(19) United States
(12) Patent Application Publication
(10) Pub. No.: US 2017/0204474 A1
(43) Pub. Date: Jul. 20, 2017

(54) Bulk Allele Discrimination Assay

(71) Applicant: General Mills, Inc., Minneapolis, MN (US)

(72) Inventors: Eric Wayne Jackson, Wamego, KS (US); Ryan Hal Brown, Concord, NC (US)

(21) Appl. No.: 15/326,358

(22) PCT Filed: Jul. 16, 2015
(86) PCT No.: PCT/US15/40763

§ 371 Date: Jan. 13, 2017

Related U.S. Application Data
(60) Provisional application No. 62/025,327, filed on Jul. 16, 2014.

(51) Int. Cl. C12Q 1/68

(52) U.S. Cl. CPC C12Q 1/6895; C12Q 2600/156; C12Q 2600/16; C12Q 2600/13

(57) ABSTRACT

A method is described for bulk allele discrimination of multiple single nucleotide polymorphisms in multiple individuals. Also described is a kit for use in performing a method for bulk allele discrimination of multiple single nucleotide polymorphisms in multiple individuals.

### CROSS-REFERENCE TO RELATED APPLICATIONS

[0001] The instant application claims priority to U.S. Provisional Application No. 62/025,327, filed Jul. 16, 2014, including appendices to the specification titled “Table1forfiling7934US01.pdf” and “Table2forapplication7934US01forfiling.pdf” which are incorporated by reference in their entireties herein.

### SEQUENCE LISTING

[0002] The instant application contains a Sequence Listing which has been submitted electronically in ASCII format and is hereby incorporated by reference in its entirety. Said ASCII copy, created on Jul. 16, 2015, is named 7934WO01_SequenceListing.txt and is 10,130,979 bytes in size. In addition, the application includes sequence listing tables titled “Table1forfiling7934WO01.pdf” and “Table2forfiling7934WO01.pdf” which are incorporated by reference in their entireties herein.

### BACKGROUND

[0003] Advances in nucleic acid sequencing technologies have led to determining the sequence and structure of individual genes and entire genomes in a wide variety of organisms. Although a single genome is shared amongst individuals in a species, genetic variation, such as single nucleotide polymorphisms, provide for genetic differences between individual organisms. Single nucleotide polymorphisms, or SNPs, or other polymorphisms can sometimes be linked to traits that vary amongst the individuals in a population of the same species. While recent techniques have taken advantage of the link between genetic variation and trait variability in order to make advances in understanding plant and animal traits and diseases, there remains a need for techniques that provide fast, accurate, high throughput, and cost effective ways to identify allele specific variations within individuals of a population.

### SUMMARY

[0004] The present disclosure relates to a method for bulk allele discrimination in individuals within a population.

[0005] In one embodiment, a method includes the steps of providing a plurality of primer pairs, each primer pair of the plurality of primer pairs being configured to amplify a unique locus in a pseudo genome, the pseudo genome comprising at least a portion of a full genome and including a plurality of identified polymorphisms; for each of a plurality of individuals, subjecting a sample comprising genomic DNA (gDNA) to a polymerase chain reaction using at least a portion of the plurality of primer pairs to obtain a pool of amplified products for each of the plurality of individuals; determining sequences for each of the amplified products; and determining an allele composition of each individual of the plurality of individuals based on the determined sequences, wherein each unique locus has at least two possible alleles.

[0006] In some embodiments, the at least a portion of the plurality of primer pairs includes at least 100 primer pairs.

[0007] In some embodiments, the method can further include attaching a tag to at least one end of the amplified products in each pool to produce a plurality of coded pools, the tag being different for each pool of amplified products, and combining the coded pools prior to determining the sequences of the amplified products.

[0008] In some embodiments, the identified polymorphisms can be single nucleotide polymorphisms (SNPs).

[0009] In some embodiments, the determined sequences can be 1 to 12 polymorphic nucleotides per unique locus.

[0010] In some embodiments, the average number of polymorphic nucleotides per unique locus of the determined sequences can be greater than the average number of identified polymorphisms per unique locus.

[0011] In some embodiments, the method can further include determining the zygosity of each individual of the plurality of individuals at each unique locus.

[0012] In some embodiments, the method can further include determining linkage disequilibrium of the identified polymorphisms using the at least a portion of the plurality of primer pairs; selecting a subset of the primer pairs based on the linkage disequilibrium; and using the subset of primer pairs to obtain the pool of amplified products.

[0013] In some embodiments, the method can further include providing a plurality of additional primer pairs, the plurality of additional primer pairs configured to amplify a plurality of additional loci on one or more selected genes in the full genome and outside of the pseudo genome. In some embodiments, the plurality of additional loci can be on an avenanthramide gene. In some embodiments, the plurality of additional loci can be on two or more genes associated with a biosynthetic pathway. In some embodiments, the biosynthetic pathway can be a beta-glucan synthesis pathway.

[0014] In some embodiments, the full genome can be representative of a species. In some embodiments, the full genome can be representative of a selected population within a species. In some embodiments, the selected population can be a breed or strain within a species.

[0015] In some embodiments, the full genome can be an oat, a broccoli, or a maize genome.

[0016] In some embodiments, the pseudo genome contains at least a portion of each chromosome in the full genome. In some embodiments, the pseudo genome can be a transcriptome.

[0017] Also provided herein is a method for producing a library of primers for genotyping a plurality of individuals. The method includes providing a pseudo genome sequence, the pseudo genome sequence being derived from a full genome sequence and including a plurality of identified polymorphisms; designing primer pairs configured to amplify a locus containing each identified polymorphism, each primer pair configured to amplify a unique locus in the pseudo genome sequence; synthesizing at least a portion of the primer pairs; determining linkage disequilibrium of the identified polymorphisms using the primer pairs; selecting a subset of the primer pairs based on the linkage disequilibrium; and using the subset of primer pairs to produce the library.

[0018] In some embodiments, the library includes at least 100 primer pairs.

[0019] In some embodiments, the identified polymorphisms can be SNPs.

[0020] In some embodiments, the method can further include providing a plurality of additional primer pairs, the plurality of additional primer pairs configured to amplify a plurality of additional loci on one or more selected genes in the full genome and outside of the pseudo genome.

[0021] In some embodiments, the plurality of additional loci can be on two or more genes associated with a biosynthetic pathway. In some embodiments, the plurality of additional loci can be on an avenanthramide gene. In some embodiments, the biosynthetic pathway can be a beta-glucan synthesis pathway.

[0022] In some embodiments, the full genome can be representative of a species. In some embodiments, the full genome can be representative of a selected population within a species. In some embodiments, the selected population can be a breed or strain within a species.

[0023] In some embodiments, the pseudo genome sequence contains at least a portion of each chromosome in the full genome sequence. In some embodiments, the pseudo genome sequence can be a transcriptome sequence.

[0024] In some embodiments, the full genome sequence can be an oat, a broccoli, or a maize genome sequence.

[0025] These and various other features and advantages will be apparent from a reading of the following detailed description.

### BRIEF DESCRIPTION OF DRAWINGS

[0026] FIG. 1 is a graph showing the distribution of loci based on the percentage of missing data for 15 tested oat lines using bulk allele discrimination (dark bars) and genotype by sequencing (light bars).

[0027] FIG. 2 is a set of graphs showing the genome distribution of loci for which polymorphic nucleotides were detected using bulk allele discrimination (top graph) as compared to the oat genome assembly (bottom graph). Dashed lines in the top graph represent delineation of linkage blocks.

### DETAILED DESCRIPTION

[0028] The present disclosure relates to methods and compositions related to bulk allele discrimination in individuals within a population. In particular, the present disclosure relates to the determination of allele composition in a plurality of individuals over a plurality of loci. Individuals can be of any species, including plant (e.g., oat, maize, broccoli, and the like), animal (e.g., cattle, horses, swine, and the like), insect, and microbial species.

[0029] Many previously known methods of determining allele composition of individuals rely on the use of probe or primer arrays on chips, which can allow for the determination of allele composition of a single individual per chip over a plurality of loci. Such previously known methods thus require a chip for each individual to be prepared, increasing the amount of time required for preparation as the number of individuals to be tested increases, as well as time required for reading of the chips for all individuals to be tested. In contrast, the present methods use multiplexed polymerase chain reaction (PCR) and high throughput sequencing to determine allele composition in a plurality of individuals over a plurality of loci in a single assay, which can be completed within a few hours to a few days.

[0030] Previously known methods of determining allele composition of individuals that rely on chip technology generally have a relatively high cost when determining allele composition of a plurality of individuals because a chip is required for each individual to be tested. In contrast, methods disclosed herein can reduce cost by determining allele composition in a plurality of individuals using standard PCR equipment and multi well plates to produce a pool of amplified products for each individual in a multi well PCR plate. In some embodiments, cost for performing the presently provided methods can also be reduced by combining pools of amplified products and sequencing in a single high throughput sequencing reaction.

[0031] For previously known methods of determining allele composition of individuals that rely on hybridization of a probe to a locus, the presence of multiple polymorphic nucleotides, rather than a single polymorphic nucleotide, can result in failure of the probe to properly hybridize to the locus and no determination of allele composition at that locus. In some previously known methods, allele composition is determined by enzymatic detection of a known single nucleotide polymorphism (SNP). The presence of multiple polymorphic nucleotides can often not be detected or can result in a failure of detection of any polymorphic nucleotides. In some previously known methods, a primer that incorporates a single polymorphic nucleotide is used. In the present methods, however, a library of primers is designed to flank known polymorphic nucleotides, but not include the polymorphic nucleotide, allowing for multiple polymorphisms at a single locus to be detected in a single assay.

[0032] Primers for use in the present methods can be designed a plurality of unique loci, with each unique locus having a known polymorphic nucleotide located near the center of the unique locus. Thus, the present methods are less likely to be disrupted by unexpected polymorphic nucleotides than previously known methods that incorporate a known polymorphic nucleotide in a probe or primer, or rely on an enzyme that detects a SNP. Furthermore, the present methods include a high throughput sequencing reaction which can provide sequence information for more than one polymorphic nucleotide in a unique locus.

[0033] In some embodiments, the presently disclosed methods and compositions can provide greater reproducibility for determining allele composition over previously known methods. For example, in some previously known methods for determining allele composition, genomic DNA is cut with a restriction enzyme, where a polymorphism results in creation or destruction of restriction enzyme sites. Allele composition is then determined by examining the fragments resulting from restriction enzyme cutting (e.g., by measuring length, mass, or by sequencing). Such previously known methods are often not consistent between different populations within a species because restrictions sites may be more or less common in each population. Further, such previously known methods cannot be used to target a specific locus within the genome since restriction sites are randomly distributed throughout the genome. The present methods, by contrast, can specifically target multiple loci within a genome to consistently determine allele composition over the targeted loci.

[0034] Allele composition of an individual organism can provide information about the phenotype of the individual. A phenotype can include any observable trait, including without limitation, morphology, development, biochemical or physiological properties, behavior, and the like. By using a population of individuals (i.e., a training set) with known phenotypes and determining the allele compositions of the individuals, in some embodiments, an allele can be statistically associated with a phenotypic trait. Presence in an individual of an allele associated with a phenotypic trait can then be used to predict a likely phenotype of the individual, including morphology, disease resistance or susceptibility, development, and the like. Similarly, because alleles are heritable, allele composition a parent can be used to predict the probability of offspring inheriting traits associated with the allele composition of the parent. Thus, the presently disclosed methods and compositions provide for rapid genome wide specific allele composition analysis, which can be used to take advantage of statistical modelling methods in order to predict phenotypes of individuals within a population, as well as model efficient breeding schemes that are likely to result in offspring with desired phenotypic traits.

[0035] Individuals in most species of living organisms can be distinguished from one another by examining the sequence of the DNA of an individual and comparing it to the DNA sequence of another individual. Similarly, highly related individuals in breeds or lines of a population tend to share similar allele compositions, but also tend to have allele compositions that differ more greatly from individuals in other lines or breeds. Thus, the presently disclosed methods and compositions can be used to differentiate individuals within a population or identify an individual as belonging to a line or breed of a population.

[0036] Allele composition of an individual organism can also provide information about the overall genotype of the individual. For example, due to the nature of chromosomal crossover, different loci can be linked. Such linkage blocks are generally inherited together. For this reason, a particular allele at one locus that is observed in an individual organism can be indicative of the likely sequence of a different nearby locus in the same individual. In some embodiments, the nucleic acid sequences in a pseudo genome can have known linkage blocks. In other embodiments, a method used herein can be used to identify linkage blocks amongst the nucleic acid sequences in a pseudo genome. A linkage block can be statistically determined based on observed allele compositions in which certain alleles occur together in individuals at a frequency that indicates non-random inheritance.

[0037] A “pseudo genome,” as used herein, is a collection of nucleic acid sequences from a plurality of loci from a genome, where each locus includes at least one identified polymorphic nucleotide. A pseudo genome can preferably include at least 2,000 loci. In some embodiments, however, a pseudo genome can include from 20 to 20,000 loci (e.g., from 100 to 15,000, from 500 to 10,000, 2,000 to 8,000, and the like) from a genome. In some embodiments, the nucleic acid sequences in a pseudo genome can have known chromosome locations in the genome (i.e., the nucleic acid sequences can be anchored in a consensus genomic map). In some embodiments, a pseudo genome can include at least a portion of each chromosome of the genome from which it's derived. In some embodiments, each locus in a pseudo genome can be in genes expressed in a specific cell type within the organism. In other words, in some embodiments, a pseudo genome sequence can be a transcriptome sequence.

[0038] As used herein, the term “allele” refers to a heritable variant of a nucleic acid sequence at a particular locus in a genome or pseudo genome. Alleles can be distinguished by the identity of one or more polymorphic nucleotides within a locus. A nucleotide can be considered to be polymorphic if the nucleotide differs between members of a species or paired chromosomes. A polymorphic nucleotide can differ in base composition (i.e., adenosine, thymine, guanine, cytosine, uracil, and the like), or can be an insertion or deletion. A locus can contain a single polymorphic nucleotide (SNP) or more than one (e.g., 2, 3, 4, 5, or more) polymorphic nucleotide. Multiple polymorphic nucleotides can be spaced throughout a locus or be grouped to form insertions, deletions, inversions, duplications, and the like, or combinations thereof, within the locus.

[0039] A “locus,” as described herein, is a location in a genome. A locus can be found anywhere in a genome (e.g., in a gene or intergenic region). If located in a gene, a locus can be in an intron and/or an exon. In some embodiments, a locus can span different regions of genomic DNA (e.g., genic/intergenic transition and/or intron/exon transition).

[0040] A method for determining allele composition can include performing a polymerase chain reaction (PCR) using a sample from each of a plurality of individuals that includes DNA (e.g., gDNA or cDNA) to obtain a pool of amplified products for each of the plurality of individuals. A PCR suitable for use in a provided method can be multiplexed such that a single reaction is configured to amplify multiple loci within the DNA in a sample from an individual. Each multiplexed PCR can contain a plurality of primer pairs (e.g., from 20 to 20,000 primer pairs, from 4000 to 15,000 primer pairs, and the like), with each of the primer pairs configured to amplify a unique locus in a pseudo genome.

[0041] As used herein, the term “unique locus” refers to a sequence in a pseudo genome that is amplified by one primer pair, but not any other primer pair in a single PCR. In some embodiments, a unique locus can overlap with another unique locus. A unique locus can contain at least one identified polymorphic nucleotide. A unique locus can have a length of from about 80 nucleotides to about 500 nucleotides in length (e.g., from 80 nucleotides to 200 nucleotides, from 80 nucleotides to 150 nucleotides, from 80 nucleotides to 120 nucleotides, and the like).

[0042] By using primer pairs that amplify unique loci in a pseudo genome, a method for determining allele composition provided herein can be performed without the need for a genome that has been fully sequenced, while being able to determine allele composition in a targeted manner. As used herein, a “fully sequenced genome” refers to a genome over which at least 95% of the nucleic acid sequence has been determined. However, sequencing of a genome should be sufficient enough to be able to identify a plurality of loci with polymorphic nucleotides within the genome. In some embodiments, the population of individuals used for sequencing a genome can be representative of one or more populations (e.g., lines or breeds) within a species or can be representative of substantially the entire species.

[0043] Primer pairs for use in a method for determination of allele composition in a plurality of individuals over a plurality of loci can be designed to be compatible with one another in a single PCR. As used herein, the term “compatible primer pairs” refers to primer pairs that are each capable of priming nucleic acid amplification of a unique locus under the same PCR conditions. Attributes that can be considered when designing primer pairs to be compatible include, without limitation, melting temperature, GC content, length of amplified fragment, length of the unique locus, sequence similarity between primers in a pair, sequence similarity within a single primer, sequence similarity with other primer pairs and/or loci, and the like. Primer pairs can be designed to be from about 18 nucleotides to about 32 nucleotides in length (e.g., 19 to 30 nucleotides, 20 to 29 nucleotides, 21 to 32 nucleotides, and the like) in order to adjust the compatibility of the primer pairs. Primers pairs can also be designed to amplify unique loci having a length of 80 nucleotides to about 500 nucleotides in length (e.g., from 80 nucleotides to 120 nucleotides, from 80 nucleotides to 150 nucleotides, from 80 nucleotides to 200 nucleotides, and the like) to adjust the compatibility of the primer pairs. In some embodiments, primer pairs for use in a method provided herein can be designed using software that can predict compatibility of primer pairs. Examples of software that can be used to design primer pairs include, for example, Ion AmpliSeq™ Designer (Life Technologies™, Carlsbad, Calif., USA), PrimerPlex (Premier Biosoft, Palo Alto, Calif., USA), MPprimer (biocompute.bmi.ac.cn/MPprimer/), and muPlex (Rachlin et al. (2005) Nucleic Acids Research. 33(Web Server Issue):W544-W547).

[0044] In some embodiments, one or more primer pairs designed to amplify additional loci on one or more selected genes in a genome and outside of the pseudo genome can be used in a method provided herein. Primer pairs for additional loci need not be designed to amplify a region having an identified polymorphism. Primer pairs for additional loci can be designed to amplify all or part of a selected gene. For example, a plurality of primer pairs can be used to amplify the entirety of a selected gene, or parts of the selected gene.

[0045] Genes outside of a pseudo genome can be selected in order to provide information about a desired trait. For example, a plurality of additional primers designed to amplify loci on a gene associated with a biosynthetic pathway (e.g., beta-glucan synthesis pathway genes, an avenanthramide gene, a tocopherol gene, and the like). In some embodiments, a plurality of additional primers are designed to amplify loci on two or more related genes (e.g., beta-glucan synthesis genes, protein synthesis genes, and the like).

[0046] A method for determining allele composition provided herein can use a multiplexing PCR protocol that can amplify the desired number of unique loci (e.g., from 20 to 10,000 loci) in a pseudo genome and any additional loci.

[0047] In some embodiments, a PCR protocol suitable for use in a method provided herein can be designed to include features that reduce the presence of PCR artifacts, such as primer dimers, super amplicons, and the like, in a pool of amplified products. For example, primers for primer pairs can be designed with one or more cleavable feature (e.g., a uracil that can be degraded by a uracil DNA glycosylase) to degrade primers and PCR artifacts after amplification. In some embodiments, degradation of primers and PCR artifacts can be followed by adding universal adaptors for further amplification and dilution of PCR artifacts. An example of a kit for performing a PCR protocol that includes features for reducing PCR artifacts includes the Ion AmpliSeg™ Library Kit 2.0 (Life Technologies™).

[0048] Following PCR, pools of amplified products from each individual can be tagged in order to produce a plurality of coded pools. A tag suitable for use in a method provided herein can be any moiety that can be used to distinguish one pool of amplified products from another. A tag can be used to distinguish each pool of amplified products before, during, or after sequencing. Examples of appropriate tags include, for example, artificial nucleotide sequences (e.g., molecular barcodes), chromophores, fluorophores, and the like. A tag can be attached to one or both ends of the amplified products in a pool using known techniques, such as DNA ligation.

[0049] In some embodiments, one or more adaptor for sequencing can be attached to one or both ends of each amplified product. In some embodiments, an adaptor for sequencing can be an artificial priming site. As used herein, the term “artificial priming site” refers to a nucleotide sequence that primes a sequencing reaction. An artificial priming site can be selected based on a high throughput sequencing protocol to be used.

[0050] In some embodiments, an adaptor for sequencing can be an anchor molecule. As used herein, an “anchor molecule” refers to a molecule that binds an amplified product to a substrate. An anchor molecule can be, for example, an artificial nucleic acid sequence or biotin molecule. An anchor molecule can be selected based on a high throughput sequencing protocol to be used.

[0051] Pools of amplified products are sequenced using a high throughput sequencing protocol. A high throughput sequencing protocol is a protocol capable of sequencing the pools of amplified products in a single run. In some embodiments, a high throughput sequencing protocol is capable of sequencing combined pools of amplified products in a single run. If the pools are tagged prior to sequencing, the tags can be used to identify which pool (e.g., which individual) each amplified product originated from. Examples of high throughput sequencing protocols include, without limitation, ion semiconductor sequencing (e.g., Ion Torrent™, Life Technologies™) and sequencing by synthesis (e.g., Illumina dye sequencing and pyrosequencing,). In some embodiments, a high throughput sequencing protocol can be chosen based on the multiplex PCR protocol used, the size of the unique loci to be sequenced, and/or the tag used to produce coded pools.

[0052] Following sequencing, sequences of amplified unique loci for each of a plurality of individuals can be analyzed. The identity of one or more polymorphic nucleotides can be used to determine which allele or alleles each individual carries in its genome. The allele or alleles in an individual can be determined for an amplified unique locus by comparing a sequence determined by high throughput sequencing for the individual to the pseudo genome used to design the primers for amplification of the unique locus. Zygosity at a particular locus can also be determined by determining how many alleles of the locus an individual carries in its genome.

[0053] Once allele composition of a plurality of individuals across a plurality of unique loci is determined, allele composition can be statistically associated with phenotypic traits of the individuals if phenotypic traits of each individual are known, as described above. Once a phenotypic trait is statistically associated with one or more alleles, allele composition of an individual can be used to predict the phenotype of the individual, or predict the likely phenotype of progeny of the individual. In some embodiments, a method provided herein can be used to statistically predict the phenotypes of progeny from individuals in order to design a breeding scheme that results in progeny with desired phenotypic traits.

[0054] In some embodiments, sequences of amplified unique loci can be analyzed to determine the number of polymorphic nucleotides in the amplified unique loci. In some embodiments, the number of polymorphic nucleotides that are determined in the amplified unique loci can be greater than the number of polymorphisms identified for use in the pseudo genome used for the method. For example, in some embodiments, a single polymorphic nucleotide can be identified in a locus in a genome, which is used in a pseudo genome. Following sequencing, the amplified unique locus corresponding to the locus in the pseudo genome can be found to have two or more polymorphic nucleotides. Thus, in some embodiments, the average number of polymorphic nucleotides per unique locus of the sequenced loci can be greater than the average number of polymorphic nucleotides per locus in the pseudo genome. An advantage to the ability to identify additional polymorphisms per locus using a method provided herein is that the presence of multiple polymorphisms increases the statistical confidence of the identity of a particular allele. That is, it is less likely that multiple polymorphic nucleotides found in a sequenced locus are a result of an amplification error or a sequencing error than a single polymorphic nucleotide.

[0055] In some embodiments, the allele composition of a plurality of individuals over a plurality of loci can be used to statistically determine linkage disequilibrium of alleles. As used herein “linkage disequilibrium” is the non-random inheritance of alleles at two or more loci. Alleles at two or more loci that are inherited disproportionately together are referred to as a linkage group herein.

[0056] In some embodiments, determined linkage disequilibrium can be used to design a library of primers having fewer primer pairs than used to determine the linkage disequilibrium. For example, if alleles at two or more loci are known to be inherited together, fewer primer pairs need be used to determine the likely allele composition of all of the loci. In some embodiments, a primer pair with desired traits, such as reliable amplification, the ability to amplify in desired amplification conditions, or is known to amplify a locus with multiple polymorphic nucleotides, can be selected to amplify a locus that represents a linkage group. In some embodiments, a library of primers having fewer primer pairs than the library of primer pairs used to determine linkage disequilibrium can be designed to determine allele composition of individuals with an accuracy similar to that of the library of primer pairs used to determine linkage disequilibrium. Such a library having fewer primer pairs can have an advantage of being less expensive to produce than the larger library.

[0057] A kit is provided herein that includes a plurality of primer pairs suitable for performing a method described herein. A kit can further include additional components for use in a method provided herein including, without limitation, PCR reagents (e.g., nucleotides, buffers, and the like), containers for performing one or more step of a method provided herein (e.g., plates, tubes, and the like), reagents for normalizing PCR products, instructions for performing one or more step of a method provided herein, reagents for sequencing, and the like.

[0058] The examples provided below are intended to describe particular embodiments of the invention, and are not intended to limit the scope of the invention.

### EXAMPLES

### Example 1

### Oat Bulk Allele Discrimination (BAD) Assay

[0059] Three different oat populations representing a general breeding population, a bi-parental mapping population, and a global diversity population were used in this study. The breeding population included 15 F₄-derived lines from the General Mills, Inc. oat breeding program. The mapping population included 94 recombinant inbred lines (RIL). The global diversity set included 96 lines selected from the National Small Grains Collection representing historic cultivars and landraces.

[0060] Eight seed from each line per population were planted in a greenhouse. Once the secondary leaves emerged, primary leaves from six plants representing each line were bulk-harvested to produce a composite sample. Genomic DNA was extracted from the composite tissue samples in a 96-well format using a QIAGEN ® (Venlo, Netherlands) DNeasy ® Plant Mini Kit.

[0061] SNP targets were identified from expressed sequences (ES) and/or complexity reduced sequences (CRS) as described by Oliver et al. (Oliver et al. 2011. BMC Genomics. 12:77; Oliver et al. 2013. PLOSOne. 8:3). In brief, ES and/or CRS from multiple plants were aligned to identify high quality SNPs. A pseudo genome was constructed by merging 7,506 SNP containing sequences from each line into a composite assembly using ambiguous based codes for variant alleles. SNP containing sequences used for assembly of the pseudo genome are shown in Table 1 (contig sequence) and the attached Sequence Listing as SEQ ID NOS:1-5402. The identified SNP in each contig sequence is shown in italics in Table 1. The pseudo genome was then physically anchored to chromosomes and gene/marker annotations were added using an oat linkage map. In addition, linkage disequilibrium analyses of the breeding and diversity populations were used to annotate the linkage blocks across both populations. The pseudo genome was then used to design 5,406 primers for multiplex PCR using the AmpliSeq™ designer pipeline (www.ampliseq.com/displaychangeLog.action; Life Technologies™, USA). The primers were reviewed to ensure adequate genome and linkage block coverage in order to include primers at least five loci in each of the 136 linkage blocks based on the breeding population. The designed primers were synthesized for use with the Ion AmpliSeq™ Library Kit 2.0 (Life Technologies™). Primers are shown in the attached Sequence Listing as SEQ ID NOS:10805-21616. The sequences in the contig sequences targeted by the primers are in bold in Table 1. The sequence identifiers for the primers for each contig sequence are identified under the columns labeled “BAD Fwd” and “BAD Rev.”

[0062] A multiplexed PCR amplification was set up (4 μL of 5× Ion AmpliSeq™ HiFi Master Mix, 4 μL of 5× Ion AmpliSeq™ Primer Pool, 10 ng of DNA and the reaction was brought to 20 μL with water) for each of 215 individual plants and cycled using the following parameters: 99° C. for 2 minutes, 14 cycles of 99° C. for 15 seconds and 60° C. for 8 minutes, ending with a 10° C. hold for up to one hour.

[0063] Following amplification, 2 μL of FuPa Reagent was added to each sample to partially digest the primer sequences. The PCR plate was placed in a thermal cycler with the following parameters: 50° C. for 10 minutes, 55° C. for 10 minutes, 60° C. for 20 minutes, ending with a 10° C. hold for up to one hour.

[0064] Adapters were ligated to the amplified products by adding 4 μL of switch solution, 2 μL of a diluted barcode adapter mix (4 μL the Ion P1 Adapter, 2 μL of the Ion Xpress™ barcodes of choice, and 4 μL of water) and 2 μL of DNA Ligase. The plate was then placed in a thermal cycler at 22° C. for 30 minutes, 72° C. for 10 minutes, and ending with a 10° C. hold. The amplified products were then purified.

[0065] To equalize the samples, either an Equalizer kit (Life Technologies™) or quantitative PCR was used. When the Equalizer kit was used, 50 μL of Platinum®PCR SuperMix High Fidelity and 2 μL of Equalizer™ Primers (Life Technologies™) were added to each bead pellet. The PCR plate was placed in a thermal cycler for a single cycle at 98° C. for 2 minutes, 7 cycles of 98° C. for 15 seconds and 60° C. for 1 minute, ending with a 10° C. hold for up to one hour. After thermal cycling, 10 μL of Equalizer™ Capture was added to each reaction and incubated at room temperature for five minutes. 6 μL of washed beads were added to each plate well, mixed and incubated at room temperature for 5 minutes and then placed in a magnetic rack until all the beads were stuck to the side of the wells and the supernatant was removed. Two washes were performed using 150 μL of Equalizer™ Wash Buffer. After the second wash, 100 μL of Equalizer™ Elution Buffer was added to each reaction and the plate was placed in a thermal cycler at 30° C. for 5 minutes. The supernatants were removed from the beads and placed in a new plate.

[0066] Libraries were also normalized using quantitative PCR and sequenced on the Ion Proton™ (Life Technologies™) using a sequencing protocol supplied by the manufacturer.

[0067] A preliminary test was done to benchmark the BAD assay against genotype-by-sequencing (GBS). Fifteen lines from the General Mills CropBioscience oat breeding program were selected and DNA was extracted from six F₄-derived plants for each line to capture allele segregates. The lines were then genotyped using a GBS protocol developed by Yung-Fen Huang et al. (in press) and the BAD assay. The probes used for the GBS protocol are provided in the attached Sequence Listing as SEQ ID NOS:5403-10804. The sequences in the contig sequences targeted by the probes are underlined in Table 1. The sequence identifiers for the probe for each contig sequence are identified under the column labeled “GBS probe.” The same 15 lines were then tested using the BAD assay.

[0068] Evaluation of the average read counts per locus across all 15 lines tested using the BAD assay ranged from 0.1 to 7,586.8. Over half the loci had average read counts between 10 and 350 per locus. Interestingly, read counts from 19 loci were greater than 1000 reads per locus per line. This suggests that optimization of the normalization process could further improve the number of loci successfully targeted using the BAD assay.

[0069] The BAD assay was able to reliably detect one or more polymorphic nucleotides in 1,198 of the contig sequences in the tested population. An additional 3,603 loci could be amplified in at least 30% of the tested lines using the BAD assay, but did not show polymorphism in the tested lines. Of the total number of loci that could be amplified, 2,132 could provide at least 10 reads in all 15 lines. Table 2 shows contig sequences in which the BAD assay detected polymorphic nucleotides. The column in Table 2 labeled “GBS” identifies whether the GBS probe also worked (“Y”) or not (“N”). None of the contig sequences had polymorphic nucleotides that could be successfully detected by GBS probe but not by BAD assay using the tested population.

[0070] Table 2 also shows how many polymorphic nucleotides were determined using the BAD assay. Of the contig sequences in which one or more polymorphisms were detected using the BAD assay, 593 had a single nucleotide polymorphism detected, 239 had 2 polymorphic nucleotides detected, 143 had 3 polymorphic nucleotides detected, 97 had 4 polymorphic nucleotides detected, 65 had polymorphic nucleotides detected, 35 had 6 polymorphic nucleotides detected, 20 had 7 polymorphic nucleotides detected, 5 had 8 polymorphic nucleotides detected, and 1 had 9 polymorphic nucleotides detected.

[0071] The BAD assay also provided more reliable results. For example, while the BAD assay provided data for all 15 tested lines for about 1200 loci, GBS provided complete data for only about 300 loci. Overall, the BAD assay was able to provide results for about 1300 loci with 6.5% missing data or less, while GBS provided results for approximately 850 loci with 6.5% missing data or less. See, FIG. 1

[0072] Of the 136 calculated linkage blocks, 115 blocks contained at least 1 locus in which the BAD assay was able to successfully determine a polymorphic nucleotide. Seven of the 21 chromosomes were completely saturated, while all but two of the remaining chromosomes were at least 90% saturated. See, FIG. 2.

[0073] Cluster analysis of the highly related breeding lines tested revealed variations based on the marker datasets used. The genetic relationships between the 15 tested lines were significantly narrower when using the BAD assay than GBS. In addition, only two lines did not cluster with other lines based on the data obtained using the BAD assay, as compared to four when using GBS. Thus, cluster analysis results from data using the BAD assay appeared to fit the known structure of the breeding lines better than the cluster analysis results from data obtained using GBS.

[0074] Unless otherwise indicated, all numbers expressing feature sizes, amounts, and physical properties used in the specification and claims are to be understood as being modified in all instances by the term “about.” Accordingly, unless indicated to the contrary, the numerical parameters set forth in the foregoing specification and attached claims are approximations that can vary depending upon the properties sought to be obtained by those skilled in the art utilizing the teachings disclosed herein.

[0075] The recitation of numerical ranges by endpoints includes all numbers subsumed within that range (e.g. 1 to 5 includes 1, 1.5, 2, 2.75, 3, 3.80, 4, and 5) and any range within that range.

[0076] As used in this specification and the appended claims, the singular forms “a”, “an”, and “the” encompass embodiments having plural referents, unless the content clearly dictates otherwise. As used in this specification and the appended claims, the term “or” is generally employed in its sense including “and/or” unless the content clearly dictates otherwise.

[0077] “Include,” “including,” or like terms means encompassing but not limited to, that is, including and not exclusive.

[0078] The implementations described above and other implementations are within the scope of the following claims. One skilled in the art will appreciate that the present disclosure can be practiced with embodiments other than those disclosed. The disclosed embodiments are presented for purposes of illustration and not limitation.

Lengthy table referenced here
US20170204474A1-20170720-T00001
Please refer to the end of the specification for access instructions.

Lengthy table referenced here
US20170204474A1-20170720-T00002
Please refer to the end of the specification for access instructions.

LENGTHY TABLES
The patent application contains a lengthy table section. A copy of the table is available in electronic form from the USPTO web site (http://seqdata.uspto.gov/?pageRequest=docDetail&DocID=US20170204474A1). An electronic copy of the table will also be available from the USPTO upon request and payment of the fee set forth in 37 CFR 1.19(b)(3).

What is claimed is:

1. A method comprising:
a) providing a plurality of primer pairs, each primer pair of the plurality of primer pairs being configured to amplify a unique locus in a pseudo genome, the pseudo genome comprising at least a portion of a full genome and including a plurality of identified polymorphisms;
b) for each of a plurality of individuals, subjecting a sample comprising genomic DNA (gDNA) to a polymerase chain reaction using at least a portion of the plurality of primer pairs to obtain a pool of amplified products for each of the plurality of individuals;
c) determining sequences for each of the amplified products; and
d) determining an allele composition of each individual of the plurality of individuals based on the determined sequences, wherein each unique locus has at least two possible alleles.

2. The method of claim 1, wherein the at least a portion of the plurality of primer pairs comprises at least 100 primer pairs.

3. The method of claim 1, further comprising attaching a tag to at least one end of the amplified products in each pool to produce a plurality of coded pools, the tag being different for each pool of amplified products, and combining the coded pools prior to determining the sequences of the amplified products.

4. The method of claim 1, wherein the identified polymorphisms are single nucleotide polymorphisms (SNPs).

5. The method of claim 1, wherein the determined sequences comprise 1 to 12 polymorphic nucleotides per unique locus.

6. The method of claim 5, wherein the average number of polymorphic nucleotides per unique locus of the determined sequences is greater than the average number of identified polymorphisms per unique locus.

7. The method of claim 1, further comprising determining the zygosity of each individual of the plurality of individuals at each unique locus.

8. The method of claim 1, further comprising:
e) determining linkage disequilibrium of the identified polymorphisms using the at least a portion of the plurality of primer pairs;
f) selecting a subset of the primer pairs based on the linkage disequilibrium; and
g) using the subset of primer pairs to obtain the pool of amplified products.

9. The method of claim 1, further comprising providing a plurality of additional primer pairs, the plurality of additional primer pairs configured to amplify a plurality of additional loci on one or more selected genes in the full genome and outside of the pseudo genome.

10. The method of claim 9, wherein the plurality of additional loci are on two or more genes associated with a biosynthetic pathway.

11. The method of claim 10, wherein the biosynthetic pathway is a beta-glucan synthesis pathway.

12. The method of claim 9, wherein the plurality of additional loci are on an avenanthramide gene.

13. The method of claim 1, wherein the full genome is representative of a species.

14. The method of claim 1, wherein the full genome is representative of a selected population within a species.

15. The method of claim 14, wherein the selected population is a breed or strain within a species.

16. The method of claim 1, wherein the full genome is an oat, a broccoli, or a maize genome.

17. The method of claim 1, wherein the pseudo genome contains at least a portion of each chromosome in the full genome.

18. The method of claim 1, wherein the pseudo genome is a transcriptome.

19. A method for producing a library of primers for genotyping a plurality of individuals, comprising:
a) providing a pseudo genome sequence, the pseudo genome sequence being derived from a full genome sequence and including a plurality of identified polymorphisms;
b) designing primer pairs configured to amplify a locus containing each identified polymorphism, each primer pair configured to amplify a unique locus in the pseudo genome sequence;
c) synthesizing at least a portion of the primer pairs;
d) determining linkage disequilibrium of the identified polymorphisms using the primer pairs;
e) selecting a subset of the primer pairs based on the linkage disequilibrium; and
f) using the subset of primer pairs to produce the library.

20. The method of claim 19, wherein the library comprises at least 100 primer pairs.

21. The method of claim 19, wherein the identified polymorphisms are SNPs.

22. The method of claim 19, further comprising providing a plurality of additional primer pairs, the plurality of additional primer pairs configured to amplify a plurality of additional loci on one or more selected genes in the full genome and outside of the pseudo genome.

23. The method of claim 22, wherein the plurality of additional loci are on two or more genes associated with a biosynthetic pathway.

24. The method of claim 23, wherein the biosynthetic pathway is a beta-glucan synthesis pathway.

25. The method of claim 24, wherein the plurality of additional loci are on an avenanthramide gene.

26. The method of claim 19, wherein the full genome is representative of a species.

27. The method of claim 19, wherein the full genome is representative of a selected population within a species.

28. The method of claim 27, wherein the selected population is a breed or strain within a species.

29. The method of claim 19, wherein the pseudo genome sequence contains at least a portion of each chromosome in the full genome sequence.

30. The method of claim 19, wherein the pseudo genome sequence is a transcriptome sequence.

31. The method of claim 19, wherein the full genome sequence is an oat, a broccoli, or a maize genome sequence.

The application's sequence listing, which the Patent Office published only in electronic form, follows.

SEQUENCE LISTING (21616 sequences)

SEQ ID NO: 1 - DNA, 480 bp, Avena sativa
atcgcggagcaaataagatcagctatttgtgtagttatacttctccagtcatttgatgattttaggataaagaagacgggtttgatggttttagctcatttgtctaccttaagagaatgaatcttgaccattaaaataatcacaaagtgaaaccaatcatcctaaaatccgaagtacattttgttacagggtttatttattactgtcatagaagttattgtttctcttgcttatctttgattgatgagcggaactggacatatttctggaaactttgcttgtttctttacactaaattgatccatttttgtgcttcaggtttggcacagttgaggataaatttggtgcagccttgtgcaagaagcttcatgaaattggctggcaagtttctcatgtagccattgttcccaatgaagtaagtgatgtttaattgatttgcatagttcttatatgatgacccaaatgtccacaaatagattg

SEQ ID NO: 2 - DNA, 390 bp, Avena sativa
tgatcgcaacaattcagaaaggtccctgttttcatcagagaggatgcggaaggggccagcagacgatggtaggttggcaattgactaggcaattagaacataagctatgtcggtggtaatgataccctgtctgtggccatgacaaatcaataatcatgtaagtgcattataaaaaaattgcaaactagtttagcttctggtagaatgtgtaatctagtttttcatcatcactaaagtaaacttaacatttgaactccttgaaaatacaccatgtcagatgtcaagaaacactatcctacctatgggacatttgtcaaaagttaagcataatttgcgacaatatgttcacaacaaaatccctcgcagcatccatcaaaccaatactattat

SEQ ID NO: 3 - DNA, 302 bp, Avena sativa
agtgcagtgtggccaaaatagttaagaacatacaaacatcatacagcgacaaccaatgagtgttttgcgctaattagacgacatgagtgcgtggaggctgtctcctggcaataggaccggaagagacaacaggatggattcaggatgagacaaaatcatctcctcagatgagaggttgcattgtgttagcgcgtctgtgttttaacgcaaggattatttagtaattctgcatgcacatattcctgtctactccgtactacattaacaaagcaggacagaacagatgccagatgcacatgcac

SEQ ID NO: 4 - DNA, 156 bp, Avena sativa
acctggatcgctaattactgccgatcacggccatgtggtcaggtcaagcagtctgaatatgagcgccagtttgatccatgatccatccaccgatcccctggagcccacgccagttattcctcctctcctgctctgctctcgttatgctgcatcgca

SEQ ID NO: 5 - DNA, 321 bp, Avena sativa
cggagacggagagcgggcacaagctccgagtactgcgcacggaccgtgtcggcgagttcgcgtgtcatccatgttcgctgtgcgcagtgtgccgacaccgacgtcaagcgccacctcacggcgccgtaatcaccctagcagaacaaggtgatcgcaaggcgcaactagaaggtcgtagcggcggccagaagcatgctaaaggcgaagggcatgccaaattacttctagggccagaccgtgctgacagtggtctacgtgatgaacctgaaccaggcgttcacgcgcagcgtcaccggcatgatgccatatgaggcttcgtat

SEQ ID NO: 6 - DNA, 311 bp, Avena sativa
ttattagcagagggctctagtaaagaacatttcactgaaatcctacactattttcaatagtgcaaaatgcatgcatgagttcgtcatctctagttgcaagtttcactggctagcttagagtatattacaataaaatgcaagctataccatatttgacaggtaatatcttgaataaaatgaaaaataaataatatacccttgatggagttcatcttctgtccaattcaaacataccacggcaacatcgtgagattttaatagttcgtaacaccttgccattctgcaattagcactcacttcagttatacatg

SEQ ID NO: 7 - DNA, 378 bp, Avena sativa
tgaaaaaagattatcactagtcttggtcaattgctaagtacggtacagttagggagttcgttagctttggtctatgcatgtagtgtgttaccgatggcgtgctcgtatgtgtcactgtgtgtatttttaatataatcacactggtagaaaacaggacactagtcccggtttgtaagaggctttagtcccagattgcaatccgggactaacgtatcgggactaaaggttaggcctttagttccggttctgttacaaaccgggactagattgtctccacgtggccgctctgtgcgcgctgggctggaggatatttattcccggttcggccgggactaaagttcttctgccgccgcagcgttttgcaccaaactgttgccg

SEQ ID NO: 8 - DNA, 247 bp, Avena sativa
gacggagatgaagtaatctacggtaattcacagtcccgctctcgccttgctcatctgtagtttccccagatccggtcttttatcctacgatccatgatctatctagattcctggaataagaattactagaatacttcttcgtcatattaccacgagcagatctgtttagcgattgtctagcctagccacgagcagagcttaactaattattaatcccccaaattaacgacgcatctgcactgacgat

SEQ ID NO: 9 - DNA, 429 bp, Avena sativa
agatggtatgaactgttcttgcgaacagatatcccagaaaaaatgtgttacgtcctaatcagcattcagcaacatttagaacccacagatggtatcaactgttcttgcgaaccgatagttaatgctcactgaatgtaagattcagcattaatatcaattattgagtaacttgataccagaataagggataaatctggactacagagtaaggcaggggcccactaaacattgacatgaaaatacaaaaaatgtagaggatgatagatggtttaatgcaacagcacggtatagatgaaagtcaattaatgcaagtgagcaacaggtagcaaataatagacttacttgactaaagcagtagccgagccaatctcttcggggatggtgcttatttgattgaacgagacatccagcgattttagcaacggaagg

SEQ ID NO: 10 - DNA, 207 bp, Avena sativa
ctacaccatcaacagcccggattctcagctggcctttccagaaataccgaaataggttttaaatttgcttaccggcggtccgtggaactgctgtacattgtggccaggcttagaacagagtatgaaagtaatgtttagtactgtatatttttctaatgctccttaagcttcaattccttttactactagttgcatttatcgggatta

SEQ ID NO: 11 - DNA, 411 bp, Avena sativa
tgcatgaagtacgtgtctgagtacttttgctaggtccaaaacttctttgtactgactctgcgctggatgaaaagataactttgtactatctgtttgcgacgactactagtctagagagccaattcggcattacaaagcatgggcatgcaaaagagaaatttaagtcgggggcattttacgatcatattaaatgcacttaaaattcccccatgttttagattcctattaaccgtgacaatccatcatgaggaaaaagccacactttggctcttatgtttgccataatcaagaagaattaattaggggatgaatagtggctctctcgtcttagcacgcggattattttttgcccatgaattaagtataattaattaccccgcctgtaatctcaaaatattttaaaattctctc

SEQ ID NO: 12 - DNA, 275 bp, Avena sativa
ttgggagcaactacatggcgcctagatgctccttcgctgccccgctgtcattgttcctttgccacctcatagattctcacttcatgatattgcgcaaattcctctatggtcagaatgccaggtacatctctaagtcggtgccggcaccgagctcatagactgtagatatcggggtatgcgggaacgatcatatgttgttctgcattctatttgatgggcgtgacgatgtcatcttgatatccatcaagtgcgtgaggccgtcggcatgcttgagg

SEQ ID NO: 13 - DNA, 216 bp, Avena sativa
tcatttttcttgcatgaggacgaaaacgtgagcatggcgtttggttgtctggagttgatatggctattacgaacacacatctaagtaatccatttggaggttaaaacaagttctaaacatgaacacgaatctgagaagatatgaagtactaagcaggttcatgtagatttgaaggggaagaagcaccccacgagagaggagagtgatgtttatcac

SEQ ID NO: 14 - DNA, 192 bp, Avena sativa
acttttgtgttgcaggccagggcatggctggagccggaaacaagggatatgctcttgatctgatctccggcgtctctcttctctctgggtaatgtgatagagtatcatgagctagctactagtagttgttgagggagaaatcatgatgatggccggtagctaggctttggaaagaagcatctgagacctgca

SEQ ID NO: 15 - DNA, 300 bp, Avena sativa
gcgacggacgacctctccctgtccatccctgggccagcctcttccctgaccctccagcctcttccctcaccctcctcttccccttcatttcttccagaggagcacccgtgtttgctgatttcggttcatttgctgattctgaaaagggtctctcctctcctacgagcctgctagctagattgaggaagcagagtagaagaggacgtgatccgagttggaagatttacaaaagacctgcatgtttcgcttagacattgatgtgtagtaactgatatgctgtactccctctgtctagaaatg

SEQ ID NO: 16 - DNA, 274 bp, Avena sativa
gtggaggtggaacgaaaattcctttattttggtagcttctgaacacactttttgaaagagttcaatcggagagaacccaagttaagtttccagtaggggcaaactatacgattttgttattccactgattgttactttcagcagagtaatatcggcaatagaaactcaacataatcatatcatccaaaacaaacaatgacctacactcaaaaatttattttataaatgtatatgcagaaaaggaagcaagactatagaacatctaagtgatgga

SEQ ID NO: 17 - DNA, 423 bp, Avena sativa
cggcaaattttgcgcccattcccggcgcgttgatagccgacatgtacattggccggttcgtggccatctcgctaggatccattgcatgtctaacagtaagtgcaaattcatccggttcttgtattttctctagcaactaacataagtgagcgcgatgatgcttacctgcgttacataaatttgtacttggtgcaggggattgttttcctgtggctgagcgccatgataccgggagcacggccgccaccgtgcggcgtaggcctcgctccggagcagtgcacgcccccggggccgaggcacctcgcctggctgatagccgggttcacgttcctgtccatcggcgcgggcggcatccggccgtgctccatggcgttcggcgcggaccagttctccaggcaccccaaggagcagaggtccaggatc

SEQ ID NO: 18 - DNA, 163 bp, Avena sativa
cacaccgttgagatatgagatcatatcagaggaagatgaagcagtccatggatatgagcgggttgttgagatcctccaccaattccccgccaccaatgccggcgccggccgtcgttgtcgccggtgatccgcacgaagaggaagaagttgaaagcctcttctt

SEQ ID NO: 19 - DNA, 329 bp, Avena sativa
gtgcaggtctgcaaatgcataactgaactgtgtaggcataaattgtcgcagacaaacccactatatactgaatttaatgtctcaaatgaaatgccgagtcccgaggtagtttctttcgttgatatcagatgtcattttaatttctcatccataggtacctatttctcatagctatattgattatgcaggatctgtttgctcgttttctggtgcttctgcataatccacttgctagggggcgacttgctacccagatccttacggtttgtcttcaaactattaaatcttcactgcttgtttgagctggcttgtttttggtatcgtatctg

SEQ ID NO: 20 - DNA, 454 bp, Avena sativa
tctgtcaactatgttggcggcctagtttatgcacatgcaaagattgatggcaatcatgaggactgggtctattatagtaacagaaaatccgattccggttaccatgtagaggaaccgcagtcatcaactgccgagcaaactgtgttgcctgctacaaaacggagtatccttccttggagaaagaggaaactgagtttacggtcattaaaggctaaaggcgaacctctgttgaagaaagcaaatggagaagagggaggtgatgatattgactttgatcgtcggctgctaacaccttccagtggatcagaggtacatttttgtctttctcttcccattgcattgttaaaaatataagcagcatcctgtgcttggccaagtatttccccgaagaatggcttgttctatattatcttttaataggcatgatgtttgttctgagcaatgcatttttgaa

SEQ ID NO: 21 - DNA, 228 bp, Avena sativa
gtggttgtgaactccactcttgttcatgctaaggtatacctcttggccgatttcagagatataattgccaattgcgctactgattaatcattgtgaattctacaaccactaatacgaactaatactgtgttctgtagaaaccagcaaaccatgtcttccacattgtgacagataggcttaactatgctgcaatgaagatgtggttcttggctaatcccttgggtaaag

SEQ ID NO: 22 - DNA, 511 bp, Avena sativa
aggagatgcaaggccaccattaaataacttccaaatggcgtgatttatcgtagagaataagaatccagagctcccaagatacaacaagaattccccccaacgggatgaatcaaggccgaatgatcacacggaactttcaggaagagatactactagatgtagagttttacagatgaatatggctacatggttcagtattatcatatacagatctagagcttgaagcacttcctatacagagaaaacgacacattactctcaggaaataatctgttaaacgcgcgatgaaatgagatgacatgtttggcttcctcgtttccttctctgttgtctggttttttataagactcacggcctgctgcctagcctactgctcttcctccggctgcccttgtcatccgaatcagaatccgctgaggatgtgccctccgctctgttgtgccgtctcttcttctgcttccttttgtgtctccgcttcttgtcctctgagtccgaggagctgtaacttgaa

SEQ ID NO: 23 - DNA, 229 bp, Avena sativa
tatgcactatcctcaaagcattacgaatgttccgactgatatctttttagttcctgctggaaaaccccttatccttgcacttgagataaaggtgtaaattgaggctctagctttatatttgacactatgaccaatctggaaagccaacatatttacctacgaaattgcacatatcaatatataagtacattttagctaatctttgccaataggattcttctgttgcgac

SEQ ID NO: 24 - DNA, 201 bp, Avena sativa
caccactcagacggttctcttgagcattcacgtccactttaaaccgtgtctgagggtgtgacaggtctctgattctgtaaacacaaacaatatagtctagtgtgttgggatcatcaaaaagcttcttctccttcttctcacggcgctctgctggtgtgagtttgcgggcaatgttgcggtccacgtgagcctgctcacgct

SEQ ID NO: 25 - DNA, 267 bp, Avena sativa
tcggtgtactagtagtatataagcagactgtgcatgaagtttgcttcatcccatcccaacgcagtgcacatacaagagctttctagctagaagcaacaatggccgttccacggagctccttgttcatcgctgggctcatggcaatcttcctcttctcctcagcaaacggcggcagcatcgccatctactgggccagaacggcaacgagggcacgctcgccgagacctgcgcaaccggcaactacgccttcgtcaatatcgccttcct

SEQ ID NO: 26 - DNA, 564 bp, Avena sativa
gatggatcagtgcagctgcatctgggttggtgtccatcgctgccttgctgtgatcttgtgacctccatggaccattagagggtcacagtacaggttaccaagcctcatacctgaagaaatgaaatgtcagctggctgtaaaagcatgatctttaagcgatggacaacatctccatggatgttgtcataggtttgtgtttggcagtctaccataaaagcatgatctttaagcggtattagattaattatattacaaaatcctgggataagggaagaacaattgtaaggacattaggtaattactagtaggatgaaccgacgtattatatatcaataagttggtagaaatagctaattggaaaatatcatgcttaagttttgaagatgaaatctagttggttgatataaattagtattaactgatgttccactaagaaatggacaagtgtgcaaactgtacgcgatgataaaattaataaaatgggagaatacgaatttttattgtttgacccagtagaaagacaagtaacatgctatgagattcctgcatgtcaagctcactttt

SEQ ID NO: 27 - DNA, 528 bp, Avena sativa
agtttcaaagtactctacgattctaggtgacaagccactgcttctagacagcgagttaatttgatctccaccagatggtgtggatgtcgttgccgatattgttttttattttcatcaaggcctactaagtttgcaccttccctttcttcaactcgtacgactgcctgattgcatcccagaaagcgggcatcgcctcagagtcaggaacttctttgaatgagggaagatagtttaggtccactatgacatggtctccgctaccctcctgaacctgcaatatataaatgctgctttttacaattccgaagtagaatgtgctacatgaagacataatggcgactgaatgtgaagaagctactctttgtagctttcctgaattctaaaagcaccaagtcatacaaaggcaagaaaaagaaatacttacaacaacatcaaatccaaaaattgttagtccaagtgattccttcagcaactttgcagcctcttgcactaatcaatgtccagagacttgttatcttgtaccctgtt

SEQ ID NO: 28 - DNA, 365 bp, Avena sativa
aattgcatgactataggtttttaaattagtgtatagactaaaggctctgtgaaatcaaaccaaagggtgatatgtaagaaaaaatctatcattaaacttgtgttcatacaattaagactgaaactctgagccaattagtaaaacgactatgatcccacatgtgtatatgtaggtccatacgtccagttatcttcaactgcattctagcatccaaaaataacgataaaagcattaatattagctgattttgttgcttggtttagtacaacaactcaggggaacgaagataccctgaaaagtgagattcaacaagaaaacattgggcaggtgaagtttgatcctacacttgaaaagccaagtgaaaa

SEQ ID NO: 29 - DNA, 454 bp, Avena sativa
agtccaacaccagttgagaaatcaggtacttacatcaatgatgaatgttgtgaacatatatatactcccgccgtttcaaaatataagatgttttagctttgtaaaagtagtgtatctagacctctttagtatgtaggttcactccaaacatagatgaacctgcacactaaaaggagtctagatacactccattcacaaaactaaaacatcttatattttttgaaacggagggagtagtttcatagtcagggattcagtcagggtcaggttacatctgatttcattcagacaaggtggtcatgtcaaatagtactagaagtaatgacaacgtttcaaatgattttgattcttatcctactgtgtgcacatgtcacaaactcaagtggatcagtcttctgagcccatcctatgcgtaaccagatcaagaagaatcatcacagccagctcagctgcc

SEQ ID NO: 30 - DNA, 334 bp, Avena sativa
gatggatcagtgcaggaattctcaaggagtttttaaaggatgagaagtttattggaaaaggtgcctttggagaagtttacaagggccttgctggtgatgaaccagtcgtagtaatgaagctgatcagtgatgatgtgctagatataaatcaatttgtaagagaatttagcatccaatcttgcgcccgccacaaaaacattgttaagatgataggtgtttgccttgatgctgacgtcccgatgctagtctatgagtttctctgcaatggtagccttcacgagattcttcacaggagcaatttgcacctcagcttgggcctgcgtttaagtattgc

SEQ ID NO: 31 - DNA, 309 bp, Avena sativa
aaactactatacaagcttgctgctagtagcagtacttgtagtggtggtggtggtgcgtagtagtagtaactagtagtaaaacctgcatctcctagtaagctccacagagtaacacaacacacccttttgccaagaacagcccagctagctgttcatcatccctgttgcatatctagtgagtatagcagcagctaaccttctcctcccttcctctaataatctatcctstttgaatggggagaggcccagcaaagcagtagaggctaatctaatctaatctagataggggtagaggaagggaggagaagg

SEQ ID NO: 32 - DNA, 431 bp, Avena sativa
gatggttccagtgcagaagtgatgctcacatctggtttcagctgagcagactgaagtagagggggcataacaacactcatgtacggaaggaactcctgaccaaggcatttacacagtctcgcccatgcctacaaatgcaattagattaagcaaaagtgaggcacactagcgatcacaatttgattaagtcaaagtaagcacacaagtgatcgtataactgccatttgggttttgatttccaacgtacttgcagcatgtaacttgttatcgggtcatcagcctccatctgagatccttgcagtgacatcaaaacttccatcacctaacaagcaaaatgtattatactcaaaggtccaacaaatgaattttgcagacaacattcaagtgaacacgtcagcaataaaatcagaacaacaaactgcacatccatc

SEQ ID NO: 33 - DNA, 435 bp, Avena sativa
gcagtacgagtagtattttctccagccctttgccgcgccatgctgtgttgtgtatgttcatgttcactggcgggcacggcagggcgttggccggcgcggccgaaagcggcggccgcacatgcgtagcttgccgctgcccattgactctcctctcttgccattgcccgccatccttcacctaatacacatcagaatgtactgtatatgcgcagtattttcttggataagtaagagtttgccaagtatagcaactcctagtctgctattttagtaacagtcaaagaattctgcaatggttattaatcttaatccggtttctcttagcacttcccctttgagcactagctccgcagtatcttgagcgataactatttagtatttacacattatttgtggggaatagatacacatggagaagcgtaactaatgtggttc

SEQ ID NO: 34 - DNA, 441 bp, Avena sativa
gtgaacaaatgtatgtaagatgtgtctttaacaaaaataaaattgctaattcaagaataatgttgttttactatttatggagcaagtgttgcaagtctattcacagtatttaattgaaagaatcttctgtgggataggacagatcaacaaaacaatttccaaaaaatgtcggagaagaatataaaattaaaagtgttttccccatgctattattaactttagactgatattcaacgagtatttctgtaagctgttggaaaattcagatataccacctaaaagtcatgtcttctctgcctggtcccttacgactcatgatataaacttgtgcaagaggatgtatcaccagttccaaagtcatattccaaaatattgaatatctttagcaaagtttatttggctgcatagcaagagttatattacttctaatactgtaaactg

SEQ ID NO: 35 - DNA, 463 bp, Avena sativa
caccatccattgaagataaatcacagttcccgaccctgggaggagggaagtgaaaaaggtcccgtgctgcctccagcgctgcattgtctttactggtgtcgcctttaaattttgcctgacgttgaattattgagtcacggttaattggaacaaataatggtgttgcatgtcagttttctttcaacgtttgttactagactttgtataccggagttgagtcgtttgtcgggattagcctctagttttgtaggctagatttgcttttggtaacaggaacgtctgccatattgtttatttgaaatgatgtggtaccagcaatgcaattggtgatttggtcttgcctcagtgaaaggcatacaccaaaggaacggagaggggttttggcctcttgctgaatctgtaccatgtaccggtggtagtgattgtctgctacatccccattacgtccatccctgatgttccc

SEQ ID NO: 36 - DNA, 499 bp, Avena sativa
gtcgtggatgcacgacgtgaggtagcgggtgtccgtggccggatcaattccaagtgtttttcgtaacttcggatcggtgatgctatatttgatgatgcggtacacaatgcggcctggttagttacttgactcgctcagcagttggccctaagtggccgtgacgactatacagtctacagtccaggactctaggtgcttggtgctgtgctcaaggtcagcattgtgtggccagtagatagaccagcaagaattttttatatcctgcaaccccactcttggtggccagtacccaaagtggaaaccttgaatttgctggatcggatgggcacccccaagcaagttcaatggaggagccaccgccattccattcatgaaagcagcaagacacagacgcattgtcatatggtatatatcatgacggtgcatactgctaattagttggagcgcaaagacgatgcctgcacgcactcaaatatgaactagtgctgccaccactatt

SEQ ID NO: 37 - DNA, 312 bp, Avena sativa
ctccaagaccggtatagctatgcaggaaatgagttgctcatcgccattgccgatgaataccatcaatcctagatggagcttcactgtgtacaaaccatcttgactcacaaggaagctctggaagtccagcaaaggaatcaagctttgatcattaaaccagaagaagcatctggaagcagcgtccccaagggaagaagaagtgtgtcaccgctcgccaatacctcaggaggttcaagccaccataggaagccccaagaatcctctaaccgtcttcccagaggtgaagatgaagaaaagaggatccctcgagta

SEQ ID NO: 38 - DNA, 456 bp, Avena sativa
ctgctgtccgctgtcaattctctcaaaagaaacctcactgcgttcagcaagcaagagtgaccgatggagaagatgttcgttttgctttggttacatctttttccctggtgaaaatgcatctaaagtaaaaaggcgatggattttgttttagaacagcttgaaggatttggtgtttatgtaagtaagagtatatatgtctggttggttcttgctgatagcctgatagccctttttgtgttatggcagcacgatgatccagttggacaagttttttgctgttaagctagataattatcctcagcgttttctattccgttcttgtacaacaggtaggatactccggatttactagcttaaatgctttttgctggaacctgttgtcaatttactaggagtatgaagcagctcattgactagttttggatgctaggtacacgcgctgactacaagtttctc

SEQ ID NO: 39 - DNA, 493 bp, Avena sativa
agtacatacacttggacttttggttcccttatttgagtcttctagtgactgcgatatatcatcaaaaattaatagatatgtttacgacgtatcaagcatccccaacgcttaactcctgctcgtcctcggatggatcccagtgcaggagcaccactgatatataaacgacactaaagcatcgtcatatataaacaacactatccaggctgaagcaaccaagaaaggaaagcatatatatcaaaatctccttaaaaatctagaatctaagactatgaactacttaagaaatatggaacttaagtgtgcagcaaaaaagaaagaaacattatcaatgatgtcaaatatccatacttcagttttcacttgtgaaataagattttatctgctgtacatatgtgaccatgagtaaccagtaacatgcagtcactaatttttttaaacatggagtaatattagaagagaaaaatagtcttgctagtgcagtaatatgtgt

SEQ ID NO: 40 - DNA, 457 bp, Avena sativa
ctgaaacaatttgcacctgagatgaatgcattgcatgaagataaatggtagcttgtgccattgcttgtgttcatatgaatcatgatatcctacaagtcggtggttgcagttgttaggaaaagcttgtgccacgaagaaattcttgttaggatagctcaagttcttgcacttgtcattgtgatatccatgcatttttaatttggtactctcattctattgctgagtcagttggttgttggatattgatattaatttgagacagctgcatatatgtatcatattactatttcttgtatatcatgacagtagtgcttgcacatgtcattgtgatatccatgcatttttaacctcgtactctcattctagtgttgaattagttggttgttggatattgatattaatttgagacaactgcatatatgtatcaaattactatttcttgtatatcatgacagta

SEQ ID NO: 41 - DNA, 528 bp, Avena sativa
ttagtgcccgctttgtatgtttgcaagtgaatgtgtttgcccccgatcagagagcagagagctatggattgctttgctttgaaaccggcctgtttaattatgaggcgttcatgggcggcagggcagcacctttagggtctttccctaggctaggctaggcttcgttggttggttccccaagtttgacattagcgctggtgctctcctccgtggagtagtcagattgttggtcaataaaagcagatcgtatatcttgggaagttttcttcgcgtatcaaggcatttttttacatttcagaacagttttaacaaggagcttgatcagccgagggccgaggctacgctaaacctcctccgattaagacgacagtggagcaaaaacaaagcggtgagagcgatacattacatgcgcacgcaaagtacggcgcgcgcaggcgggttttggcaggggtgcgtgccgcggcggcagcgcgggcaggacgcaggaggcccccatcccatcacccgtcacccgtctcccgctgccag

SEQ ID NO: 42 - DNA, 444 bp, Avena sativa
aaaacatggctatgcagttctcaggctttcagttacttagaacagctccagactaattctaaatcactgaaaaccctgatcatcaatttgcacttttatcactaacatgtctgctgcctcaagctgtcccattagagcattctgaaatttgtgttatgttgcacacatcatctgtctggaattaagatgctacgggtttttcctggagaatctaagctgtaaatccccatcgttgctgttaactgatctcattttattttttctagggcctatgccaggaaaaagggaagaaataatgtaacactagatgatgtagatgtgaaactttccgtatgtttgtgttcttgtcgcctttcttaaatttttcggagttacaatatccgttgctctgtctaggagtaaagcgtcggtgtacttggggttgcggtgggtgtactattctgt

SEQ ID NO: 43 - DNA, 608 bp, Avena sativa
atcctaaagaactaaggagacagagggaaagagagcgttatgcacttaatagagatgacattctaaaaaggaggcgcgaaactcgtgaacgcaaaaaaatgcagctgccaatgaaaattacgaatccactgcaacagagacaccattagcagggtcacagggtgatcatcatgaccattttgtgtagactagccattcaggttgaacactttatatcaataatataataatttaattcatacatgcttgcagatcctaaagagataaagaggcagaaggaaagggatcgctacgcactacataaagacgagatattaaataaacgacgggaagcccgtcatctggtaaatgttgcagctgcaacaaaggatgacgaaattgaagccatggcatcgtgtacaccactggtccagtcccatggtaaaagacggcgtgacgacagtggacagactaaaactacaactggccttgaaaattttgttcacggtatgaaataccaactattgacatggtacttccatttggtgcgtacataactcattcaccgacaattgctgacagatatgcacacccaaaatgctgatacattcaaatcagcggtgacccag

SEQ ID NO: 44 - DNA, 239 bp, Avena sativa
ccaccgtcagatttcagatcagcggttcagatcgtttgttgaccggtcagattcaggcgttgcctagtcagacgcccggtcagcgcccagtcagcagacgcgttgaccagtcaacagacacagttgactggtcaacgcgtctgctgactgggcgctgactgggcgtctgactagtcaatgcctgagtctgaccggtcaacgaacgatctaagccgctgatctgagatctgacggtagct

SEQ ID NO: 45 - DNA, 407 bp, Avena sativa
gacctttttcgtatgtgaaaccgtatacactagacaagcatgattgatattttactagtagttgtcaatgggtcatgttcagaaaaccttgtgaattgattttccttttgacaaaaaacttagtagatctgtgactccccatattcagcatacaatgaaattttttttcaagtgtacctatatagcataagacagtatttctctgtcgtgcttgtgcaccacaaaattcacacataccagagtaatatcagcacacatacaccacatcccataggactagttctcacaagtctacactggcagcagttgcgcgaatgaaagacaaaaattcagacataacagaaacacgtctggacttattggtagagtgtgaattatggagtttctgcgaataatcactcctacga

SEQ ID NO: 46 - DNA, 378 bp, Avena sativa
gggattaggaagacaagggatcaagcaagagtaattcagattgcgaggatattgagagaagagtaagcagagagggtgagtggaagcgggactttgacagaaggaatgagccagacaaacgggatgcacttagagttggggcagagggatataagcctcataactttgatgctaatagtcagggtagtaaaatagtacagagcagggcgaagtactttggccgtatgactggaggtttgttatcttcttccagaggtttcggcggtggttccatttttggtagaagtgctcaggcccctgctcctcaagctaacaaggtgactaaaccgattgttgctgcaactgaccagagtaacacagttaaaagggattcccagc

SEQ ID NO: 47 - DNA, 484 bp, Avena sativa
cttgtaaatccccaattttacaatagccataaagaagagaattacaagtgataatggtcggaaacataccagctacaacaatctgatcatacagacgaacagcattaccgatatcaccaatctttgcatagccatcaataactacattatagagtactacatcacctggctgatatctgctagctacattttccaaataccatcttgcttcaattaacagtcctttcttgcaaagtcctagaagaatagataaatggttcagtgaagttggcatcactttgtgagaatagcacataacatcgcaaacttggagcgccctttcaatttcccccagcttgcagtacccgtggatgaggatggaatatgcaatgacatccatatctagaccaatactgtgtatctcaccaagtaagttttcaacctcatagaccaaacccttcttgaagagagcattgagaaggacgctgtatgttacaatattcaa

SEQ ID NO: 48 - DNA, 425 bp, Avena sativa
attatttggaaccgaacaggtatgtatgccattgcagctcaacaaaagacactattggtagcaacgaggaacaccgaattttgctgcctgaaatcatgaaacaatgcctcggacttgggtcacacaaataaagcatcatataaatgaatgagcaatgtatgtacacgggcgactagactatatgattctacgaagaggaacacggcactatgattgctagcctgaatctaaatcgggttcgtacaggagcatcgctgtgctctgctcctttcccccactgcctaggaacatgatgcattccaccgacttaccagccaaggttccaaatcctgaaacctgcatcaagatgtgagcattagcaaccaaacacgtgaatcacaacactaaaactagttaaaattgaaatttgcaaaaactacctgagc

SEQ ID NO: 49 - DNA, 473 bp, Avena sativa
cgtcgcaccaatgaagcacaactttgtggcacccacaccacctccaaccccgtctccaccatctgcaacacacgacagtcgccataagaaatggccagagcgaccaaaactccaaagcatattagtcagggagccgccacccgtaccaccaaggactgtgccgtccgcgcaaaggtggaagctatggcatccgaggctgtccgggcctcgcctccgcagggcctcctcaagctcgcccacagacacgccctccctctgcacttgcatgtacagcttgctcggttagggtttagggtttgggagagcacaacagggagggatttagttctgttttgggaggttgcgacggatgctagtgacagtacctcgtcggagaaccgtgttccggatgcagcggcggcggcggcggcggtggatggggcgacgactaggcggtcgccggagaggacgagggctatgccgcacatcgctga

SEQ ID NO: 50 - DNA, 543 bp, Avena sativa
tgcagtatttttcttctctgctatgtttaaatacatgcgaatctacacaaatccgagtcaattagttttcaatggagggagtatatccatgtggttaatctgaaaaaacaggcgcctcacatattactctgtacatttaagtagaacctgatcattggagaagttcttgactaggacagagacataatgttccaactttgtatgtgtgttactgtatggtctggagaaatgataaatctatttcagttgggccaatatgctagacctggtcaatctaaagattatctttcagttactatcgtttctggcttgcacttatgatatttgcattttgttatttgactggaatgaaaatagggatagcttctctccaagtttagactagacctattttctatcttcacttttggaatgatttttttcttcctattttaaagtgtaccatagcagattggaagatgttcactttctttctaacctctgattccaggtagttgcacgggaagacactggtagcacccccagcggcaccgttgccccccc

SEQ ID NO: 51 - DNA, 309 bp, Avena sativa
ctggaggaacagttatgggtaaacaaattaccgaagcaaagtagctgctagacaatatgcaagacaaccatgcccaatggcatgtggaaagatcaaacacgaagaaggtgaactccatcactcctcaagaaaatgaagagatcaatgttaagttggatgctctcatattagctttcaaaggtaaggaaacccatttaagagctacacccgaaccaaccattgaagaaatatacttcatagctcgtaatgattataaccctgcttggaagaagaattataatctagatttttagaaacattattctagtc

SEQ ID NO: 52 - DNA, 468 bp, Avena sativa
cgcactgattcccgcgtatgtcgtacatttgattagataattaatgttctaatcttgacattaaacatatgttgcatgtccaaacgaaggtacgcattcagaccgcccgacatgcatgcatgaaataatacacgcgtctgaaagatcttgccttgatctaacttttcttccacggcttcagctcctaaattcatctcctaatacatcaaaccgtcggtggaacttgccatctgctgttgttcttccatgaactatgagagagcaagagagcacaggaatagagcacgtagcgagagagaagtgaagctgtaagagaccactgtgccgattaaaagaggcgtaaatgagaggaatcagctctgctttgagtggtcaagtagaggaaaaggacaagacattgatatgagtagacctaactgcgcctgacagaacctgcagtcccgaaatcttcacgacacctcccgccaa

SEQ ID NO: 53 - DNA, 457 bp, Avena sativa
catcttactggaggaactatcatattgagaaacaaggattttattattctatatagaggcaaggattttcttcctggtgaagttaaacaatctgttattgaacaagaggctcgggtagatgaccagcaggtgaaggaagaagaagcccgattaacggtggttgactcccttaagatgttcgctggtttaccatctgaggaaagttctatggggactttcagagagtatcgggatttccaggttaaccatgtgcgagaaacaactgaaaacaacaaggccatgatagaactagaggccgagaagcatagattggagaaggaactgaaagaccaggaacggaggcttttcattgtaagacctggtctacactaatgctctttttcttgcggaatacactaatgctcttgttagcatagtagacttctaatagtacctaatgaaacaaaactggtctgta

SEQ ID NO: 54 - DNA, 418 bp, Avena sativa
atgacatgtataacaagtcctaggatcactaaaccgtaagagatactacatagcaagattagtgctttagtggcaagctcatcaatcatgaatacaaaaacattcccttgcccgaaactgccaaaccgtctctagagtaattgaggtaaacattccctatctatagactaaaccgtaagagatactccctcagtttcacaaaagctaaaacatcttatattatgaaacggagggagtacatatcaaggttagtgctttagcggcaagctcatcagtcctgatgtcagcaatcagcggtgcatctacatttcatcagagcccaagaacctgcaaaattggagaggattctgtctggcatatcatcaacttggattatctgaaccctaatagataagaaaatcatcaatatgatctgaag

SEQ ID NO: 55 - DNA, 466 bp, Avena sativa
gatggattccagtgcagtactcaggtttctcagtttgcttcaaatgtggtcatagactttgttgcacatacgcttcttagtttatatctatttatgcctatagaagagttactttacgcaggtctccttccaagacaggtttttcttatttcagatttattaatattttgttttcatattgaactgctattagttttgagaccaagtcccagagtttctaccatatgattcctgctggtatgtcctattatattcttcaaggaccttaacatattgtgctcattcttttatttataagttatccttcatcacatcaaggcaaacatcagtttatattgtcttggattttgggtcttctatgttttttgaagaaattggggcttataagttttctcttatcgcaggctgttaacacactaacatcgttaatttagagaaagttgtgttcagagaattatgcttcgcg

SEQ ID NO: 56 - DNA, 366 bp, Avena sativa
tctgaacctgaagcacatgattctgcaaaaatctggaagcaaatatcatcttctctagatgcattttacaggttttctcggccgcatactgtcataggaacagttaagttatgctcctatattgtttcactcagatattttaaatgaagctagtaagcgtgatttgtggtctccgcttgctctccttgattctaaggacttttattcgttcatttgtttgggcaggcactgagcatagtctcagtttccctactggctgttgagagcttgccagacatctctccatcgtccattgctggtttgcttgaggtacaacttgaaacaacatttgtcttctaaaactagaaattaaatcatcacaaagtt

SEQ ID NO: 57 - DNA, 394 bp, Avena sativa
gaaacgggaacgaagtcggcatagattgatatgccgccggcttactcgtatgctgatgacagccggcggcatatggctgtcaataatccggtggcatatagtcgtcggtaatcaaggcgtcaccatatagaggatggccgttggcacatagttggccgtagtagcaactcatgcaaggtggattgatttattgatgtggataacttgcagcctaaggaggctaaaaccatctgaccccaagacaaacttctgttgtaccttgcttaagcttgcatcctagtgtcgtgtaaaaggcaaacttctcgcaaaatatgttaccatgcacctcattcatatttgactattgacgttcaattgtcccagcaaaataaacaatttagcaagacacatcatt

SEQ ID NO: 58 - DNA, 304 bp, Avena sativa
gactagcatagtgtttctgaaagttaggattataactcttcttccaagcaggattgtaatcattacaagctacgaagtctatttcttcaatatttgattgggggtggctcttacctgagtttctttaccttttacggctagtatgagctcatccaacttagcattgagatcttcattctcttgtggtgagacagagttcaccttcttcgtgtttgatctttccacatgccattgggcatggttgtcttgcatattgtctaacagctactttgcttcggtaatatgtttacccatgttcctccag

SEQ ID NO: 59 - DNA, 471 bp, Avena sativa
gatggatcccagtgcagtcgtgaaaagaatcccttggtcagataaaataaaagccctgttttactcatcagatcagatagttcatggagatttttggaggagaggaaagtaggaaaccagcgcaccttgtatgcggcgccaggcgcggccgtggagctgcatggcttccaggaagagcttgtgctcctcctcggtccatttctcgcgctgcttcgttatcatgtacggcttccgcgccttggggaaccgcgcttcggcggcgagcgagtccttgtcgccgcgattaggggggcacccgagatctcccatgatgttataatcatcgctcgggttggtttccttcaagaggagaaggagatggtatcgttagactcaatttcaagcgaatttcaagggggacgaaataagatccggaaggaacacacagacggataagaaacgagtaattaattacctggaaacgagccatat

SEQ ID NO: 60 - DNA, 349 bp, Avena sativa
gcctacaaactctaatgtcaaacctggataaccaccaggctactgtagtaaccgaccatgacaaaagggtgctgatcactactgacaaaccaacgacggcaagagacatctaccggctactcgcggaccgtggaacgagatggaccccggccaaatggatttggagagcagtcatcccacacaggcacaagattttttctggttagcattcaggcgtcatttaaacacaaaagacaacatgattaacaaaaagtggtgcactgatggaggatgcgaccaatgcctagcaattgagagttttgtacacatcgccttgcactgccgacaggcaacctgggtgtgggacaaa

SEQ ID NO: 61 - DNA, 465 bp, Avena sativa
ctgttgttgcttcatctctgaataacccacttgttttaatattctgtatgtgcagggcgcctcttggatttgtacattattctagccttagcattttagaattctatgtgtccaagcacagttcaaggagttgccaaggaaagcttgaggtcctcaacccatcctgtacataaaataagatggtcagtgtgcacaatcatcccacaatttcacaattacatgcactgtttacatataatccgagtttgctgttctgaatctcgctgcgttggttacctaggtacttttcccttcacatttttgttgctctagactgtgagtagtattactgctggaactgaaaaatatttgcttctctgtgtgaacccccatttccaccactttttcccgatcccacaggcccaatattttattgttttggcttacttcattagcgtgtaatcttaacgatctgcggtgcctact

SEQ ID NO: 62 - DNA, 347 bp, Avena sativa
gctgaagatctaagtcgcattgttgataatttggggaagtttttgtctaatagagatgtgaaggtcagatatttgaatctgttataccttccctagacattaattgttaaaattttctcggaactctattttgtaatttatttttgtgtctttcccactctgaatgtttgaattacgtgtggaccaaaaacataacgaagtcataaataagcaattctcttttattttgaataccgagaagtttacagcaaggaagcatcttgctctctcaatccctaagcagtttgacgactcttgtttgatattatcaatactattagatttttatgcttttgtttttctttctg

SEQ ID NO: 63 - DNA, 404 bp, Avena sativa
tgctgctcggctgttgcaagagctcttgtgggcgaagcttctagcttgtgtagagaggggcttcagtttgcttacaaatgaagtaaagcctcaagtgatcaattgattgagcttagtttctatcaaacaatgctcgctgcatgttggcagatctcataatatctcaaatcataaaggtaaatcctgtagtttgtgagctgcggcttgttttttttaatgtatcggttggaacactcctagatatgtataaccatcaagtggcatatgtctatttgcactaatctttcatgtaaatttgtcagttagtagaacaatgggacatgttcctttttacctgattttgtatcccttgcttctcagttcaccaacaaattaagtttttttatattcattttacttgaact

SEQ ID NO: 64 - DNA, 517 bp, Avena sativa
cagcagtcgttatctacacgcggtggtaatagagtgaaaacaacctctaaagaaactaacaatagtaacataccagagtcggctagatatttaagccgacacaccaaatttcttcttcaatcggtttgcttttaaaaccgactctaatacacaccaaatctagttcaatcggtttgtaaaagaatttctcggccgattcccaagagagttggtatgaaggggtgtaaagttggtcacgcacgcacgcgtgttcaagctttccaatgagggcgcgggccacgctaacacacatacacacggcacactggcacagagtacagagtcacccagcatttccaaaaatcagtagctgacagatccaagcataaaccccctgctttacctaaagatctgacgccgtatatatatatggccagctgccgggacattaagctttctagagcgaaatatgacacatgcatcaccagaaacctgaccacgagtaacaagactaaagttccactgcactggacccatc

SEQ ID NO: 65 - DNA, 385 bp, Avena sativa
cagtgcagggaactgcccgttggacaagatgacaagcctactatccctggaactggagatgcacagttcagaagaaaagagacatggtctgcctccgttcaaggctgctctcgggaacatgcctcttcttggccacttatatctgaaagctgatctgataccttcatgggtcttcaccgacccaagccttgtaagtcttaagaccatggtcctaaatggaaatgtcaattggaacaaaattgtcccccaaaacaaccaagtgtcgggtcatcttctacgaaaggtccggccaaacctcattcagattaaactgcaagatagcaataaggtgcctgaaatcatcaaagagcaactaggaatgatactaatcaaagaggattagaat

SEQ ID NO: 66 - DNA, 493 bp, Avena sativa
cttgctgagggcgccgctgagcgcgcccacgggcggcgccggcccgtccagcgtcgccgtcggcagcgacacctgcttgttgtcgttgagtatcacgatcatgtcggagtccaggtacccggcgttgttcatggcctcgtaggcctgcccggccgtcatggccccgtcgccgatcaccgccaccacgttgttcttgccgcccttgaggtccctcccgacggccatccctgccaatccggcaaacacacacacacacacttgatcaactgtcacagaattttcacgagcaggttaactacacaatcggatgcagagactaatactagtagatgcttgtagtaccgagggcggcggagatggtggtggagctgtggccggtgccgaagctgtcgtactcgctctcggagcgcttgatgaagccggacaggccgtcggtctgccgcatcgtcggcatcttgtcacgccgccccgtcaggatcttgtggggatacga

SEQ ID NO: 67 - DNA, 503 bp, Avena sativa
ggacagctctccaaattgttgcgtacctgctagcttaaatgtaggataaagggctaggcatgtaatttgttacatcagaaatagggttaagttaattacctctatcttctgttgttccaaacatgatgcggcactctataaaataacgaaggagtacaccatgcttattgatgcaaagggccttaggcgatggatatatcacaaaaaatgcgctgatggactgattgggcacagaacgttctggtgcatttttctccatcagactatagaagatggttctcattccatgatatttactcattgcaggcaatatctagtttcttcccttcacttttatctggatttgaggaagatattattgaacttctgaaggaggataatgaagtgcttaaagagggtattgctcatgttttgtccaaagctggtggcaacattcgtgaacaattggcctcatcaaggtcagctgcttgaaagttttttatcttgtgacactactttgcact

SEQ ID NO: 68 - DNA, 332 bp, Avena sativa
agctagcgatggatacgtggtaactctgtacgtggtaactcagtacaagaaatgtgcatgctaactaacctgtacgtggtaactctgcactggatccatcgatggatccagtgcagggaatgtgatgtaccgtaggcatctagtctttgatcccatggtatcaccttactacgaggtgtttaagatccccattttggatgactataatactacggacgaggtggaccccttgatggaggaatcagaatggccgccgtccctttacaaaatgtatgtattctcgtcaaagtcaggctgttgggaggagaggggtttcagccgagaaggggatg

SEQ ID NO: 69 - DNA, 446 bp, Avena sativa
aggccgccgtcggaggtgaaggtgcgcggccggtttatagtccttgttacttgaatggctgcctgttttcagttatagcgtgttggtgtttgcgcttaattctttttctctgcagattcctatggtccaagcctccaggtgagcgagggagagcctgtgtacgatttctgctggtacccctacatgtccgtgtctggtgagtcaattgcttcctttgtcatgtcagggtgtctgcaaactgtacatcttttgtgaatgcaaggtgctgtgccgatttgcagatccagccacctgtgtatttgcaagcactagtcgcgatcatccgatacacctctgggatgccaccactggcgaggtataattggttgtttatgcttctcacctatggtgttactggtttatggataatgaaatatccatctctgatgattcattgtggtaactgc

SEQ ID NO: 70 - DNA, 369 bp, Avena sativa
ccagtgcaggagcttggagtgagcttgccaaggtaagaagtcatatgaggaacatgtgcggcaacaaggtgctcggctgtagctggatagaagtaggtggaaaggttcagacatttgtctccaatgatgtttcgctccaacgatcaacagagatgagacacatgatggaccttcttgtcgtattcgtggaaaaggagtgcaatgaagatactctttgcaaggatccagatttaatttcagaatggttttgacatcttattaaaagttggcgttaactggcatctgcactggatccatcgatggatccagtgcagcacatcgtcctaagcccctctgttgaggacactatcacttggaagtggactgctg

SEQ ID NO: 71 - DNA, 393 bp, Avena sativa
aactatgttaacatcaagtttcataatcaagcaacattaattataatttattacctcttggttttctaacttgtgtcaaaaacttacagcatgtcatcagaaatggtagcttgtattgccgtagagtccatttctatcctggaaagcatgcattctaaagggtaagcagtcatctgaaagctggctatgtttaatgcgttgggcattttctctttctcgtgacgcttctatatgtttctttcagatatgtacatggagatgtcaaacctgagaacttccttctcggtcagcctggaacgcctcaagaaaagaaactttttcttgtagatcttggtttaggttagcaatgaaataaacttctttattcagattgtgttattttacagctttatg

SEQ ID NO: 72 - DNA, 293 bp, Avena sativa
gcgctggacatggaatcagtttccttcacggcctcacgggtgtcatgtcaatgccgcggcatgcggaggaggactgtcacttgcatcatgcatgccacatggacgtgttgtggtgtagattagggcatgtacaatgctagggaaggcatgccttctcttagctctccacatcatttagagaagacacaggcatggagaataagatcggatagtctggtgattagggactagtgctcatcaagaggagacgcaggttgagaaacaaacgacgtgctgcttctgaggatccacag

SEQ ID NO: 73 - DNA, 429 bp, Avena sativa
gtgagcagtggcatgtgttgttgtctgttacaagactatgttcgcttgtgtttcggcaagaggtcactaggctaggctagtggcgccagcagtaacatgccgcagattttgtacgattatttagtttttgtttctttatgaagcgtactcggttcattccggtcgcgcatccctgcctctagcgtgccctgtcattcgtctcgttcccggcctccactgtcctgctcacccgtcaaaaacgtcccgacaggccctttctaccaacccacttacgttatgaactcgcaagtcgcaaaccgaagtaaaatgagaaagattgtggattttggcggcgctctcatgggctcatggctgctgctgcgtctttccacgctgctgcaagtgcaggccctgcaatggcaaaaggcaaaaacgaatcgctgctactag

SEQ ID NO: 74 - DNA, 392 bp, Avena sativa
gtcactatgtgccacagcttgctgatcttgtatatgagaggaacaagaacaagatggccaacacatacatgaacctcaagggtttcatggtaagaatttacactgaatcaatcttttgcaaatatgaattcctttcaaacagagtttgtcaatcagaagggatatcattttgtctactagactaacttccaccggaaccttcacgaaaaaatggcataagagctggaccaacttcctactccctccgatccatattacttgtcactaaaatggatgtatctagacatgttttagtgctagatacatccatttcaacgacaagtaatatggatcggagggagtagtaattttgtcaattactaggaatataaaattcagaatggacctatgta

SEQ ID NO: 75 - DNA, 491 bp, Avena sativa
cctgagacccagagcaagagttgctggcaccaaacctgatgggcaagaaggcgagctcgtcgggcatcggcccgagtgcgatgacaccagctgacgacatcttcacacgaggggattagtaggccgaagcttcctgctcagccactaccaatatttacactagctggagtcagaatctgtacactaagaattaggagccattgagaaattaagccaagcgtgtccttccttctaaaatggaggaaacccttcgcgaaaaatccacaccacaacggcacaaccagtgtaatttacagcctcatttcggattccacgcccatatctgcacaaaaaaacagaccgcccttcgtcagtgtccagcagaaccttcaacaaataaattggtaagagatagagaacagcttgagggagcataccggaattgattttaggggcaaagtggcgtaaatcctgcctttgcccccactgttgacccaatccggcgacacaat

SEQ ID NO: 76 - DNA, 547 bp, Avena sativa
tagacttgtttggctaaaaactgagtacgggttagcccagccatggtcacagcttgttatgtctgaataaaggatgctgcttatctaactaattgttgaagtcccgcatttaagtaaagaacattttgctactggtctctttgtgtggattattgttttcatttgcgccaaactaaatggatacgagggacgaacccatccccgacatttccttaggaaagggaacatcgccgtccttttccatttagtaaaacgtttcgcaggtacgtgacctccagttcacggcaaccaattctccttgtcatctgatgcatatgctcttatcagtttctaagacttaccagtgcattgcatttctgatacacttcagttgcgcatggatgacgtccccattttgctgtgcgagtacagaactctgctttccacctgagagggctccacttgcaactcttttacctggtaggtgcttctgggctaaaaccattgtgccaggacataattttctgcttttatggtttctgatgagtgatgacaccgacttttatgt

SEQ ID NO: 77 - DNA, 357 bp, Avena sativa
gtccgcacccccaaaatccctcgcccaaatcctgctgctagggttcgtcgtggcggggaaccgaatcccagcctcccggcgatccgccgtgcagtagccgtcccttcagcatgggctccccgcaggatccgttctacatcgtccgggaggagatccagggctcggtaatccccacccttctcctctgcctcctcctctcgcccttctcgtcaaccgcttccaattagttattgcatagttcgtcctctcttcatgcgtacctgcggcgatcacaagtgaatggttggatcatgtgtctgtgcttgctctgtccgttgcatactgaacatgtagtaaatattagtagttctgtaactt

SEQ ID NO: 78 - DNA, 260 bp, Avena sativa
tgctcttaatctagagttcataccctccacggaagtgcatgaacatctctctaacttgggcatttgaactaaaactagctcctccagtgaaggaaacgatatttgtattactctccgcaggttgctcaacttcagctttgttagaaactgtaaagtatctagagatggaagtatttcccattttctacaactgtatagatgaagcttcagcaaggaggtaaataagatattgctaacaaggcacgttggtgaggtagcat

SEQ ID NO: 79 - DNA, 564 bp, Avena sativa
tgcagaacgaatagaacgatgtttgttgatgattctgagtccaaaatcttgtctaaccaacatctctgaaaccagtctgagatttcagataagccaaaacagttgcaatgattagtgcagccttgcacttcatgacaaaaatcatctgtcttccacgaacattgctgtctactaccatttccactgcaagccaagaatatacaacaactaaggaataaatacacagcctgcctttgtaaatgcctagtagatttatcctgaagctcgcccaaacctacaacgctcaacaaaaatggggatccttctaaacaattctccagttcagtaatatgttgggacataggttcgtgaagaagattctgaaagtggtctcggagtaatttcagcaaaccaataatatgcgagcaattctgttgcatgtgaggcttaagtcttatcattagcatctgcattgaaaaagcatgattggtgagtgcttagttacagactgtttcagtttcataagaaaatgtgatctgcacactggtcagcaaacaactgcatttttaaaayaattgcccatcg

SEQ ID NO: 80 - DNA, 408 bp, Avena sativa
cctactgccctgcatatgacccccgcgaagatgataatcaggggtgtattcttctttcttttctaccagtatacaaaaactgtagggttccgttggttccagatttcgtgggacacaaacataaatagcgaaagacagtgtggtcaccacctgagctcagaaacttagaacaaacagtgacagcatacagcaggatgccacatccggatttccaaagaaattgaggcaatcaaaagttgtttggcacagaggcaagcatacttttttttcatgatgaaagccctagcgatgctgcacacttgatgccctcaaaatcaaacacctacaacagcatcagtggacaccatgcatccaccatgaaacataccatacagtagaacagtagagttaagctagccctatcctaca

SEQ ID NO: 81 - DNA, 347 bp, Avena sativa
atacacactcatatgcttgcagcacctggatgcatgtttttgaatgtacagtagcttatttatatatgctcagttggccgtgtatcaaacttcttccaaatttattgacctgtttatctgaacattgaatcggtaccatgtcaaatttttgatgttacctgaaacatattcttcagctctcacaaaattttgatgattcaagtacatgggtgattttttgtgttgtttcttaacttggcattatgaggacagaccattcattcttttgtctgcatcatttgctcacagaaaacattttcatgacacctagattatcaatgccctgagctgagctgagctttgctgaa

SEQ ID NO: 82 - DNA, 349 bp, Avena sativa
agtgcagtcattttggtgtcagtaagctctttacttattatctatttgttaggatcttggtggatcattaggtagggatgctgctactggacggggtgtattgtatgctactgaggctctcctggctgaatacgggaagtctatttctggatcaacctttgttattcaggtgagtcatgataaatcattaacctctatgtatctggtgaactgcttcttagatggtaataagatagtagtatgtgctatgctctaatgtagcaattcaaatatcaaaataagtttgtttaaacatagtggtactgtctgcacccaccactatgttgcactgtctttaatctgtgagatc

SEQ ID NO: 83 - DNA, 462 bp, Avena sativa
tattcttgcagcagcaacaacaacatgaggcagtacccaaaggcctctgctccgatcaagaagctgatccatgaggacttatccttgaggcaaaatgaggggcacaagagagtgcccagtgtgatcgccagactgatgggcatggactcgcctcctctgaactcggccaccggcgagctcgtcaccgcccacccagatgatagaaggcaggagaccaccattagatcagtgtcaaggagagaaagagatcctgccgagacggtcgcgaccaagcatgtctccttcgtgccgcagcagaattctgttcggcatgccgcgaaactggaaatccgctcattaaacgatgaggaggagaaggagattcttgggcagctgaggaagaagagtagcagtggcggtggtggtggtggtggtgaggaatggagcaagccggcgccgcgggagcatccgcaggaagaggag

SEQ ID NO: 84 - DNA, 549 bp, Avena sativa
cctcggagcctgctattgcctgcacattatcagaaacaacaggtaacgtggcttgcaactaattctacctagctgctgccccgtaccctaaccttgatgttgaacatactcaccaggggccataggtagaacaaaatttggaggcaagtacgtaccatgtgcatttgactgagaagtaaaatcttgagttgaagaagatcattgtaccatatgttgagcttgatttgtaggcacaaaaattgtcggatattgcctagaaccatgcaaacagacttggatttgtgaagcctggtagactgtttcttcttttttccttttcagaggtccaactgtcatactagacaccgcgccagcaccccggaagagcggcctggtttgatggcgggagcccaaatggcaaagtggttgtaggctctagtccatagccatacccaccatgtggcccagatagtgctgcataggaaccaggagccgacacggcataggcactaggggatggcgcatacccgcacatgggagtcgtaccacgcggcggaatcggaacaacca

SEQ ID NO: 85 - DNA, 284 bp, Avena sativa
taaacgagaaattccatcttcaaacatggccctgcattctgcacactgtgctcgcaaccttcagaagtgcgaacgctgcggagatatggttccaaggaagcatatggaggaacactacgatgagaaccatgctccggtatgtttccaaattttgaatcatatctgttttcctaaattctgatcatatctgtttccaaaattctgataatattcaaacttacccatactccatggtgctgctcaattgggcatcctgcattaattcaacgcataaaccgataaac

SEQ ID NO: 86 - DNA, 458 bp, Avena sativa
ctggaaccgaaggggtggctaggaagtgtacttcagatttctgttatctgtgtcgggcgagcgagcgcaatcagaatgtccagaaatttttgtcttccttacgatttttcatgtagggttcctcgggtttttgctcttgccgaactgacagccgggttacggtctgtagccggaaccgaagagtgtgcccttagacccgcctacagtactcagtcgtctgggatgcgtgggcgtctggtccatccggcgagtccccgggagagaccgccggagtcggggtaagaacaaagcaacactcggtgtggttctcaaggtggcgtcccggttgtgtctttgctacggttcgtgtcgtggcacgacttgtttctgcttagacatttgaccacggggtcggcacaccggtgtcgtcgccctagtctcggctatctgacgcccttccactgtgcttggtctcggtc

SEQ ID NO: 87 - DNA, 414 bp, Avena sativa
gatttttactgtcagtctgaacattgaaatccatcccaaaagcaagctatatatatatattgcagattgaccacaaatccattctctaactttctatccataacaacaacacggtagcatcctagaaagaaagtaggaacaaagtaagtgcatcagctggatcttacaacacacacagggatacatatagcttaatcaacaacccaaactatacaacaacaacaacaacaacaacaacaacaacaacaacaacaacaacaacaacaacagcagccaagacaggagaagatgctttgaagcgagaggctgcaaaaccatgtgagctgccctgtcctgccctgctcgctcttctttctttctgcttctggggctagagaaccaccttgacccaacagccaacactgccttgatgtt

SEQ ID NO: 88 - DNA, 238 bp, Avena sativa
tccagtgcagccccacgtcaacattttcggtgccttgcagctccgctcctttaataacagccgcacactttttcttcttctttgcctttccattcacttcatcttcccggtcttgtgactgatccatctgatcttgatcgctgttaaatatactcttgtaaggaccgagtaggggcgggcggaaacgaccatcggcaggctgaaaaatcttctccctatttctcaccacccatgtcca

SEQ ID NO: 89 - DNA, 516 bp, Avena sativa
tctggtcagtttcacaagcacaccctcttatttctgggaaattgtacgtgtgcttttgcagttaactaaccgcgtgatggtgattactgattccactacatggttagggttcaatatggtttgccacctatttaggctttctttattaatatagaaataatgggttttgcaaaatgcaaacaaccacaactctaatcctattgtttatgaattcaattggatccttgaaaatccaatcttatcgcacacaattcctacaatacacacacttaatcttgcatatccagcactaattatgtacttacttgggctacacggccatttttttgtgctagattgctcaatatagcttagggaagatggtttggttattttcttgtgacgattacatacattattttgagattttgatcattcttaggtgtggtggtgtttgtaacatagcaagttaagacaaccatctttatgctaaaagttgagtcggaagaaacgcggcagaattgtttcgtctttatg

SEQ ID NO: 90 - DNA, 563 bp, Avena sativa
ctggcaggatttgaattaaatattggtaaccattggtgaagaactccagattccgggatgctagcagtaattcctacaggcataacattaaaaatcaaacattggcccataaacgaatatgaattgcaggataagtttctggctggacataacaataaagcataactgtataaccgcggaacagttttgggatccaaaaattatcttacttttgatagggtatagtattttagtacagtggcagtacaggatgtgactgcccatgtaacaccgatatgttattacagcctgataaaaagattagtaacgataaatttattttaaacatatgaaggggcggatttatgttagaaacataatttatgtaataccacatccaaagagatgtacatttttagatgtttaacatgcttttatcactactcgctagcatgtcatcttatttcggtcgctgatcttgctggcaatgagatcatggcgacaactcaacttgtgcgtcttcaacaatgcacagacggaccatcacatgctggtagattagattttggacaaggcagttaatc

SEQ ID NO: 91 - DNA, 561 bp, Avena sativa
aggtcttccacgggctatatgacgaggtgatgaccgtgtctgcgcgggggcatggcctcgtgctccgggcgcagcagctggaggcagagttgccaatcctggagaacgacatctgtcagacagattacctctacgttgcttctaacaagggtaggatcagtacagagcacaaagttccttttcccctgtaaaacttgtttctttccactcaaaaaagggcgttgctacacaggagttgattggcatgcaaatccgagggtggaccatggggttgtgacgacaggagacacgcctcgcttcatcatgaactccatgaagcggtgtcatgggcctccgagattgttcatgcttgacaagtatgatgagttaccccgcccttttctgtttctttgttgtgagttggagatagggaagaagcaatgtaggtgtctatgaaatggtgatcatgtaattttgctcaactttcaggtatgatatcggcggagagggaacgtgcttgaagagatactcggacccagccttcttcaagacggattccgcgtgttctaggaggctgcactg

SEQ ID NO: 92 - DNA, 346 bp, Avena sativa
agtaagtctctccaagttgggggcgtggcggagaaaatactccaggagcgtgggcgtgtcacgggtgaaatcgcactcgtccaggatcagtgttgtcaggttattgaactctggtggatctctgtcgtcaaaattacagttcatcacctggaaaaacagagaccgaaacacgcaatgtcaaatacattgtcgtgctcatggttttatataagtcttactgatcttccagtaagaatgaatttcatatagttattagttgagacaatttagcaacagacggacggaccgatcgtagcgacgggaagctggatatctctaatttagtcacgttatgaagactgcactg

SEQ ID NO: 93 - DNA, 518 bp, Avena sativa
attttgtcagatacatggacacatctagaaaaaatgcccagtttggctctcttctatttccgtggaggatcatcggaattttagttttaattccgttacagacgcagcctgttctgttcagtttgagcatcgtgctttaaggccattatcaatgaatttttgttcaaggtgtctgaatgtgggccattcgggactcaagtgctccaataggatctaatgtttcaagtgtggtaaagagggtcatatttctgtcaagtacaaatcgttctagtctggaaaccgaagcaacaaccttagcgcttatctcctgtttctagtaacaatattggcaataccttgggtattttaaggggtgttgagcgttcctcccctccttttcctccttatccacctgacagcaccatggcctattttccagttaatcccttttgctttgttcctgatggcctgacgttggatgatggccctgctgatcgcttggttcgtgctcacttggcggttcctgcactagatccatc

SEQ ID NO: 94 - DNA, 502 bp, Avena sativa
ctttgctctgttgaatcatgagtacagcgcacacgattgtgtcattctagtactactaataactgatgatccggagttagctgacagattagtttctctttacgcttttgtgtttctgataaatgttcaaatcttgaaatgattttatactaaagaaaagctggttagattctgttcagttgcccttttggtgtggtaacaggaaatagataatgactgctctgatggtcatggcaatggtgatcatgacaaatatgctgctgtgattggcaccgcctctaatatgtttgcatgtcaatgcagttccagtgccagagtggtgatggactaactgtactcagaattttgacaaacacagagatctagcgcagcagatttgccaatcagcaccggtccatttactccttggcaagatcaaaatgtttaatgggagtttctgtagcttactaagttcttaactgcactagctaattaagttatgtaaagagaacagaagtttact

SEQ ID NO: 95 - DNA, 388 bp, Avena sativa
gtagaagattgatgcggtaaaacacaaaaggcttaaattgtgaatgccatttattgtgaatttccatcaatacagaaggcatacttaaatttttaatgccatttattttgaatatccatcaacaagagaagcatacgtgtgaactatccacttcaaatagacccaaaaaagtatctcaagtattcaaccaaagatagtgtgtagagagctacagatctacaaacccagaatgcacttaattgtgtactgctactgatactagatgaaaaacattataagcccaacttacagatgaaaaacaccaacacaagcaattgatcccatgcccatcatctattccacacttgaaataagggattacctcctatgtcacatatttgcaggacct

SEQ ID NO: 96 - DNA, 408 bp, Avena sativa
gagctactggataaatttagcagaagaaaacagtatatgaaaacgtacaacaggggtatgtagggaatctcagcttctcccagattggatagtctagacatgtctctgtttcaaccatttctagaaccaggaagaaaaaccaccaatggttcaaagtaacattaaacgcatggataatcatggtatactttgaactgacaaaggaataaagagcacaatagcacactcacatcagatgaaaaagaaaacgtacatcaacagaagcaacaaatggataaaagacaccaccccaatctaaggaagtactcaagaaattaagcacaggaagtaatatgatatgggtaaacgaaccaaacttcataccagtaatttacacaggcgccatctcttaaacgggactgtagccgt

SEQ ID NO: 97 - DNA, 457 bp, Avena sativa
taaactattgtgtcctcaccaattattattacaccacctagtggtactttattgctagtccactctcacaatattgggtaatgcatcatggcaatgttcagaacaagtacatatacagatttctactaaaatatgataacataaaagcctaagaataagcatgtgtttctatatagtcaagagatcaagcattggatgatcggacagaaaatcacgaactgaaaacctaaggaatatataaatatcacgtataccacttgtaccttcagaatatattgccctcctccatatggggggcttgtgtcctcattagttctcagcacatgcaaactcagtttataccctatgaggttcaagatgttctacagtggccatccatgttcggactccgaacaatggcaattgaactaagttcacaaataaaggggaaaaaaggaacattggaagtattccacag

SEQ ID NO: 98 - DNA, 545 bp, Avena sativa
ggaagagctgctcaccgccgaggagatggaagcacgcttcgctgagcgcaaggtctcccatgtatctcagctacaccacttcgctaaacttgccctggcgcattacaatggcaggaaggccgaggtatgtatacatcaaaacttccccatataatcgtgttacaacttgcttcactaacaggttcttgttgttacaaaaatcgcagcacaacaagttggatctagctcaagccctgacatccaactgcttcaccgaggcttgcgggaccacatacgctcatgtcaacttcacagccattattccccgaaacaatcatcagagtgatcgcccaacgaagaggctcttcttcgccgagcttatgctcattccagaactccagtcacgcgaggatgccgagcccatgcgcgtgctgcaagtctccgctattgatgatgctccttgttttggtatatgctgtttgaatctcttgctgttttgtatttgatcttagtacattgtattatattttgatgaaatatcatgtgcgtggcttacttgtgttact

SEQ ID NO: 99 - DNA, 479 bp, Avena sativa
aggcggcgccggaggccgtggccgccgccggcgagcgctgctgcatggaggcgggcgggtgaaaggtagcgggtggcgctggcgtgaggccgagcggccgttaagaggcggacgcgaaacggaaggagccaaggaggcccggggaggagatcaatggagacgacgagaaacaaacaaaatcatcttctccacaatgacatgacatgcgggtccactagaaatgtggtctcattacgccagagacacatgccgtcatctgtgggggcacgacgagtgtgcgcgtagccgaagtgatacagctcggacggggattcggagccgtgctggactggcgcatattcggagccgtgctggactggcactggcacgacggctcgcctggtgaagtccaaggctcgtgtagcaggcgatgacatggacgacagctcggatcatccatgccctgtgggacccgcggctgttgcggtcaagctgctgtg

SEQ ID NO: 100 - DNA, 393 bp, Avena sativa
ttcctgatgctttcttggtccgtggcagcacctgctgatggccagacttcaaagctgactggtctgaagctaaaactaaattacttccaattgaatcaggtactcatctgaccgctcctgtgatctggttatcaatcactttgcaagtgttacctgtaggagagagcaaccgatcaattaggaatacctgtattcttctcttgattcgtcatgagcttcatgatcatctcagaccttttagagcatggcaatttttttgccatttctgttgtgaacttaggaaaactgcaagaacctgatgattgccagtttggaacataggttgttgtgtcgtgatatttgcgtgcgtgcatgcattgggtagatgcttactctggtctgtgttcagctttc

SEQ ID NO: 101 - DNA, 418 bp, Avena sativa
gaatgtagagtggcgttacctactagtagcaggactgcaggaatgtagagtggcgtttgcgttggtaccttcagttcaacattggttcagacttcatcccagttgatgttgcattcaccctagcaggttagagaactcccagtaaatcaaactacgagtataatttcattatcaaactacggacttctgtatgatagaaacacaagggaaaaaaactaccccttgtagaaccagtgctaggaactataccccccttaggcttcgttcggttgctgtggattacttccactagtggaacttatcccaggagggatcgggtgatcacccaaacccctggggggattagttccactagggggactaatccatgcttctatgttctgttcggttaaccccagacaagttatgttctgcactg

SEQ ID NO: 102 - DNA, 342 bp, Avena sativa
tgcagattttagaaatgaacccgatctgcattttgatatttctcgtttcaccgataggaacatagcttgactactaatatgcaatagagtagaaatagacatgctttagcaactgagtattctttcaagtctgtctcttgtttaaatctgcacttatatgatgtgctctttggctgctgaaagactcctttgcaataattgtttcttgcataattaagcatttaaagttgtagatagatgtaaaagagaaacacaatcaattaaacacgccttgattccacgattcatttcctgggaacctccagtaacatgtaacatttagaaaatggagtaatctatgta

SEQ ID NO: 103 - DNA, 555 bp, Avena sativa
ctcacatgctactcaaggtgcatttagcttgcaagggtcttcacttactcatatcaatattgcagtttggtcacgttccttgatttgatctgtacctccaggagtataaacaagcctgtggtgctctcttggatgcacaaaagtttgatcccggtaatgcagaaattgagaaggagctacggtaacttactctcttatgcttatctcgttgagtgtctcccaaatgctagtatgattttaggttggcaaaatacgtgataaggagacaagcagttttacttgattgattatataatgtcaaatgccattagtgcacgcctctgaagaacttgttttgtttcttatgcaccactgtgtctcggtaacttatattgctggacctagtatgtcagccctagagagaggaaccatagtgggttgcatattgacagattattgttagagctgacatgtccatcccacacggttgaattcttgcaggaaggctagggaactcatggagaattctcctggcgatggtgatgagcagtgaggggcgtggctgtgggcattgga

SEQ ID NO: 104 - DNA, 302 bp, Avena sativa
gcaaaccttggttggtgggaactacggcctgcttaacacaacaacatttgaaccaaatcctgattattacaggtaaactgacagggctgaatttctgaaagtctgggcaacaagagatattactgctttcattccaacaaggccatgccttacgtgcagaattgtttccaattattagaatcttgcagcacatacttagtgtccaagctaaggattggatccatagactgaatgcaaccttgtagagtgatgaaacatggtgccaaacttgcattcttcatgcaacttattcctgccttttt

SEQ ID NO: 105 - DNA, 281 bp, Avena sativa
tgctagtttatcaatccaagtaggctgttcttgtgagttcttatgattttcaataatcactcctaaaacataaataatagaacatcaacatgaaattagaagtgcaagtctctaattgttaagcttcggtagtttgctgcgttgaaaaacaaaaggttgatttaagaaaatgaaagctagctaggtgcctagccacatcgttatatgtatctttccaagtagtagtttgcagcaaatatattggtcaaaaaggtctgtctccattaccctgtgcattattt

SEQ ID NO: 106 - DNA, 390 bp, Avena sativa
ccaaagtctaaagagtgcaataaatatcatgtattgtcgcctatatgtgtcagctctcttttgtgctaggctgacagaacgagatacgtaccttgtttacataggactgcgaacaaggcttgacagtgggcaactgagggtgacgaaacagctgagagtgcagtgacttaatcagctttcagatgcacaaagacgaattaagcatgcaaatgcaatgggaaagctaggaacatgtatacaaagtagctaggcacctgaagaaggtcatggttacggaaaaatgatagcacgaagaaagcggagagactcaaagcatcttgtgatgaacatgaccacatgcctgcgcagactggaatctgcaccaaatattttttcgtgtcaccaaatcaa

SEQ ID NO: 107 - DNA, 356 bp, Avena sativa
agttcatgataaaaatggagctgatgagtcaaaagatgtccatgtggaatatggagttgaaaaaccacctgtgccagaatctgtttcagacccctatagcagtgctgattttagtgcagtttccacaagtgaagattgtgcgtatacttctgatcaatgtaatgaaaatgaaggtatacagcaacatgttctcttcgttctttcattatttattacaattccctggaagaataatataatatagtgttgagatgttgtgctattgaagcgtatctacatgaactgattggtactgtattctttcaggatttaacaagtcttgtcatgaacaagaacagatggcatctcagctagac

SEQ ID NO: 108 - DNA, 309 bp, Avena sativa
ggctagaataatgtttctgaaaatttggattatagttcttctttcaagcaggattataataattatgagttatgaagtcaatttattcaatatttggttctgggatagctcttactagggtttcctaacctttgacggctaataggagatcatccaacttagcattgagttcttgattttcttgaggtgtgacggagttcaccgtctttatatttgatatttccacatgccattgggcatggttttcttgcatgttttctagaagctgcttttcttcggtaatttgtttgcccataaatgttcctccag

SEQ ID NO: 109 - DNA, 345 bp, Avena sativa
ttcctgaagttacagctctgatttgtttgatctacttttctgatcagtgaacatcccatttcatttcatcaactgcaagtgtttgtcaatgttttgctcataaacctgttcagggcagcaagaggttagcagatgggtctcctgttccgtgcgagactgcaagtcaactatcacatcattcggacctagggattcagcttatcagttgaaacaatgaaataggttaaggtaaagtgcacaaaattattttgaaatgggtcaaaactatcacgcggggtaaaaggtggagaggtcttataaagtattgcatcaaaagaaaaggccaaatcacatggcaagttttct

SEQ ID NO: 110 - DNA, 525 bp, Avena sativa
caggaagaagagacgatgagcatgagctttttctacttgagagttgagacagagagagagagagagacgagagggatgcaaagctttactctttccgaggaatccggtggagccggtgatgaggacgctcttgttccggaagtactccgtgatcttcccttcgtccaatgcgcccgccatctttctttgctcagatttagagagatgcgcaaaccagagaccggtgaagacaaagagtggaggaggaggaggaaggaagaggtgctactaggtgtggtgtgagttgtgtgtgtgtgtgtgcggccagtatttatacacacacaggccaaggccaatgccaatgccaatgccaatgccaatgccaatgccaagggcatcatcacggtgcccgtcaattaagggggctgcgaggcctcttgagtgcacgtaattagctagcgacggcaacattcatgtgtgctttgctttccaaccaaaccgatcagaggagggtctaaattaatagggcggctggaggactgcact

SEQ ID NO: 111 - DNA, 353 bp, Avena sativa
ccaagcagaggtctttgagcattagaagtttccttctcagaatatggtccatctttgcactgaaggtggtaatgccctcaacaagtggaggcatctcagcatcagtgctaccttcacaaggaaatgccgcaaactcatggccatctgcatcagttccatgagtactttcacctgcatcttttgactcatacaaagcatactgctcactaccattcatcttatccacagctgtgtcaatttcctcctttgtgctaccttctatgatatcatgttctgatgttgaacgaaattcctcagaaacttgcatcttcttggcctcgcagacagagattgagttgttctcgtcctctgca

SEQ ID NO: 112 - DNA, 430 bp, Avena sativa
agtgcagctttaatttgtttccttgcatatagcggtgtcagttagtagtactccaataaaacttgcgccattaatttgggatgaagattgcatgcagcagttatacccagcacaatttgggccactaaaatgcggatgcagggacggcatattcctctctgggttaaactgctaagtgcatactatacatcaattagattaatatcggtggttagatcagatcaattggtgtaaacaagcggtgttgatttgtctgtgtagaatgagcggagtgtccctaggaaaactaatgtttgcttgtttaatagtagcggtgataatagtagtggtgataataggaatgttgcctacacaaagaaattatttggcccacaggaacgatataggtccttttttcaagaacacacgagcaccaatgatatttgtagat

SEQ ID NO: 113 - DNA, 301 bp, Avena sativa
ttttctgcatggctttgcctgccttcaaacgataaatctaagccaaagaggtgtatgagaattgaccactatccttatcatctttgaagatgtataccaaaagatttctcaacatgattcaaatgtttatagacgaagtcatggaccaagtcacctggattgaagaattctatggtgagtctggcaggggcaactggcctgtcagctgagcagtgaaaaaagctaataatagctgtggagctggtagctagaccttccattatatttatggatgagccaaccacagacttggatgcccgtg

SEQ ID NO: 114 - DNA, 405 bp, Avena sativa
ctttgggaacgaaaacttcaactaaatcaatgaaagtgcatgttactattggttcagtatcatatctgatggtagcacccattcgttcctccattcaaaatttgctcctaagttatctggagttcaaattatgtcacctatgactgtgaagctagtagatggcaattccatccaatgtaacatgcacatacctgcttgctcttggaattatggagatgaacaatttcagtcacacttcaggcttctctctttggcacattatgatggaattcttggtctggattggctagcatcattggggcccatgggggttgattgggggaagaagtggatgacagttcatcataagggacattctgtgacttttggggggattccacagccagaactgggttgttttgcact

SEQ ID NO: 115 - DNA, 336 bp, Avena sativa
tatgtactttctgctggctgataaatttgactgtactagattctgactgtgatggtagatatcttttgcgacagagaacccctgacaccacttacttgcagtctgcaacttttatgttgtaccgtctgatgatgtcgtatctccttttgcctttgtgccatttgacatagtaacaactagacctcattatgccctgcaaggttttaaagactctttaacaagccctgctgttggatacctaccactaagtataaacttgacttcagtgtattcaaattttcctgctagagaaagtacaaatttaaaattctagtaacaagccttgctgttggatac

SEQ ID NO: 116 - DNA, 378 bp, Avena sativa
ttcatgttcacctacctcttcttccccgggtgagtcaccgagttgcattttcacagccagctagctgctgctcactgataaacagggataatcatggcaaactcggtatgttaattagggaatctatattggttgtatatgtataaatagttcgcataaagcattggtaataccgacgtaccgtaatctgttcagagatttggtacgggcttcagttgagaatttggtgtgacagtatcctcctcgtagctagacacatctccatagaaaagcaaagaacatgttccaatttatcgccgtatggcctaatatcatcactatagataagtagttttatactcttcaaaagatcatcaactgaattcagttttcatggat

SEQ ID NO: 117 - DNA, 325 bp, Avena sativa
gcttacatgtagaaatcttttctctcttctctcacatgcacatgggggttaggactgagcagtgacatcaattttttagccggctaccctccacacagcccccaaaggcattagtcggatgttaaatggggaggagtggagatgcttttatgcaccattgcattaacaaaaatggtatggatattatttatttaaaggtaccactgacttgattaacacttcttttgtaacataagacatcaacttctcactccaccctacccttgcacctgccccttgacctttcagcaacatgatcaaactgacgatctgcaaggagaccatg

SEQ ID NO: 118 - DNA, 593 bp, Avena sativa
gagagctcccggtggcggtcggtataggagatgcaggagctctcccggcggaggtctgactccaatatttggatttttagtcaatggttccaagtttatgactgaaagaggaaatccattattcagaaactgcataaggattgtaaaagaagacgatttttgatttccgttacacagttttatggagaatggcattatctacccatgatagaaaagtgatacagtttgcataaatagatatgttgatatatgaagtctcactgaaagttgaccgactctgtatgttcacaggttcacgtatctctgaatttgatgaattttgctaaaactcccaactaatcgtgcaccctatatactgcctattccaaccgtactgattggtatgcctgaggatgtcacggggatcgtcgtggtggactccgatagtccagcgatcagtactcatcttgcaaggtcgtgcacaaaaacttgctaggaaagaggcgcttagaggcagaggctgcaagtgtcagttatcgtggtgctgaactcaaaaaaggacaacagagatttctacacgaatcagatcccgggcgtagatgaacgctagaggc

SEQ ID NO: 119 - DNA, 427 bp, Avena sativa
attggagtgtgccctggaaggagaggacagtgacacacccaggggcctttgtctatgaaaactacggcggccgggagggctgtccagatggaaactacggctcggcgtcagcttgctcgcatttgcttactccgtaaggaatcaaacctgcgtgattctgaaacttttttctttaatttgtcccctgattctccactgcatcatcggaaattcagaatgacaaagcagcagtactaactgtcagaggttgatgatagaatagcaggagtatatatagtagttgactgagatccaagattgcatcttgtaaactaatttcattacttaatccctgaagccctgaaacctccgatctggtaacgtgttcctgttctgcttgttggcatgcatgcagcgttttaggtaggatcctgctggttggaggtct

SEQ ID NO: 120 - DNA, 335 bp, Avena sativa
ctgctggattccactgaataatgcgccctgctcctcaatactcttgtaaattttagtccgtgaccgctgaaccatgcctggtgatgttgctgtagcatgtaggaaattgattaacaacgaatagagcccatgagcttgatggcaggtttatctggatgatcctcaatttgctggaccaggtagtctcgcttgaggtcgtcgctgtaagaacccatgagccggacttccttgagatcttttatatgctctagtccagaaagatgcgccacagcctatgacctagcggtactagagattctgcaatagcgaaccttgagcaagtagtactagagctt

SEQ ID NO: 121 - DNA, 296 bp, Avena sativa
aaaaattcagaaatcacaactcattacatcactcacctcccacggagtttgcaggtgatgcagtatacatggaacagtacaatattactagcagttaggatgtgaatgttatgcggttctttgaactccttttctttataaatggttgatgtgaatgtcttgtccttttcttgaatgatgatgttacctaaataatgatttagtttctccacctcctttagagagtctgtagcatttctaaagaagctatcatgtaataactccctaaaattgttgttctcattttgatgcgcatg

SEQ ID NO: 122 - DNA, 307 bp, Avena sativa
tattaatcatactttcattccatatcgcatcattcaaacaactattcagattaggagccagaaagaagcacaaggagcgagaaggcataccttggggcgcgtccaattcttgtgtgagaatgcgaaggcggtgaggacgcggatgccccacctgcgggagagcaactctgactgtacttgtaaagtcacaaactgtaaaccacgttgacagcccaccgaaaaccgattttacggtcctaaaatgcctgtcgtccgccgtgcgagatcccagcccctgcttgcagcgaccacaaagtgttacagcgac

SEQ ID NO: 123 - DNA, 531 bp, Avena sativa
tcaagctgggtatttctgtaatgtacaggtaattgttcatgccctcacatatcctgatcctatcatctccactgaaattaccttttgttcttctggatcactacctccagatggatccagtgcaggaagtgcgccaacaccaacggtggtctaacaggaaggagtatattacaaggtcatcatccccaactagatttggtcatgctcaagcaagctaggtaagttcctagcttttgtggtcatgctcaagcaagctaggaaggagtagattacaacgcatgcatgctcagtccatggctacattactacatacccacattgtccattgtatatggatataagttgacttgcaatcaatcactagtctttcttgtttgtcgttttaaaagcaaacatgcactggttaaccgagtattttcaccagggtttaatttaggatgatgtccatgctactgcccaatatgcgccattggtatttggcatttagtcaaaaaccacgatgccctagtctatatcaacaacacaaggcta

SEQ ID NO: 124 - DNA, 304 bp, Avena sativa
attcccaaactggtgcctcggcaaattccttcataatacaaacgtttgaccaaaacaatgtcagctttttataacaaattataataatggaacaactaactttgagcttatggtgcaggttttgcaacaatgaaggcacagctgaacaatccaacgaacgatgttgcactcttattgctctgaaaatgaatcttacagtttaagtaagcaaccttactttcttgtagaagctgcatagcatacacactttcagaattcacaagctcttctagcaaaaggtaccctaagggcacgtacattataa

SEQ ID NO: 125 - DNA, 268 bp, Avena sativa
actgttaacgatgtgttggttggagtcacgtacgctgctctatcgcgctattacttccggagctcaggtgatctactggcaagctaatagcgttgtctttaaatagggcatcccatattttcctccagaacgagagctgattctgtttagctgaataggatagtgagttcgctgcttgttcccctcatttttattaggtgacagcgacattggcaaggagctacgtttgcgatccatacttcttgttaatttaaggccaaccacaagc

SEQ ID NO: 126 - DNA, 474 bp, Avena sativa
aaatactctgtaaaatataccgtgaagactactactccagtgtgaagtcgtttagccatataagcacctcattcctctttggatcatgaaaaaaaaaacgaagtttctagtaatggaatcaagaaagaaaaagaaagtgtttctagtaatggttgaaagtacaattaaaggtcgtggcatcttcttggaaagatcagcatctaggaaggatgcataagctacgcaatttgctacacttgttttcctaaggcgacacaaaatttcacatctcagcttaactaaaaaggcacagggcaaaaggaaacataccatcacaaagctctttgtcctaggatcattgtaccgcgcaagcaaacagccctgttgaggcttcaacccgtctttgagtagctgggagcgtagctccttctctttcttgaccacaatttcctcttctggtcgcccactgaattttttcactgcacttgatccatc

SEQ ID NO: 127 - DNA, 569 bp, Avena sativa
tagctacaaatctcaataattacaacacccatctctgtaactcaacatcttcacacacacaaaaaggaaaactgtaacaacaaggcatgcacaagaggccttctctgtcttatgtactgtgtttatgttcacttcgttctccccttttttatcatctccaccttcgcatacactttcttcgtacataattttggtattccattgttatggcgtaacgggattacgaacacgtataatccatgtatatgtgtcgctttccagtagagaacactagttgtttgccagaaatcaccatgacagagccaccatctcctggcatttggttccctttggccgccacgtcgtccgggccttcacgatgacaggtcctgattccagtctcagcagatgctcacagtgcaaggttgtttccccagactcgtcggtgcaatcagtgtacacggtggtgtgtgactccagaacattgtctcggccacactctctcttgtaatccagaacaatgcccgacagttcatgattctccagaatggaaattggtgcactctgagaggggaaaaaatagggttaag

SEQ ID NO: 128 - DNA, 398 bp, Avena sativa
ttttgccacacatgacaaatacaagtctgacaaaacacttaattttgagaaataaaatagaagtggcaggaagcgcacaagagctcgctaatccccaatattctagacttcaagctttattatttagtcttcaaacttcatcatccagcccttgagaactacaaccaccaatacaaacatcaggaatataatatattgaagatacgtcatacatgcagatctggacattaattctgatagtttagcttaagctcaccaaaagtttagcactgggctttgtagcggagctggacttgcatattatcgctgaattttgtgagaattgcgcttgcaaagatgatagtgattccgcaaagcagatgtaccattcataaccggatgagcagggatgtcctttt

SEQ ID NO: 129 - DNA, 541 bp, Avena sativa
gttgcaacctatcaccagaatttgtatttctagaatattgattaggtcagtccccactccacctaaacaacaaaaccatggaagccttagggttaattcaaaacaggtgttgcatcttcattagcaccagaatttctgaatctctagtcatcttcaccttttccttgaatttacttgtgtaccattgatacatacagattggccataccctaaactacaaatcaatttctgcaactcttgctgtcttgaccaaatcagaaacatgataatttttgcaagaatgcccttctccacttttgggttcatgtggtgaacaattatctttttttactttcaattttctcacaaattgttaaaagaaataattcttccaaagtattttgcataattagctggatcaaaagtctgcaatttattgaatcatagaagggaggagacagaaactataccttggctgcagcccaggggcggtgaagaccgggcgaggtcagggtgtagcagggacggtgaaggcagggcgaggccttcggcgtagatgttg

SEQ ID NO: 130 - DNA, 319 bp, Avena sativa
cacgggcatccaagccagtggttggctcatccataaatataatggaaggactagctaccagctccacagctattgttagtctttttcgctgctcagctgacaggccagttgctcctgccaggcccaccatggaattcttcaatccagttaattctaccaggtccatgacttcttctataaacatctgaaacatgttggacagaaatcttgtgagatgttttggtatatattaacatcaaagatgataaagatagtgatcagctcatacatctctctggtgagatttaacgtttgaaggcaggcgaagccatgcagaaaa

SEQ ID NO: 131 - DNA, 359 bp, Avena sativa
accaaaatgctggataaactagcgccctgtgctatccataatccataacattagaagttgtaaatcattcatttcagggcataataagtgaggctatttgcatacttcctctatcccggtttaaaggacacatattggaaatcatgcaatcccaaaacacccccaccttctaggcacataagcatttaattttagagaaagagccaatcggaggagtaattagacccaaattagccccaatcaaaagacgcctagggcccagagatttgctatatgtgccctttaaaccgggacggagggagtagtagttaaatttgtgtgtatgtgaaatgtggattatccttcatggtgcacccatc

SEQ ID NO: 132 - DNA, 342 bp, Avena sativa
ttcctaattctctgctatagccctgactacagtacacatggatctgagaattaggacctgcgctgcacaagttgaaacttttaggacctgcgcagcacaagttgaacttttaggacctgcatacagttccgtccaaacttttaggaccttcggtgcattttactctaaataataaatacatatgatttttctattgttgtaacataatatgcttagctaagtcacagataaagattaactggtgtgtaatataaatacaatacaaattaaggccagaacattgtgaggctcggatcaataccaaattagaacagacaataacgatctgtttctccaggagcg

SEQ ID NO: 133 - DNA, 332 bp, Avena sativa
gcgatgacaagcttgtgaaggtttggaagaccggttcgtggcgctgcgtccgcactatgtaagtgctgcttatatttttctcaatgtagctaacacgaagcagacaccaaaaattgcatccttcatttggcacgtattcagtctctaagtcttgttctgttttatggtgtatgttttgtatgagaacccactgcttatctttgatagctgactttaaacaagcaatgagcatagtatttattataaacagtgcagatctatatattattgtgttgccaatactattaaatctttgtgcatggatatgatgtcatttgctaatttttttactt

SEQ ID NO: 134 - DNA, 345 bp, Avena sativa
gttaacaaaatagtaaagcctcataattgttcatccaccgctgaagtgatctcaagcatggcagaccaagcatgggtggcagaaaaggcaattggcatacttcagactgaacgaaacattggtgccggtgagctgcaacaaaagttaaaagatgagtacgatgttactactgggtatcacactgtttggagggccaaagaaagggccatggataaattatatggtacctggggacaaagcttccaaaatctattgaacttcaaagctgagattcagaagagatctccgggtagcatcgtagaggttgatgtgaagagtgaaggaggtaaagcatatttctgcact

SEQ ID NO: 135 - DNA, 266 bp, Avena sativa
gcagtaagaagtaataattatttgcatgttgactaatattaaacattgattgtcttgttgcatgagaagagacgatcagaagacatgtaaaattgatcatggtagggggcccttaccaacacggaaactagctcagttgtggatgttaaaagattcttggcctggctatttgtttggattctaagagataagaagagtaaccatccaaagcgataatgttcagaagcatgttgcgcatttgattctgaagaattatctgcactgga

SEQ ID NO: 136 - DNA, 609 bp, Avena sativa
aggaaaaaagctatcagaaagcataatcagtgagaagcttgctgcttgtgtgagcatagtgcctggtaggaacacagttctatctctttgtttattctgtgcagctatagacatccaaatttagcatactcttgtcaattgaccatcatctacagcagttttcagctctcaaagatcataatctcttccagtttcatcaatggaacaggatgaccattaaacatttcagttctccaaaatgtgacacgggtaatcatgtagttgtttatgtaagcatcatttggcctgtcaggggcagcatcattaccactgttgaactaaatttgatgaaaaggattcagttgacgacattgtggggtaacaaatgaaaataaaaggccaaagggagctatcttaagaatcatgggagtagggaatagggatgatatactagagatggagtataaacttgatagcacaaccctacttggtcgctgacaaaaaaacatttttatgaaagaaacacaactccaacttgtggtagctgaggttcaaaatagtcattgtttggcattctagttgaattaactgaatatatgaccttcatctagatcttcaagatcccttcaa

SEQ ID NO: 137 - DNA, 228 bp, Avena sativa
tgcaggcttgatcttctagcagagcagctacccagttttgaagaagtgcagtctggccaggcaaccttagggtcatggaaggaacaatatcagaagtaagctattcttagattctttcccagtctccttgctttgcatttagtttctgtaccaattgattccgtgtttgcaggttgcgggcgagcctcaggagtgctaatttacaagcaaaagcaaatattaagaaag

SEQ ID NO: 138 - DNA, 419 bp, Avena sativa
tccccctagaggcggagtgccagcgacaacggccactctcacacacgtagggaacgacgccaagttttgccttgtggagtgtgtgttgcgcgatggggatcatgcttttggtcgtgatggttgtactctccacatcaccacgtttggcctcaagtactctcataagggagagctgcaaaccatggaccgtgtcactaactcatatacagtgtcaaagcatgcccccttgttttctcccgtggcgttctggatgtaggaactacctctttgtatgcaatatgcatactacgtccgtccagtactctggtctctggatgtaaattatatgtgatttctggcaataacatgcttgcttctccggtcaattgtgtagaacctgcttttttcttatatgtcagttatgggaaatgcaaagatgc

SEQ ID NO: 139 - DNA, 381 bp, Avena sativa
gcaccagccgtgccagaatgctcacttcttttcaggtatggtctatggtgtcaaccatctcaaccgtcaacaaatattgcaatatgccttcaaatccttgactcccaaatttctgttttgccaagtgaatgctgaatatcctgccaattgcaggtttcttctgagtggcactctactggacattgtggaattgtggtgtaagcatgcggccagcggtgtaagcatgcggccagcatagatagagtatctccgtccgtttcatgttgttgcagtgcagtgtagtgcaaatcttctgccatcacctagaccagtgcatgttgttgacctaaatacgctgattaaaccatgtaatgtttaagcgtatcagtttcatctgcactg

SEQ ID NO: 140 - DNA, 330 bp, Avena sativa
cttcgccatgatcacctgctcgcccgacttcttcgtcaccggcctgtaataacgcacaatcttgtcccactgtctgctactctctctagtctgtaatatgcatcttctaattcggatgctccacaccacagcgaggctccaagccagaacctctcgggcctgctcgccccgaccatagccaacctgaccagcctggagaccgtgtgagtgtctcccccttctttcacaaatcccacggattaccctttccactgcaacttatttgttcattcattcagagtttcccattttcatttctgattttggtatcattcccttgggtgcagtctt

SEQ ID NO: 141 - DNA, 572 bp, Avena sativa
gccagactggttacaagaagtcctaaattcttataccactgacactacagctactactctattacaagaactagctgtgcattctccaaatgcaaaaggttagtacttggaacaaggattgattacatacaaaggcaggttagttattggtgacaatctagcactggaaactaaaattattgcctctttggtctttgcatgatagtgttgtgggtggacactctggaatacaggctacttaccagagatggatccagtgcagattagagaactgtaaaaggtgcagaggactaataaaaatatggccacatgcagcatagagaaataagaccacaaagttcagatataagagaactcactctcatgggagtctgaacagctaaccgctcaagtatcatgttctcaacaaaagtgtctaatgtttctgcattcacaactgaatcttgctcttgttgggagaacaacaatgaattcctcaaattccaggggtgtccagaattcacactggaaacgaaacatgcaagatccagatgaaagcataaaagatcacacaagtactcctcgcaggatgt

SEQ ID NO: 142 - DNA, 338 bp, Avena sativa
gatggatcaagtgcagctacttagaccgagacaggccaaggcagatcaaaaactgcgattccatatgatgtacatccactagccattgatttgggggaagatttgtgatatcttcataaaaacatccatgacctagcatcagagacatcccagagaaagagaaaccaggtgagtcagatcataaagttaccatgtgagcagatgacactggttaataaaattaaaatatacctcttcgtcattttggtattttacaatattcagagggttctgggagcactgcatcaaaaaattccatgtcagaataattaaataactagggataacttgataaatca

SEQ ID NO: 143 - DNA, 319 bp, Avena sativa
gatggatcccagtgcagctcttgaaattacagttacattcagcgtaatgtcctactcgtatccataagcagattaaaatcttattatgttgataaaattccaaaaaaatattgactatgtattcgtagacaccattattctcacgagtagagatattgtgtttaaaccagtgtgatgtcacttcatctaaggaaccattttgttgcttaatacaagtttctgattgaatcattgaatatatctaacaaaataaccatgcagctatgctcacaaggcattccattaccttgggaaaaattacccactaccaaacttaata

SEQ ID NO: 144 - DNA, 322 bp, Avena sativa
gtttcctaatattatgctggcttgctaataatcactctataagttctgtatgaacaggttataaatttggccacggtgaataacatattcaaggtagatacttgcaagatttcattgattatgaaacacatacacctacgatggaacacctcaaaacctcggaagccccatacaccaataggaaggcatagcatagaagtattccaagaaccaagctaaaacatctttggctataaccattagagttcatattgcagtatcctcacaagaggtagcacatccctgatattcctataaattaaattgaatacaaaggcccatc

SEQ ID NO: 145 - DNA, 311 bp, Avena sativa
cccagcaacgagcgcgtcagacactttctgctcatcagcggcagacgtaacagcatctttcactcgcccttccgctgaactcgcttctgccctctcctccttaagctcacgctccagttcggccgcgcccaaggcggactgagccactgtcaagtcacccaccgggacaaggcctcggcgggcctccttcaactcggctgcaaccgcttgaagctccttgtttgtatcctggacgacaatgagctccttctccaagcgagacttcgcagcaagccggtcggccaattcatgttgcagaccctgcgcacaaa

SEQ ID NO: 146 - DNA, 558 bp, Avena sativa
gggatagtttattagctttgatgacaccgtaatgttggcctcttggtcacagccgagccacctgtactgaaatgtctgaaatgtatttcctttcactgtatccctcaccctgtcacccaggcagaaccaacaggatggctccactaatgactctggatctgactcctgttcattaaatcgctatgctaagtccatatctcaaagtgctaacaaacggccctaattacatcctcgcctcgcatcatgatcagcaaaaccttgcaaattacgcttgtcccctattcattgagggaactactgtgactaaagcaatactgtaaggtggtgtgcaccgatggatgcttttccagattcctctcatttctaacatatggtgcatactgcatagcacggtccacttccatgctttgttcattagttatcactatctctcccgaatataatctatcttcactccctagcaaattgagggaaatagctacaacagaagtttataagaggtggtgcatctgctcatttataagagatggtcatcgtttgatgtgtgaaggttgttgg

SEQ ID NO: 147 - DNA, 563 bp, Avena sativa
atgtctgtagatctgaaacgaggagagactctgccaattcacataaatgtatcatttccttctttaccatgtgaaggtcagttattgattcagtatatatccagtataagtctgatacaaggttccatttgaacattgttttacacatggttcatgattttgatatatatttcattgtctcctgttgtcattcagtcttgagtgtggatgcaattgacatgtctggcaaacatgaggttgacttgcatacaaatatttggaaggtaactaccatctgatgttaaaagtttgttacttttaatgcatgcaagtcaatataatatcaggtccatgtatgctctgatctgactgtagctgcactaacaaattattatctactctgttccataatttttgccatggttatagttcaaatctgagctaaaaccatgacaagaattatggaacggagggagtatgttgcttgtgttggagaaacattacgtaaattcgcatccctaccatccatgatgcatgcctatatcctagatttttggccagttgttttcttagattagtgtagg

SEQ ID NO: 148 - DNA, 484 bp, Avena sativa
caggtccgtcctcctgatctggcgggacgagctgctttggtggagtcgtagacgtgacacatgcctgagacaactcgtgaaagaaagtcaattattttccgtctcgtactggttttgacattacgtgatgcttgcacttgtagcttcactttttttgggtagattgaaactcttgcacggaaattctcatgcgtcttagacttgatcgcaacaagatcagacgtagggctttcctccgactgctactcttttctaagaaaattgaaaaatcacatgaattagtactttttgtgacgtgctgcttcagatcacctttttctctctatttttttcttgagcttcatggagtaacaagaccagacgtggcactttccttcttgttcaaactgattagaaatagcctgttgcgtactcgccacggattccatgaagctcctaattcgcatgcttggccgcgatgaagatgaagtagaccatggcggtg

SEQ ID NO: 149 - DNA, 532 bp, Avena sativa
ggcgaccgccaacggaaacgcctagaccggccaagggaaaggcgcgggttgcaaaggctgcccgcgcgagactggacacgatggaagccatagcctagggcgaagggtttgtgcgcggcggcggaggcggttgttacctaggagaaaacctttatacatagagcaaagggtctcttgaggccgttggatcgctctcgccttgtatctccttcccctaaaactagttgaaccacgcaataacccacctaataaccccgctctgcctgccggacactgctggcttggcacggcgtacataaagcagcaggcgcatgccttccatcgccaggacgccagtctggactgaaactcacttgcttgcttggtggtcagttagttgcccttgttccaaaggcaaatctgttgaatgatactacccctgatcattaggtgaacacaatatgtttgtcaggaaagtatgctgatgttgtcatatggtatacgaaactgaagaagaaggatttcatgcagtttatcagtctcaaggcaaacg

SEQ ID NO: 150 - DNA, 395 bp, Avena sativa
tgcaggttctgatgctggggacctggacaacagtgatgatgatgatgacaatgatgagattgcacatgtgtattcacgtgaggatgactgctatcatagtccaatttatggtggccatggtattcttcacagcctctccaatgtgataacaatgaacttgtcagcacattatggggaggtacatttcacgccgctgatactatcgccttctcgtttttgtatgctttctacagtgtatgattatgtgcagtgggaaggggttactggcgtaggcgcgtagctagagctttatcttgaaatctgcatgtagaactttttggtatttcttctggtggtgaatttcttaattaagtcattatgaatcagtaggagtttccagcttatgcgcgccgcac

SEQ ID NO: 151 - DNA, 371 bp, Avena sativa
atcctatctgcttgacagatttctgaaagtctgaatgctgttagcctgagtattacttacacatgtttttatcacgtttatatcgcgacacgataaatgtcgtatgaatcattttaactgtttgctcttatcatcagcataatgggttgcctctgtattaccaaaatgtcacacgtaccattaactatcaactgcatatattccttcgttatcatcggccttttgatcttattatcagcgacgaagcgcacggtcatgctctgttttggaacaggctttctattccggggcttcaccatgtgcgagcacatgctgaaacccactgtcgggtgttcccctgtggcaactcttcaatcatgctgggatcatcg

SEQ ID NO: 152 - DNA, 300 bp, Avena sativa
ataatcttcatctccatatgctaaaattttggatatcccctctagtgggatctgttggatgctcctgcacgaggccttcagctacctccgctgctgctcaggtccggctcacagctgcctctgctcaggtgaagaatctcggtgtaagccaggcagtagggtgctcacatgctttgattggtactgataggtggtagcagtatcttcacgggaaagagagcataggtggttcacatggtctatgccagaaacgctgagaatgcttgtgactcttattgtgttgcaatcaattttgtctcg

SEQ ID NO: 153 - DNA, 337 bp, Avena sativa
tcttttaagaaaatttagtttaccgacttctcttttaaagcatataatgcttgtttagttcaatgtatcatatcatattactgagtttaaatgagtataatgtacagcaagccagaaatatagcagtgtcagcaaaatatgttcttcaaaaaaattgctcttgtaaatacttgcgggtgtaagcaagtactagttcttagtggcgtatatctgttttagtatgagagaatagtgacgtatatctgttttactctccagtctgctgtgtatgagatactgactgctgtgtattgtagatttggaagaatctgctctgcccctagaagaatatccttct

SEQ ID NO: 154 - DNA, 395 bp, Avena sativa
gtgcaggacacgacttgtacaaactactagtatcatcagaacagaattacacttggtacaagtatagtatacctgaatatattttgtgcctcaacagaactcttgtattcagtacaacagcaaaatgctcaagaaaaaaagggtctttaccaggtctgaaagcatccttctaatttgttcatttttccagtggcatgcttgcgatttatatgccttctgtttagagatgcaagtgggatcccaacaaaattccagctatagttcattttgtgatttttaaacatttaacaaaaaaattgaattacaaatcaaaaaatgaacaaccagtgggatttcggtgggatcccacttgacaccttacttctgttgatgaactttctccacactaccaaaaa

SEQ ID NO: 155 - DNA, 559 bp, Avena sativa
gaggttggtgaacaatgggatccagtgataaatcttggatgctggtgcttgtggttgtcccagtgcttcaaggagtattttatagatcctgtaccacagtttgagcactacatgatgtttttcagcttgcttgagcagtgggaatttcctagatattcaagtaagactaatcctgggatgtatgcgctcatgaaggtgcaacacttggataacaggttaagaagaccatgggatccgggaaaacaagaggttgtgatagatggcttatttggtttgaaactccatgcagaaacatacatcagtcagtgcaattttgctgttgttaccagatcaaggaaggatgctaaagcaaagcaattaaccactaatattttgttggataagatgccagcttgggaacgaagtggtttcagccctggattgcagccacacttggggataacaccatcaagtagaaggcaggtaagtccagattgtctgcccattattattgcaaggtttgccagatgttcagttgaacggttggcgttgtacaagtgcatttggaatgttcagaagg

SEQ ID NO: 156 - DNA, 458 bp, Avena sativa
actgattttcacccgcttgtctggatctcctcttcaaccttgccttggtcctcctccttcatattttcatcgccccaggttcggatttccactgtggggtggttcagaagcagagtagctgtattcctgatggcatcctctgatgcctccacctcccgaaccgtggcaccagtgcaaatgatcttggcgataatatgtgtaacagaagtgaggtgctggatgccaaaatcaagatccctgccagcatctaatggaacctccagcttttcaaggctgggcatggccccagcttcaaacatcaggcctttccggttgctccagcaggtgaagcggagctccttcgggcacatgaacatgttgctgcttatgaagagtctttgtttgggagcagctgattctgatgacaaccagagaaacagcaaagcaggtagcgctccaaggatctcaaatgtgtcctc

SEQ ID NO: 157 - DNA, 447 bp, Avena sativa
gaaacaagcagggcacatgatcttgagctattggcaaaactatggaaaatgccaagactagataatagacggtgcgcacagtaaacctgaattcatcaggagtttctacatttgttagttgattcttcaaagcagaaaacctgtagagttaactcggagttggtatacaagccttgggcatttatatacatataaataccatgataaatggttgagcagtcaataaaacagaaacaaaggtagttccacgaaccatattcccttttgttgaataatggtcaagacagaatcatcctttacaacaattccttggcccatttgttgggtgccagtcttttgcaggacaaagatagcaacgatattaggtgcgatccgtccaaggacattgtttggtgaaaacaccaaaacaatcaccttaggtcatttcctacattctgagaagtagag

SEQ ID NO: 158 - DNA, 311 bp, Avena sativa
cctaacagaattagtagaacctcaagtttgcttatctgtaataaacaagcaccaagtgatcatagtgcaacagcagaataaatataataataaacaattaacagtacccacaatatgtactatggagtcaaagtggatcaattccgaggatctctagaaaagaaatgactcatgtgtcagcaaacactggagtcctaaataactcgtttggtaagtctagttacaaacttacaaatttccgaacaccctgtatgcttgaaagatctaatgaaaaaaatatttgtttgtattgtgcaaactgcaatgcattc

SEQ ID NO: 159 - DNA, 535 bp, Avena sativa
gccggcaggcaggccggcgtcgctttgtcgtgtccgtctcgtcttgtcccgatatgctgacggtcgttttcagcctttttcttctactagaaaataagcccgtgtgttgcaacggcagcctgtggacctgattgtattccgatcaaaaagagtcaagagttagatcaaaataacatcctcatgaccctggtccatccccaaaacccatctaacatatgcatattctgcactggatccatcgatggatccagtgcagcttgatggtagagtacaacatatagcacgaggaggaacctgagtcatcaccactgtacatatatttagtaattctaaaccgaactttcatgttcatacaatcattcataccatggccggacatgcttccagatttatttggagtattaagatgtatataaatacacgtacggggtgatattactatcggttctgtataatccagtaacttgtactactaggaggtgtgcatcaaggctgattgagcaacatatccttccattgctggtggagcaggggt

SEQ ID NO: 160 - DNA, 238 bp, Avena sativa
gatggtccagtgcaggaggttgcccagcacggggagctgcttcggagggccaggagcgtgtcttgctccctcccgcgtccctgccttactgctcctccacaagagcaagtagagcagaggaaggagaagcagtgcagatatgaatgcgaggagaggccatggcgacgggttgggaagagaagaggcagccatggagtgactggagttgataaggcactgaggacggccaccaggggga

SEQ ID NO: 161 - DNA, 310 bp, Avena sativa
gagaaagttagttaaagtacaactctctctctctctctctctctaaccctgagtccttcatgatactcttctttacacatttaaaatttattttcaggatccagtgcagagctcaaccttttgcaatgaaaacatatgcacaatatgtatctgtaccatgaaacgactaatctcaagtaggagattagcctgaaaagcaatttatattgagtgggatactatgaactaaatgtgcatacccctaaaacaaccttctccttcttaatgaccatatcttgtatgtcagctactacagttcatgggattcctc

SEQ ID NO: 162 - DNA, 235 bp, Avena sativa
agtgcagatcatacttcttgattcgtatgataatgctagtggctaaagatgattcattggatcatccaaaaaagttttttttgtcaacgtgtaacatggaagtggtctgctttggtacatgcactgttccatttctacctgctcttactgtctatgaatatctgtggtttactactttacttcatgcaaaattcaacaaaggcaagttcagagaaagcatactagtgtagtttgt

SEQ ID NO: 163 - DNA, 317 bp, Avena sativa
tcacatagttttctttctgtttttaggtacagtgatacccaaatgaaagcatactgctttctctttgatcttagtttctttgtaattcggttaaaattctcactgttttcttttcttctcagatgttacagaaatgaagccaaaatagatatgagatactttgcaggagagatctttgatggttttcggcttgtggcaactcaagcaatgaaaggtccttttctgtcatgctttagttcgtgtcttggaattatctccttccatcacttaagtacgcaagtttgtacttcccagtaagtcatttgaacatttgtgcg

SEQ ID NO: 164 - DNA, 384 bp, Avena sativa
cagctccgacaactcgtcaacaacatcaacctgtagctcgtcgttgtccttgacattctccctaagtcaggaagagggcaccaaccttttgctagtcggtgccgtcatcgccttgctctagttcagccacatctcaaataatagaggaaatagattagtctagtattaatataaatagtagcagaaattgcattatgagaaacacaaagcaccaatgcaatatctacatatatggaagtccaggataaatttcataagcatacaatcaagacagggtagaagcatgattgagaatgtgacatagaagatcacggtacaggttttaccaagtatagctgagtatagggcataataacaagaaatgcaagcagtttggacacgtga

SEQ ID NO: 165 - DNA, 372 bp, Avena sativa
aagaaatgcttgctcgctgaaagaaagaaacaatggcactacaacgatcctaaaacttcacctatcagattcaaccgccaccaagaaaccagtcacccaaagaaggaagagatctttgtttcacagtacactaatcatgattttaattgttgcagttgcagggcaggacagcaggagctgaaccaagcccttcaccagcagacagctgacccttttccataaaaaaaagttattttcaatgattcatgtcctgcaaaacaaaaatttgtatgtttttcttagagattaagttttttatttttgatcattttagcaatctcacctagtatagctttgtatgtgcttccatgaaaacattcaatcacacgtgca

SEQ ID NO: 166 - DNA, 527 bp, Avena sativa
caagttgcagatgagagagtgcaaggagtatcatcagtaacagcattgttcatcaagatgatagatgcaaaacaatgtaaaaattgagccattagaggaatccaaaattcttaacagaaaatgtgtgtgggtggttatcacctaatctctgttaggattggtgttcagacactaaatgcctaaatggttgaactactcaaagctgaactgagttgttgttcaagtcaacttctcagttaaacgggagcagattcaaatcaaaactaccgtataactaatctaactcttagatagcgtatcagtgtgttggtatcctgtcagctagttactgtcaggattaccaatactgaacttgcaacaagctgcttgctacagctacatatccttaaacatgtcttttcccgctattttctttatgatatttattaacgttccagttttaccactagagatagtagagaagggaaaaacactagttagagccgaataagcagcaagtaatagcaagctgacaaaaataacatata

SEQ ID NO: 167 - DNA, 520 bp, Avena sativa
cgtcagccacagtatccagcacggttttatctaaatcaagagcttctgcctagtaaaagagcatatcttatgaatctccgtgggaaaaataatatgaatgattacttctcaaataatgcagggctggtgggattttgcagtttattcaatagtactgtggccaagtgcctagccagatttagtatattacttgaacaaacttgagaaccatatatttgagaaattatgtacgacaataaaaaaatcatcataaaagtagagaacatctatttgagaaacgttgtgttacctgattctgctcaaaatagtttggcagcacattatgctccccaagaatcacttcaccttcttgtggtttctccattcccaaagcaagtttcagtaatgtgctctttccacatccattggggccaatgatggctatttttctcctctctcaactatcaggttagcattgttgaacaatgtctggacataatatcaaaacaataaggaaacttaataagtgttaaaatacaga

SEQ ID NO: 168 - DNA, 352 bp, Avena sativa
agtgcagtaggttttgcagccactccaaaaatgccgctgagcgctgcccctccctctacaccatggccgcgagccaccagggccccgccgtggggacgacgaggtgaggaggaaggcaggatggcatggaggctaggatttttctcccccggtcacccttggagggaggcgacgagagcgaaacacgatgggggatgctattggtaaaattgatgtgccctatgattgtcaaagagagagagagttatgaagccctagaatattacacctatagataacattctttggtggcgagcagcagtgccactacctgcttttatgtctctcccagaagtggtgaaggcgtggaatt

SEQ ID NO: 169 - DNA, 309 bp, Avena sativa
ataccaaccaggcacagtcatatatggttcatataaatggggttgcaaatgctaatggtactgcaaacaacacaatggttacccctgtgttgcatactcctccagcggcaactacacaggaatctggtaagaagaaaagggggaggccgagacgtgtgcaagatactactgttccttccgtcgccccagttcatttggttcatgtggatcgtccagttcatttggttcctgcggatcctccagttcatttggttcttgcggatcctccagttcatttggttccagcggatcctccagttcatttggttc

SEQ ID NO: 170 - DNA, 285 bp, Avena sativa
gttgttggtgatgagaggggcatagtggcatggccttcacgtcagcgtcaacgccaactccaagaaataccacatcagcgtcaacgccgttaatctctcattccaacatcacctggattgcttctgtttatcatcgttgcccctggtaaaattactctaggagtaccttgtgccatggcatcaactttattctcttagtcagcatcgcgattgattgattgattgcttctagattggcgtatgaacagttggacgcgtaggggtcacaataacaagcacgacgag

SEQ ID NO: 171 - DNA, 336 bp, Avena sativa
gacattgaggccctcatagcagatatccaggcctttgggttcaagtaccaaccagaaccacaagtgccggtgtccaagcagtggaggcagacagattatgttatcattgacccacaacaaattgccgggagatccagagacagcagcagaagagcatttacttcctccttgtctcacatatttatatttagagtcctgtgctggcatgttgaggggcattctccgtctgcccacctccctcaagacactgagaattgaagacagcagcgggttcacatctctggagtgcctgtcgtcaggccagcccctgttgttggaagacctttgtcttattca

SEQ ID NO: 172 - DNA, 251 bp, Avena sativa
ttcagccgcggatctcaaagttatctgctgtggcttaaacctaaagttgaaggcgtggactaaacaaatcaagatcaagaagaagagaggacaattgttcgttaacatgcatggaaatcgtcacctgcggcgcgaagaagtatggagctggaggaggaagaggaggaggctcccacatcacgacatccgccggagcgacggcctcagcagagctatcccaaccaaacaactagactagacaagcaccgccg

SEQ ID NO: 173 - DNA, 247 bp, Avena sativa
gttgtttctttatttccccttctccagccattggttgctgttttgggttgggatattctgaagggtaagacagcactgcggagaaaactaatgcagttgttctggacaagcaaatcccaagctctacgactacaagaatattcacattatcgtacgcagacagacgaggtactttctttgctcttgaatcatcttgcttctgtggtaccgtttagcaaaaaaatgtgaatggttttgacttctccat

SEQ ID NO: 174 - DNA, 541 bp, Avena sativa
tccagtgcagaagaggaacagaacaccagggttacatatactcctgaaccgaatatggcaggacacgtacatactggatccacaacatcatccatctcgtgaggaatgtagtgagaactcaccagctggttcgtggtcgtttgttagagctggatcccctgttgtcccctgtttgctttatccacacttccctgcgctggtttagtgtttgtctcacctgctttatatatagtttatacacgagtatgatcatacatacaaggaaaagagtaagcggagaatgtggtcggcgcactcactctctctgcgtcctttgggattagcacaatcttggcacttgcacttggcggtgcacctgacctcgttcttcagaacaagaaccagctagcctcagtcaggaggatcagagaagaagcatatctagtttttaagaaacaatacaatatatagatggacaagaataatctatctatgtaagaaagaccatgcatgtagaagtcacaccgaacagcaagaacaacggttggtggcgcatccaatc

SEQ ID NO: 175 - DNA, 305 bp, Avena sativa
aggagctcgtcgtaagcttttctatcacagattttggctgtattattgttctttgcaaagtgatgatgcatgtttaagttttcctgggctactgcctcactgttgaaacttagagaattgaaacaattgtcgtccagtctatacattccactaaatgtttctatatttttgattggtacctggatgcaagttgccctaataggaagtgagatgaattgatgcactccttgttatttgatcacgcagatgtactcctagaaactaatattggttgctgatatgttttacatttatactcaagtctt

SEQ ID NO: 176 - DNA, 264 bp, Avena sativa
aaatgaacatatggttaagtgatgtccttatcatgaccttcaaataatctgacacttcaaactttggctggtaaacctgatagaaaataaataaatagatgtgagaccgagactttacatattcagatgcctgttgacatcaaacatgactattagtaaatcgtacaggttaactgagctccaggcactctccacacgaacagtgacatccctatgaggaagtccatgatgccctaacatgagccctggggtatcaaaaaagca

SEQ ID NO: 177 - DNA, 422 bp, Avena sativa
atttgttacaaactcaaaaatatttatgaaccaatttatgaacaaagaagctccttcaactcccatctattagggctccaatggcacatggaatttgagctccgcgtgagcaacataataatagtagcagtacacccacaatagattggtagaaagttttgtacaacaaccatctacaaaattacgaagatatgcaaacagggggactataaggttcttgcctgattgtactgtgcaagatgttctgatctggaaggtgctctggtcttgatttgtggccctatttcataagaaagattgttgcattaacttcagcatgaaacttgagttgcactaatgacctctttccaagaataacttggaaatatactgtatataacccaaccactaaatcagcaattaacgcattctcggtttcacca

SEQ ID NO: 178 - DNA, 221 bp, Avena sativa
agaggcgggcgaagaacaccaccgagtccgcctcagaggtgctaataccactcatttggttcaccagcatgccgctaagttctagcagtctcatgtcctctggcgaggcagcaaggcagtccatgaagacagaatatgcagtgacatggcaccgcaccaggtgggtaggtctgctcaaaggcgatcaggttgcggaagaggggctcgctgtaggcgcacaa

SEQ ID NO: 179 - DNA, 241 bp, Avena sativa
gccacagtgtatctgtatgtggtccatgcatgcatccactgagccctgaaaacatcacatcagaagcagcagcagcagcagcagcatatatgccctgcttcttctgtctggtgtagcattagcatctgcggtgggcatggcgccctgattgaaccttctgtctcatactgtcatgtatcttctatatatttttccccctctgttagtgttctgtgcattgtgtgctaggataggatcactt

SEQ ID NO: 180 - DNA, 318 bp, Avena sativa
aacgtaggctgagtgctgggctggccaagtggacgctaacataactacatggatattttgttagaaatgacctaatcatcacgataaatgctcagcgggagaagttgagctagccaactcacacacacacctatctcctaatttaggcccgcataaagcttcttaatcaacttaaaacacgggatttaactggttttagtgtgcagctgcaacagaaacaggggacagtactactgctgacagtagtagcttggtccaaccaccaaaccaaacctgacatcggttaggcgtgcacggtctccctgcactgaatccatc

SEQ ID NO: 181 - DNA, 212 bp, Avena sativa
atccatagtctactggttacttgatacgtacgagaaagcctgtattcaccgagacttgttccataagggggctggcataacaagtaacttggtacgtgaacacccactcctcatcttcatatgccctccatgaatatgctttaaagggttccttttgttttttccctccatgaaaatttgtgttatgcactactcatttgagattttgcttc

SEQ ID NO: 182 - DNA, 517 bp, Avena sativa
ttgcaggtgaactcgtgagccggttaatctccttctcaattgagttcatctggaaaattctaaacagttttcacagtcaaactttggtagactagagtgcacatatatatgggataccttgtaaatgtagaagtccaaaggcacacatatgcatagtagtttaacatacatacatttttctatggaattaataataatttcaacatacctagtgtgaattttaaaaacactagttgatttttccatgtcagatgggcagttgccttgtcttcctcacatgtttgtgttaggaacgcaactcatatattccatggggctctggaccaatatgtagcacaagtacatgtattatataaggatacacgttagcgtgtctcacccaccattgaacacatcagagtcaatggtgtacttgtccctggattttatattttgctgagagcctctgcaatggtttagccgtccgtatgtgccggccagcagcttccctcctcaatccccatggaagttgccatat

SEQ ID NO: 183 - DNA, 339 bp, Avena sativa
agtatacaccgtatctaccaaataagcccttcgttatggaggaaacaatggcttctttgatggcatgcagagaattctctcaccacaaaaaagcgcctagggaattctctcaaatattacccctaccttaccttgtgaatacccaaactctcccttacagtttcgtcatttgtccataactcggatagaaagtacgtgccattctgcatcaaccgaatgaagcacaccaattaacaccgtaaaatcagaacgacaaaatgaaagcaacaagaactctgaataaaactaaatacagagaaaaccgagaagaaattcagattaatatatgagatgtttacc

SEQ ID NO: 184 - DNA, 433 bp, Avena sativa
gaccatgatttccatcctggtcttatctgcaataggaacgtgagaaattgcacataaaacaaatatttatatcaatttataccactaaccctttcttgtttgcaggctctgttttttataaggtcgtccttatcacggcaaatatttttcacagttctccatagctccctggtattcttaacctgacaatagggaataaatcaggacttttaggcattattaatatttagagaaataagcagaactcccatacattagtctccttaaagctggaagtgtgaggacttgcttgcttcaaaaacaacatgcatgctgagtatgagccatcggaactttcttcctgagtagaagaaccaattagaccactacacatctattttaaaatactaatccttaccacattgtcagagtttctttcatttccatttctttt

SEQ ID NO: 185 - DNA, 528 bp, Avena sativa
tgttttagctacaaacctacacttcattaagcattactattggtatggaagtgttgttcaagggcctttttatcctcacaactgtgggttcgttaagctggatatgctagttcttccaaaagtatgaattcctttggatccattgacttgtaactaagattcaagtttcaaatctgtttgcctggtgaatgaaaatcaagtagatctattgcctagaataatttatcctgcttactgttgcttctgataatttagttcatatgacaacactaaactgtaaaccccaacgcttttttgttgttgcatttggctggtttttgtattaatcattctacatgagctactgaatcttttcaatatgccatccttttaccatatgcacattaatcatcacttgctcatgggcacatataagcattgattgaatctgccagtgtattacatcttgttgcaatgtaacacacggttcatctgtcctaataacatttgggttctggagagttgaccactgacagtattgtgtttgac

SEQ ID NO: 186 - DNA, 547 bp, Avena sativa
cttgacacgcccaagctacagcaggaactcaaaatacagagcaggaaaagacaaagattcagggactcacaccgcaatcactatgccagctgcgcgccagagccttatatcctcacagatttgttcaaatatatctcctcagcggagtgttgggtgctttcaaacaccttggagttgcgctccttccagatttgccaatgaacaagggtgacgacggcatcaaaattaaccaattgcttatagtagctgctattgcttatagtagctgttaccatatttccgtggagaagggctaccaacagaaaaagaagagatttccaaacaaaatctgtatttggtgaattattttggtacatattcttgtagtatattcattcgggttttttttttttgaatttcagtgatccatatagtacttagtacatgtaaaacacgaaaaagagaacgttccaatgactctgagggtaattaatacaattcctcagtttacagccaattattagtcagctaggttgccaaaaattaacacttagaaaagcagctgttt

SEQ ID NO: 187 - DNA, 230 bp, Avena sativa
acagtgtgggtggagaagacatgagaagttcagagtctctcctgtacgatttgagtaccctcagagatgccaccgacaacttctccgaagaaaataagctcggggaaggagggttcgggccagtctacaaagtacgtgacaccgattaacttggaatatgagaatatcccatccgattaagttctccattcccgagcgagactgaactttggctgttggtcagggcacac

SEQ ID NO: 188 - DNA, 232 bp, Avena sativa
tgcgttgttgggtcaagccaccattgcaccggacacgcaagtacccattgctctcagattcagttggtggggctgcaagtagagagatcgcatttcaggatttcatttttccatcacccatagaatggcgtaagacaggagcagtaacttgtggttctgggaggatagagagagaaacttacgaggccaatatgtgcgtggtgcagaagatgctctccaaccatttgaatct

SEQ ID NO: 189 - DNA, 175 bp, Avena sativa
tgtcatttccaacaaactcggttacagaatattattcgttgttaagatgcaggacagaaagagggctaaaaattaactggtaacctggagtagatcctcaaaatctgttcccaatccggtgaatgatcttgcaatgtacttcacaagccactcggtagtcaccaatagtctctct

SEQ ID NO: 190 - DNA, 329 bp, Avena sativa
ttcatccatgtcagcatggaacctatcaataaaccgagtgctcaagctggttatgtcttccccattcagattcgcctgattggtaatctgcaaaccaattatttggattaagtaccatactgcgtattcttgagcaggagttgtactagactacaggtgccatatttgttggagattttcctctcaagatcaatatgtcacctcatacattgattttcagaacatgccttaaccactataatatgatgttcgggtgttacattcttcattgcaatttgcaagcaacaacttcgtacagtagcacctttttactaatcgtctgttcagat

SEQ ID NO: 191 - DNA, 379 bp, Avena sativa
gcatgtctcttatatcaagtctatccatatctaaaattgaagaatatgtggttgagttgactgcataatttccataaccagtaaaactcgtagggataatagtatgcaattataatttatcaaacttaggaggtgttaaaaccacttaccatttataagatcaagtgtctttcccataagtgagagttaggctttccatagtaaccgaaggcctcatgtaaataggaagaagaaaaaatattgcttgggttatcatatttcaagacccgctggacaaagaaccttgatctttcacaaacaaaatgagatgaggccaatgttgctgtaaaattcgtccattccaaattgagagattggacacttcccacagtgcagatag

SEQ ID NO: 192 - DNA, 273 bp, Avena sativa
gtgctatgtattagtaccatgtaataacaaggagtgaaggttgtaccttagcatagtcagagcttccttctcggcttcaagaaacgatttagcttcagtgacagcttcatgcttgctgctcacatcagaggacaacttttccaggttttgctcatctgccatgacctctagactctccatggccagtctatcatacatgctatcaacttctgatcttaaacacaccagttcctgattcagacactctaaagctttactttcttttagcaagaa

SEQ ID NO: 193 - DNA, 315 bp, Avena sativa
caagagtggtttgcaactaaacatgagcaacaagcatgtgctagtgaacagtgatagtttatctcagtactttgcaagaacaagaattgatggaatgatggaccaatgtcgtactcatacatgcagttcataattacctgaaaataattagaccgaggtaccacttatgataaacaatcaaaaccatagcagcatggagcaacgtcatagcaacacaatcgttgaaaagacggagcacaaagatggagtgaactctctttgataagcacagcaaacccaagcccaccaaggaagctgtcatcatggtcaataagc

SEQ ID NO: 194 - DNA, 443 bp, Avena sativa
atgtttttaatgtagagaactacagtaacaccaactatgatacgctgggcgcatcccaacagcctgtgcaggtaattacttagttaacgattttcttcacttgtgagatgcaatcatttcaacagttgatgattattgtatagcttgaagcaatagcaaagattcgcccttacccttttctgtatagaccttctctgtctcaatagtgttctataatataatatgcaccctccatttcagatatttgctcattattttaggaagatatggttttacagtttttatccactgaggaaatcaagagtgtagttactgtaatatttgctctctactcctactttagtactgtggaagagactaagtagttgtattaagtcatttctgtcggggtatgcatgattatttgtcaattatttttcttagagctggtgctttgttagtta

SEQ ID NO: 195 - DNA, 363 bp, Avena sativa
agcagtgcatgcaccgcgtcctttgcaagtcggtcaagcacgcggcatggtcgtccccccgcgaggacaaacggggatttgcttgaattttaggaatttcttctgtagttttcctaccatcttcactactcgtgccgacctccgtttgtcgcatcttcgttttttccctttctatttagagctgtctgcatctttgctacgcgtatgccagatgcaaaaaaattcatttgttttccccgcaattcttttatttgtctgtatgcatattgatgtgaactttgagtcataataaaaaattctctttatatcaacaacaaaatcgtcatttttgtactaaaaacacaaacgaagtaattaacaagt

SEQ ID NO: 196 - DNA, 576 bp, Avena sativa
cagtgcagtctatacatattccgttatgtcagctgtactgtctgggtttaaagtttgaaactcacgcaatgtttcacatggctgatatctcttcatttgggcagacatacactggaaatattctcattgctgtcaatcctttccaaaatttgaagcatttatatgacctgcatatgatgcaacagtataagggcgcaccatttggagagttaagtccacatgtttttgctgtcgcagatgttgcatacaggtaagtaaacataaccaaaatcggttcagtattgccaaagaagacgagttgatctcattgttctattttcacatgaaatagggctatgattcatgaaggaaggagcaactctattcttgtgagtggtgagagtggtgctggtaaaacagaaacaacaaaaatgcttatgaggtatcttgcttatctgggtggccgtgctgcaacagaaggaagaacagtagagcaacaagttcttgaagtaagacaaacagttacttagccaggcaagaaaatttactgttaagttatttatatttcaattgaacttctattttgcattattatat

SEQ ID NO: 197 - DNA, 415 bp, Avena sativa
ttctccaacgcgtgcggggccatctgcaccacccagaagggagccatcccggcgctgccaagcaccgccgccgctctggagctcatcagcaagggcagcaactagataatggtcgtcgtcgtcgcgtcgcgctcccggggttgttgagtttagtgcggatttagatgcctgcgttgggttaaaattagtttcttttcatgtgtgagtgagacctcgtgggcgcttataataaaaaacaagcatgtgtgatggttttaaggaggctatatacttgtactgtagccttggtcggaaatttatcagtgagtcctggattgaatgaatgaaatgtgtgatgatttttttgtctcatgaaatgtttcttatatggctgaaaagttgcatccttgattaatttcttgtttgactgtttact

SEQ ID NO: 198 - DNA, 283 bp, Avena sativa
aacagaggaacacacatcaggtaagtaaaatatacaacaggtattgagcaagcaaaatatacggaagaaaaggggaaatacaattggcacataagtaataaacactatatgctttaacagctgcaaggtgctgctgcatcaatatctacgcctcccgccattgtcattagtcctatcaggaggaacaaatggagtaccagcaacaaatagatggagataacgcacagtcaggcaatcaaaaataaaatacaaagagacaacaagagaagtacataccacatga

SEQ ID NO: 199 - DNA, 284 bp, Avena sativa
aatgggggtcctttctcaaggatcatccagatggcgggagggacatgtcgcgatgccacagtagattcaaaactgctgtggaacttgacaggcagaacaaatattgaaattgacaggcagaagtaaaatttatgctctttataggttaaaatcaaaaagtaaagaagacctggcttctgaagtagatttggcttgcatttccaaggttcatataacagaaagatttatgttcagttcccacacatgtgccagcagctcattcaggttatctccagactcagctg

SEQ ID NO: 200 - DNA, 239 bp, Avena sativa
aggacacggtgcgactgtggcagtagtcgtacttctacgtccacaacctcggcaacatggaccggatcaatctaccggctttccaggatgtggaatctagccgggagaattgggacctgaatatccatggcgagaaggcagagtcggacaccatgctgcagtagatgcgatccctcgtcaccaccggcttaaccagcctggacatcacgctcagctggatgtctcagcgcatgatgccg

SEQ ID NO: 201 - DNA, 550 bp, Avena sativa
ctggaggttcttcctgtttagaaactgatggaggttcagcgtctcctctcactgagcttaacttgttcacagatgcattcagggtctctccatgtccagtggcactaagaggttcaccaatcggcccctcagctatactattgtcagttctcatgaccagaatgtcttccactgtatcacccttcccagataaactagtgattttttgcagctgaccattatgtgaggtagcactacactaccacctgtagcttctttggatatgaagagcaccagcagcagtgtgccacaactgcgcggtgcgcgtattttcacgttcgctgaactgaagaagataaccaataacttctcggaggcgaatgacattgggaacggcggctttgggaaggtgaaatagacattgtgatcctgcatggcatggcatgcattacattgtcagaagtggtcaatatatattcagagctgtgttggttgctccttactgcaggtttaccgagggacacttcccactgggcagctggttgctgtcaagaggtcccagcatggatcc

SEQ ID NO: 202 - DNA, 227 bp, Avena sativa
aatgattactttgacagacgaactgatttcagccaagctaaaacatgttcaggttggtaccaatattttattagtttgtcacaacattttgacacttgtactattcttcgtagctaatggcatttataagctggcatttgtactgccttttatggatgaatgaatatttattcacgaccatttttggtgcaactttttcagttgcagcaagagctaaatgcgttgta

SEQ ID NO: 203 - DNA, 130 bp, Avena sativa
gccttctggcctggtgttcaggttcgctttactccattcatggttgattcactaccttactgtggaattttgattcctttattatttgctttctcctatcatcatcaccagacgctactaggagatgttg

SEQ ID NO: 204 - DNA, 254 bp, Avena sativa
gtgtcatggtctccatatattaatatactgtataaaacatagagctattaagttttgatacctaccaacaacagtggctgaggcgcaaccaaatgagccaaatgaccagcccccgtggcgctcttacaatggcggacaaaacccaggccatggtaaacgtgaagcttgagaataccatggattcacaggtggatagctcgtatggatctctcgcgcgacaacaacagatgcagcagctaaggcagcagcagcta

SEQ ID NO: 205 - DNA, 419 bp, Avena sativa
tcagttggactgcgtgctactgctacctgtccgtgtgtgtgcagtatcgtcaatgtagtatatactcatacaccacagaataacgagtaaacaaagcagccaattgagccacagatgccctcaccctcgctgtgcttctgcactggatccatcgatggatccagtgcagtgcatgcactacgtatatataactctactgactatcaggcggccatgataaatgaaggatagagcatgacaacccgtgctcctgctcgcgtgtaccgtcacaaatctcacaaagtgtgtgaactgatatagttattctctcttctaaacctatctacccaatctctcgctatcttcagcatgttataacccacaacagtttgttgaattaatattcacacactctttattagaatacatcgtatgagatc

SEQ ID NO: 206 - DNA, 277 bp, Avena sativa
gtttcttggtgtccgccaccggaagctaatcctgttgattaacgctgatgcggccatgttctcttcggctaacagcatgggcgctggagtttaattcgtgatcacggaggggagtgcgtggctgcatgcagtgccaggttccccaacgttacaacgcccaaccttgctgaacccatagctgtgaggcttggcctctcctttgtcagggacgaagccttggataacctgggttacctgaggttcaccgcatcaaatcgtcagcgagggaccggtcttc

SEQ ID NO: 207 - DNA, 336 bp, Avena sativa
taccagcttcatcctgcacaatgacatatccgtcaataggttgaaaatgtatttatgcgtgtcacagaaattgaagtttacacagtgtatacttggcttgagtcctttccaatccagaagtggatgtcgtacataaggtccgctgattgtagcctgatctcatggtttctttagtacgctgtcctgcttgtattggagtctaaaatttgccataggatgaacttgcacatctcataataggaaacaaatgtatacagaagttaattacagattgtattttatttggtatgctttcatctctttgggttctaacagaataatacttatttttctaat

SEQ ID NO: 208 - DNA, 427 bp, Avena sativa
tgcaggagagcgtgccctgagccgtctccacagcgtgagggaccgcatcggcgattccctctcggcgcacaccaatgagctcgtcgccgtcttctcaaggtctgtctttaatcttttgcagactggactggccggctggcagtttgtagaatccctgcgtacaaaacatggttaagtgatgaattatggttgccttgtgtatacctaaattatgctacaagtacgagttggaatatgacacctttgctgtattttcagcaaagctcaacaaataagtagggccattaattttaaggcaagtgtgtgtccagaagcttctggtttcaggtgatacagaaaggtaaacagaaaccaaatgttatatacattatccatggcttgtcaaaatcatgtaactatttgaggaaggcgatgattcagcgctgcg

SEQ ID NO: 209 - DNA, 416 bp, Avena sativa
tagaccaatattttttgtcacaatgtgcttctaaatgggcagatttaaggtcatttaggaaattacttgtaacttgaactgttgaattctttggtgatcctcggtttagtcgacatgaaagagttcttttaaattgttgtgcaactgctatgctgccaaacccttattaatctatttatttaatgtaagactgttgaacacacctcaattggaagattggaactatagctgcactagagcaattctgtttcagacggtctcattggtggtgatggctgaatgcaagtgcaccaagctaccacttaattgatgagtttctttagttcttgtatccgagtgacactgttgtgcaactgctatacttgctaaacctatattagtttgttagtatatgtaatactgtataacagttaggg

SEQ ID NO: 210 - DNA, 312 bp, Avena sativa
ggtgtctaatctaagtacttagtcgtgtccccagtatggacatctgagtttcttgatattgagttcatgatatgtttctcgttcattccaatttcctaaagtatataatattgttgggttaattaattgggatctttttaaagaaaatctaaaagtgattatgaaagtaggataaaagtgtttatgctcgcaaaatagtcaagcttccacctagccaaataagcatgtagttgctagttgtattgtctctcttcatagcactacttgccgtacattccaagtattgacccttcgggactgctacgttttatg

SEQ ID NO: 211 - DNA, 602 bp, Avena sativa
gtttccaattctaccaagggcatcaggaatattgccagagaacttattcatggtcaggttaagtttactgagtccctttatattcttcagtgactgaggtatgcttccctcaaaggaattattgtctaacaaaagccagtccaacactatacagttctgaatactgtcgggtatcttgccagacaactggtttccggacagaatcagctggtttagattcgccaagctaccaacttcatcaggaagaggtccagaaagcgaattgtacgacaagtccaagtaccaagaaaggccaggtaatttgaagatctctctcggaattgaaacattaatttggtaattcgttgacaaatcaagtacaaacaggtttttcaactcccctaggcttgctggaattggcccctccaagttgccatagtatgcataaagcctattcaactgcgaaagatttcctaacgatggcggtatgaggccagacaagctattgttgtacagggctagctcaatcaagttttctagcttaccaatactctctggtatcactccggatatgtaattatttgctatggcaagcaagttgagaccaaccaaattgcctatgt

SEQ ID NO: 212 - DNA, 211 bp, Avena sativa
ctgtcagaaaaatataacaagaagtaagcacaatttccaatatgattcatccagctaagtaaaatagacacatggaaactttgtaagatagcaacatcattttaacggtgcacagtagccacacaaatcagaagtagtaccaaaaaaatagatctcagaaacagggacaagacaattcatgaccaagaaatctgcggactcttccaatgca

SEQ ID NO: 213 - DNA, 279 bp, Avena sativa
cgtttgctattcgtatcaaactagtagataaacgaatatttgtgttgcattaggtgcttctttatgaccgtgctactggtacagcactaccctatggaataacatgaaatcaggtctagtggaaatttacttccagtatgtatgccgtttaaaatgtcgtttcactaaacgagttaacttttccaaacccacgagtactacttgttgaagtctgcttcgtttacatctgtgctgattcactttgcatttcagtctgctaatgtgtaaacctgcactgga

SEQ ID NO: 214 - DNA, 381 bp, Avena sativa
actttgtcgctttatatgacattgccgttagttttgttagtcttccattagtttacctttttaaggaccaaactacccgtccgcttgatcgcttcatctgccctatttttgattatcactcgttaatatccacaccggagaaagagtggaaccactgaccgtgtaacttacccatgactcatatgtactacgttcttacggctgacaaataaagtcatggccgttgccggcggccgaacctagaggagacgaactcggtcagggtcatgtggctgatcaacgtatacatctcttacgcctccagccgtcggtacaactataaaactttgttctgcagcccataaaatgtgtacgtggcccgtggccttgtgcccacacacg

SEQ ID NO: 215 - DNA, 234 bp, Avena sativa
gggacgttgtaccctgtactatgtaccactgcaactgcacagcagttttgcgtgttccaggagaattgcatgtctatgtaccactgtcaagtttgttgaattaacatgatcacacgaaaacataaaaaactttgtgatttgagatatctgaatcagtgatatagagacattaagacagaaatatacgtcctgtcaatcctatttttcttcaaagcccattgtgtctttactgtc

SEQ ID NO: 216 - DNA, 277 bp, Avena sativa
gaattcatcgctatagggtaatcaataccaacatagtagtatttcttcctaacttgcccattcagctcaggtgcatcaagaaactttgatatccgggtgaaagcaaccttagcttgtacccgagcgtcctggatttttttaaatattttctgaaactcacaaatatgtttttgtattttctaaaataacaagagcagtggagctcgggagacaaaaatctctactccatactcacccttttatttagcagtactcatactagcatagtcaggatgaa

SEQ ID NO: 217 - DNA, 240 bp, Avena sativa
tatgtttttcaggagtagtggtacttcctaaaacttgcaagtactccaacatacacatatttggttcaggatgcttatgcatgataactgtaacttgatatctgcttcaaactagtgctatcatgtagtattgctaatcttctgtagtgtgagcttgtattactgcttgttgcatgatcatttgtgctcaactcaagttaattggaactttattatactccaagataaacgatgaccaat

SEQ ID NO: 218 - DNA, 393 bp, Avena sativa
gttaaagatgcttgccataacaaacaagttgtagcataaatatagcggtgactgctataacctccatctttaattgcaaaagaatctctcttctgcacttaggctttcataattttctataggagtttctggactaagctgcatgcttatttcttccgaacttcccatcacttggtagttttattaatcacatacttactatattaaacacttctataaaatgcaaatctgacaaggacatttgatatgaatatagctgactggaatggacatttggtatgagctacgaaaaaaaccctatgacaagctcaaggatttcatcagggcaggtacaacaggccagcaaaaaaacagcacgaacaattcaacccaggtatttgaggtgccatctct

SEQ ID NO: 219 - DNA, 579 bp, Avena sativa
gccatggctgaaggaatccgacgttgtgttcgcagcaggtttggggaaagcgctggagaccgccgctcgctgctagtagcacttggcattagaaactgtaaataaaccaactccaaagtaccaagttgactcctagcaatgtaacttggcatcgggtgctcatatcatcattgatatcccaaagggatcatacaaccaatcacaatagatgaaaatattaaccataagagagagagaacaaaaagtaaaaataaaataacctcaaatataatttcctttttatgcataagaatgttttaaccaccggatctaacttcttttatgtgcataagacataattaaagtttttaacccactgggaggaattgcacaagtgtttacatagccatggttttcgctcttatacttcctccattccgatgattaatgtgtatattctttggttaagactaggaaaatgcccgtgtgttacaacaagagtgaaacaattgtgtcatggaagcccatacagtaagtcttagttggtatagtcgtagtgtgttgtagaaagagccaattccagcacatctaagacgcact

SEQ ID NO: 220 - DNA, 259 bp, Avena sativa
aagtggtccatctttggcagtatgtgttccttaaagaccagccttcaccttttcactatgggtaagatcagatgcaaaacctgataaacatttaaccacggttggccatcaaaaatcatactatttctggtttttcacagtccccacaggactgcactggatccatcagatggatccagtgcagcagactgcattaatcgggtgcaacgaaagtagtttagtggaaaatatcagatgagaatatttagcgtgcaaactc

SEQ ID NO: 221 - DNA, 245 bp, Avena sativa
agattattcagccgaattattaaaaccaggagcatctgcagaaaagaacaaagacaaccaataagcctacatgaattgtgagtcttcaagcgtccatatcaatggaaaaattgcaggctaaaccagcatgctttcgccaagagaaaatggcttgaaaacggatataagtagcagcaggacgaatggctcgcacgaattataattatgcattaaacgcagagatgtaacacacaggcaagacgggg

SEQ ID NO: 222 - DNA, 249 bp, Avena sativa
gagatggtcgtcatggcacatccacccgaagagcacactgaattaatctttcagtacacaagggcaaaaagttctcattccttagcagtctgtgtcctcctcgccaccatcgcagctgtctccggcggcttgaccatgttgtccagtgcaggtgcagggcccttgggggagccggacagggacgtgctgtggtgtagctagatgccagcggaccgctgccgatcattgttcacgtatgtagtctgtatt

SEQ ID NO: 223 - DNA, 505 bp, Avena sativa
atgtacatcaccaggggtgttgttttactccaccccattgaagagcaccttaactctgttgcttgtctgtaactgaccaaattgcattagtccttgctaaggtcaatcagtgacggttacttgttagtgtacactccttgttgctggggaaattctgttttaggccctcagctttttgagttgggtctgtccaaaccttaattttaaggacttccagaaaaactttgatctctaggttataattatagagtatttttgtaaaatgtgttgtctgtctggtgtcactagactgtaagacgtgggcttcttatggggccttcgcggagttatatgtttgagacttgtttggaatggtttttcctgaaaagaattctttcattctttgacatggtggcggtgctgatgttgtctgtttggattgcctctattgtgctcttatttggtttataatgttgatctacttcttgattgagtaaacatctgctaaacatttgaagctcgtgta

SEQ ID NO: 224 - DNA, 523 bp, Avena sativa
ggaggatggatgcaaatcttgagatgattgcaaaggttgccgctgtgtgcaatgatgcaagcgtctcgcattcttcaaaccagtatgtctccaccggaatgcccaccgaagcagctttgaaggtgagagttggtggtacagttcctgctgctattccacaccagtatttctgatgaagtattttgattccacattatggtgcatccacaactcaaaacacatgtttcaatcatcatcctgtaaacagtgtaggaaaagagtgatgattggatactgtattcagacaatattggttttggtacgcgttttgtttctgagctcccatgatgattgttttgttggtttcttgtaggtcctggttgagaagatgggacttcctgaaggcaagaacggcctgtctgtggatccatctgagacactaggtaagcaatggcttagattatattttactattctcgcatgcttgtcaagtaactctcaatcatatattgactacattgggatttggtttctactaggctgg

SEQ ID NO: 225 - DNA, 293 bp, Avena sativa
gtattcacctccctttaccactctcgctgaattaatgctcaatgtctgtgtgttcaagtcccaactaactatatgatcgtagagtgggatacactttgagatcgcatactctcccctcattggtgatgtcaattcaaggagacaagtcttagctgaagccaaggtgacatacgttgctctgctttcattgttccttcacacaataaatgcaaacattatctaatagtagtcgttttttgtttcattaccgcaatgctctacaatctttcactatgctcaaacgtcaaatttca

SEQ ID NO: 226 - DNA, 344 bp, Avena sativa
catgtagttgcagttagcacatagcacacatgaagatataatgtgctagattacatgattttacaatttcctttggacaggaatgaaaaacaagcgataaggaagattgtaaaatgactttctgaactcaacaggaaaacacaggttttctcatcgttcagtttgtctgcaccgcatataaacgacagggaagattacctgagccgatgcctgttgcatgttgaaaagaaggcaacaaaaccatacaaaatgctccggactgcacggaaaatctaagaaaagagccaaagtcagttgcatattatactacttgaaaaaagttggttcagtagaaatactaacaa

SEQ ID NO: 227 - DNA, 578 bp, Avena sativa
gtgcagtattaccttactagtcttacgagtattgctttactgacagtgttacttctaactgaagcttacaaatatctaaacagtacaggcctaagggcccagaagtgggctactcaactctgttctatgggacatactaagaaatcttagcattttcatgttgtccagaaatcttacattcataccgtgcagctaactctaatgcccacactgtagttacatagccagctaggccatggtgagctaattactttaatatttcagaaaggtggttgttttaagtatgggactatgggtaggatataccaaaatttcagtttcgttgtacaatccttcgggttaaatttagcatccgcacaatgaatccttttgttgtttaatatcttttaagttatgagattgtccttactaatattggtgtataacgaaaaattgttaaactactaggggaaaaatatttgagagaaatttgatgccagtcctgaagtagatccttcatatattgattatttgatttgattatgtgaaggaatatgaaactaaggacaaaacggccaggatggaagtcccttgtgcct

SEQ ID NO: 228 - DNA, 378 bp, Avena sativa
tgaattagttgcttacttaatctagctgcgcttacctgccatgccgtgaatccatgaatcccagctgaggcgagcaatggagggatgaattagttgtactctcagcatctacatctgctctgctctgctctgctctgctaaatataaaatccccttccaccacctactacgctacagtttgaccagaccgctatttgtagttgacatacctttgttgcacctggtccttctctcatctactgtagattgcacaaacaatataacaagttgttccattcactattacgcattgattcatacattcatgcctctattttgcttgtgttcatcggtcatgtcatcttgtaccatcatttctaattttatggttataccgat

SEQ ID NO: 229 - DNA, 502 bp, Avena sativa
ctttagaatggctgcacagtttgcagactccatactcactacaaagctgcaaaaaccccgaatccaaactccgtggatatggcgccagcaacacaaaaaacctacgtgcatccaggtcaagaacgttaagtacttcttaaatgcgcatcttaattcttagaattcaggattcatgtaattcaagccaatcagatcaccgtccccaagttctgcatatctattatctatgtcagacagatgagccgtgtcctagatccgccaaactaccagaattaattgagatagcagctcggtggtcatgagcggcagtcggatttcagatagattaggtgcgcaggagctggtggctgtcgggtaggtaggtgcgtaagaggcagcgggtgtgcgggtgtggctgaggagaggcgcgtggtacggctacggcaggtacctggatggtgagggcggcggcggccgcgcggcgcaggtggctacggagctgccgctcctcggagaccttctg

SEQ ID NO: 230 - DNA, 274 bp, Avena sativa
gataaagtcaaggtccaagattttgatgtacttgacatcatttcagtacacatccctttggttattgtggcaaccatttttgttgaagaaaacaaagagaacgcgaagaacttgcctatggcacaaatttgtgatgctgtacaagaacatgtgaaggtctcctgccatcatatacaatcctactacatcagtaaaatatctgtactaagttacacatatcatcttggaaagctactactgcctaccgattactatgggtacgggtctgtctatg

SEQ ID NO: 231 - DNA, 332 bp, Avena sativa
aaaagacatacagttaaaagtgcagagagaaggcgggaatccatctctaaatctgatcctgctggtggatccacttcattgtttccatgcgaattagagtcattgaccttgtcctttcttccctttgtttttccgttttcatcttttttcttgccatgtttgctttgtttatctcctttagtatcacgagggcaagacataagtacctgacaacagagccatagaacaagaataacaattttaaatatttaaaagcaacactatataagtgagcagactatgaagatggaacttaaagccatagggaaaaatcatatgatgtaaactgcact

SEQ ID NO: 232 - DNA, 325 bp, Avena sativa
gaatgagtaaactccacgtccaaaaaactggacgaggccaattactttggtcggcactagaggcacaaatcaataacttcagagctgaatttctagtaagaccatgataggatcttagttagtcggccacattccttcaggacagcatagttgcaatacctaaaacattcttatcgtttcactgttctttgttgatgtacggctaagcatgtccatttgaaaggaagtggcatttgaggatgagaataatggtcttccaagtgactgcaaaaaccgacaaacacacaacacttacactgtagagtcacctgtaacagcaccctca

SEQ ID NO: 233 - DNA, 342 bp, Avena sativa
aacacttactcttatatgcaataaaggaaaatcctatggctactagactgcaaaagctgtttgacggcatgattacatttccccctataaatttagcaacctcttaggtggaagcctgcacaattaggcgggcttctagataattttggggactccatggatcagatcatcagagattcactatattcaatttttctacctacttacctactattggatttgaaccaatgactcccgccgtatgaaagcaagtgcttcttattcaactaccatgagtttactttacagttagtataatgatttaaacagcttaacaggacaacaaacttggatactatacat

SEQ ID NO: 234 - DNA, 391 bp, Avena sativa
ggatagtttattagctttgatgacaccgtaatgttggcctcttggtcacagccgagccacctgtactgaaatgtctgaaatgtatttcctttcactgtatccctcaccctgtcacccaggcagaaccaacaggatggctccactaatgactctggatctgactcctgttcattaaatcgctatgctaagtccatatctcaaaggcatcacctactgtagggaaccaaccaagaggtacgacgattctcaaggaaggcatagagtttgcgcctactggtggatcgggccctgcggggtaacttgtacacaccgtgggtgccgccaccgtgtaccgcgatttatgtacgcaagccatggcaatccacaaacatcaagtccgaagacatatcaa

SEQ ID NO: 235 - DNA, 379 bp, Avena sativa
gtccctccagctggtgccacctcgtcgcccacacgacacaaggtgaagcacactcaaggttgttggatatttgaagccgccgctccaactttccgcttctccgccgcgccctgcgcgtcaaccaatgaacatctcggtacattgttgttgtagtccaagctagtacttctgcctagtgtttcaaaagcaaagatgttcctcatttggagcattgatctaggacaagctctattgtcagacgacctatagttgtgtatccccctcatgcctgtacaattgtacaatagtaatcacttgctggtctgccataggggagtcattctgatgaggctggagcatgctgggaagatccagtcagcttcactgatacgagtcgcag

SEQ ID NO: 236 - DNA, 323 bp, Avena sativa
gatggatcagtgcagtcatggagtgggtgcattcatcatcaggtcacttttgtttgttccaattctgcctttgggcaaaagtcacttgcccaatgaggtcatctaccctggctaagcaagtttttcagtcaccctacagtttaccaaatgcccagcaaaggtaagcaagttaaaatactctatccacacccataacattccattctgtgtttcagaaagaatagttgtacctgagcaatttttcgtagagaccagataacttctggtcaatcaaaactcaagatatggataaattaaccttacgcatggaaaacacagatcca

SEQ ID NO: 237 - DNA, 290 bp, Avena sativa
tagcaaattttatgagggcaacacgtgaactcttgggtgcaaaccgtcttaccaccacaacaatcttgggtacaatcttgtctatgcacgtgtaccgtgctcgtcgcctagaaatcatctgggctccacaacaagaagacgggcacaataattgtggaaccggtgatgcagagtggtgccgcactagctagggtgtttgacaacaagctgaccgagcaaatccaagagcttaaacgtccgtcatgcatttggtcacgagagaggagcggcacaatgctcatcacagagaa

SEQ ID NO: 238 - DNA, 242 bp, Avena sativa
ggaaaacaggaaacctcaactgaaaattcagccagcacaccggaaatcttcagatacacacgaaatggtgttttcgtttcgcttgattttagagtcacagccctagctcaatccacaaaaagtttgcatactaactgcatcaagcaacagatacttccacaagggtcttaataagatgtaaggagcgtgcagggtggcctggaggttgtctgacagacaacacaatccttttttgctacttt

SEQ ID NO: 239 - DNA, 345 bp, Avena sativa
tacaagaagcagtttctgaggtcatctgaaaggtcatggtagctcagattcaaaattgctcggacatgaccattttttgacaactcgctttgaagctggttgtacgtttgtttccaaatgtccaatcgttgtcttgaagacaacatgcttccaatggtaacaattgctagcggcaggccatgacacctttcaactatagaattagcaattgtctcaagctccttggggcacatgtggtctttcttgttgtaaaatgctcttctgcactggatccatcgatggatccagtgcagagggagccaccacatcgtccttcacctgattctcgtggtcaccgatgatcgc

SEQ ID NO: 240 - DNA, 195 bp, Avena sativa
acggactgggagggtggatacttccccctaactctgcaatttgatgataattacccaaccacctctcctagctgcaagttcccagtaggtttcttccatgtcaatgtctacgattctggggttgtatgcctatcaatcctgggtgatgtaagtttccactgactgatactctcttccttttcagcatatctatct

SEQ ID NO: 241 - DNA, 284 bp, Avena sativa
aattccactatttcacactggttttctgccacaagaacctatgcacaatttaaccaccttaagacttgtagaagtttattaaaattgcacaaataaattaccagtaaatgcacctgtccaatagggttgcctggatttacgaccacaagtcccctaacggtgacaccctcagatcgggcatcatccagatgcttcttcaggtctgaaatgctcacgccccaacctctagattcatcaagataatatggtacctgagaaataacatatctgtttactgcactgga

SEQ ID NO: 242 - DNA, 384 bp, Avena sativa
gcaaacgccaatcagaacagtgacacctttcagaaagtggagtacattgtctgtctgtcttcgccacccagagaaaaggaaagaaatgtaaagagagaacgaacgcaccgaacgaccccaggtaggcggcggatggggtgccggcggcgcaggttatcctcgcctcccaccggccggccccgtgatgcctgcggtgccaacaacaacaaaaaaaaaaagtccatccaaaagaagcagagaaggagcaagaagaagatcaagggcgatggagtacgagtaccagtacagcagcagcctcgccaaggagaagaggcctccggtgaagaggggtcaggtgaagcagcagatggcaaggaccctgagcaacctcgtgtcgcccagcag

SEQ ID NO: 243 - DNA, 466 bp, Avena sativa
cgggctgggatgctcaagtgcaagacgacgactacgcctatgtctagcactaacaagatcactactgttgatggagagcttctgtcttctgctgatgctacagagtacaggagtattgttggtggtctccagtatttgacgatcactagaccagatatattttatgctgtcaacagagtttgtcagtatcttcagacgctccgtgacactcattggtcagctgttaagcgtatattacgctatgtccgtctgaccgtgtctcacgggctgcatatacggccaaacccctccggggtcctttcggcgtactccgatgcggattgggctggcagtcctgatgacaggcgatccacggggggctatgcagtgttctttggctctagcttgatcgcctggagtgctcagaaacaggctactgtctcacggagcagtactgaagccgagtataaggctgtggctgatgcta

SEQ ID NO: 244 - DNA, 398 bp, Avena sativa
agtgcagggaatacacgtagtgcaaccaaccattttttttcctaattctcatgttaatggctaccaaagcttgaaccaaaaagtacatcagagagaacacttcagtattatgcagtctaattctgcaccgaaataaacactgataattcatgctgcttttcagagcttgacacatggaagctgactatgccatgaaaattaacagtaatacacatgcatttatttttttagcaataacatgattaactgaacgtgaagataatagataagaaaactgaacatgaagaacaaagttgacaattcaaaagcaaaatggcattgcacaaactccagtagataaaagtctgttggataatacaggaactcatgaagccagagtctcgcttacttgtgttcaa

SEQ ID NO: 245 - DNA, 664 bp, Avena sativa
cggatgctgctgcggcagcttgtgtgaagtttgcctcaaaatttgagaagagcagaaaggacaaaagagcagcaatcaaggcctcctccatcttcccggagtcatcaagctcagcttcaaaaggcaagctagaccttgcactgaagaggaggaatatagaagccagtgcagtgtctgtgctgatggcaggcagggtgaagccgtcctcgtggcagagcgccggttgttctggaagtgcacggactcttgtcccgataatggcgaggcgcaagtaggttgtgctttgcacagtcaggaggcttgctcagtaaaacctgtttatctcgtgtgcactttcagttctctttgtgaatgctcgtagaatgtagtgtaacctcgtcgtgacgtcctgctgtcattggctgaggttgtgacatcttgaaggatctagagttgttctgtttgtatatatatgaagaagatggtcgcgctttcatcttgcagacaactacgatgtggtttctgcatcatattattgatatgctgatttggttgcagttgattcttacataaaccgccctgtttctctccctccctttcattattagtaaattaatggcataaatagctttgaactaagcttgcagcgctagatttgggagcaacgaaaccatgacaagtctgc

SEQ ID NO: 246 - DNA, 264 bp, Avena sativa
tgccagtgtcttggggcgtgcaaccatacatgtatctagtagtatttgttcgtgtgcatctccataagagtaaggttaatagtagagcctgctgccggctctatagacatgccaagtcagttatagtcttcataaagcccataaatacaataggctagctattaggcagactattagatgagttttaattaaaatttaattgtataatgcatagatgccattgggcctgggatgcatgcaagctgctttttctcgtaccctgtg

SEQ ID NO: 247 - DNA, 399 bp, Avena sativa
  modified_base (370)..(370): a, c, t, g, unknown or other
gcatatatatatattgtattgtatgcctatgctatctatagtataacgatttgttcaaaccatagttccaatctcatttgatgcctcaccagaaatattttagggctatcagcatgatgctagtgcaagacaagaatgacgcctctccttactctataatctcctgtcctccacaaactgctacaatacctcttctatagctccactgaaaggtccattggttatttctgctaatattcaattcttcatctcttcaaaagcttcggtcatctaattataggatatatattttttatctccatgcttcagatcatagatgccatattttatatatattagttatgtcggtagtaccatgtcaggtgttctnatttcaaccttaacgagttgttgtttatg

SEQ ID NO: 248 - DNA, 382 bp, Avena sativa
cacccggtcatcaccgtcgcgctagggtcctctacacgctcgccaggttctgctacttgaagggcttttccactggcgtcccggacaaccgcctcaatcccgggtatggattctttgattagcaacaatgaatgatcaacccatgttgttatctgttttcttccaactggtccatatgcacataatttgcttactttacagtgacatcaaaatccttgtggttgtgaagcaatacatatccacttgatgatttctagtacagggtttatgctcaagtattttcttaggaatttataggtcctgcaaatatgtgacataggggggatatcagttattagtttggagtgggtatatgcaaggtgttctgagagtcaggttgtta

SEQ ID NO: 249 - DNA, 199 bp, Avena sativa
cctttgtcacactctcatcccttaaagtagagatatgcacaaaccaggaggtaaggaacatgatgaatggctcatataaataaaagattggcaattaaaatgatgtgcagctactcccatccttgtagacggcttcagtgtattgcaataggtgggttgcgtaaggtaccatcagctgagcttttgggccctttatacc

SEQ ID NO: 250 - DNA, 238 bp, Avena sativa
agaagttcattgtaagcatgcaaactgatttgagtttgaattgaccaaacttgaaaccatttgactgtattagggagttttttgcaaaaacaaaaatgaactaggaggggacgagttgcacatcttttctggaatggagggagtagttaaatatttttttagaggattgtacatattgagttgatttgccaagataatgctgcgtagattcaaaggctagagaaatatgagctcaaag

SEQ ID NO: 251 - DNA, 328 bp, Avena sativa
cgtcggtagcattgatgttcttcagaagtaccctgtgccagaaactgacatttggtttatcaagttctcatgtgattttcacttcaatcaattagcaataggtaacacttgttatttacactggtatctgaggaatcattttttgtaaggctacccttttatatacctggcaatactttataaattctacacacaacaaagtttctgaagatgtccatacttgtacatatgaaacattgattttcagaaaaaatgctacagagcaatactagtcttgcgttttttgtatgtaaagtgtaaaccactcatctacatgcacctgattaga

SEQ ID NO: 252 - DNA, 491 bp, Avena sativa
gcagcagtcaggagacgcgtgaggcgaggtcaggatgccagaaggaagggtatgttgggcaggatgccagagtagataagcgaggcgtgtaaggagtattggtcggggtggtcggccggaggagagaacgacacgtcggggtcgtggcgtacgtgtcagttggttgaatgggggacaatagaaattaacgatagagaacagcttaggcgtttttcactttggcggtggcatacccttgtaatatggcgctgctccggccttcgctgatccgcaaaattggagaagtggtgctccgagatttacacagcaaactgggccagcttcttgaatttggctccatggagttaggacgttcggactgctccacagtggatttttagaaagctggaagctagaggactaccgaacacgccctaagtatgtaatgcttgcatgctattggagctggtactagtagtggctgcacgcaaaccttctccttggagcttgtg

SEQ ID NO: 253 - DNA, 349 bp, Avena sativa
gaattagaaggaatcatatgattcaattttcaatgacagaaattggcatcaacctagctacattaacagatgtggggtggacttgatcaaacgagtattgacaaatttatatctcattaaaactgcaaaagggaaacgccatgtcaggaagaacatagtggcagaaatatggcaatcatatcgccacaacctaatccgcatatcagttactctatctcgcagataatcttgaaaaaggacaaatgaagaagattacatttgtatcaaaattttgaaatatcttcatattttgacgcttcagtagcttacaacatcatctaacacagttttagtcttattattctcttgt

SEQ ID NO: 254 - DNA, 437 bp, Avena sativa
tccagtgcaggagtattgctaagcatttttagctgtgagctttatttacatgtagtagttcaacagttgggattaaataggacttgatctctgacacaaaaccatcagacctgtcacctatgcaacatgatagcaattcatttctgcaatcaaaacgcgagcacttctccagaggaatcagcaaggcatctttagtgtggaagcagtgacaatctgtgtgtgccagacttccagtactacttggattcttacagcagagttgtatttatgtggtgagacttgggtaccagtaactggtgggcaacattctgttctaggcttgtagcaagtactccagggttgtggtattgtttatcagttaatgtaggattatttgatgttcttgctggaattgcttaattgcagttcatcctctggatctccgcaaatggaactgc

SEQ ID NO: 255 - DNA, 347 bp, Avena sativa
cttatctctaataaatattacttgtgttctgtttgatgcaacaacttcttctgaccctaactgttcccaacacaactggttctgagacaaattgataccctaccttacactttcagatttcaaaccccttgtgttgaacttagttcgctctagtatcttttgctaaatatcttttttcttcttgattaggttttggcttttggtggactggtataatggaaagaatcgcattgtttcaagtgatgctcgtaatgctaatgatattagagggccgtatgttgtcatcaacatcggtgcttatttgtctggcctctctacagagcgagccaattgctatgcctgtaaaa

SEQ ID NO: 256 - DNA, 384 bp, Avena sativa
gttcttcctgtttcatcttcaattctttgtcgttcacattcagcttttcctccctacaactaagggatctctgcaaattagcaagtctattctgactttccttaagcctcttctcccaattatgcagagactcctcattttccttaagttgattctcttgtgcctcccacctgaaaatataagaattttttaccataaaaagataatatattcatgctcacttctgttcacacaagcgtaaagaaaaatcatcaagtcaaaaaacatcatactcagtctcatagcatagcttttccttttcatatctacattgatgagcttcaatgtctttaattattttttcagcatgtgatactgtaaggtttgcttctgcaagtttcgcat

SEQ ID NO: 257 - DNA, 346 bp, Avena sativa
  modified_base (309)..(309): a, c, t, g, unknown or other
actatagagaggaagggccggttggctaatcacgcgaatcatagtagtagcaattaactttgtattagagccccactctctaagattcatcttaaccgcatcccagcggccagccatgaccacctctgcctcgcaaatctccaacacggctggagggcttatatctaccgcttgtttcttgttccaatcctgggtaggttataggccgggactagtgtgagctctagtaccagtttatcccggctccaatgcctaggcggctggatagctatagtcccgggtcgttccggacgtctagtctcggtttangatacggctcgggactaggagggctcgcgccagccag

SEQ ID NO: 258 - DNA, 279 bp, Avena sativa
caccttatatgtttagttactctgttttatggggtggtataactcttgaaatgtctgctaatacaatactattgcacatacttttggtttacacgaccaatcacagcgagtacttgtcaaaaagcagtgttccttctaaaaaaacatgatatataaacatatccatgcggtaaccaatgtaatgtgaatcctgcaatttgcaggtgaactgaagtagtactaaaaatcagcattctaactgacctcaaccgatccatatgtgacccctttcttcctata

SEQ ID NO: 259 - DNA, 354 bp, Avena sativa
caggtgcatttgatgctgcaaaggacataatggaagctcttaggagcaagcataccaatctagccaatgaactggaggtaagaaacaacaaagtagtttatattcatggttggaaactgtagtaatgagcaaatatgtcttcggctgtttggatatttgttggcaaatatgttaaacaaagctaccctttaaaagcggcagaaaagctgtggtgcatactagttctactatttatgagctatatgatgataattccgagcttgagaaatttgaacgagaactaaggatcacttctaagcttctccagtgtttgaaactttgatgtcgttagaatctaactttttgtgcttgttt

SEQ ID NO: 260 - DNA, 381 bp, Avena sativa
cgccaccgcaggatagagccatggaagcgtcacatgcagccaacgatgggagcgaaccgaaacatggtggtgttgtgtagaaagggccagggtctggggaagaaaaagctagctaatctgatacgtgaaaacgaatacaccaaaaaagttttatactaggaccgtcatagtagccgcctatgagagacgttttccagaactaataggacccacccaacatgtctaccgtctctgctgccaactcgtcttgtggaggaccccaccgaatgcgacaaaccatggacggcgacaggtaacacttcccgctcgtctctcgcctgcgagaatgtgctgccagctagagtctacgtcgctaggtgtgctttcggccatgagaaacca

SEQ ID NO: 261 - DNA, 242 bp, Avena sativa
gttgctttcttcttttcccggatctgtcatatacccaatatcactggccactgcaagacgtttatccaccgaaaccccggcaactagttcgttataagagggaataagacaaacccaggaactgcaagatgcctaaatgtaacgatcatttgtcaacaagttacaacgttgctgaagaagctaaccaaattctaatgaacaacctgtcagacgacaaatggatcgcgcgattcacattgagg

SEQ ID NO: 262 - DNA, 303 bp, Avena sativa
acctttgattgtattgagttctttctccccaggctcaacatcaccaacagcttaggataatcaaacgagtcactatacaaatcatttcagttgtgaacagggatatcttttcaagctcctgagactacccgttagaattgcaccacgcataggttcgctaccaaatgcattgtcatttgtcaaaacaatgattgactagagaaaaaggagatacaaggcataccatattttagatcaccagcgaaatggattttctgtggtggtgtatggagcaattgaaaacgaacagcctgaatagtactc

SEQ ID NO: 263 - DNA, 371 bp, Avena sativa
ccggagcagctaactaaaatctttgagctgtgtggcacgcctgatgagttaaactggcctggtgtcagtaaaatgccatggtacaacaatttcaagcctccccgaccattgaagagaaaagttaaagatgcctttaaacagtgagtcctatgcttggcattggtatgtcgtgtagctttagtcatgtccccgatgatgctcacacttatgtatttgcagttttgaccggcatgctctggacctgttagagaagatgttaactctagatccatcacaggtactgtatgaaaaattctttctctttctttaggcccgtgtactataaacattttacattatttaatttaaatctacttgtatgtttccacaat

SEQ ID NO: 264 - DNA, 262 bp, Avena sativa
gagaagctgcggcaaacggacagaggcagcgtctaatacgatcatgatatttggagctttactttacgagagacgcatgctgatatactggtcctgctctcagaagaaaccataaagatcaagtttgtgccatggccgttgcagcacgtacgggccaaagcaaaatacttgtactaagaaaaaaaactacaattggaattgctgttgcgaggaagggcacgtaagattcacagagcatggatgatgcgactatatattcgga

SEQ ID NO: 265 - DNA, 498 bp, Avena sativa
actcttagtcaaggtacagcttctcctctcctggtaacatcaaccgtttccagcctattagggcttgtacagtgcaaaatatttctacatgggtcttgaagccttggcaaagatattctaacaacatcatcaaacaccatctaagttacaactcctccaatgcaagttcctctttgtaggttctcagatgcttgtattatgtaccaacgagagctaattatatgcttaagcacatggtaagcactggttcctcatcaagcataggtgctacaaaataggaaccttgtccccatcatacgtggcaagggaaaagtgttcagttttgctaagcacctctcaaggcacctgaattctacatgttcgtcgcaagcaatttcccttaatgattcagattcattctactcaactaattagcattgaagaaagaacaccaacaaagctttctgaaacccatacccgctagtgcgccgaaaccttcatcaggaaggacccagccgc

SEQ ID NO: 266 - DNA, 203 bp, Avena sativa
acagaacaggaagagtacatcggatcagttctgtcatttggggtctaactatatgagatgaaaatcatcccttcccgctgatcatcaccatcagaccattaaggcaccgatagtagttagcatttgcaaattatattcagtagtaattacaagtctgtaaatattttattctattccttattccgaagaataacagtaaaatc

SEQ ID NO: 267 - DNA, 537 bp, Avena sativa
aatatagaaaggagtggtgcacaagcaatgaaaaaccagcgccttgcttcctttttgcaaggaagtttacacgtggagctggtctgaagcttcttaactcagtgagttcaggatctttaacttttgatgtacatgagcatgcacaaacataggcaaactttggacctagtatgtttgcctaagaaatcacattgtgcttccttaatgtaactcctcatttctatatttcctttgtgcagtcatttatagcaacaagatgatgaatatagtccagaaggcttctgccatgtaaaggtttcgcccttgcaagcagaatactgtcactttgcacatacctaaaggaaaggaaaggggtggagcgaacagaaaatgacagcgatattttgagtgttagtaacttgtggcactctggaaagtgcaataggtcttgtaaagcgataaacttttgcttcatatagttccaacgttagtacacgtgttagcttgcagctcagtattgtaattgtaactggaactgtacgcaatgatctgcactgg

SEQ ID NO: 268 - DNA, 336 bp, Avena sativa
aattctcaccctcaattaccaccgccaccgcgagttgcatcccagccagacttcaaatcttttcatttggtcaaaaaacctgcctgtactatatgctagcatgatgtggtagaggtagactaactgaatggtaagcaggacctgatcatacactgttagatctagagtatggtgtggtgaagactttgggagctactgtgcatgggttaatttaattttgttgctatgacagcacatagacttggtattttaattctgcattttctttctttctttctctgttacctttaatcatccatgtaaaaactgaccaacttttcactcagctttgagctt

SEQ ID NO: 269 - DNA, 562 bp, Avena sativa
ggcatggtgttcttgctgatggagaggaaacggcctggtctcaacggcttggtcctcctacctagcgttgtttcctcgcagcagcaaattaaccgatttagtatgtcatgataaccacatcaatttcttgcatagttcgtgtctgtttgcagctgtcctaaattggtgttgcgcagggaggtattttggtttatgatgactagactcactcatggggttctcggctatgttaatatcactttcagcttcccagaattttcacataatttcctagcagtgtaatcttttttgtgaaagatcataatttattgcacaggtgaagcctagaaatttataatttatttgcatttgttgcagatctccttacactctcttaatttggtatttcacatgccaatttgtgctattcgctatatgtgtttgttcatgttacttgactatatagagaaagggaatgaaaaacagtgctaacataattcttgggtctgcatgagaaaagtaagtatcttctgcactgatcaggggaagaatcatggccccattcagctgcaccggatccatc

SEQ ID NO: 270 - DNA, 510 bp, Avena sativa
agtgcagataccagctgaagcaaattacagccagtttcaacttccaagttgtgcaccaacttctggggcattgtgccattgtatacttaaatcaatagtgttcatatagtgtgcaacaagtgaaccattctggaagcttgaaaaaaggaatttaaacttattctcttgctttgtacatgtactgactcaagaagtcataaaccggtgtgatcttttgtcacaaaaagaaatgtgtatgcatgccacttaggcacattgtgacaacacatgattgcttaatcataagacatgggcttataagtttcgcaagaatatatataccatcagtgtatgatatagactttgacagcaaggggaacatctaaataaccaagaattacatggaaatatacaaacaccaacttaaaaaatacaggaaaggtaagcttaggtggttttgcatgcacgtcacttaaaaatgtcagggaagagtaccttcagaccgtaccatttcccaaaactttagcatgg

SEQ ID NO: 271 - DNA, 356 bp, Avena sativa
ttcagaggttttctatatcgctctgcacttcaaatttgagttgggcgcttcataatctatactggaggtttgaatgcctaaagtatagtacaccaggctggcacgagtggtttagactatcacgagagagccgttaatcctgggtgtagttgttgaggaatatttaagttgatccgcaggccaacacgaaggtgtagctgtaaagatgattaaattgtaaaacattcagtatgacttttgttcttagttttgcccttgctgattgctcatcgggagttcgggacaggtgtatcagtgatcatctaaatgtattcatcccatgtgattccatctcagtttaaatttattattaatac

SEQ ID NO: 272 - DNA, 304 bp, Avena sativa
  modified_base (299)..(299): a, c, t, g, unknown or other
tatatggatatgtttttgagttttgaccttcaaatacagctagggatgaaaccttgtttgcaaacctatcaaggacagacagaagatttctgcttgtaggatagatcggttaccatacataaggattaagctagatgcttgcaaaccttgttcaagttgaagtagctagtactatcaagaatccaacaaggtatgcatagaatttaggattcacttttgatccaacgtctttttgtagtggccattgaattcccaatctgttagagtcatcaaattagcatcaaaccctccaaaaaacnttaca

SEQ ID NO: 273 - DNA, 457 bp, Avena sativa
agtgcagatcagcaaatgcttgccgattggatgcatgcctttctccatggttcaggcggccgagaaactatcgcagactcatcacggaggcagattgtgtcggctgagatcgttttgcttgtctagctacgtgaagtactatgtgttttcgtgtcaactgctctccccgattagtccatatgccttctctctaaaatattttcagcccaaaacaataaaacacacatatatgaacagtctagagaataagctccccatagccatgggccctaggcgcttgcacatggttgcctagggtcagagccgggcctgatcaaactgacccccctttggatacgtatggaggtgggcgaccgaggacaagttcacaatgcgactctcaatacccgtagacttagcagtggctttcatattatcaaggagaaggttggtcattagaaagtgacctgattgagca

SEQ ID NO: 274 - DNA, 308 bp, Avena sativa
ttttatcattaccttaaaaaaccatgaacctccatatattttgcacactttgtagtttctataatatgtattcgttgcacggggataaaacgaggaaatgccacatgcaatgatttttgtaaggattacttgtcatagcacaattagctgcccgctgttttgtcaaactaaagtgaataaagctttatgtttgcttattgcttcatcttattcttccctttctttgtattttctagcttttcagcagctggatatagattatgttattggtgagagccacaaagaatttcttcccaaatcttctggcc

SEQ ID NO: 275 - DNA, 260 bp, Avena sativa
ttctctttgatcagatcatttgtatactcggttgccagggactgtgataattgcaaagttgaccgcaaggtacagtttccggagacagttccttttgagttacattgttgtgtcacattgctgcatgcatgtgctctaccgtttaagacaaaataaaacagacaattcctttcttaccatgcccatgcgtagtaaattgacatcatcttcatctaatatagtattttgcaatcaggcttgtgcaggagtaatcctctttg

SEQ ID NO: 276 - DNA, 236 bp, Avena sativa
aaaaccacaggagaatcgtggaattactagcctgcttgctggatcacatagaacgtgtatcatacagtagagaaagattatttcttgaaattctacggcgacaggaaagagaaggctgtacgtgattgtcctgcatataacatgaggaaaatttgtgcatcgtctgtccaaaagtacctatcagatcgggtgagttagtctcgcttgctaagcgctagtccctatatatgctggat

SEQ ID NO: 277 - DNA, 167 bp, Avena sativa
ccagtgcagggccttcagggctacagtgctccaccaagagcatcaagtcactggtcctcattatacctttacaggcagcatatatcaaacttcagagtctatctagctatttgttgccataaggagtactggccaaagaatgcgacttaaaaggatgtagtaagaag

SEQ ID NO: 278 - DNA, 375 bp, Avena sativa
caatagtatagatttactttacaatcccttctaacagcacatgcaaactaaaaaaatatcattttgaatcaaagttctaattgctgaccaagattggaacttatgaaatagcacgatccttgtctaccaaaatcagacggaatcttttacatatcaaacattgcaatgccaccaatttcatggtccaattcaagcatccacaaattcgtgtgtttaccaacaaagagaatttttttaattaacatctgcctactaggtacttgctccattgtttggctccactatttgacagttgttagtctacttctttctgcataccttgttaggcattgggtcctatgttgttatccaacactatttgttcaaatccgaaat

SEQ ID NO: 279 - DNA, 205 bp, Avena sativa
caggcttgctggcatgaagtgtgcccattcctggaggctgcataccctgccctgtagttgttgtccccctcccctaggatctctcggtacttgagcagcagtgccgagcagcagacagcgacgtcctcgccctggtccagccgatccctggtggcaccacacagggattgcagccatggggcgcggtcagcgtcggtaagaggga

SEQ ID NO: 280 - DNA, 463 bp, Avena sativa
gatggacctccagtgcagaatattcattggcagctaacggcaatagtacatgtctaacctttttattcaagtaggtaatggtactccacataatctaagttgagtaccgataatgttgtcaagttgtgtaccaatggtgacacaaaaggttttaacagcaatgccgtaactgtgccaggcacagtgttgcacatgcaagtgagcaccgacggctgaacaatcatacgagtgagtaataaccaacaagccccatgccacaagattctccttaccactttgttggaccaaccatcctatcctgagactttgtggtcttttcccctcttttgctctccttctccccgcccgcgtttgtggtctttttgttttcaaaaaagttggagtgggaaccggggggagagaaagctagtagacctgattgaacatgcccaagggcgttctgccaaagctgcctgcccttcag

SEQ ID NO: 281 - DNA, 331 bp, Avena sativa
gggaggccccgacagtaaaattttatcaaagagtagaaatatatacaacatggaatggaaggagggaatgcacatatgggcctagctcagggcatatcccaagtaaactacagagcgtctagccaggcaataagaggggattacagatcatccttcattctgtaagaaagaaggaagaagtctctttaaaagaaaaggacaaagctctaatagtaagtataatattataaaaaatgagagcattcctttgcttccaaatgttccaggatgctgtgccaaaagcttcaaaaagaaaggccttccaaagttgtgctttggtcatggcaatcat

SEQ ID NO: 282 - DNA, 556 bp, Avena sativa
taaccaggacaatggtataaacagaagaaccagaaagacttcaaatttagggcataaattatttacactgacctaaatgaggccacacattacacaagaaatgtcagagctcaagtcaattccagggctcctatatgaagagagcctgttgacatcctgcttccagataacatgagttccatgagtgttctattgtctattgttctaattatattgcattaaataatcaaattcacgtaggggacaatatattaaggaagaaaaagccttcttgcggaaaaaagttgacacttagcatcagtttgttctgacacaaacaagtaaaacaaaaagataaaaaagcacaaaggtacaggcacacacaatcatagtaatcattaccaatatgaagcaaccacatgtatgtgatagcaaataactattgcagggacataagattgacaatatttacctctctcctgaacccctgttgtttttctgtttgctgctggaccaatgcgcataggtctggaagaacaaggcattccattcatttcagtcattgcacgagcctgcy

SEQ ID NO: 283 - DNA, 349 bp, Avena sativa
catatccaagggggcgaagaggtggctgcagtgaagaacacacggtagctgcaagacaggcgctcaagccactcaactccatctgaccaatacaggtggatatggcactcgcaagtttagttgttgacgcagccgcactgctgtccgagggcaaatttccaaagataaatcttaggtgccgaaagactgccatgcaagctatccttgcaagctcgctgcttggagtcacaagttcaaggtaacgggaaaccagtttccgaccctttggtagtgagattacgcgaagaaacaccaggtcatcatttggcgatagaggcacgctcttatttggtccaagtggatcaactaa

SEQ ID NO: 284 - DNA, 459 bp, Avena sativa
catcccatgactccttgctggtccaggaaggatcgttcttcccggtgtactcgtacatccaatgaggccgggtcgccaacgggaccaagcatcgcccgagccagcagttatacaggttgattgtggacaacccttggtccttcaacttctggatctggtccatcatctctgtgacggccatcctctgatcatcggggagcttgttagctgtcagtcggcggggctcgcttctctctgtgatgaactcgggtagcgccacttcgccggagggggtagactccttcacataaaaccatctcttcttctattcgttcgcggccttcttcggcaacaggagcttgatgaaattgaccttcagcttcaactgaaatgtaacccctctggctgccaagatcgggttgccagacccctcgcgcccgatgcagccatggaacaactccaaccacagtgggaagtacg

SEQ ID NO: 285 - DNA, 538 bp, Avena sativa
gagatgccgcggcacgggacgaagcggcctctctcggtggaggaagagagggggtatcgcgagtgcgaagtgcgcaagaagttgatgcgccataagtgggaggcgctaaactgggacctgtggcttgggtgccttgcctggaggacgcgagctgctggagatgcctggctttgttgccgcgactgagaagatgatgctggctatgcggaagaccaatgcggagtttgcaccgccgcagggtgcacagaagcccagctccagcgccacagctagagtagatgctttgcacgagaagttggcgcagacgaccaaagtactaacaaaggtactccatgaggggagcgtcctacaggtcgcaacgaagctcatgcggctgctgtgcccagatgtcggttctagcgccccaactggaggcggtttgggcgggaatgactgggggctggttgaggaggcgataggcaatttggtgaatcagaccggggagggcatgcaggtatgttgttttcttgtatgtgcttcatcctgatgttaaattata

SEQ ID NO: 286 - DNA, 279 bp, Avena sativa
catcgtagtgttctttgttcttgcactaagttagcacctcacaatgggctatcctttcacatacaaagccaacctacccatggagatgaagggcatgcataccggtctgacatcttcgtatctcgctatggttcctgttagcgacggtccaacaatcatgagtagtaggtcttccagcagaaagcagcccgaaaaacactccattgcggcattggctctagtgtagcagggttgtaggtgtagctagaaaacaacttcactacttcacgggtagagaaa

SEQ ID NO: 287 - DNA, 326 bp, Avena sativa
caggggtttgtacactttacccgctcttaccatgacacgcattttgagctcaatttgagttgccgaatttagaagctatgacatgttctcgcttatcccaatttcataatttgataaaacttgtggttaacttaattgggttgtatgctgaaagatcaaatggtttaaaaatgataggatgaacttattttgatgttgcaaacatgccttgaactccacaagccaaataagcatgtagtgtatagagttgtttcacactctaatagttccacttgccaatacattcaaagtattgacctgactagtttggctgcaaccttttatgc

SEQ ID NO: 288 - DNA, 248 bp, Avena sativa
aacatgtgataggtacaggccttggcagcggatcggcatggctgaggttttggagaagttggtccttagtctagtgactataccaaacattgaagtattctgatgatcatgacggcgtttgatcacaccgatctgatgaatatttgccacatcgcctacttatggtgatgcacaaatgatgattctcctaccagaagtttggagaggaggccttcgtccgtggctaagtcaagcaggcactgcactgg

SEQ ID NO: 289 - DNA, 481 bp, Avena sativa
agtgcagcctcagtccccgggaacctgctcatataactggagttggggcgcagtaaattagtactcatcctcctcctgtgtacttacttgatggtgtggggattaactgccccgagtgaaatcctattagtaatgcagctgacctcattctcaatggcccgccgctgcccagatcggctctctacgtgcgacaggggacgcctcctggcagtgaattcgcttcactaataaccctcccgaggtggatcccgccctggtcccttgtcttcttgttgtaagatggaggagagtttgttgggacgcgaaggccgaagggtaggcaaagcacggttatcacattattatgctgctgctgctgccgcctggcttcccccctactgggacagaggagcagatttggggctgggcgagacagacgtcgcacctactgtcattatgcaccagtttattcgtgggacttgtagtactctcgcgatgttaa

SEQ ID NO: 290 - DNA, 595 bp, Avena sativa
gatcatcacctcctctcaaccgatcaatcaagctaagctcaagctcaagcatcatcaatggagggcaaggaggaggatgttcgcctgggtgccaaccgctactcggagcggcagcccatcggcacggcggcgcagggagccgatgacaaggactacacggagcctcccccggcaccgctcttcgaggcgtcggagctcacgtcgtggtccttctaccgcgccggcatcgccgagttcctggccaccttcctcttcctctacatcagcgtgctcaccgtgatgggcgtggttggcaacccctccggctccaagtgcggcacggtgggcatccagggcatcgcctggagcttcgggggcatgatcttcgtgctggtctactgcaccgcgggcatctccggcggccacatcaaccctgcggtcaccttcggcctgttcctggccaggaagctgtcgctgaccagggccgtgttctacatggtgatgcagtgcctgggcgcgatctgtggcgccggggtggtgaaggggttccagacgactctgtacatgggcaacggcggcggcgcgaactcggtggcgccggggtacaccaaggggg

SEQ ID NO: 291 - DNA, 588 bp, Avena sativa
gctaaactaagctatctggagcaccatctcttgcgagatacctatacgaaggaaacagtacctgcgttgcataggatcaggaagtatcttgtggaggcaacgaaagaagcatccaattcctataatgaagcggtttcacgactccgtgagtatcaaggtgtagatccacacttcgatgtgatcgcgaggcagtaccatgagattgtaaagaaactggagggcatgcagtggacgatccatcaggtcgaaatggatctgaagccagcttcatcatgatcacataggcgtctgagtcccatcactcatggaaaagagatatctcatgtagaagtgtttgttacccactcaccagaatgttcagggtgtgagtttcgttgaatttgttgtttgccggctcatggctgagtagactttcaccagagttgtccacgcatatatggcactggtggttgtgttaatctgtttgatatgtatgtatgtttttttgttcttctagacatcatgtgtgttctgtttgctgatagtatgatagtatgttctgtttgctgatagtatgataatcttattggactcagaagacatcatgtg

SEQ ID NO: 292 - DNA, 527 bp, Avena sativa
gaatcacatggttggattactggaggaatgaacagtttttcatgatcgggtcgacaagtgcatacccagcagcagtgctgcacatggtggtaaatctcctcacaaagaagggtatacacttcagagttacttcgaagcaaacagccgccgacaccaatgacaagtttgccgacttgtatgacatgcgatgggtaccaatgctaatcccgacagtggtagtcttgatttgcaatgttggtgccatcggtgtagccatgggtaaaactgtagtttacatgggagcgtggacaattgcacagaagacacatgctgcactgggtttgctcttcaatgtgtggatcatggtgctgctatatccgtttgcattggcagtcatgggaaggtgggcaaagagaccagtcatcctagtcgtcttgttgccagttgcctttgtaatagtttgcattgtatatattactgtccatatcttacttggtggtttcgttgtcattttagctagatgatacagtagaaaccattgtactgtt

SEQ ID NO: 293 - DNA, 463 bp, Avena sativa
atgtacctggcaatatggtgtacaaggaaagccgtttcacggcagcaggtgatactgttgttgcggtggatacgtcccttttgaacgattgggtcttacagtttgctatgatttgagatttccagagatttatcaatgtttgcgttttaagcacaaagcacaggtcttgcttgtaccatctgcattcacaaaggtaaccggggaggcacactggggaaattcttcttcgtgctcgtgcaatcgagacgcaatgttatgttattgctgcggctcaagctggaaaaacacaatgagaaaaagagaaaagctaatggtgattctataattattgacccatggggatagttatagctcgacttccagatcgactgtccactggatttgcagtagcagatattgacttgtcaaaagttgaggctgtgcgaaccaaaatgccaatttctgagcaagcgcaagttcgaca

SEQ ID NO: 294 - DNA, 638 bp, Avena sativa
ttacaagtggagtagatcattatagagggcaatgggcatcaacatcacttacacaaaccccacgctatggtttcaaaatatggccagagcatggatgcaacgttacatgactgcttaatcccagctgatctgcttatggtctctgcacataggggagaggccatggctggacaggtaagcaaacagcatctgtatcttccggttgggggacgagccattcactacacagttggcccagatgttaaccgtggacttaagacagtccaagggtgtagattccggcgatgcattcgtcctcggaggacagtcgatcctcaacctctgcgtcggtgaaggtgagagctctctgcaactttttgggactgaaaacctcgatgtccacggtatacactgctttaacggggcggtgatcggatagcctaatatcgaccgtctcgtaggacagcaacctcatccccttgccataggaaagaatgcggtcgcaccatgcaggtgtcctcctcccagattttggctcatcactcgtgtacttcttcgagttgaacatgtacttgtatgttggagcaaagctgataactccttccgtccacccgtcaaatacacgtcctttcctcagttctagccttagctgtatcccg

SEQ ID NO: 295 - DNA, 883 bp, Avena sativa
aggaaacaaggctgaagctgtttgggaagactgtcgtcatcccagacccgaggaaaagatgttccttagaagcagggcatgaggaaggcgagcaaatcccacaatcctctaccaaaggaacatcgcaagccccatcagctggagagactcttccagcatataccacgccaaatgggtgggttctcccgtacaattcatatccaccccatctcggcgaatcagcggtccctttgcacgtgtggtggccatactatgggtttccagttggccatccaaggggaccaccgagcgcagcgccgcacaatgaaaccaccgatgagagcgatgttgtgaagagccctccggtcgagtcgagctcggacgactccgatgacagtacccaggtagccagcaagaagtggaaagtactcgagtcgatagaaacgactcggcgcccacggtcggcttcgacatttgagctgaagccaagcatgaactcggcctttgtaagagtgaagccggtcagcggcggagatcagccggtaaggggattcgtgccgtacaaaagatgtcgagccgaataaccagagcgggggagaatatttcccccgcgtctaatttaactacgagttaccgtaggagcctgttcccacatattcttgctccagtgtattcttcttagtcttttttacttgcagagattggcggggaatgtttgctgctcgcgtctctggtaaaatagcaggcgcgggcagttgctgtaagtgtagtctggaagaaactttttgtagggatatatatgccaatctctgtctcttctaatgttgatgtaaaagcaaaagattcttgtgttgctcttgctgaaagttgttgattcctaatggaaattgatttctgaatgtgg

SEQ ID NO: 296 - DNA, 637 bp, Avena sativa
acatcatggccttctgcaaggattacaatgccaagacggcagacaagcctggatacattatccccgtcgagatcaccgtgttcgatgataagagcttcacctttatcttgaagacacccccggcctcaatactgctcctcaaggctgcaggtgtcgaaaaaggttcaaaggagccacagcgcgagaaggttggaaaagtaacagtggagcaagtacgcgtaattgctcaggagaagttgccagacttgaactgcaaaaccatcgagtccgcaatgagaatcatagctggcactgccgctaacatgggcatcgatgttgacccaccaatccttgtgaagaaggagaaggtggtcttctagtccgtccgtcatcacggagaaaacaccctagttatgtccatttgtacattttgcttcctttttgtttgcaaaacctctgcagtactcgggatttccccccggtcgtttgagagcaaacagtgaggatcctcttcttgggaagctgtaatcatttgtttcggttattgtagagtgctctcacactgcatgtttgcaactatattttgtcctagaagttctatcattatgaaattcatatgattcgttatatctgaaaaggacgtctttgtgtggtacaa

SEQ ID NO: 297 - DNA, 821 bp, Avena sativa
gcacctctagcaattgttgataaaagaaggcatggacacaacgttgctgaggtaatgaatcttattggagatgttagaggaaaagtagctgttatgatggatgatatgattgatacagcaggaactattgccaaaggagctgagctgctgcatcaagaaggagcaagagaagtctatgcatgctgtacacatgctgtttttagcccacctgccattgaaagattatcaagtggtttgtttcaagaagtaatcatcacaaacacaatccctttgaaggaggagaagaacttcccgcagctgaccatcctctcagttgcaaaccttttaggggagacgatctggcgtgttcacgatgattgctcggttggtcacgcgccgtactccaccttggatatcgactgatgcttgtgttaccctcatatggtgcttccgtccgtggaggcccttgtttgaatgatgcctaggaatagttgtgcaatgcccttgccttttggatcttatcctctttgctttcgtggaataagctctcagcgtgatctgagactctgttggctgaaaacaacctgataatgtgcttgaatggtggtaggctggtagtacattaggtggaagtttggattgtgtaatttacgccgtatgtgtgtacataggcctgcttaatccctgtcattcgttcttatttctattttattagaagagagctattatgattggcttgttctcactggcataagagttgacgatctatgttcccttttgcggaataatgttgctatgcacatgacggtgggaattcttttatatatgtctacttcagacaa

SEQ ID NO: 298 - DNA, 667 bp, Avena sativa
gaaggcggctgcagccactcctttgtactccaaatggtggaatgggcgagatgggtactcacatggcaatgtgaagcaatgagcaaacaggagcccttagacgtgtgcagttctgattccattaacttgccgtatcctttccccttgcattcagaggattgcccgtattcttatacccgccagtacaaccatgatggtcccatatttgtgatcatgcttgaacatgataagatgtctgtccaagagctctctgcaaactcaaccatagtcgatctgatggagcgagtcagcgcgaatggcccaagattgagcccttacagcttcccactgaaagaagagctccggccaagagttaatcaccagcccttgagtgacccgaaccggacgctatgcatgggcgacgtggtggagctgacacctgccctgccacacaagtcactaactgagtacagggaagagatccagcgcatgtacgagcgaggcgggttcgccctcgccaccacccgtggcagttcgacaagctgacagcatagagaatgctaccatgtaacctaacctgctgttgtaaatgtacaatgccctcaatctctgtcaagttccctgtaaatatgaactaatcctcgcagcacgagagaaaagccaaatgaacaccccaattgaactgtac

SEQ ID NO: 299 - DNA, 878 bp, Avena sativa
gcgtttgcttgatttgttcatctgtgtcgaatccaatggcgcaggagagctgtgatctcaacaaggacgaggccgagatcctgaagccatcctcctccactgcaccttcgcctccttctccaaccacaacctcggtgccgccaccaaccgcccaaataccagaaccacaacctcaacaatcgccactgcaaccaccgccagctcaattctcgtccaggccctgcgaagttgttctcatagagccttccaaaaagaggaaacgtgccgatgctgatgtggatgccgtcacgggtgctgaagcggtggtggcaatggcaatggcagttgagccatcttcgccagtgctgttcgttaaccgttgcaatgtctgccgcaggagggttggtttgaccgggttccgttgtcgctgcgagaagctcttctgtccacgtcaccggcattctgagacacacaactgcccatttgattataagaccgccggccgcgaggagattgcccgtgccaaccctctcatcagggctgccaaggtcattaagatatgaggttatgtcatctaagaactatatggaagactaaatcctggagatgctgcaagtgaatcatgctgtcattccaagggccatccataagcacgatcactgccagtttgtgaattcattccccatacaaccgagctcttggtgccatgtggggaaaatgcttcactcttgtcctttgtccgtctacggttcactccatagctccccaagctaccatgaaggcggatgatggaaacctgtatgtccagtcataatttattggatccaaagatttattgtagtagtatatttgtaattttacgtcttgttcagtttttattccaacacaattgtgtgtta

SEQ ID NO: 300 - DNA, 881 bp, Avena sativa
gacagtagcaaataagttcacaacaccaaaagtagataaagttcaaccagatgtgttgtggcggcgagtgatgatctcatcttgtctatccatgtagaattgcttttgtgcagcattcataccagatgtatccatgagcatgatcttctcatctaattcaaactgtttacgtgcatcctccctctccttccgtgcatcctccctctcttgcaatgcaatttgcttttcttgcaattcaaaagctcgagcgtaccgagcaatttttgtggcctctttgatatcatccttctcgatcttttgtgcccacacactttctaatgataacttgcaaccattagcatcggatacagaagctttacctttccgcaagcgctctttcttctcgttctttgcaccatgaggtcttttctcttcttctagagcatccgtgcaaacagcatcagtgcaaacagccctgtcctcatcgttggaggttgtacctggacttgcatctgaggtcttcttttgtttcttctgtggaagcggacgtgtctgccatttcggatacttctcaaactctatatagcaatgcattagtgtaaatggcttccttttaggatccaattcaatgtacaggaggtgtgcatctctttccttgtcagcgagagtcataccactctcatttctatttattatttgttgaacgcgtgcacaaaacttgctcgtgagagctgaaatgacagtataacggcaagagagtccattagaattacgctccggccatgatggttctctatgtgtgttgtagtaatctaaaatccttccccaataagaatttgaattctgatccgtcccggtcaccgcatccaaactggtgtttacccatgcttggatcaacacct

SEQ ID NO: 301 - DNA, 741 bp, Avena sativa
cagggaagcagtggattttgcaggtctccaagaactaatgcaaaagacaggatttgacatggatgatgtagtaagaaagtacatccgatatactctgaacgaaaaacaattcaatcctgatgtggttgtggatctcatacatcttaggaaagcatcaatgttagaagatgctgaagttgctgaaattcttaatgagatatcaagaagaattgttcgggaaaaaggtccaatagttatggacttaactggatttacagaacaaggttttaagcggaagcttgctgtgcaaacattgtttggaaaaatcatgtacttatcagagctcccagagttctgttctcgcgacagctcgcttgttgtcaaagaaatctttggagttacagatgaggatgcagacagccttcgcagtcacaccctttctgaagccggtaatatcgagtcgttagaaaagatgattgacgattctgacttcggaaaaggtaccccatcatcatcgtcttgaagaatgttgatggaaggatactaagcatcttctacgatagaagcttggcgtgagttttttttcagctgttaaagaagagagggatgctctggatagtcgactgcaagttttgtaaatcgccttctattaggattgtagcttctggcagtgtctctgacctgtctacccacctactaaacaaggaaagctgttgagagaatggtgccaatggcgagtttatataaagtagcaaatttaag

SEQ ID NO: 302 - DNA, 778 bp, Avena sativa
gaaagcagggataaagatcagcagcagcgaggaacgcccccagattgattttgctttcactgacgcggatgtaattgaagagggtacactgtctgccgtcattgggcgccggaaaatcgagagtggggagccttcttttcattcaggagaagggtattgttaaatcggctggcaaggttgcatttatcattgacaacgacaaatatgtgaaatggtgttgagggttctattccagttttgatcaaaagtatcatttcagtggaaactggattgatacggctgaagagattgatgatctgttcctaggcgacgcagaggtttggaggaggccatccattggaactgccggtccatcaggaggcgacttcccattggtaaccaaggagggctatcacatacttgatgttatcttcacgacacccatccaggatcttggaaaggtagcagaagacttggagaaaatcgtaggcgtagtggaccatggaatcatttacaacactatttcgtatgctgtcattgcgtcgaagggggaagtgaaggtcttggatcagaagtcgtcggtgataccaaacacttaagtctaccaattaagttgaagaggcaccatttccctcacattttgacagccgagattattgcaaataatatatccaattgtgtggtaattttttgtgtgttacatgtccaaagtgatattactttatgtgctacatgtccaaagtattcccctcctggacgtatgaagatattcacagatctggagttactgagtcaaaaa

SEQ ID NO: 303 - DNA, 885 bp, Avena sativa
ttcctattgaattagtcctgaaattagctttagacattgctcgtggaatgagttacctgcactcgcaggggatacttcatagagacctgaagtcagagaatgtgcttctcggggaagatatgtcagttaaagtggcagattttgggatttcatgtttggagtcacagtgtggaagcgctaagggttttacaggaacctataggtggatggctccagaaatgatcaaagagaaaagtcatacgagaaaagttgatgtgtacagctttggaattgtcttgtgggagattttaacagctttggttccattcagcgaaatgactcctgagcaggctgcgatagctgttgctctgaagaatgcgaggccaccgttgccttcttcatgccctgtggcaatgagccatctgatatctcagtgctgggcgaccaacccagacagaaggcctcaattcgatgacatcgtttcaatcctcgagggctacaaagaagctctggatgatgatccatcgttcttcttgtcatacataccgcctccgctgaaccatcaccatcagcaccaacagagccttctccggtgctttcctcgctacaaatctctgcgacgatccgcatctctcaaagcatgatgatgatgccgggagtgtcttcttcgacatgtataatatgcaccttcttctgagtttcttcttctccatgcgccggcccctctattattgtggcatttaggcttgctccgattccgttctccttttcttggttatgataccataattgattcatgccatttaagcttctagatatgacaaagcagtttcgctgcagattatctatggatgctatttagtacttgagagtgatggaaccatggactagcctctgtaattgtaa

SEQ ID NO: 304 - DNA, 609 bp, Avena sativa
agcaaggtatccgttttaaattaaccctacaacctggcatgacatcctcgcacgactgggaaccagaggcaaatgtagtagcatcagaaatgatgccagaaacctcctctttcggattgcaacaaggttgcaagggtttggcatcatgagggagctgcccctcaacactgccctgaacttgcagctcctcggcgtcagaagcatgaccctcgctatggttgatgccgaggcttttgtgcccgagatctgagcgtaccttgtcttctgcattgccacaatcttttgccaacccagcttcaccggggatgctagaatccacaccatgacgaggctggtcgttcttgcgttcttcatcgcacatatcagtacaaggcaatgcccgatcctcagctacagtaacattgccttccaccactatgtccacagaagcccccttactaatctcttcactttctggttgtgaagatgatgcaagagttttggacttcctagagccggtgcttgaactgtaaagcgccatggcattctcaaaaaaggaagttgttttcccagaaaaaatggattttatcatgtaatttaagaaccttgcgcttgatgtccgatcccggg

SEQ ID NO: 305 - DNA, 866 bp, Avena sativa
tctgtttctgtatctcaattcctcgatctagatcgagccactgacacttcgatcctctccggtgaccaagggtgtgactgagcggtaagctaatcacaaattcagacggcagccatggacagcggcggggccgacgagggcacgacggcccgctggatggcgacgcaccgcgggatgtacgagcgcgccacgcgacaccccttcaccgtctccatccgcgacggaaccgtcgacctggtcgccttcagacgctggctcggtcaggactacatgtttgtgcgggaatttgttgcatttgtagctagtgtactgctcaagtgttgcaagcaatcagacagcacggacatggaaataatcctaggtggcttggcttctcttagcgatgagctctcctggttcaagaaggaagctgctaaatggggtgttgatctagtcggtacttctcccctcagttctaatacggagtactgcaggtttctccagagcttcgatgatccagagataagctacaccgtcgccataactaccttttggataattgaaaccgtgtaccaggatagctttgctttctgtatagaagaagggcataggacgccatcggagctcctggggacctgccagagatggggcagcgcagatttcaagcaatactgccagtctctacagcaaatcgttgatcgctgcttggcaaataggacaccggatgctgtcaagagtgctgaagaggccttccttcgggtactggagctggaagtcgggttctgggacatgagctcttctcagtcctaaagcggcagcaaaatgcccaaaatctgaatgactgtgctgtcacttggtggaagtagatgatatcatggattcagact

SEQ ID NO: 306 - DNA, 692 bp, Avena sativa
ggccgcactgggtggagtcataaacaaggacaatgctgatgacatcaaagcaaagtacatcatcgaggctgccaatcaccccacggacccggaggcagacgagatcttggcgaagaagggcgtgctgatcctgccggacatcctggcgaactcgggcggcgtgacggtgagctacttcgagtgggtgcagaacatccaggggttcatgtgggacgaggagaaggtgaaccgtgagctgaagacgtacatgacccgcgccttcagggacaccaaggagatgtgcagcagccaccactgcgacctccgcatgggcgccttcaccctcggcgtcaaccgcgtcgcccgcgccaccgtcctccgcggatgggaggcatgagctccggccgccacaccgatcccttcgctctcctgcccggatctcctccttcttcgatcatcggctaatggggattctgtcgagtcgcagctcaagaaaagaactcaataagtccgcatgttctgtcaatcttcgatatctgacagaacggtcgtaccagtaatgcagtatcgatctctactggacgctgtatcgtctcgtcttctcggaattcgtagctgaaatgcggcaatgtaatctagtttcttggaaactttgatcatggaatttacaaatctgttgcttcagatcatgcatccatatgattggcatggca

SEQ ID NO: 307 - DNA, 764 bp, Avena sativa
cgagcggcggaacgtgagggtgctcaaggccaactacatccaggagttctccgtcgtcggcaagtacgacgacccgctcgacccggccgcctgcgtgctcgacctcgccgccatccacgccagggaggaggctgccctcaggcaagctgagattgaagctgagagaattggtgttggtgtcaccccagatgctcaaagattatttgatgcattgtccaagacgcttccagttcattgggacaagaccgacattgttgtaatgaaggaagttcgtgtatgcagtccatacctgcctgaaaatgtcagtggtggaacatcagctgctaatgaacgggtgaaaaaagtgctggactttgaaagaaaaagactacatgtgcgtgtacctggccaattctaacttattcggcttgacgatttttcgcctcaactcttgctgtgctctatttctaaaactgaccttgtccattttgtatcatcatttgaatttcctaaaatcggtttagcatgttattgttctcacaaactaccacaccaactagctagtttgtacactgtgatagatggcatacatgtgctggataattacagcacactgtgccattaattctattgctgttagtaggtgtgtggccgagacacctaattctactggtggagctaagaagagacgcggggctaaggcaaaactgaaattaccctctcagactatgtattaccttgctgatggaataaaacttccagcttgttctgttgtaaatactaaa

SEQ ID NO: 308 - DNA, 599 bp, Avena sativa
  modified_base (560)..(560): a, c, t, g, unknown or other
gcagtcagtaaactacaacggagtacacttaccatcttatcatgaagaactgcaaccatttctgcaaagatatgtgttacaaattaactggcagcaaaattcccaagtgggtgaaccggctcgccagaataggtgccatctgcaattgcctcctcccggaatcgctcaagatctccccagtgggccacgacccaaatagccagcccgaagactgcgagaagaggcgtctgaggaatccgctgagctgtttctcctccatctccagccagcgacagctccccccgtcgtcctctttccccccgtcgcccgtgaaagagcccgtaccaccgagctgctcgtcgaaaaagtccggcgccgcgtcgctgaggaataggtagccagtcagtgtaacttttggtactaccaccaggttggctaattcgggcagcggcgcatctggacggcactagcgtgtgccgtcacggctgccagttgatttttttcttatctccgctcttgcctaatgcttgtcgatgttgttgtcgttgttgtatcatgtaatccctgtcagtgtggctacngatctcatttgggtgtatggattcagctcgattccaccg

SEQ ID NO: 309 - DNA, 826 bp, Avena sativa
cacagcagagacagagttttgcgacgcgttaacttgcgtgaattcattctcttcctattatcaggcgtatcagactgtagcgcatccgattgacccgcgccatcgacacaatatataaacatagagacaacagacgcaacgtgaacaagcactacgctttatgtggactcactccataacaaaaacaaactactggatagaaataagacaagatgcccgtatactgaagaagctcaacaatcagatggccttgagagtaatctgagccccatgcgcaggctccagggttgccacaacatatggcgcgtgggtatacgttggtgcgagctcgaactcaaagtgctgaaggatcatacacagggcaatctttgcctccagcatcacaaagctctgtccgatgcagacccgtggacccgaaccaaacgggagatatgcgccttggaattttgaggcattgggaatcccgtcggcaaatctctcaggccggaattcgtgagcgtcgctgccccagatggctttgtcgtggtggatgagcaggacagggatgtcaaagatgacgccggcagggtaccttactcccccaatctcagcccccctggacgtttccctcttcatcaagctgatcggagggtatagccggagaacctcgtgaaggatcatggttacgattttgagtcggctgatgtcttcgtagttgggtttgttgttctttccaaacagaccaaggacctcttctctggcagtaacctgccactccgggtgcatgctcagaacaaccatggtccatgtgagaagtatggacgttgtgtcggatcctgcaaagaag

SEQ ID NO: 310 - DNA, 591 bp, Avena sativa
  modified_base (123)..(123): a, c, t, g, unknown or other
ctcatacaaccagccttggcaggaggcattgctcctccattgcttgctcgtatgcgcttgctggctggaccagagctaccaccgctggaacaacttgacactgccttcttttctttttttttnttttttttttttttttttttcttagctaacaaagatattaattaatagtcagtgcttgggaattacatgcagaacttttttttttgcttagtgcttttaactgaattacaacacaagatctcaaggtccacatacacagcatacatactttacattcagttttttcagtgcgaaagtagacatgactgctaataaccagacagaacgaagtaacagcttctagtagtgatggggaggggagggagggggtgcaaacctaccgttggagtcagtcgctacaaaacagggcaacggtgatgagccagcatcatctcggctcttgtcatttggtcattttcgactgattctaccggtagtaagcctggtgaaagggtggggccattgaattgccgtagactcccaaaccgctgttgtatccggcatagacagggtaggtcaatacggagggggtgggtatgacactgcaat

SEQ ID NO: 311 - DNA, 813 bp, Avena sativa
catgacaaaagtgttggagctgtcattgttggacttgatcagtactttaactattacaaaatgcagtatgcaagcttatgtattcgtgagaacccaggctgccttttcattgcgaccaaccgtgatcctactggacatatgacacccacccaagaatggccaggagctggaactatggttgctgcagtaagttgctcagtgcagaaagagcccattgttgttggaaaaccttcaagctttttgatggacttcctgttgaaaagctacaatttggaaacgtcaagaatgtgcatggttggggatagactagacacagatatactatttggccagaatactggatgcaaaacactccttgttatgtctggcgtgactaccttaccagaactccagagtgcttcaaataccatccatccagatctttacacaaactcagtgcatgatctcgttcacttactgaagtcgtaatcttccacttcgtaattggcatggcagatgcagctcggttgagtcccaactacattaccagcgacaatccctgggaccctctgaataacgcctaacaagattttacagaaacatcgtatgtgatcctgtcgggttatttcaacaacattccattctttgggtagctgtttgctagcaaccctggcttgtatcggtcacctgtgtaccacttcaactcaatttaagccctaccatttacaagtcaatttcataacaacatgtttttattatcatggcaatgctaaagcttctaattggccaatattggacagcgtctggatttcaatgaaatttatacatgtcact

SEQ ID NO: 312 - DNA, 580 bp, Avena sativa
acgagtacgaggcggcgcccaagctgttccactacagcgacgccgggcccaactgcgtggccgtgggcagctcgccgcgcttccgcgtctacgacgtggacttcggcttcggcaagccggagcgcgtccgcagcggcgggaacaacaagttcgacgggatggtgtacctgtatccgggccgcggcggcggcagcggaggcatcgacgtggagctggcgctgcagccggagcccatgcagaacctcgagaaggacggagagttcctgcaggtagccaccgcctgatcgcgactacgtacacgtcgctgcctgcattaattagtgagcttattaagtaagcaagtgtttgagatttatatattgctttgcctatgtacctacaggtgatgtgtgtgtgccctagcctagccagcttcattatttcggtcgttatctttgctagtattgtgtgttgcttgctgctacggatttgctccacttgaataaggatctatagtttgtgcaaagacacgatcctcgttgtcatgtactactaatgtgtattgtaatcatccatctggatttgcatattttgttacgag

SEQ ID NO: 313 - DNA, 735 bp, Avena sativa
catagctaggttttaaattctgtagtcagcaaaatgtatttaggttggttagctggtcgatggtatgcacatttgggtagtgccacaagtactgtttaatgacaaatcagctcaaggacataacaaatcataatagggttgagtataactgattacggatagcaggtttgcttgttactacttgttactacagttggatcatgttatggtttgattctaccttttctttttcttttgcaggattgttagcaaactgaagttttgcagttgaggtattctgcttaaatttttactgaggggtgtttctggagtccgtgctttcaatataaaacctgactgcagcaaagacagcggcaagcaggaactctgattcaggtcaaattcaatgtgaaatcaggcaagccattgctcatatctcatcaccacagcagatctgtgtcccacattcccagagattccaatggagtagctcataattgggctgataagattctcagagaaaacctgacccaacctgtcttcaaccgtgtaaagtcagctcataggattaatccatgccttgtagctttgctgcttcaaaatgcctcttggcatggctatgtaaaccatgccgttctatgcaggtgagctggaacgaatcacgccattggctcctctgcttgctattcgagacggaaaaagaaaatcctttatcctgaaacaatttctgcagtccgaatgatagtcctgcaattg

SEQ ID NO: 314 - DNA, 698 bp, Avena sativa
agcagcatgggagatctttaattctctagatgtcaaatatgtgcttgttgtgtttggaggtcttgttggctaccctagtgatgatatcaataagttcctttggatggttcgcataggaggtggtgaattccctcacatcaaggaaccggattatcttagagatggccagtaccgtgtcgatgctcaagcaactccaactatgttgaattgcctcatgtacaagctttgttattacaggtttgttgagactgatggcaaaggctttgatagagtaagaggatatgaaataggaaagaagcatttcaagctaacacattttgaggaggttttcacgacacaccattggatggtccgcatttataagctgaaaccccaaaagaacagggttcgaggcaagttgaggaagttgaaatctggttccaaacctagttccacgccttcagcggcccgaaagaacccatggcaatgaagagagagagaaggatgcgctccattttgttgaaacttgatactgtagcttaagcgcactaagctcggaactagaatactacagaattagagtagaattgttgtgctcggaatttgacaagcaatatgttctttgcggaagaatttttgactgatgagttctgattctctcactttgctgtgacactctttaccgtgccaatctataacacatgtgttaagtgtctaaa

SEQ ID NO: 315 - DNA, 751 bp, Avena sativa
tcgagtctttcgctttggagcagttggaagccaactctgcaccacctgaagttcatgagttgactagcgctgatgtgatggaagagaagtgtgcttctgctgccatttgctttgtgtctttccttccagacatcctggactcaaaggcagaaggaagaaacaagtaccttgagctactactatctgttgccgagaaatataagaagagcccgtacagttttgtctgggcaggtgccggcaagcaagctgatctggagaagcaggttggtgttggtggttatggctatccagccatggttgctctgaccgtgaggaaaggagtttatgccccactccgtagtgccttccagctcgccgaaatcagcgagttcgtgaaggaggcagggcaaggcggaaggggcattcttcctgtcgagggtgtcgccacggttgtccagaccgaaccatgggacggcaaggacggagagatcatcgaagaggacgagttctcgctcgacgagctcatgggcgacagctctccaccgaacgacgagttgtgatcctggtgggttctgagacgatcttagcttcagagtagccagaccgtgtaaatctgaggaacactaatgcttcacttgttcttgtactgtactactgtacaatttggacgggacactttttggaacgttttcctccatactggaatcatttgaagttgtggtagaaaactttaatgtgcaaggcgtggttgttttgtccccgaaataaaaaa

SEQ ID NO: 316 - DNA, 874 bp, Avena sativa
gacgaagttctgctctgaaaggattgccaagtacgcctttgagtatgcttacctcaacaacagaaagaaagtgtcagcagtgcataaagcaaatattatgaagcttgctgatggtttgtttttggagtcttgccgtgaggttgcaacgaagtatcctggaattgaatatagtgaaatcattgtggacaactgttgtatgcaacttgtttcgaagcctgagcagtttgatgttatggttaccccaaatctgtatggcaatctggtgtctaatgtagctgcaggtattgctggaggcactggtgtcatgcctggaggtaatgttggtcagtaccatgccgttttcgagcagggcgcttccgcaggaaatgttggaaatgacaagattgttcagcagaaaaaagctaaccctgttgctttgttcctctcgtccgcgatgatgctgaggcatttgcagttcccatcattcgcagaccggctggagtcagcagtgaagcgtgtcattgcagaaggcaaatacaggaccaaggatttgggcggcaccagcaccacccaggaagtcacggatgcggtgatttcaaaactcggttaacgaccaagaccaatcggcaatcgtgtactttttgagacaaatccctccatcggactaggctttagtcctgactgattttgttggttgtagctttagatcatcattttattcagcaatcattgtaaatcttcaggcgtcttgttctggttttgcttcagaataatttgagcaactcaccaggcagttattgccatattataactggaaataagagagaaaatagtaaaaaacaattctctttttaacctactatctgctgccattgcgtttatttgtgcttttgaa

SEQ ID NO: 317 - DNA, 797 bp, Avena sativa
ttttttattcaccatccaacatgacaaccatattttactactacaaatagctgcccccaaaccaaatgagcagcaaccaaaaacagcttcttctaaggtaccagcaactagctcagagcaggaaaagctttacaaacgaggagaaaagatgatggacatctcatgtgatcatggcaccaggtgaggaggttaaattttctcggtggccaaagaaagaaccaaaaactaattgagacatgtcatcatcaatcgccacctgtgctgccacaggcaaggagatggtgtggacttgatacatgtcacatcacctcatctcatctcatgaatctaactgtttcttctttctccctatctcctacggtcctaccattctttgggctaatgaatttcctgatggcctgtgtcacctcgtcggctgatcagatgcctggttgttagatgcggctggagctgatgacatcgccgggtgggctccgttgtcctggggaggggcaactccccactttgggtccgtatccaatggctccaccacatgaactgccccgtcactcatgccaactgctatctggttaggctccaagggatgtgcggccacaaccatggggtacacacttcccccgcttgatattgaaggaggaacataagcagaaagtgcaatcctgcaacgtaacctaagagactctgcttcaaatacgccaatagcgccatcacagaatccagcataaaccagaagaccatcacaagagtatattgcactcgaaaccggagctggaagtgcatctcttgggtaccactgc

SEQ ID NO: 318 - DNA, 792 bp, Avena sativa
ggttgattcaccgacctaacaaccagttggatgaaaagaggcgcttaagaatggcacttgatgtggcgcgtggtatgaattatctgcataactgcacaccagttatagtccatcgagacctgaaatccccaaatctactggttgacaagaattgggttgtgaaggtttgtgattttggtctatcgagaatgaagaacaataccttcttgtcatcaagatcaacagctggaacagcagagtggatggcacctgaagtactacgcaatgaaccattcagatgagaaatgcgatgttttcagttatggtgtcatactgtgggaactatgtacattacaacagccctgggaaggtatgaacgccatgcaagttgttggagcagttgggtttcagagccgacgccttgatattccagataacgtcgagcccgccgttggagagatcataacaagatgctggcagacagacccaagggcccgaccatcatttgcagagatcatggctgcattaaaaccattactgaagaccatgcctgccaaccaagcaccaaggcagagagtacagcaaacagatggttaggaaagaaaaacgaagattagcagctgctcagcgtccgtaatacaggattgtttttgtacagttactgcagagtaaaaaaaacgtgatgttggtctttgtttcccctgtatagatgtaagttccaacttcyaagagtggatgagccatacgaagaacaaggaactgacatggcgggcggaacagggtctttgatcataccgtctctgtgttgtgttg

SEQ ID NO: 319 - DNA, 599 bp, Avena sativa
ccagcccaaccccgcttgttttcttcccctccaatcctgtgttgactaccttccgccctagaacattcttctcccctcccaacctccagagcaaccatgtctccgattggcgtgggcagcaccctccccgacggccagctcgcgtggttcgacgagagcgaccagctgcagcaggtctccatcacctccctcgccgccggcaagaaggtcatcctcttcggcgtccctggggccttcacccccacctgcagcatgcagcatgtaccaggttttgttactcagtctgaggagctcaaagccaagggtgtagatgagatcctgcttgtcagcgttaatgacccctttgtcatgaaggcatgggcaaagtcattcccagacaacaagcatgtcaagttccttgctgacggatctggaacatacacaaaagcacttggtcttgagcttgatctttcggagaaaggattgggtctgcgttcgaggcggtttgctctccttgctgatgacctcaaggtcactgtcgcaaacattgaggagggtggccaattcacaatctctggtgctgaggagatcctcaaggcactgtaggagcttcatggccg

SEQ ID NO: 320 - DNA, 853 bp, Avena sativa
tacctcaggtggatatattcgtcaaaagtatcaagtatctcaataggattactacattcagcagcttttaacaaaaccatgactggcaccaacaataagaattaccacaagaaaatgttggtgcgtacttaaacaaaaccatacgctaacctcagattatggttgttcaaagataattcaaccaattcagtcatcccggataacacatgtaacatttcaacagtgctgaacaacagcagggcaacttctcgacaagcggcccaactgaaacatggaatgcagatggactgaagctagtaaatgatgtctctgttccccccctacttcgcagcagaatcaggtgagccatctccataggaaaccaaacccttcttcccgtcaggactgaccgaaatagacggggacctatccttacttgcacgcttcggagatggggaggcaggaagggaacgatcttggacaggtggtggggaccttgatcttgacccagacagactcctgctcctggagattgaccgtgcacgtgatcttggtctcccagcaggaggtgaacggctacgtacaggactcctgctgtagccacctccccttccacggtctcgatgaacaggcgggctgcgtgacacacttcggctcctccttctgtacctgttaggcctcggcgatgctcttctgggtgggcttctgtaccgccttggtggtgatcgataccgagtgcctcggtgactcgtatatctttcacgatcaccccttccaccatagcggtgagaacgatcagcagaaggtgaacggtattgtcttgcaaatgcgaaacgttgagtaaagccccgtcccttttacgcgttttgatcct

SEQ ID NO: 321 - DNA, 719 bp, Avena sativa
gttgatttaacgtcagaacgagaaagcgaaggtggcgatgctgtgtctgttaaaataaattccttaaagatagcagaccaggattctgctgggtttcctgatcttgtcgggatggactcagatgcacctgaaactctttctgatgagcatgcaacaaacacaagccccagcgccgagaacaaatcaacagatccaaccgctcatagcattggggatgctaagggatcggcggagtcagaaggtgatgaggaagagtcatccggagaggatactgaagatgatgatgatgatgataccgtgctgacaagacagctgaacaagcaaaggaaaagggcaatggcagccgcccttgggcggagaaggccactcacctcaaggaattcttacaaggacaaggggaagggcaccatgaattccaagatccagaagcaagcatgccagtggtgaatggtatgccaggttcagtttcttgcagggggtcttacaatgggtcaagcctagggacagggcacgcatgagctgtaagagtgttgtgctgagttggtagcaggcattactcttgtgtttgtcttctcagttttagttgttgtactggtgctccttcatggttacactgttgagtagtatatcaaaacaatgtaatacagtatacagtacattatcttgtatcatcagttcagtaatactatttcttacctttgcactgaaactaaaaaaaa

SEQ ID NO: 322 - DNA, 781 bp, Avena sativa
atcagctttgctgaattcgaggcctcagctggcttgggagaagacgatggaagtgaggagaacaagaatgatgctggttatcaggaacagcagatcgagcgggtccggaaatgtcgagctgtttttgaaaggggattcgactacttcaggactaatgctgcagagctaaaggaggaaagagcaatgctcttggaagaatggctcaaaaaggagttgagctttggtgatcttggcgatgtcaccttagtgcagaagaaggcgccgaggaaagtgaagaggaagagaccactcccctcagacgatggctccaatattgcgtacgaggagtacattgattatatcttccctgatgaggtggctctggcgccaaacctcaagatattggaagctgcttacaaatggaagaagcagaagacagatgacacagacgatgactgatctgaacattgagaggctacctgatgttaatgattgcttgcccacagttggagatgagtgccaccatgccaaaatcagatgtagagaagcttcccaataccgtagggttgtaacatggagttttgtgtgcttcctcataccctccctcattcatgcatttggcatcttgatcagttgtgttgcatgtctaacggatatagatgctgaattatctgggttctgttacagaacctcggattgatactgtatgttcaccttaaggattcgatttatccttggttttgttacccttctgttcctttccttgggttgaatgtaacttgacatgtattctttgagttca

SEQ ID NO: 323 - DNA, 686 bp, Avena sativa
gattgataacccccgtgcttcaggatgctgataagcttgatatttatacactgtcaaggaaatggaaggagctggttgaaaaggctcgtgcgaaacagctgcagccccaggagtacaactctggtacctttaccctttcaaaccttggtatgtttggagttgaccgatttgatgcgatcttaccacctggaactggagccatcatggctgttggatcgtcacaaccgacagttgttggtacaaaagatggtagaattgggatcaagagccaaatgcaggtcaatgttactgctgatcatcgggttatttatggatctgatcttgccgcttttctgcaaactctctccaagataattgaggatcccaaggaccttacgttttagatgcatggagtgattatttttcccggaggcaatcacataggatgcttgtcagtagatgtgtagcatggttggtgtgtgaattagttatttgagttgccagctttgttggtatcaggtaactttgttaccttctcctcattggtttgtttttcaataatctttttaccttctgttcagataggtgactagcatgaatattttacccgagtgttccttaattgttgattatgttgagctcgatgtacaagtagaacggatcatgtcactgtcacctttgaatacaaagaatgaaatgaactttga

SEQ ID NO: 324 - DNA, 526 bp, Avena sativa
gactgctgctcatctcctatagagagatcctcgaaaaggagaagaaggagaaagcttggcagaagcagaaaagagaccattgccccaatcgtgttcgagcaatgatgtccgtgccttgagaataagtgatttcaaacgtgcacatgaacaggtttgtgcaagtgtatcttctgattccacaaatatgaatgagcttattcaatggaatgatctatatggagatggtgggtcgagaaaaaagacaacgctaagctacttcatgtagctgatgttgagtacatgtacatacatcataaaccttagcacaaagcaatggagattggaggggatagtggtgcagatttgctgcaagtaaaaaaaaaagctgtaggcatctgttagacgtcagatcaacaattgacggtcagactgagagcaacagggagatgacaaaactgattgataccttgatgtcggccgtgtgtttctgtggtaggtcaagacagctgacatggcctgcacgttccctgttcaagtagtgactgca

SEQ ID NO: 325 - DNA, 672 bp, Avena sativa
aaaatatatgcgctgggcagactacacaatgattgccactacaacactatgtttaacaagagcgcttcggaatgagcatccaaaattactaatggcagcatcaacgttgctcctaccattccagcccttaatggtcacagccatccacactgggatgatggaggtttcattcgcgaaacgagcatcaacagagccagaactcaagacggcgcataacctgcgcaggatgtcatctctgcttggtggtgcgctgttcatagcagatgatgtcttcccggagaccccctacatccacgcagcatggcatctagctgcagcgctgggtgtctgcacatgcaacaagcttcttgaatgatgatatatgaaggtgacattttcttgccattcggcaaatctgttatcaacatactgttgatagcattccatcaactgtcgacattgattattgcacattgcataggtgatcggtttacagttagtcgaactattttggatgattactaagagtacagtgcgctgtcgtagtgagacaaactaccagtttgtccctgtatttgttgtagatgatatattgtacttgttccacatattgtgatgagatgtaaaggtactatgttatttactgttgttgtatttcgatataatggacatgatttggttgttgaacaatta

SEQ ID NO: 326 - DNA, 671 bp, Avena sativa
  modified_base (149)..(149): a, c, t, g, unknown or other
gctgccgcagcacgtggccaaatggtttgttgaatgtcagatgcatctatttgttcaccccacatgcatacctcgccaccaagaaccaacttctgttgttccgggttggtgatatttgtcaatggttcattcatgtaaaatcctggccntaaagcatccaagtgatctaggtaccacttatcctggttgctcacaatgcatctgagaccagcagtaacgactttcttttgcaactccccctccaagccagttatgcaccacagtgttgcggtccaacttgtccccgaagttgttaaatgtttcttttttttgcgaacagaaccaggcccactcattttctcatttcatttctcgggatgatagcaaacggaacagtgacacgggacacgatggaaacaggaacagtagcacgaacacctaatggtaaccataatcatctcaaaccctaagcaatggagtgagacctaggatactctggagcgatgacacgaaacacataaacgataagctaggataactggccacgaggggccccaccattcagttcctccagttgccgccggagtcgccgccgccgccgtagccgccgccgccaccaccgtagcctccaccgccctcacggcgctggtagccgccgccgccacctccgtagccgccgccaccacgacctc

SEQ ID NO: 327 - DNA, 345 bp, Avena sativa
aactttttttaagtaaataaaggcacaagtactttcaactgatcaaggtatattctcaacctgatgttccttccttcctaacactacggagaatgaaacaaatacaactaagtcgactagtcctctcctaactttcatcatcatcaatggagaatgccatgtctggcagcacatcaagtgggcgctgtaatacggagccacacataaggctggagcctggccaaattcatctgactaaaagcttaaaaaaaaccctaaatggcagatagcttggggacagcagaatatccggaatagccaaactgagctgcctgcagttcatgattcttttggcgatgtagctgt

SEQ ID NO: 328 - DNA, 870 bp, Avena sativa
ttcctattgtagttgctgttgactgccctttccctccatcggataaaattggtataaattctgtccaaagggaaagtgaagaaattgtaccaatgggcgcaatgaagatggcatgggtgccctatgttccactagaggaccggctcagcaggatggaaagtttgaaaactaaaatattcactcttggctgcacccaacgaaggtccgcgctgaagcatctcaaaactgagcgagtcaagaagttcgactactgcatgccttactatatgccacttagtcctcctgaagatgaagatgatacggttgtcaacatcatgtatcctctagaacctccgatagtatgcgactttgactgggaaatggatgattatgaggattttattgatgagaaagttaaagatgaggttctgccagaggacgagaaagaaaaatttaaggacttcataaaggagagagttagagaaaggaagagagagctgaaacaggctaaagaggccagaaagaaagctatgaatgatatggatcctaaattgaaagaggcattggagaatatccggttttacaagttctaccctgtaaaaaccaaagatactcctgatgtaagcaaagtacaggcgaagtacatcaatagatactaccgcaacgcacatgaactgctgtgatgtgcaacctcacaaatcatgtgagcaagatcaagcttgaagctatcaaggcctaaatggatagcactcaaaattttgtaagatggaggagatgtgcttggttgcacacatttagttctggtctcctattgggctggcggataacctgttgtactgcagtttgccccaggctcccacaatccttgtagagcatctcttccctcgacat

SEQ ID NO: 329 - DNA, 925 bp, Avena sativa
gtgtacaacaagatccaagagacagaaaccatgaactaaccatcagcagatttaacattttcagttagacgccagcttttggccaactgcctacagtataactcaagaaggaacatgcaccacagaaatgaccattaccatgataagattaactagaacaagcaccacagaaatgaccattcccataatcatagcaggtgataagttaacgcagcatacgacgatatatccagtttcgttttgctacacggcagctacaaaatttaagacggcgttcagtctttcagacaactcggcgtctgaggtgcttgcaattggatgagagttgccagtgaaggcctaaggttgagctgaatttgctccggtgaatgtttctttcttcttcgaattcctgcaatcacggttcaaaaatttgaagtttcctcagctcatcttcctgtctccctatgtactattacctcccttctacttggcggcacttggctcagccttgctgttcccagccttcttcataccaccgttatgctgctccttgcgcgcatccacggagctgcggccaccatttgagctcccattgcactctgatgattttgcctcgattgcatcaggccttttagttgttgctgagctccttggagaagcactaccgttagacatctccaggccagcagccttgttatgcacataagctggcaaacctcgtggggagttaggttccgcatgagcatgtgaagcttggatcatctgatgaggcggcagcagttggtgacctgatccaggaggaaggaagacccctgtgcctggaacaggcaaacgaggcggggcaggccttgaggcagcttctggaatccaagctggcgctgtatttgataatggaacagctgctgggaaaggtatggctgcggcggcaacaggagcaggtgcc

SEQ ID NO: 330 - DNA, 993 bp, Avena sativa
tatgatcacagcaaaactgcagggctaccacccaacatcctacaagagctgaatcaagtgccatagtagtacatgatatgcttcacgctcgaagccaatagttaacttaagctaatattgcaggttcagtttgctgaactgcagatctttcatctactctgcttcgattctccacaagcacattccagaaacgccgaaaataacaatgcttcacttctccaggtctatgctcggttctggatcggagcgaggccgttcctccaggtctatgctctgttctgggtccgggcgaggccgcttctccagttctaggcttggttctgggtccgagcgaggcctcttctccaggtctagccttggttctggatcaaagcaaggccgcttctgcaggtctagactcggttctgggtcagagcgaggccgcttctccaggtctaggttcgattctgggtccaaacggagccgcttgtgctcctggtcacctaggtgcagtgacatagcgagctcttccactgatggattattcaaattggcgacgatgctccttggagcattttggtcatggcgcacgggagacatgccgacaaagtttgacatgaactgatgctcttccatatcggacggcatgttggatgcaccctccccttcagttgcagagcttgtcatgtcatgacgaggcagctgctgaattttgatccccaaaggctcaaagatttgttcaaccttctcttgtggtgtggtttctggtgcagtgacttctaccagggaagactctccaacagctgagataaccgcagccacgtaagcattcctttgctcctgcacggcatctttgagtgattcgttggttgtgataagatcaagttctagacgatcaagaaggcggccaagatcaaccccagtagtccaattttcaggaccatgctcacttgtaagctttatcctccacggttgccgtgccaccccatattatcccaataggacgtggcttct

SEQ ID NO: 331 - DNA, 848 bp, Avena sativa
ccacaagaaacgcaggatacacacggtacagactcagcggtctgtgacaaagtatcatcagtccacccgagaaaaaaatttcggcatacaacgactacacggaacaaggcatacaggttcaggaaatcgggtactggagatacaagctggctagaaaaaagccacaatccctaacgcttcatctgtacgactcgaggcgtttcggcttgctctggacgaccgcctcgatcttctcgaggacctccggcgtcagcagggggatgacttcgagagccttcatgttctcgacgatctggctttctttagtggctccagtaatcacggacgacacgttggggttcgacgcgcaccaggcgataccaagctgagctaacgagacgccgagctcggaggcaataggtttcagcccattcacttttctaagcgtgtcgtcgaccagagacctgttggccaggttcttgtaattgtctagtgcaaaccgactttcagcagggatattgcctctgctgtattttcccgtgagaactcctgaagctagaggactccatgtagtcaatccgatgccataagtattgtaaagaggtacgaactcagactcaaccttatggcgggagaagaggttgtactcaggctgctcgacgatgggcccgacgagatcgaggcggttggcgacgccccatgcctcggtgatctgctgcgcggtccactcggaggtgccccagtagaaggcccagccctggtcgatgacccagttcatggctctcacggtctcctcgatgggcgtggtggcgtcggggcggtggcagtagacgacgtcgacgtagtccatgtcgaggcgcttgagcgag

SEQ ID NO: 332 - DNA, 1115 bp, Avena sativa
ccgggatacgatttattgacaacaccgatcctgctggaatcgatcatcaaattgctcaacttggggcagaacttgaatcgactcttgtaattgtaatctcaaagagtggtggtacacctgaaaccccggaatggtctactagaggtacaaaaggccttcagagacgctggactggaattctcgaaacagggtgttgcaattactcaagaaaattctttattagataacactgccagaatagagggatggttagatcgttttcctatgtttgactgggttggtggaagaacatcagaattgtcagctgtgggattacttccagctgcgttacagggtatcgatgtcaaggaaatgcttattggtgcggcgctaatggatgaagagaccaggaacactgtggttaaggaaaatccagcagcattacttgcattatcttggtattgggctacagatggaataggcaataaggatatggttgtacttccatacaaggacagtctgctacttttgagtagatatttgcaacaacttgtcatggaatctcttgggaaagaatttgaccttgatggcaatcgggttaatcaagggctaactgtatatggtaacaaaggaagcacagaccagcatgcctacattcaacagctgagagacggggtgcacaacttctttgttactttcatcgaggttttgcgtgacaggcctcccggtcatgattgggagctcgaacctggtgttacatgtggtgattacttgtttggaatgttgcagggtacacgtgctgctctttattctaatgaccgggagtcgatctccgttactgtgcaagaagtaactcccagagctgttggagcactggtggcactctatgaacgtgcagttgggatttatgcttctctagttaacatcaatgcctatcatcaacctggtgttgaggcaggaaaaaaggcagcgggggacgtattggcacttcagaagagggtgctaactgttctgaatgaagccagctgcaaagaccctcctgaaccattgactctggaacaaatcgcagatcgatgtcattgccctgaagatattgagatgatatacaaaattattcagcacatggctgcaaatga

SEQ ID NO: 333 - DNA, 880 bp, Avena sativa
gaaccagactcttgcttctgaagcagcttcctcattaaaacaatggagtcctgcaaatacttattcgcgcttcttagagtaggatccggggtgcctacaactggccagccagcctttattgcaaaaccttccttcttcaggatcttttgccacacatgctcagcatagtgtggacagatcggggtgataagcctggtctggacatccataaaccgccccaacaactcacggttcatgcctgccgatccacaggaaagcctgtattcgtctctagctagctgtaggtcatagaacccagacttcagagcatctctgaacatgaaggcgttatagctcttctcagtttcttttacggcaatgttgatctcattggcaaatacattatcagcataagtagagggaggaccacctctcagagaagattcagcagctataacttcttccatccatgcaatttcctttgtaagcctcaaaatagcagcatttgcggtttcaaaaacaaagtttgcatcatccataccatcaccagcatcagcaagagcaaacctagtggcatccgaagagaattcttcaatggcctgcttaagagttcggaagttccccgtggacttggacatcttctcagagttgagcataagatgcccattgcagcggaagccacgaggccagtgatgctctggaacaagtgctgtatggttgtaaatgctgaatgtcagatggttctggataaggtccttaccagatacccggatatcaaaggggtaccaatactcaaattcttgcttcattctgctcaagagggcaggcgagatgtcgctcttcggtgctggaccatcacagaacacatactcccatacttcatctgtcatttcttctggct

SEQ ID NO: 334 - DNA, 788 bp, Avena sativa
ctcgcttgcaaaacctcctgctgataaaaaggacaagactgtatcagtatctaatgcaaaaggtggtccattgctccatgccccacttggatatggtatgacgccacgagcagatccttatggtgcgcctcctgcttatggtgcacctccttcttatggtgcacagcctttgttgtatgccccaggagctccaccaggtgcagcaatggttccgatgcttctaccggatgggcgtcttgtatatgttgtacaacagccttcagtgcagcagcattatgcttcccctccaccccaggcacggcatcatcagcatttcacatctccttcgtcacaggcacggcacggtggacgccatggtggtggcagtggtggtggtgggggcagtggtggatcaagcaggtccgggtctggtgcaaagcggccgaggggagatgacaacagcagcagcagtcgcaacaagggccggcaacgtcgatagtggtcttaggagaggcgtgcggtacttttggttctagcactagcaccagctagtaataagtccatgtcctctcaactcagattttccgacgaacctgcctaacccttgccccttgaactgcaaaaccgtctattttctgcacaactatttatcgcaactgtgttgatgtctgcgcgtagtttatgcaaaggtggatccagttcagaacctacattggtgttagtttctacatctatgaacttgttaatcatttgaattggatggatgtaccaacaaacataccagaatggttccatgaatttagtacagt

SEQ ID NO: 335 - DNA, 978 bp, Avena sativa
agcttacattcatactgtccctggagtttgtcacagggatgtgaagccacaaaatgttttggttgatccctctaacccaccaagtcaaactctgtgactttggaagtgcaaaagttctggtacctggtgaaccgaacatatcatacatatgctctcggtactatcgtgctcctgagctcatatttggcgcaactgaatatacaacttcaatagacatatggtcagctggatgtgttcttgcagagttacttcttggtcagcctctgtttccaggagagactgcagttgatcaactagtggagatcatcaaggttcttggtactccaacccgtgaggaaattcgatgcatgaaccccaactacactgagttcagatttcctcagataaaggctcatccttggcacaagattttccacaagagaatgcctgctgaagctatagatcttgcctcccgccttctccaatattcacctagtctacgctgtactgctcttgatgcatgtgcacattccttctttgacgagctacgcgagccgaatgcacgcttaccgaatggccgcccattcccccctctcttcaacttcaagcctgaactagcgaacgcctctcctgacctgatcagcaggctgattccggagcatgttcgacggcaaaatagcctcaacttcgcgcatgctgggagttagaaggggtgagcgccacaatgcccatttttttgtttgtccgtcttccgcgtgctgctgcaaatatgcaagctcagacctcacagtgttggaagccactctcctaaagagccgcgtgcggagagaccggtctagttcagtgcaagagaaagaagcacaagtatgtaaattatctgaccgtgaagttggttgatgctgccagtgtttaagtacgtggtagcccatgttggttgagttattacttattattagtaggtaaggcagtgatgtaggaggtggagacatgttaatgcta

SEQ ID NO: 336 - DNA, 601 bp, Avena sativa
acatgcgatacatctgagcagcagatttgctgggacatctctactgataatcctgaagaaagtggtactattgagaatgctccaactgaatccggacaatatgaatgtatgactgaagaaagaagtcagttgctggagaaggaatacagaaataatattctggatgatttacttgaggtaaaatcatttttgaccctacgcttaggggagatgggaaatggtgatacatcatctctacagcatcaggtgcaagctgtctcaccgtttgttctccagcagtatgctcctggcagtttggagagtatgcttgtcgaggtctcctcagcaatctgtttgctcactaaccagaaaactctcgaccttataatgatcctcaactctaaaagatttttggacagactggtgtcaaccttagaagaaaagaaacatcacgaggtgaaattacgagaaggcttaggtgatttatcagttaagcgcatggagctgcaaaatgctctatcatcatcctggccaaagcaagaggcagcaattacaaaacaagggactaaagaagctctgtgaggcaacactttcatctatgtttgatagcaggccagtgcat

SEQ ID NO: 337 - DNA, 899 bp, Avena sativa
ggagaatatcctcaactccatgtaccagctctgggtgttgggcgccttgaacaatgttggtggcctcacagaaataggttggaagatggtggagttcccattggacccgactctagcaaagatgcttctcatgggggagcagttgaagtgcctggatgaagtattaaccattgtatccatgctctcagtgccctcagtcttcttcaggccaaaagatcgagcagaggagagcgatgctgcaagggagaaattctttgtcccagagtctgaccacctaacactcctgaatgtatacctgcaatggaagtcaaaccagtatcgaggagactggtgcaatgaccatttcctccatgtcaagggcctccgtaaggctcgggaagtgagatctcaactgctagacatactgaaagccctgaagatcccactgacatcatgccatatggaatgggacgtggtgaggaaagctatctgctctgcgtacttccacaattcagcaagattgaagggcattggagagtatgtcaactgccggaacgggatgccatgccacctgcacccgagcagcgccctctacggtctcggctacacccctgactacgttgtctaccatgagcttgtcctgacaaccaaggagtatatgcagtgtgtcagcgcagtcgacccgcagtggctggcagagctgggccctatgtttttctctgtgaaagacacagacacctccctgctggaccacaaaaagaggcaaaaggaggagaagagtgccatggaagaggaaatggagaagctgaggcaggaacaagctgaggcagcacgcatggagaaggagagggagcaacggaagagagccaggcagcagcagcaagtttcatgccgggcctaaagaaaggttcgacatatct

SEQ ID NO: 338 - DNA, 991 bp, Avena sativa
gccctgctgcttcgacgcgctcggcgcccgcctcgtcgagcgcgcggggttcccgatctgcttcatgggcggtttctgtgtttctgccgcacgacttggattgccagatgttggtctaatctcctatggagaaatggttgatcaagggcgtctaatcactgaagcagtatcagtcccagtgatcggtgatggagacaatggttatggaaattctatgaacatcaagagaactgtaaaaggatatattaacgctgggttagctggaattatgcttgaagatcaggtggcaccaaaagcatgtgggcacactgaaggaaggaaagtcatctcaagggaggaagcggtcatgcacataaaagctgcaattgacgctaggaaggagagtgcctctgacattgttattatagcgagaacagattctcgtcaagcagtttctcttgatgaagcattatggagagtacaggcttttgctgatgccggagatgttctatttattgatgccctagcttcaatagaagagatgaaggcattctgtgcggttgcacctggagtaccaaagatggcaaacatgttagaaggtggtggtaaaactcccatattgacccctgctgaacttgaggagattggttttagccttgtagtgtacccattgtccctaattggagtatcaatgcgcgcaatgcaggatgctctacttgcgataaaaggtggtggcgtacccccgcctagcagcctgccatcatttcaggagatcaaggatactctagggttcaaccgctattacgaggaagacaaacaatacagcgtgtcaaaagcccagccatcgttgccaagtggtaacccttaaaagagaggtttctgcttgattcccacgatgcggatggaaatgggaccagggtgtccatcgaataatcagtacccatttgctttcgaagcattgagattagtaccgctggacagtgatgtagagcaatcacattttatcttgaag

SEQ ID NO: 339 - DNA, 887 bp, Avena sativa
tattgcagatgcaaatgtggttcagcaacaagtgacttgaagtcagtccatccagacttgtagtagcggtacaatggatttgcgtttgcagcctgggcacagacaagccgtggaacccgatcaactagcccaagctcacggcacatctcaaaccccttgtagaaagcataaatgttgccaagattgcctcctggaataatgacccagtctgggacctgccaattgaactgttgcaatatctcgattgctgctgtcttctgcccctcgagtcgaagcgagttgagtgagtttgcaaggtatatgggcagctctgctgtcacctccctgattagccgcatgcatccgtcgaaatccgtgtcaagcgagagcactgtggcgccgttggcaatcggctggatgagctgctgcagcgagatgcgatcggcagggaggaagacgatggcggggatgcccgcagcggcacagtatgcagagagagctgcggaagtgtcgcctgtggaggcgcacccaacgccgttgatggggcgcgagagcggggctcggcggaggcggttgacctggctgacgagcgcggtcatgccgaggtccttgaaggagcccgtgtgcgagatgccgcactgcttgacccagaggtcgttcatcccgccgaggtgctcgcggccgaggcgctccgcccagaagaggttgctgtttccctcgaagagagagactatgtggtcggagtcgatctcgggaagcacgaactccttcttggaccagacaccggagccatagggccaggtggtgcggccgacgcgggagtcgaagaggtcgcgccagtaggagcccgggaagcgcgcgagcgcctccatgtcgtggcggacgtcgaggaggccgccggaggtgga

SEQ ID NO: 340 - DNA, 728 bp, Avena sativa
tgaagtcgatgtttatcgagagagcccaggctctgattcatggagatctccatactggttccatcatggtgaccacagactctactcaagtgattgatccagagttttgctttctacggaccaatgggttatgacattggggccttcttggggaacctgattctcgcatactttgcacaggatgggcatgctgatcaagcaaatgaccgtaaagattacaaggagtggatattgaagaccatcgaggagtcatggaattcgttccaacagaaatttgttggactgtggaacaaacacaaagatgggaatggggaggcatacctgcctgccatatacaacaacccagagcttttgagcgttgcacagaagaagtacatgacaagtctgtttcatgatagtcttggatttggttcagccaaaatgatcaggagaatatttgggatcgctcatgtcgaggattttgactcgattgaggatgccagcaagagagcatcgtgtgagcgccgtgcgcttgactgcgcaaaggcaatcctgaaaggccgccgccagttcgagagcatcgagcaggtgattgctcacatccgatcaataactcactgactgagaagaccaggagttatgcttggtgtgtcctattgaggagaccctttggttggagtttatcatggtagactacacactcttatcaaaggcctgtgccttgtcaaaaacatcattgagcggctatc

SEQ ID NO: 341 - DNA, 857 bp, Avena sativa
atttctttctcgaccctcaagctgccaaggcggctgtaggaatctggtttaaacatcactctcattcctttgagagctcagcgccaggtggcttctttcagaaaagtcatgagatcgctacatgctgctgagaagactgctgaatcatcatttgtgtatcggctgttgatgtcaatgcagaaactgcaaaagattaaccaagcataccatcacattgacatgttccttggagagcttcttggcgctgttttcttggttcagcaatcgcatatagatcattcgatcactgaaagggctatcagtgttagttctggtcatgcggacacagatggtcagactgtcctccacccgacgaacggaaagctagtaaagatattagatcatctcgatgcaagtgcatactacacccagtttgcagaactgctcagcgccaagaaacaatctgcagtcgttggcagctttgatgagcagaagaggatgtggaactgatgatgacgattctggttctgctaaattagcctagctagtggaaaggaatatattgttttctcttctcctcctcccctttctttgttgtattgtcgacgtcacaaaagttcgctgcaggagaaacggtataataatttcgctgtttcaaagcagctgtgtgagactgaatgtttccattcaagtaccacctggtggtgctggcttcctgcaaggtagtcaatgataataaagaaggcagtagtgcaaaaaaaaaaaaggcatccaagatggtgatgagattacttgtttgcttgtaatgacagtctggttttctggttttctgctaatgaaaactggaggacgaaatgcatgtgttatgagaagtcacc

SEQ ID NO: 342 - DNA, 636 bp, Avena sativa
  modified_base (577)..(577): a, c, t, g, unknown or other
acctgcactggctccccgtcctatgctggatcaggttggtcataggagtcagccaagccccatttgacatgccacaagcgatgcgacatgatccccgtcgttctttcccagctaatatgaatcctatgcaacacactctaaatgctccggggggcactcgtgtagatccttctgcccatcatcctatgcttcagtgcatgcctgggagttttccagcagaaggcttgccgagaggtgttctgccgtctcagaacgtgcatcaggtggctggttatagacctgagatgaacaatgtaaataatttccatatgcaccctcgccagcccagctatggagactttggattgatgcctccaggtccatcgggtcccgctgtgcgaggcaatcatccagaggcctttgagaggctgatgcagatggagcttacagccagatccagacagatacatccagccatggctggccccgtactggtggcggcatgtacgggccgcctgagcttgacatgaactcgagatacagatgatgaaacaatactcactctgtttgtacgtgtggccttgcctgttacccaacngcatgttctgtgtccatgaacttgtgtttgcgtttgcgtcgccccgccggagtcgcgtg

SEQ ID NO: 343 - DNA, 556 bp, Avena sativa
ttacatcgatatgtatctacccctgatatgaatacatacaataaagattgtaacattattccatcgcatccttctctttacaaatcgatcatagccccaggtccattgagcatagtaactatcttcgtttggtttcaaggtccatactaccattacaccactctatacgtatggaatttgaaacaccataactcacatgttcacacaatccaaacattattcatgtggcgattagacattttaatcaaagcggctcaccagaaatccaacgactgaacatagcgagacatctctctggttggtccaccggcgctatgtgtccaccaccctttatggtagtgaatgtcaggttatctgtgtatgttatggtgaacccagaggactgcccatcaagatgccaagctctccattcatccacaatggggaagttgagtgatcgcacccaagactgtgtactcagaaatggtacaacagcatcatggtctccactgtacaaggaagatagatgagagattcgaaaacaaaatatggtaacctgatacttggagtggatagc

SEQ ID NO: 344 - DNA, 696 bp, Avena sativa
atggagcaaagcttgtacgggatgcttttcagttggctaaagaaaaagctccttgcatcattttcattgatgaaatcgatgcaattggtaccaagagatttgatagtgaggtcagtggtgatagagaagttcaacggactatgctggaattgctcaatcaactcgatggatttagcagcgacgagagaataaaggtcattgcggcaacaaaccgtgctgacatccttgatcctgctcttctgcgatctggtcgtctggacagaaaaatcgagttccctcatccatctgaagaagcaagagctagaatcttgcaaattcattcacggaaaatgaatgtaaacccagatgtgaattttgaagagttggctcgctcaacagacgatttcaacggagcgcagctgaaggctgtttgtgtagaagctggtatgctcgcgctacggcgagatgcaacagaggtaacccacgaggatttcaacgaggggataatacaagtccaggccaagaagaagtcgagcttgaactactatgcttaacaacttacgttaaaaaaattacagtattcagtagtattagattgtagctctactggtaggtgatcaaagatgtaagttcatgtttcttttgtagatgtaaggtttagcagtctttagatgaagctcttgtgtgattgaaaagaatctccttctcataatatgt

SEQ ID NO: 345 - DNA, 708 bp, Avena sativa
gtgaggtttacctcaagggcaaatgccgggctctgtacattcataagctaagggactgccgtgtgtttattggccctgttttcggctcggtgctcatagaggatgttgagagctgtacatttgtaatggcggcgcaccagatcaggattcacgaagcgagggcaacagatttctatctgcgggtgaggagcaggccgatcattgaagattgcagtggtgtgagatttgcaccacatgctttgaggtatgtaggaatcgaagaggatctgagggattctgggcttgaggaggatactggtaactgggccaatgtggatgacttcaagtggctcagggcagtgcaatccccgaactggtctttggttccagaggaagagcgtctgccgactgtcgacatttcagaagttcaggaaacagaggattgtaactgagctcctcgaggtttcgctctctgctctggttttggcttatcgttctggactggtggaatcttgatgcttacagtgattacctatttctgtttgtttacgtttacagcttcttgtatttagagcttgctaaatctaggattggaagcatgagagattcgttgtgttttcagaaatgtcttaattatttcatacttacacatacctagtaagatcatgaagtttttatgcaagaagcatacttgctgtacgaattttttggtcgcttggcatcagaatc

SEQ ID NO: 346 - DNA, 791 bp, Avena sativa
cagcgaccgaaattgagatgccgacagtagcatacctcagggatgtcttaggtctgtctgaagaacattccgaccaggaagtgctcgcaatagctacgcacttcatgaatgtgttacatgcatctgaggatgtttgggttagcgaccagctcttacgcagcacagcaccattatatatggataagttgcctgtctccgaggaagattcggacaccgacgaagaggagatttcgcttgctgatgtgcgcgcggcagctacatacctcaaggatgtcttgcatgtatcggaggggccggtttcagctactgacgatgagatgccaacagtagcatacctcagggatgtcttaggtctgtctgaagaacattccgaccaaaggatgctcaagatagcgacgtacttcaagcatttgttatgtgcacccgaggatggcaccattttataaggaggacaagttgcctgtttctggggaagtttcagacaccaatgaagagagcgacaaagttgacaaatagtatactagtattgtgcctcttctgttgtgaagacggaggaggcggcactgcctcaagaacttgacgccgatctcaaccacctcgcccttgataacacgccagatcaccattgagttatgaataaatatgacattctagataatagcgctgttgtaatttatgaataaatattttttgtagatggaatacatcatatatatttttattacgtgtcaatatacggacatgcatgtttctatggatatggttgggcttctccgctaggtatctatcat

SEQ ID NO: 347 - DNA, 950 bp, Avena sativa
gtcattagcagcaataccatttggtacaatggttgtcatgttcgtcctttgggctttcatctcttttcccctggtgcttttgggtacggtcgtcggtagaaactggagcggagctcctaacaatccctgccgagtaaagactattccacgacctattcctgagaggaagtggtaccttacaccttctgttatctcattgatgggcgggcttcttccctttggcagcatcttcattgagatgtactttgtgttcacatcattctggaactacaaggtgtattatgtctacggcttcatgttgctggtctttgtcattcttctgatagttacagtctgtgtcacgattgttggtacttatttcttgctgaacgcggagaactatcattggcaatggacttctttcttctctgctgcatcaacagcgctatatgtgtatctgtactccatctattactatcacgtgaagacaaagatgtctggctttttccagacaagtttctactttggctacacaatgatgttctgtcttggtctgggcatactttgtggtgctattggttatctagggtcaactctttttgtgaggagaatctacagaaacatcaaatgtgattaatttccgctgcttttgggtggagggcagtatccgatcagatcatatgtcattgctgtggaagcaaggcctcccaattggatcaatgctagttcctgattagggtttcagaactaagcagtacgttgtgatccctttgctgacccagtcacacctcttccttttgcctacttatttcttccaaggagctgctctcatagtgtatacatctgtggtagccgaggagtttagcacaagtgcctggtgcatttaggttcttaattttttgttttttccgtctattttcttctcgtaaacagaagtaggaagtgagtatccatgcagcactgtctagact

SEQ ID NO: 348 - DNA, 660 bp, Avena sativa
ggtgcgccgcggttcagcacgtacgcggtgctcggggctcacgtgtggcggtgcgcgtccatggcacgcgggctggccccggagcagccaaccaagctgtactgcgcaacggacggcggcagcggctgacgccgacctccctgatggatacttcggcaatgtcatcttcaccgccacgccgctcgccgaggcgggcaaggtgaccggctcgctggcagacggcgcgaccacgatccaggaggcgctggagaagatggacgacgagtactgccactctgctctagactacctagaactgcagccagacctatcagctctggtccgcggcgcacacacgttccggtgccccaacctcgggctcaccagctgggtgcgcctgccgatccacgacgccgacttcggctggggccggcccgtgttcatgggccccggcggcatcgcctacgaggggctcgccttcgtgctccccagcgccaaccgcgacggcagcctgtcggtggccatctcgctgcaggccgagcacatggagaagttccggaagatgatcttcgacttctgaaacgaacaaacagcacgcgcgcaatcgcaactcgcagcggagaatgaaagaggaagcagctgagcgaaagggcagagggcgatcttgattacagcttacta

SEQ ID NO: 349 - DNA, 841 bp, Avena sativa
agcttccagtgtccatattgatgaagatccaaatgcttacgaaaggagtccgaatgtcactgcagctaaaaagagaccaatcccatactcaactagtgatgaggcaaaagctgctaagaaaagaagagagcgggactccgatacaatctctaggtcagataaatataggtcagaaggcgaaactacaaattatgataaaataagcaaggggagtgacggaacaaaatctatatatttgaagaagagactgtgggaagatgaaaagaataagcttggcaatgttgtctcctctgcagaccaggtgaaagaatctccagtcaaacatgctttgccatccactggcatggctgctcgtgccttgtatgatcttaacgaggctgttgaactggacgatagacacgaacagatagacgcgttgctagatgatgctttggaaaacgatgccgatgacaggagtagatcacctcttatgcccccacaacctccaccagtggtccaaaatacttatagcctgtacgaggaccttgacgaggaagtggatgtggaataatcagagctggatgatgtagtagccagctgcatgccattggaggggagaccattattaattagcatttcggtgtacaaagtgcttgtcaacaatataaattgggagtttagcttatattatgcagaaatcctccttttgtagtggcaccagccttggtgtttggttgtgactgagccttggtgtttggttgtgactgagccttggtgtttagttgtgactgagccttggtgggcctatttggatcttacttattggtaaaatggcaactgcttctcttttacagtgacagtg

SEQ ID NO: 350 - DNA, 933 bp, Avena sativa
cgcggtactccgccatgaatgcctcatgaaacaccttgaagcgagagatgatcgccgggatcttctcctcctgcggaaggattgtgcatctgaagtgccatgtgccaggaacctggccaaatccagatccagggacaacaacaattccagttgactcaaggagacggagagcatagaatgcatcaggcgctttgttagcagcattcgcagcttcaattgccttctgtggcagaacaatctgagggaacaggtacattgctccttcagcttcgttgcatgtaattccctcaagtttgttgaatgcatcctccagtgcctttgcacgacgagttaaggacgctatgattccatctttttctgccttgtatgaagcgtaagattcatccccagcctttggtgggttcatgatgagactagcaaggatctgaccagtgatattggaacataagttcactgatgctattttgtatatctgctctcttactggagcactgaagccagtaatctccatgtaacctcctcttttaccacactctccataatatcccttagaaacagattgatatgaaactagaggaagatcctcctcgccgtaccccaaggatctcactatcttcttgaaagaatgaaatttcttattgtcaacatagacattctcttggtatacctcatcagcaagaagaacaagaccctcgtttttgcagaacttcactatgtcatattggttttcctcggcaagaacctgtccagttggatttcctggattgataaccaccaaagccctaacatcaatgccttttgaccgagcatcttcgagttgcttcttaacatcggagatttccagaccccaacctgtcgattcattgagatagtatgggacgagagctccgccatgaagagctatggaggccgagtacaagggatactcccggg

SEQ ID NO: 351 - DNA, 799 bp, Avena sativa
  modified_base (11)..(11): a, c, t, g, unknown or other
ttttttttttnttttttttttaataagtgtcctaaatcagccacacatattatgtagtatcggagagagtatcacaatttgctcctatttcttggtataataacgagctaaagatacaaatggcctgaaatatagggctatgtgctttgcatgacactgaatcatatcctcagatctttgttgtcatgtacactaaatgtcagggtcaggtccactagtgaggtgagggaaggatcaggataatgtaattataccccatacataaatttcagtaaaactgctgtgctaacttaacatgaatgaatcccagccaaattctctacgccaggcgcacttctcttactctaccacctcgaggcggaggaaacgccgccctccttcgtaaaaatattccttggcagcattgcatctttcttccaccccctgttgttctgtgcagtatatatgtgggtgcgccatcctacattttgctaaatcagggtccggacttccatgtcaaaaaaatccttgctgtcacccctgcttaaccccaagctgacgaagagagtccgggccaaccaggtatattcgtctcgggctactcttgtaccggaacaccactactcctttgtaagctgcccgcggaacaccgtccttccactcttcaaatatcccaaaatggcgagctatacgctcgaaatccccctgatcatcgtactgaatcctgacatccacatccatattgtgggccttcaacaaagcatcggatccatgcagaggtgtggcgctagccacatctttcccaaattggaccaagaac

SEQ ID NO: 352 - DNA, 799 bp, Avena sativa
acatccctgtcccgcagaggcagaccgacctcccgttcttgctcgcggttgaggatgtcttctccatcaccggtcgtggtacggttgccactggccgtatcgagcgtggcaccgtcaaggtcggggaccccgtcgatctcgtcggcatcagggagacccgcaatgccacggtcaccggtgttgagatgttccagaagaccatggacgatgccattgccggtgacaatgtcgggctgctgctccgtggtatgaccaaggaagacattgagagaggcatggtgctagcaaagcccggttccatcacaccacacaccaagtttgaggccgttgtctatgtgcttaagaaggaggagggtggccggcactccccgttcttccctggttaccgcccgcagttctacatgaggactaccgacgtgacgggaaacgtgacaaacatcatgaacgacaaggacgaggaggccaagatgtgcatgccgggtgaccgtatcaagatggtcgtggagctcatccagcccgtggcgtgtgagcagggaatgaggtttgccatccgtgaaggtggaaagactgtcggtgccggtgtcatcaataacatcattcagtaaactgaatggaggatatccaccatcagagttttcctcatttactcttttgcgaaatgctatgtagtagttgttattatgcatttagggtgactcatgtgaaattgtagtatggcacatttttcttcaagtggttttgcatactttgtgatattcacggtaaagatacatcttcatgtgccatttgactaaaaaaa

SEQ ID NO: 353 - DNA, 743 bp, Avena sativa
ctgtcagggagctttctctatcgctagttgctgggatgcttcacaatcagaaagatcttatggaagaatccatagagattgtccttgaaaagctggtgttgatgaccaaagatattatggcaaagatttcaaatgaagctaatcagtgtgtaaatgtcgtgttggcaaaatatgatccttttagatgccttgctgttatcgtgcccctgctagttagtgatgatgagaagacacttgtcatgtgtatcaactgcttgacaaagctggttgggcggctttcacaggaggaattggtggctcaactgccttcatttttaccagcactttttgatgctttcagcaaccagagtccagatattcgcaagactgttgtattctgcttggtggatatctacatcatgctagggaaagcatttgtaccatacctggaggggcttagtagcacacagctgcggctagtaacaatctatgcaaatcggatatcgcaggcaaggtctggcacaccgatcgatgctaaccaatgaatagtagtattgcttttgtgtacctgtggacatttgcttcgatgggccaggatatcgggtttcattcctttgtgtatttgtatagaacagacggctggtgttcatgtattcaattgctggcggtttttcttgtgtgacattgttctttctcttgtttatttcccttcatgtgtgacattataccattcacgctgtacaaagaaaaccttcacggtgaca

SEQ ID NO: 354 - DNA, 632 bp, Avena sativa
tgctgttgtaacttgcttcttcctggatacggcacacaatattgttgaatacattgagatcatatcaaaaattctcaaggatggtggggtctgggtaaacatgggtccacttctgtatcacttcgctgattcctatggaccagatgatgatatgtctatcgaacttagtttggaagacgtgaaaagggtagcttaccactatggatttgtgatggaggtggagaaaatgatagataccacttacacagcaaatatggcatcaatgatgcagaaccgataccgtgcagcattttggacaatgaggaaggatgcatcccgatcaaaagcgaaaaagcgcacctgaaatggggagtgtggttagcacccaagctgttcaatgtttagaagaacagatttcggtctgtcgatatccagcggctggaaacctaggacaaataaggatgatcagttcgtgccaccgtttctcatgatattgaaacctcatagcaaaatgtgtcgtgaatcctgtgatatgtggcactacttagcatacggtgatgtaccattgtctgtaccctggtccatctgcatgctataagattgaaaaattgactggattatataagttggtttttggggacgcaagaaaaaaa

SEQ ID NO: 355 - DNA, 195 bp, Avena sativa
tttttttttcttttttttttttttttttaattcatctaagcaccttatttccttaaaaaagagataaacatggtcttgggttaacaggacacaaactgcaccaagaaacctgatgccgcttgcaggcaatatacataccctttcagatgcagcaaccttcaccagattcggatctacaaactatttatcctctac

SEQ ID NO: 356 - DNA, 871 bp, Avena sativa
tatttattactccctctggcccatattacttaactcaaatttgtctagatttggatgaatttagacactatttagtatatatgttcatctaaattttaagaaatccaagtcaactaatatgggtcggagggagtactagtataaggagatattattctacatccatgcatctgtgcctaccgtgcttcgttccagaagttagcatttttacagcgagacaggaactcgatttttcaaagagtacaaaatgcacgttcaagggaaccttaaaatgttttcgtccagacagcgcttcaaaatggacgaactggccgttgcacatatcttccgaatcacttccgcttggcactctcttcagctctggtgaaggcatccgtgagcacatcaacagcccagtccttggcatcctccagccgcattggttccccggttcttaagcgggcttttggacgagccaactttgattcaaagggagtccttggcctgacttcttggatttcatcccattcttcccgtgaaagcatccgtactgttccttgctcagggtgactattctttatcttgcgttctctcctttcttggtctgtagcgtcatgttccatcatgaggagcttggtgaagaggggccacggctgcggcggtgaggaccatgggcagcgtgacggagtcgagccaggcaagtgactccggcgtcggcacgaagaactcgtcgcgcgccgggtcgcgccgacgccgccgaaagcgctcccgctccgccacgcttagccggagaaggttccgcgtagatccctcgtccaacgcggcctgcctcatggctgctcctccccggtgcagcaccgaccgcagcatcgccgcctccacgccgccggcc

SEQ ID NO: 357 - DNA, 665 bp, Avena sativa
caaatttaattcccggagatgtgctttggtctgatccttccatggacaagggtctttctctgaataaggagagaggcattggcttgctttggggtccagatatcactcaacaattcctatatacaaataatctgaagttaatcatcagatcacatgaaggcccagatgcaagagataagcgacatgatctattaggaatgggcagtgggtatacaactgaccatcatgtcgcatgtggaaagctgataactctcttcagtgcaccagactatcctcaatttcaggcttcggaggaccgttacaacaattctggagcatatcttgtcctcagtcctcctgattttgctacccctgatttccatagttttcaagctgtaaagcctcggcctaaggcgaatccctactatgacttcgaggaagtaattgattctgatgaagagttaaatctgggcgccatggacactggcaattcgagcagttgatcacatcctgtactgtatcagtgtacttagcttgtgaactgtcaccgtgaactcgggaagtggcaactaattcttctgtaattgatactaacatgcaggcttgtgaagtaattattttgtcatgttgtccaagtttatttatcggctggtttgtttatccacctaactgtggacgaaaaaaaa

SEQ ID NO: 358 - DNA, 610 bp, Avena sativa
ggccgtgaagcaggtgagcgtggtgtgggacgcgtacgaggccaccaagggggcccacggcgtgtgcatcctgaccgagtggaacgagttcaaggccctggactaccagaagatcttcgacaacatgcagaagcccgccttcgtgttcgacggccgcaacgtggtggacgccgagaagctgagggagatcggcttcatcgtctactccatcggcaagccgctcgacgcctggctcaaggacatgcccgccgtggcctaatttctttctcgcacagccggatcggacctgctgcaggggaagagaaggaagaggagccaagcggtttgaccaccattctttatagtttgctttttgcagggagacgctacacattttcgattatcgggcataagaattgggttccgttagtaaaaacgtttgtgttctaagttgcttcgctacatgttttcgccgccacccgtctgtagatctcttacaatcaaattcctcgttacatgtgatgtatgaggaggctttttcttgtatccgtccagtgaactttgtagccggttgatccttcaactgttttgctgaaatcattactgaatccatgtgttttctcaacaaaaa

SEQ ID NO: 359 - DNA, 814 bp, Avena sativa
gttgctgttgattttaatccgaattggcctgaagatagactcaaagatgagagttgctggtcagacaaacagttctgcaaggagaatgaggactggtattccgttgctaagatcttggctgaacaggcatccctggaatatgcagagaaaaacggattaaatgttgttacgctttgccctcctttagtttttggcccattactacagcctatggtgaatacgagcagcaaattcttaatctatgttatgaaaggaggtcgtgatgcgatgaataacaagctgtggcacatggtcgacgtgcgcgacgtggccgacgccttgctgctcgtgtacgagaaggcgggatcgtccggtaggtacatctgcgcgccgaataacatctgcacgaaagatttggtggacctgctgaggaagatgtttccaaagtacagctacgtgagcaacatcatcgacgtggagcgcaaagcgccgataacgtcgcagaagctgcgggacctgggctgggagccgcggacgctggaggagacgctggcagatagcgtcgagtgctacgagaaggcgggccttctgcagggttcggatgggcggccttgccggctgccccatctcttccgtctggctggtgatcagtgaacgagctatggtgacggtgctcgtttttatggtgtaataagaccatgtataataatggagagtgcttcgagtggttcttacaaaaataaaccagactttttcttaagcatcggtgcttttttctatagaaaagatgcctagttaagcatctttcttatacaaataagcactagtgcttaag

SEQ ID NO: 360 - DNA, 688 bp, Avena sativa
cgcgcaattgatacgcagctcggggtgtctcttcgctaggatcctcgagtacgcgttcatggcggctttggccaccttgtatgctgagaactccgccggccaaccgcggctcatctactgtgccggcctcgaagtcttttaggaacatgtccaacagctcatcaatcctctcctccgtcaagttgtcgatgttgttcagctcctgcttcagctcctcgctcctgaaaagccttagcagtccgaagttggaggagacattgacgatccttccatccgacgaggattggagcagggggcaggagagcttctgttaccaactactacggcacaaagcgggtaacagaagctctcctgcccctgctccaatcctcaccggatggaaggattgtcaatgtctcctccaactttggactgctaagccttttcaggagcgaggagctgaagcaggagctgaacgacgtcgacaacctgacggaggagaggattgatgagctgctggacatgttcctaaaagacttcgaggccggcacagtggatgcgagcggttggccggcggagttctcagcatacaaggtggccaaagccaccatgaacgcgtactcgaggatcctcgcgaagaggcaccccgagctgcgtatcaattgcgcgcaccccgggctaatgtgaggactgacattactaggaactc

SEQ ID NO: 361 - DNA, 720 bp, Avena sativa
caacctcaggtacagcagcagcaagcacagaaacaaggacagcctgtcatgcgcagggcagcatctattgctgctcggcaagcagcgatggcacagcaatctcaggagaccaagcctctttcccccaagatcaagcgtcaagcatctgcaaaaggtggtccaatggcatccacgaaagctgtcgcagctgcagctgcaacaaaacctgatgacagcacaaaaaaaagcgaggcaaaacctgttgagctagtgcccgttccagccgctgaagctgatgttcgaaagaccgagcgtagggttgagctaccccctgaagccgaaggagtggatgacatggctgtcgatgaagccgatgactctgtagagggcgccgaagaggttgaaccctcagtagaggaggagagcgtgatggaggagaccatccgcgtgacacgtgccaagctaaggaggcgtgctgccgcagaggcttccgcatgaaattagccgcaaaccattctttcctgttgctctttttttatctcgagccttagattgtcacgtcgttttgtggggatgatatctgttggtctaatcgatcgttccgtttcagagttgtcatattttctgtccctttcttctcgttagcccatttctgtgtttggaatggaagttgtaaatatcagtggcatatgtatatacagattgttggcatgtgctatgaatgcatctatcttcattaca

SEQ ID NO: 362 - DNA, 850 bp, Avena sativa
ggacggtaagcttgatgagggctccgcacgcctgcttcttgattcagcaccatcaaaagttatttcaaacgagatgactgtgcaagtgaagtgctcattggcatatatggactttgagggtcggtctgatggtcgttccgtaaaatcggttattgctcatgtggccccactgaaacttgttttggtccatggatcagcagaagctactgaacatttaaaaatgcattgtgcaaagaactctgacttgcatgtgtatgctcctcagatagaagaaacgattgatgtaacatcagatttgtgtgcttacaaggtacaactttcggagaagttgatgagcaatgtcatttctaagaagttgggcgagcatgagattgcgtgggtcgatgcagaagttgggaaagtggacgagaagcttaccttgctaccgccctcatcaattccatcagcccacaagtcagtccttgtgggtgatctgaaactggccgatttcaagcagttcctagcaaacaaaggtttacaggttgagtttgccgggggcgctctacggtgcggcgagtacatcacagtgcgcaagatcggcgattccaaccagaagggcagcacgggttctcagcagatcgtgatcgagggaccgctgtgcgaggactactacaagatccgcgagctcctctactcgcagttcttcctgctgtaaccaacgacggcctcctggagcgtgtgtgtgttgtacaactgaccgtcgaatagacaagtggatatcaccacgctaacattagttaattaatcctggggatcccagattcccagttgtactttctcttaccttgtctcaccaacgctatgtcaagct

SEQ ID NO: 363 - DNA, 607 bp, Avena sativa
gggtcatcaattgaggcagctactggtgtcgtgtacaacatcactggcgggaaggacatcactttgcaagaagtgaacaaggtttctcagatcgtgacaagcttggctgacccgtcggccaacataattttcggcgctgtggtcgacgaccgctataccggcgagatccacgtgaccatcatcgcgacaggattcccacagtccttccagaagtccgttttggccgatccaaaggcagctcggatactggaggccaaagagaaagcggctagcctcgtatcggccgctgcgcaacaaccggctcctgtcccgacatggtcccgaaggctcttctcttgaacatggtccccgaggcctcctgtcctgacagctttgagagctgtggtggctgctgttattcttttggctgtgtaaacattctgagaactagtttcacgtagtgattagcttcacacctagtgtatgtattgtttagatattgtctcggttgttttgggcagagtcagtggcagctctaagaatgcacgctgcttgctgacagtttggcaaccccagagatctcctgttattttgtggtgtgttctatggattggcctcttcgactgag

SEQ ID NO: 364 - DNA, 786 bp, Avena sativa
gttatggtgcattgttattctcgaagatgagcaaagtgcgttctgaaactgtgtcaactgagaaatggaaggttgccagtttagctgctgtctccctgatttgtttctcatcttccgctatactagcacttgtaactaatgttccagtgcttttgtattggtactcaacagatgcggacatcatcaaggatgctatcatactgtttttatattatttaataggctcgtcggtgccgtcaggatttgttttatgggtcatgagagatatgccacaacggccgatagtagaaaggcccacccaatcaagagtggttaatttgttcagggacagaccacccactacacaggatccacagtggagaactgctgttacatcctctaacaaggccctcaagtcaagcccaatttaacctgaagacaaacgatcgatgtggaaactttttcggcccgcttaatgtgctgggaccaacacatcagtgacacactgcacactggcatcaactagctttctgacaattggccagtgcaggacggatctgtaattcctactagaaggtagctctaatgatggaaacaatggaattacctgtggatgtagcaaaggttctcacccatgtattgtgcattatgtatttatccattaggacagagtttgtttaaggtttgaagcagcaagaaatgtaaatagccatagaaattaccttttttgttgtttggcagcggactgttatctcctttcagttttctatttaatgatatagtatttgttggttcccctaaaaaaaa

SEQ ID NO: 365 - DNA, 883 bp, Avena sativa
gtctacatggagacaactgaaggggcattccacaaaaacatatcctctattgaacaaaagagaagttgcttggtggagaatctccagcagtgcaagacaaggacagaactgtgctcagaacaatggagcaatgctcaaaagtcagtactggcacttggaagaagcaatgcagaaacaataagttcagtcataagcgatggaaatgaggcgaacagccaacttcacatgagattttcatctgctgtcagcactgctgttgaagataacgatatttcaagcaaagctcttgtttgctctattgatgattcactaagattggacggtgggatttgtgagactgtgaaacctatcatcactgcatcacaatcacagctgtgcgagcttcaaaggagtcaccatgagaagacgctggtgatatcagggaacgccaacagatcattgggggatgattacaaggtggatgaaccaacttgttcaacaccaagaaggcggcagatcaacatccccagcagccaatcgattgagggcttggtaacgccgctggaagaccttgtgaaatcattctgggacagtagaaccccgtcgaaactcgtgactggaaacgtgaagcgcatggatttggcagttgagacggagagagttcctctcactacaatcaactagaactagtgtaggtacattagagcagcacgagctttatatcttccagagacgacattgggtgttgattctgtagtttgaagatcaaccttggaggttgtatgacctgagctagttgatcttttgtgttgtagaagcgtgtattcgagttgtcatttgaccacatacaacagttgaagcaatattatatatgttccagcagatagatcatttcattaagatg

SEQ ID NO: 366 - DNA, 617 bp, Avena sativa
atctgcagaactaagagaggatggttccctactggcaatgcatataggaaggttgtcagacttggatacaaatctgtggcacactatctcattgcaacacagcgagcaggagccagttcaggggattcaagctcagctgactcctccaatgagttgccatctactgatgtggtttctgagcatgcaccagttgttaagcagggactagagtatgctggtgatatctgcagcaaagtgatgaatgccaagaatgaaggaaacaaaaaggcagctgtcaaaggtgaaataacaagagccaaggccccagggaagaggattagtgatgtctgcaaggatgatagcagaagcgagtctggggtgacatttgattctgtgaattgtcaggctaaccaggataatggctgtgtgactgtgactccatccaagccggagccaaagaagaggaagaagttggttgaacgaagccctgactgtgtcgcaagcagactgcggtcccggtctcccaagtcatgaacgcttggtcttatgaagctggcgactcctttagtgtgactgtgactcatccaagccggagccaaaagaagtaggaagaagttggttgaacgaagccctgactg

SEQ ID NO: 367 - DNA, 672 bp, Avena sativa
ctccatacaggagagaccgggatgcatgccgagctctggttccggattctagatttattgaggtatttatggatttaccactagaaatatgtgaagctcgtgatcctaaaggtctatacaagcttgcacgtacaggaaagattaaaggattcactggagttgatgatccatatgaatcaccagtgaatagtgagatagtgataaagatggaagacggggaatgcccttcacccaaagcaatggccatgcaggttctgctctaccttgaacagaacgggtatctgcaggcctagctgtatacccgagaagattgatcttattcttctgtgtccataactcatggacacaggtacgatccgcttggtccagaataagaagcgttgccattgacgcgcagcaagctgcctttttcatggacagagggacggacatccatctgttaattttatcgacctatatgcccaactcgtttcttgtgtatttgtgctattatagctcttttcaaacgcttgctcatttcggttaggagggtgtacgggccgtgtgctgattcttggtgaaatggcggtgtattatttggttctgggtctctgaagtgagtgcgaataaattgtattgtacatttttcttaggaaggagtgaaaattctgggaggaaaatgcagcactggca

SEQ ID NO: 368 - DNA, 770 bp, Avena sativa
cgggatcggcgatgttcctcaagtaccttcgcatggaagcgtgccgccaagcccaatggccccatcaccgacgacgaggtgcgcaacgagctcgcgcaggagaagctctacgtgcagggccacgacaaaatgggctgccccatggtgtacctcttcggatgccggcacatcgccgccaagcgtgacatcaacgagttcaagcgctacgtcgtctacatcctcgacaacacctgcgccaatttgccggcggggcaggagaagtttgcggcggtggtggacctgaaggggttcgggtacgccaactgcgacgtccgggcgatgctggagtcgctggacatcatgcagaacaactacccggagcggctggggcgggtgctcctcatccacgtgccctacgtcttcatggcggcatggaagatggtgtaccccttcatcgacgacaacaccaagaagaagttcgtgttcgtcgccgacaaggatctggacgccacactccgggacgccctggacgaacaccagctgcccgaggagttcggcgggaagctcaagctccagggctataataatgcgtcgggtgcaactgattattagctactgtagtttgtattataagggtgtccaattgtacgcgcatgagtaccaaggatggtgtacggtagtaatttggaattggtgttggaacagacattcccatgatcgatatcgatcatggttacttggtccctgcctgagrcacatgcatgcatgcaccgtcgatcaatcaacttcac

SEQ ID NO: 369 - DNA, 887 bp, Avena sativa
tgccatattctagtacaacataagaaccacattctagttcatatagtttcaaacactcatgttgcttgcatgcacctaaagggagaagacccggttgctcagttcctgattgatggatccaactgaagctctagctactcatgtagcctaaccatgtcatatcctcaacgatgaatgagatcaggggtcagtttccatcaagaaaactcagcaatcgagtgttttctggtacgcaaccgaagttgaattctttagtagctccctgattgccatcgtagcataggatgatgaaggtaaagtaaatgataattttacggccagtttgcttggcaatgtatctgagctgccaatagacttgttttgtacgacgctagtttcactagttggcatggaggtctccaatggcccttccaacttgcaatccgatgtctcggagacagaacttccagtagatgcaggctcattagctacctttgcatccgtaagcttgtctttggacataatatccaaatcagtttctgctaacgatgcactgtcatccgtgtatgtcatgagttcccactcaaaatcaataggcctctggaacacccgacggtaacctcctttcatgtttgtaattgagaactccttcacaccatgagcattttctgtcaagctaatgccatcctttttagccatttcatggtaaacctcagcaacttcattcccagggaacaatgcttgtgaaccaggtaaaggaaggacaacatcttcaaacgaatagacccctttcaataaatcttcagaatcgactatcttcacggattggatatttcttctggaagtatttcagaacaaatatcaatttcagacaaatttagcatggccatcatcagcttctgaagtac

SEQ ID NO: 370 - DNA, 631 bp, Avena sativa
  modified_base (621)..(621): a, c, t, g, unknown or other
gtcgatgaagagcctcccttggggatcagaagacgatgcgctcaatcaagttatgacgactgactcatggccctcaggtcagacttacacttctcatccagaggtggaggaatcctggacttcatctgatcttagcacagaagggcttggtcaatctgtcaagccttgccgtctgaagtcgtatgtcatgtcatttgatccagacacgttgcaaacttacgcgacaattcggtcgaaggtggcatttggcatcatagagaagcacacagaggcgctatttgggaaaccggagattgtgatcactccggagggaaccgtggattcttccaaggatgagcatgtcaggataagcttctcagggttgaggaggctgatcttagaggctgttacttttgggtccttccttggatgtcgagagctatgtggactccaggtaccattttgtgacctaactagttggatccagatagtgtagattcatggtctgaagttcatgggctttgctgaagaccattgtacaatggtaattaccctgtgctgtatgccgagaaacatatgattctggcatcacatcattgtaaaggggaaagtgtcattagactgatatctaaaaaaaaaaanaaaaaaaaaa

SEQ ID NO: 371 - DNA, 727 bp, Avena sativa
gaattctatgcaattgaaacttttgggtccacaggaaagggattcgtgagggaggacttggagtgtagccattacatgaaaaacttcgatgttgggcatgtaccattaagggtagcgaaagccaagcaactgctcgggacaatcaacaacaactttggaacccttgctttttgccgccggtacttggaccgcatcggcgagaccaagtatctcatggcactgaaaaacctatgtgatgttggcatcattcagccgtaccctccattgtgcgacgtgaggggaagctacgtgtcacagttcgagcacaccatcttgctccggccaacctgtaaagaagtcatatctagaggcgacgactattgatggcgcagcagctccccttctctgtaccggttgctggcatgatcattttgcacctagtcttgggcaacctgtgttatttccgctcaaatggcacaatgtcggagtcagaccaataatgctgtgaggcacggaggtttactgttccattgagcaccattttgatttctgagttcaaaagtttgttgagactggtttgtgtacgaattgctacctgtgttgtatttggctggattcctctaaagattatcctaccattcagagaacttccatctctagccctggattttcgagagtgaatgtgtttctgcgacgatcgtttgttcctttagaggcccagttgacaaatgttgcagattcatgtcta

SEQ ID NO: 372 - DNA, 820 bp, Avena sativa
agaaggctgggatggtaccacttcagatggagcttggaggaaaagatgcttgcattgtgctagaggatgcagacctcgatctggttgcagcgaacatagtaaaaggaggtttctcatacagtggccagagatgcactgctgtcaaagtggtgctgatcatggaagcggtggctgatgcggtggtagaaaaggtcaatgccaagctagcaaagctcacagttggcgcacctgaggataactctgatatcaccccagttgtaacagaatcctcagccaatttcatcgaaggcttggtgatagatgcaaaggagaagggggcaactttttgccaagagtacaggagagagggtaaccttatctggccgttgctgttggatcatgtccggcctgacatgaggattgcttgggaggagccttttggccctgtcttgcctgtgattaggatcaactcggttgaggaaggcatccaccattgtaacgccagcaactttggcctccagggatgtgtgttcacaagagacatcaacaaggcaatcatgattagtgatgcaatggagagtggaactgtgcagatcaactctgccccggctcgaggacccgatcatttccctttccagggtctaaaagacagtggaataggatctcaggggataactaacagcataaacatgatgaccaaggtgaagagcaccgtcataaacctgccatctccatcctacaccatgggctgagacgttcatgtacaatgttctataaccacacgactacaatgtagagaattgaaatgttctgtgaccacgtgagatttggagatctgtat

SEQ ID NO: 373 - DNA, 668 bp, Avena sativa
cttgtctatgaatcaagccaggataattgatactccagttcagacatttacagggcatacaaatacaaagaattttgttggcctttccatttctgatggttacatcgctactgggtcagaaacaaatgaggtttttgtctaccacaaagcatttccgatgccagtcctggcgtacaagttcaacgtcacagacccaatatcaggccaggagatcgacgatcaatcacagttcatctcatgtgtgtgttggagaggacagtcttcaacacttctctccgctaactctagcgggaacattaaggtcttacagatggactgaccctgtaccagagggcaagtgtagctgcctggtttcgagtagaaatgtaccgacttcagtgacttgttaccaaagggaacagggtgtgtgtcttgttattttgtcgcttcaatgcagaagcgggggaacagggtgttctgtaaactttgccatggtggaattagtagggtggtagaggagatgttagctgtatcgagagttagcgtaggattacaggttagggtcatagcagatgtagcataaatagggaagatatttgagacgtgaggtggccgaaaggttttgtacatcattggtttgaggtatacttgtataggcaatcaatccaagtttttcttacaaaaaaaga

SEQ ID NO: 374 - DNA, 691 bp, Avena sativa
ggaacgccgtggtgttcgagatcgtcatgaccttcggcctcgtctacaccgtctacgccacggcggtggaccccaagaagggcgacatcggcaccatcgcgcccatcgccatcggcttcatcgtcggcgccaacatcctcgccgggggcgccttcgacggcgcctccatgaacccggccgtgtccttcggcccggccgtcgtcagcggcgtctgggagaaccactgggtgtactggctcggccccttcgccggcgccgccatcgccgccctcgtctacgacatcatcttcatcggccagcgcccccacgagcagctcccctccacagactactgaagaatctgagccgatcccatcgattatcgccacgatcatgatcgagagattacgatagctcttcaagaatcaagcaagtgtcgtcgtgcgtgtcaacaagtaagaatcgagcaagtgtcgtcagtaagattgctccttcaagaatcgagcggtttagtttcagtgttgttctctgtttctctcctgtgttgagaagttcagggtgaacagtgtgagtcggtcaggaataatgggtacattatgcatcttctctttgtaatcctcaattatgcttccattccatggtcaagattagtgtctttttgtacaaatcgatctgttgtatgtatgccttttccagcggactaaaaaaaaaa

SEQ ID NO: 375 - DNA, 918 bp, Avena sativa
cggcttcgagaagccctcggccatccagcagcgcgccgtgctccccatcatcaccggccgcgacgtcatcgcccaggcccagtcgggaaccggcaagacctccatgatctccctctccgtctgccagatcgtcgacacctccgtccgcgaggtgcaggcattgatactgtcgccgactagagagcttgccacccaaaccgagagggtgatgcaggccgtggggcagttcatgagcgtggacgtgcacgcctgtgtcggtggcaagagcatcggcgaggatattaggaagctcgaggctggagtgcaggttgtctctggaaccccaggcagagtctgtgatatgatcaagaggaggaccctgcgcacgagggccatcaagatcctcattctggatgaagccgatgagatgttgagcagaggtttcaaggaccagatatatgatgtctacagatatcttcccccagaacttcaggttgttttgatctcggcaactctgccccatgacatcttggagattactagcaagttcatgacggatccagtcaggatccttgtgaagcgtgatgagttgaccttagagggaatcaaacaattctttgttgctgttgagaaggaggaatggaagtttgataccctgtgcgatctttatgatacgctgaccattacccaagctgtcattttctgcaatactaagagaaaggtggattggcttactgaaagaatgcgcaccaacaacttcactgtatcagctatgcatggtgacatgccccaaaaggaaagagatgccattatgaacgagttcaggggtggctcaacacgtgttctaatcacaacagatgtctgggcccgagggctggatgttcagcaggtctctcttgtcattaattatgatctaccaataatcgtgagctctacatc

SEQ ID NO: 376 - DNA, 698 bp, Avena sativa
tctgctgagaagggaagagactgttcatacttccggaagtcttcagtgaaggaaccacctgttgttttgccgagtgaagtagatagctctgaggtagtctggttggaggaattggaggaccatcaacctccagagggattcgttgttgctagaggtctgtacaaaggccctgtgataaggagatagttaggtttataccacttttgcatatggatcaccaatcagttgaggatgcaggctcctagcatcggttgtatgtggcttagtagagcaagcatcatccagtcaagctgcatcatgtgatttacgatgtacacgaccgatgtggatgaatgaagagttataagaccatttttagtgtgcctggagcagtgatgctggtctgtgatgtagctacgtgtgtatcagatgaaggcctttggagtacatacttctttcgagaagaggggagttctagccatgctgtattaggtagaacaagtggcttgagcttctcacccgatgattattccaggaaagaacatttggtgtggcgaactgattggtccatctcattgtgtaaacagtcgcaatattctttgggatacgaactttctgtgtctttgcaaaaagtgacaatgtggtgtcctcttccaaactccaataactctttgtttattattactagaataacttttcttccattgacgtgaaaaaaa

SEQ ID NO: 377 - DNA, 754 bp, Avena sativa
aggaaccttaaaaaggcaactaactctatggttgaggcctctaagatatctaattcaaaggctgatgcctcgaaggtatcaaattccataactgacgagccaaagatatctgattccatggctgactcctcaaagatatcgagtgtgctgaacggtatctctagccatcacgacaatcaatgtgagaaagcactacagagtgcatgtgaggcttcgtttcctcctgaaactcacgatcctcacagtggcaatcttttggaaaattcaaatatggaaacaccattcttaaccgaggaaaaatttattgatcctactatagtcgctcaagcagatgaagtcatggaaatgcaaaaccttgacaatggagatgataccagagaaaagaaagaagaaactaggtacaaggaagaacctctgtctaatggacagcttagaactaagaggagatcttcgttctccaattcagaatatcaggagagtgaaaccaagaacactccagttccaccaaggaagccaagctatatggctccaacagaatctttaaaggcaaaattgcgaggaccacccagattagattttgatctacccgtggacaagaatgacttcacccgccgccagtctcttccttctgctctgaaaaatgaggagtcaaaacggatggcgacggtgaagaggctatcaaagttccgtctgaagcttttctctatccaatgttgtggatgaatctgctgccgtctactgtctctgtcattct

SEQ ID NO: 378 - DNA, 953 bp, Avena sativa
cgacaccccaagacttcatatacttgatggggagctacagtggctgaaccctgacaacaatcatgagctattgtgggattatagcatgtgtgctgacacaagtcgtggggccgcgatccgagatttgattgcaagagccttaaagggtccacttggacctggtcaacaggagcaagttgttatagaattggcaaaggactctaagctagtgtatcattgcgggatgacgccacagaaacttccagaccttgttgagcataatccactgattgctgtcgagcttctttcgaagcttatgaactctcctgacattgcaggttatttcgatgttcttgtgcacatggagatgagcctgcattctatggaagttgtaaacagacttactactgcggttgaactcccgacaggatttgtccatgaatacatctcaaattgtattcaatcatgtcaaaacattaaggataagtacatgcagaacagactggtgagactagtttgtgttttcctccagagcctcatccgaaaccagattattaacgttcaagatcttttcatcgaggtacaggcgttctgcatcgagttctcacgaataagggaagcagctggcttatttcggctgctcaaatctttggagtgaagaaccaagttataaactggtggtattgttatcatatgtttggagtttctggttcgtagttctcaggccactgtgggatgttcaagatcggacgatttgtgtcaatttcttacagaatcagtggcaccctccaacgacaatgcacccctgtaagagtggatcaaaagaggcaccaagagcagatccagatagtacgctatttgtggttggtcggcaattagatctgtttgtatacgccagttgtactgagacagataatagatgcatgttttggtctattcttcgatatccatgtaatctcaagaatgccatgagc

SEQ ID NO: 379 - DNA, 551 bp, Avena sativa
tgtgaaacaaaaagagaggctatccacaaagctcttcagcgatcttcaggtaagatcaaacttagaaaacagaaggcagtagtacacaagttcctggaacatcagttttatatctgttgacactttaatgaacacggcaatgtctcaagaataactgggatcatctaatttcaccaatacaaaatacaacttgactatggctgcattagccggtttgctgtagtggcgggagtggtagcagcccagacacaagatctttaactttgcttatcttcagatgcttttagacgacccttgatccacccctcaagagaggctagctcttccctcgcaatggagtggccgagatctggatatgccttgaactcgcaactcataccagcactttgcaaaaatggcgggccagcttgaccagcctcaaattgtaccactttgtcagccattccatgtgaccacataataggtgtctgacaagtttmgcgaacgaatttcagataaaataaaaccaatgctcttgtatagaattcaaattcacttctgaactcctatcc

SEQ ID NO: 380 - DNA, 773 bp, Avena sativa
ttttttgggcctcaaaacgaaatcctctgttattacagggtgcattctcgcaatgtcaggctgaggcgaggaggcactccgacaaaattacaaccgtacaaaattgaaacacctctattactgtatgggttaactttgagcgcaaaggtgaaaactgctcaagctgcagtcccagttcaagtgaatcgtccatttttcgcgtgctctgctctgaaaagcatttgtgccatgtggaacaatggccaaagcttcgggtgctctcccagaatgctttgtccgtcggtctcatggtatattcagtattttcttcagcttcgcgacaagcttccagtcatccattgacaactcatccctgtagtttgctttcagaagatcaatagagcgcctcgaaatgtggctgataagctcatcttccatctcaaaatgcctgccaaagctcttctgctgctcatctgaattgctcccgattatctttatagccaccttttgcccttttgtagccgtgtcgacttgcttgtgattaatttcaatagaggcaatcttcccaatatcaataaattccttcgagggtatgcagataggtgtcccgatcttagctattccttcaagaatatcaacacccagaacgattggatccttcttgttgaagacacaattcggcataatcttgagaacacaggggaaaacagcttcctcagcgctttccttcttcttctcttcctttacgttcttaatgtatgctgtaaactggtcaaaaaggtggtatataatat

SEQ ID NO: 381 - DNA, 768 bp, Avena sativa
gaagcgtgagtcgtttgacaactccctttcagggcgtgggagtcgaagttctggatcccacgatgatactgagaagagttccgggaatcctcaatccgggaaagcattgtatgatttcacagcaggtggtgatgatgagctgagtttaaactctggagaggatgtcgatattgaatatgaggttgatggttggtactatgttaagaaaaagagacctggaagagatgggaaggtagcaggtctggtccctgttttgtatgtgagctcgtgatagcaatgaaccttgtatcatgctactctcaagagctggctggagtaattagacctaagaatggcacgcagaaaagtttcatgatggccttgcatgcatatgggagctccgaacattttacaggcacacaaccttgtggaaggacatctctgatcatcttgatggtcctatggtgcagttttgtttgcttttcatactgccaggtcatgcaattcattgttattgtgtggataagcattggatgaaggattccattactctcttctcgagtcatcatacagcggttgtgcaacatataccattgtaattgtagaactattagctgtgaaatagtaaactgtagctgcctcgtttccccgcgattcttttggtcttgtgtatgttgttaagcggtaagtagtgctgtatcagtttgtgtaaaattttgtgttgtggtggaacaaggatacatgagatataccatagcgaaggggcatgcacccaattatagttaaaaa

SEQ ID NO: 382 - DNA, 911 bp, Avena sativa
tagaaaataatggtagtattacatgcattctgcaacttcttcaaacgcaataatccaaagtgaagtcatcatataattctatctgttcacaacctcatgacatgaaaccattctttaaattaagcatgggcacgttactatgccacccgatgtttaaccgcgtcatggtgaagatgggtgtttgtgcacatcatcacagctcaagcttgctggcaaggtaccacgagtgcatggccaggctgccgaacgacatgatgttggccagcgacgagagcccgtggatcatcccaaactttttgttcatcgcggcgagggcagggctgctttttgctgacttgacgttcttcgaccacccgacctcgtcaccgatgcttagttctctctcgatcttgtgcctcttcttcatcatctcaatggtcatgggggtgaagacgagcaggttggagaggttgaatccgagcgcggagatgaggaacccaagctggtagcgctcgacggcggacgcggtcttccacgggtggaggtaggcgaaggctgctacggagacggccgcgcaggcggagatgagcgtgaagtaggccgggaacatcttcccctgcaggttcccgaactggtgcctcggcaggttcttgaacatgatgatgccgccgatgaaggtagcccagagcgcggcgccccaggaagtggcgaagcagaggaggtgggacaccttggcggccgtgacggcggtggcgccggagccggaacgggcgccgaggaggacgtccggggcgaagaggacgcccgccgcgaagaagcacaccgccgacaggaacctagtcgcccacgccatcgccgattgctagagagagatggggaggaggaggaagagagaggcgagagccgacgcgtcctttgtgagagcggactcg

SEQ ID NO: 383 - DNA, 664 bp, Avena sativa
gaagatgcgcacttacaacggctctcttatatccttccaggcattcgaatacaatgcgacgatcgacttctactggtcgccgctgatactggaatcaaacagcgacaacccgataattcaccgggtggagtaccggatcataagggcggagaagatcgagaagcatgccagtatgtggagcaattccgacattattgtcttcaactcttacctgtggtggaggaagcagagggccgatatgaggatgaaagtcatgtacggtacatttgaggatggtgatgcgaagctagacgaagtggagatggtcgaaggtttcgagatcgctctgaagaaactaaccggatggctcgaaaccaacatcgacaacaagactaaaatctatttcgctggctcgtcgcctacccatacctgggcaagcgactggggtggagacgatagcaacaagtgcctcaacgagacagagccgatcccgaaggttgggtacaaaggcgcgaccacggactacagcatgatggacaaggccggggagatcttcaggccactggagaagaaaggcatccacgtgaagatactcaatttcacccagctctccgacaaccgcatcgacgcgcacccgaccatccacaggagcagttccgcccccctcaccgcggcgcagatcgcc

SEQ ID NO: 384 - DNA, 699 bp, Avena sativa
gcccacgtctacttacaaggcaatgacgggcgtatcaatgagggataagtacaaaaaattcaacaaaaaaagggataaagtagtaaaatcctttgtatattatcggtgggtagccagcaaatcggctgaaattaatcaaagctgattgcaatgaagaaaatatacttaattcgtttcaatcaacaaattagcttaggtccttgtcgcaaacagggtaacttcttgagccttgcttcgtcctccatcgatcagagcacgcagttgccgaatctgggtcgctggtggacgacggaaccgcagcctccgaagtcacatgactgatcggaccggccatggcgctggtagtagtcgttgaatgcgtaggaggcgtgcacgaccttggtgtcgggatcgaagcaccgccccccgcgctggatggcgctgcagtccgccccgtggccacaggcgtagtccagcgcgtcctggagccgctggtcccccacggccgggttcgccacgcaccagcttccactgcggtcgaagtcgaccttgtacacgggcgtgccgtccgggtagaagaggccgaagttgcgctcgtcgtcgtcgccgggcttctggttctcgttgaagagggagaagatgtagacggagatgtcggcgttgggtttgtaaggtgtgccggtgccttccagaaccttagttgatgaggttcacattgta

SEQ ID NO: 385 - DNA, 657 bp, Avena sativa
tgaccagtactaactagaataattaactcattgatgatatatatcgataataagtatacatggttgtctgcaaaaataaaacgagtacatagttacaacaactaaggtaaaaaatcaaatgtggaaatggaacggaattaacaaccaagtagggaaataaaaacttattcggcacccgtgcagcagtacgccctttaatgggctgggcaggtgaaatcggacgggcacttcttgccgcagtgattaaggaggagggtgatgtccactggcacgttgaggtggacgacgccgaggatgttggccttgacggcggtgcagaggcagacgacggcgtcgaggtcgaccaaccccttcaacaacgggcaacactcgtcgtatgctggaacaccgaccttgaggccgagcagcccgccgagaacgttggcgcacactctcagcttgagcacgtcgatggagcactggccgtcatggccgtgccctcctccatggtgcggcggcggaacgacgacgggtggcgtcggcaccacaaccggggggctggcaatacgatccgcagccgtggaccgcgacggcggagaggaggctcagggcaacaaagagtgcagccttggatgccattgtgatcgtgtgtgcacgagtcgcagcagcttttgmact

SEQ ID NO: 386 - DNA, 625 bp, Avena sativa
ttttaacttcaaaacaatgactggattcaattaatgcaaacttatcaaactagatgccactgaacttaacttatatttcttctcaaacatgtttcgccaagaaaggacacacaatattagtctctacctactgagaacggcacctgtaaaccgagaaaatggggtaaatttcaggggattctagctagtgaaagatcacccgtcgctggttaatgtaagggcaaggacaacacaagtcagggtgaacataattgtcgcagcagcgaaggccaggatggccctctgtgagaagcctttcttttcacggcccgctagctccacctccttcagcagatcacggatctcgtcgatgtctgagtccttcgctgcatgaattagtctgctctgaacctcttcaagcttggcaagccttctagctcggttcgcgtctctagcagaccagatggaccgtgtcatcctccacaagagaattccaacatagattgccacaacgcagtccacagtgtaatgatgacgttcacgtatctccctttgtgcgctgtgcagtacaagaagccatattgcaacagaaatccagcccccataagcttccgtccacgccattgcagtaagaaccgagacaagc

SEQ ID NO: 387 - DNA, 879 bp, Avena sativa
tgatggcgagcacagtgacgaggaagctccaagtgatcacttgcgatctccagtaggaggtttctttaaggagaacgggagtgtactagggagaatggtaatggggaatggtgatttgtatgccaatgatcatggctttcatgaagggagcatcggcaagggtgagaatggaggagtccattcaggtcttgatccgtacaccgactcaatttcgatgcttcagtcagcacaagaagcacttgagaatgagatccaaatgtttgtggaaatagggaaacaaaacagtgataattctgcagccaactacgaggaaaatggatggggcagctcatccgattgcgaagaactttcagaagaactaggtgaaaaattgcagcttctcgagtctaaactggaagaagcttcctctctcatcgatgagaaggattcaagaatacgtgaacttgatacactcaacaagacacaaccaagggaagtggcactatacaatagcaagctgctgtctctacagtctgaagttgatcagctggtgatggagaagatggaggcagagattcagtgtttcatcctgaaaagagcttcagaagcttggcgaccacagtccgagaaccagggtaccctttacgaagcgcagaagtctctgtctgaggatcacaagcagttggaagtcaagctacggcacgctgagaacagagcgaagttgctagaggagatgacggagaagctagagtcacaatgcaaagagctcacggacgctgcagaagtcctgaagctgcaggccggagcaagtcgagcctcgatttttgtccattcagctagtgctgctgtgcatcgcggtgtggacattcattgctcgattctttccctccctgctgagtt

SEQ ID NO: 388 - DNA, 875 bp, Avena sativa
ttgcttaatgcaacaccattttggggtttctttcgaacccgttaagatctcctcatttgtcaaagatttttccatgggctgggacatttcctcttccatcatttgtgaggaaacttactgaaacagtgtggcagaagatacgtgacccgagaagtatacagaagatactcaggcaagtatatgctgaccactcaacaaatgttgataaagtgttctcgcgtattatagagacaactgaacacccagcagctgctgcatcatttgcctccattatgtgtgctccaatgggtcagatttccttccaggaggcactctctaggtgccaaaggcagggaatccccatttctcttatgtatgggaaagaagatccttgggttggaccttttgggggtcttagagtcaagcagcaggtgccagaagcaccttattatcaaatcagccctgccggccactgtcctcacgatgaggttcctgaggttataaactatttactccgaggatggcttaaaaacgtggagtccggcggtttggttgatctcccatttcttgatgaccccagctatgaagaacatggtgtatcccgggagctggaatttgttagaacagggtccacgaaatcagttagtgtgcggctctttggttccagaaattccttttggagccagataagctcattcttgaaacggcatgcctcgaacacacgggtagtacctagatgattcatctctagtttgtagaatttagaagcttcaactgtgtattgtattcattattctttatgtagagtagtcaggttgatgactagatgtactagatagatacaatttttaacatttctagtgaatgtaaatatgtatagtacggagacaaaaaaa

SEQ ID NO: 389 - DNA, 479 bp, Avena sativa
cggaattcccgggatcgtgcaggaccacgccacgtacgccttcaacgcctactaccatggcatggggatggcatccgggacgtgctacttctccggagtcgccgtcatcacgaccaccgatcccagccatgggccttgtgtttacggtgggaagaacggcagcgcgttgctgaacggaacctcgatggcgccgtcgtccaactccacaacggaatccggctcccggcggggagtgggcgacgtctcgtcattcgtcctgtccgttgtcatcgcgctgctcttgagcgtcgtccttctgtagtaggatctcttttagtagtaggaagtgcagactagtcgctcgtgagaggattcattttgttgtcagatgaggttggcttgggtgctgggtaatcctcactgattcaaaatggaacggatgtggttctgttgctcttatggcgtgagctactctggtattggttgggaatttggattgg

SEQ ID NO: 390 - DNA, 596 bp, Avena sativa
ctatctgttgtgggtctcagcgaacaagaggctctggaggaaaccaagaatgacattcttgtctacacatcaagtttcaatccaatgaagaacagcatatccaaacgacaggagaagtctgtcatgaaactggtggttgacgctgagaccgataaagtacttggtgcagccatgtgtggaccagatgcagctgaaattatgcagggccttgctgtcgcactcaaggctggagctaccaaagccacttttgacagcactgttggaattcacccttctgccgccgaagagtttgtgacgatgcggacgttgaccaggcgcgtgagcccggcttctaagccaaagacgaacttgtaagcaagatacgcgttcttttggacctaaattataccacatgtttgaagtgatgcgccagagggaatctagaagtagagacctgtttcagtttggttgccccacgcttggcatttttcacccgaaagggtaaaaaggtatactgtgtaattgttagaaataagggttgcattatgtacagaagtcagtgggattgtcacgatttcggatcgaaataaggccttcaagcattatcccaaaaaaaa

SEQ ID NO: 391 - DNA, 832 bp, Avena sativa
tgattgagatgattcaatcatttgttcttgctcatgtattgatattattggcccacttattacatcatacatggattgtaaacaagataaaactcaaggcttaaatcatgtcttcattctgcccatcgcaccaatggcacaacctgcaatcttctcaatctaaagcagatgcctaactatgttgcgcgtggatgtggatgtggatgtgctcaactagaaaagaggtgacatgcattcagatcatgagatgctgactatataatcccccagagaattggcgcacagagtaaggaaaagagagaggatggagagagagagaaaggagcaaaccattccacggaaactgatggagacctgcaccagcactctcctccaccagcactctcctcaggcagcagctagctggctcctccgccagacctgcaccagcactcttgtgcgccagctatgtctcccttgccaacctcttcctctctggccaagcttctcctcctctggcgcaaccctctctcagcagggcacaatgcatggctcctctctcttcccccgtcgaatctcttctctccgccctctctactcctgtttctgaatgctcatggctctttactctgttctgtatacccgtggtgcttctatgcctctattattgtagctgctggctttggctgctgcatgcttttggaggttagctgctagctggtccatgtgagctgctggcatttggaggttagctacatgtgaatatgcttctcagatgagcattctttctttatgcagatatggcttctttgtcatctctacttctagaattactctgtatttttctacatgt

SEQ ID NO: 392 - DNA, 714 bp, Avena sativa
  modified_base (61)..(61): a, c, t, g, unknown or other
gccatgctaagcgcagttgatggcagatttttaccaatctatgcaccatcttagtataacncaaaatactaacagcacttgtaatcgttcaacgccacatattactccaagcaagatcgatagtgcaacacataacacacattccaatgtcatcagctcagtcaatccaaacacgaggagctgttacacaattgtatcacaggctaaaaactacactccaacagtggtaatgcagcacacagcacacccactaaatatcatcagctgaccaaataactgatggttgacaatcagcaggatccttcatcaaacttcaggtctcacgcagttcgcagaggcggagacaccaatataacaccatcacctcggacaaaaaggaaggggatggtacgcttggtagtccgcactatttcttcatatgtttcgtcgtcaatctccacagttgttacaatctcctcaacatctccaaggatcatgtttaagtgctgatcatatgcatggagcttgccgcggagctctcggtcggaccggagcttaacgtagatgcgctcgtcgaggctgagccttatcagatccagaggctccttcaccgcgatctcctcctccgccgacgccatcgcctccgccgacgcctccgctgatactcctgtcgctctccggaactaagacctaaaccctagcttccgcctacccaatcgaactcgccaagccgcg

SEQ ID NO: 393 - DNA, 546 bp, Avena sativa
ctattctcgaaaggcagagtctgccacgagccgagacatccgcacacgcgtttgtgaccaaccttgtcaggtatgatgctgaagatctcagggtggctgagcccaagggtacctggatggacagcggcagcggcagcaacaataataggcctacaaaacgacaagtggaaggccctagcggcggttacccagcatcgccaaagaagctaaagtggtagaactgtctagatcaagttatctgacttgttccagtggattcgtcgggctcagtagatgggtactagtttgcagtagcaagagtaaggtgcagagagttagataaacgaagtaagaagaaggtaggtgcgtagcaaaggggtcagctcaagggaaactggtggaaacactagattgattgtatctttccttttctttttgtaaagctctcgaatttccgtaacttctgaagtgttgatatcatgttatccagttgagaactggaggtcaagttagtgataccgaatggaataagaatttaaagaacagccccagtgaggcagtgattat

SEQ ID NO: 394 - DNA, 400 bp, Avena sativa
caaaacagttaccagcatatgatgagaagctcaagcgcaaaccaggctttacttcagcaggacgcatcacacaatgctgtggcagcaaacagctaccagaatatgcttagaacctcgagcgcaaatcaaggtttgcttccagcaggaggcatctcaaaatgctgctgcgctaaataattaccacaacatgcttagaggctcaagtgcgaatccgagtttgctccagcaggaggcatcgagcatcttcaaaggtcccacagcagtgcacaatggcattcagttccgtgcgggtccgcttgggcaattccagcaccccatgtcgttccagcaagctatgccccagcaccagcataacaatttccaggcctgggtgcgacccgcaattccagcagcatgtgta

SEQ ID NO: 395 - DNA, 688 bp, Avena sativa
tcccgggatagcgccgccgcctccgattccggccgtctcccgcgcctcctacccgcgccgagactccgcccccgtgtcctcttctcaataccccgccatctcatcgccattccggtccccgagacgcctcccgcgctcaggacgtcggcgcggcagcctccctcgcgtccggctgctactacgcaaagcgtcgagttccggatctggtcaggaaggatgaggaagggactacaccctcagctgcagtggatctcgtacgtgacgcagagcggcaggctgatcaacgtaatgatgaccaaggtgaaccacaccggtaaaagtgtaccacatgagggcaaaagcggcagatggcccagagcctggggcagattgcaaagttcaagcgccggtacgagcaggaagcggcggaggagaacaaagacaagtaacaagtagtgctcgctggttcgcaagggagctttagattctccttgttaggcataagcaagattggttgactgcacgagatgattttaactgcatcagctttgtcggtgcagttttgttctggctggctgagctcggcgtgtttgttttgacctgtcatttacatgtcggttcaagcttcctttgttttgctctgttatgcttgaattgctgagaccagaaatgcaacggattcggtttctctacttaaaaaaaaaacaaa

SEQ ID NO: 396 - DNA, 800 bp, Avena sativa
ggtggaggtgccggtggtggctttggaggcggtgcgggtggaggtgccggtggaggcggtggatttggtggtggcgcaggaggaggttccggtggcggactcggcggtggagccggtggtggcggaggtgctggagcgggaggtggtttcggaggaggcaagggtggcggtttcggcgttggcataggcgcaggcggcggcaaaggtggaggcttcggtggaggcgtcggcggcggcggtggtgcaggtggtggcgccggcggtggtttcggaggaggcgctggcggaggagcaggaggaggattcggcggaggcgcaggtagcggcggcggcatcggcgatgggcagtgaggtccgcgcgctgggcacgggcaggcgcacccgcacgtcgcgcttgcttcggtccatgcaggcaagacccgctagcttgacgtgaggcggatcgacgacgcgcgtggcaatcttggtagtctataaagtatgggaaatgaacgaataatctgtgacattcctttcgtagtattaatcgtgagtatttatttttgaagccatcaagctagccaatatatgtttccccctgtacaccgccggaaagatatttatatatacatatatacagaatattactattaatttattacgcagtagtccgagagttggagtgtgctctgtgagtgtggtgctaccaccatttcgccgtggtgtagcatgcacgtgtatgtgtgtgtgtatgcacgtagactaccaagatatactactcctttgtatgctgataatagatggaagaattacttgtaaaa

SEQ ID NO: 397 - DNA, 930 bp, Avena sativa
tagatttaggaataacgaactcaatctctaattgataactgtgatctatccgttactacatgatagctggatatactacttgatagctttcctgtaactaaatgataagcatgactgttgctttccaagctagtgtcgccatcttctgtgccgctggctggccctatggttaagacacatccccacccacaacatgaatattgtcaacttcagtgctcgtcagtttgatatatctgtatgttctgtaggctcttaagctgaggtcaaatgagttgaaacttgagaaggaaatggagggtttaaattcagagatttcttcatacagacgcaaagtttctagtctagagaaggaacgtcagcatcttcagtctactgtcgaggctcttcaagaagaaaagaagctcctacactctaaattgaggaacgctcctgtgagtgagaaggtaaatgtcatagaaagaccaccggtcgacaaaagggatgcatcaaccgcgacagaggatttaggggaaagcagctcttcagaaacactgaccagtaccaataaccaattacaagatgttggaacatctacttcccggtccaataatatgtctgattttccttcatttgaggaggtatcttctagcattccagacgaccagcttagaatgattgacaacatcaactctttgatgtcggagttagcagtggagagagaagagctactgcgagcactgaggatcgagtcatccaattgctccaagctgaaggagctgaacagggatctaacacaaaagctggagactcagacacagagacttgaactattgacttcccaaaggatggctaacgagaatctccttgcaaatccgatcgactcacgctccgtcaatgatgcaacaatgtatgctgatgaaggagacgaggtgtcggacgggtgcttggctg

SEQ ID NO: 398 - DNA, 777 bp, Avena sativa
ttgttcttcggaaaatcccaaactcatattaacatagtgaaaatgtgacatacacaaaaggacatgtattttatacatcggtaaggtgtgatctatgacaccgacaactcctagatttctgatgtgctgaatgtacaatataacttcagagaggcatcatagcagtagcaagaaaaatattttcaccggcaaaaaataagcttcagtcaaaatggtccgcggagaaatcgggctcgtcaggcttctgtagccggcggatcattgtgtcgtcattgcggaaccttctggatgcagaggcaaacttgtgcatctgggcgacagcaccctcggcaccagttcttgcgccgctcgaggtgccctcctgttttggtttgtcagcagctggatgttcttctgaccaccatgagtatgactcccatcggctcaggctctcggacagcttccttcgctggtgctgccgccatgccgcctggatgaagcaggcggcccatgtcctccagtggtgggagtagaaccggaatgtgtgctggagcttcttgctgtgaagccttcggaactggttcgcgacgaatttgaggtcctcggctcgcagggcgaaggcctccacctccgtgatgctccgcacggtcctcgtggagagcgggaaatggacgttggtctttggaagcagggcccaggtgagcagctcctcaccagcgaaatcaccaggttttaggagtatagagttgaagaagttgctccggcctccattggttgtggaactctccagcttgtccc

SEQ ID NO: 399 - DNA, 946 bp, Avena sativa
agaccctcagacaacattacaatagactacatttcttagtcgtcatcggaaaagttgtctagagggacctcagtttgtttagccacatcagaatcctgtgttttatcccagtccttcaattttgtaccaagcatgtatgtgtcgcgtagaggtgcccaccctggctcgtcttcatctttgccaatatgcttagagaacttggaagatgcctggcccttttgtccttggtttgatggaacagactgtgtcccttcttttgccaaagctttacttcttgatggattcaaaccttttccgagttttgtcgcttgctcacctcattgaacaacctgacaaccccttgggttgcaaccttgatgagcatcttctctttgttgtcaatatggtttgcgggtatgacatgacccttctgcgcagcaatgcgcttctccttgcgggcatctcccttggacttgtgctcgtccgcctcttcggccaacttggcggcgaccaatttcttgtgcgctgacagaattgggcccaatgggtcgtcggcgagcttcttggacatgatcttggtgaaggcgacccggaaagccctgcagccttgctcgaacctggtgaccaccttctctccgtcgtcggattccccgccggagctggaggcctcctcctcggacgagggggcctcgacctcgcccgcatcgggagcagcgtcgccgtcgccgtcagcgtcccgtcgcttcggtggaggccgtggctgcaaccttcgtggtagggcttggacgtcgtcttcgtcgtcagagttgtagtcccgggcgcgcttctcgagcagcttgaggaacttggcgctcggcttgttgcggcggcggcgggtggcgtcgtcggggcccgttgagcttcttcttcttgttgggttgccctttcccttccccttgttcttgcgcttgtgtgggttcacggcgcc

SEQ ID NO: 400 - DNA, 846 bp, Avena sativa
cattatggtcgtggcaaagtgaaggggtggactgtggtagaaccagctcgaggttatctgaaatggaaaaaggagaacatgcatgcaggatggctgctcgtttgtggggacgtacaaggaactccgcaagcatgtgaagtcggagcaccctcttgtacagccaagggaagtcgatcctgccgttgaacagaagtggagatcgcttgagtttgaaagagagagggaagacgcactcagcacggttacttcacaaatggggagggctgtggtctggggtgactatgtgttggacttagaagatggagtggacttggatgatgaggagagtgacgatgatgatcatgacaatggccgggaggcggacaatgcccgaaggttgataatatttatgatgcgtcaggttactcagcggcatcgaacccaaaggctccagagtccaagcggcgtgcctggaaatgctgaggaagactatgcggttagtggtggtgccaatggaagcaccccttacccttacccctcggaaggtgacgatgaggatgatatggatctggtggaagggagaggcgcaggcatgctgagaccagataggcgtcgccggcgacgccgtaggaaccgcggaaggctgtttttagactctaattaagatggcaggggcttggccaccagaggaggcacatgcacagctgattccccggtgccttagcattcatcgatttcaaacctaaatttacttgttcatgatcatgtaccaaagtagttgtcttaacctcagcccattgctttccatcaatgtatcatctcacattctttgttgaaaagggaatgccgcaaccatctcgtgcggtt

SEQ ID NO: 401 - DNA, 557 bp, Avena sativa
cagtgcaacctgcagcagcagctgtgattagaaggaaactccagtggagctgctgcgtgccagccttcctcacacaaatgagtatcagcgcaagcagttgctcagttttgctcagcgcaatgtgcctgtcaatagctctagttcttctgggtctggtaatgtaccgatgacatctgaatatgtccagagctgaatagaagaccaaagctgcttttcgtaaacttggttcttgcgagtggtgggaagaaaggctgctctcggtctaaatacagagaggattgtcttcgaccacttgaggaagctggttgatgaattatattgctgatgaaattgaggtagagaaggctgcatctgtggctgcaacggatggtgctcgagggaaacctgatcactgaatgtgctattccttcatcctgtcagccaaaacttttaggcctttacctgttacattccgtagcgcaatgtaacttgctttgacttggagttattcgtatatgaattttgtttctttggcttgtgagctgctgttcttttgtccttccagcacctgatcggct

SEQ ID NO: 402 - DNA, 894 bp, Avena sativa
catcagctgtggatacgaggacaagacgaatggggaagagattggctggatctatggttcagttactgaggatattcttactgggtttaaaatgcacacaagaggttggatatcaatctactgcatgccatcacggccttgtttcaagggttctgcaccaatcaatctctctgaccgtcttaatcaagtgctccggtgggctcttgggtcagttgaaattctgtttagcagacattgtcctatttggtataaccatggtgggcggttgaaatttctggagaggatggcttacatcaacacaattgtttatcccattacatccattccacttatcgcctattgtgtgcttcctgctatctgtctcctcaccaacaaatttatcattcctgagatcagtaactatgctgggatgttctttattctcatgtttgcgtccattatggccaccggtatattggagctccagtggagtggtgttggtattgaggactggtggagaaatgagcagttctgggttattggtggcacatctgcccatcttttcgccgtgttccagggtctgctgaaggtgttggctgggattgacaccaacttcacagttacctcaaaggcaaacgacgaggatggcgactttgctgagctatatgtgttcaagtggaccagtctcctcatccctcctaccactgtgctggtgatcaacctggtgggcatggtggccggtatatcatacgccatcaacagcggttaccaatcctggggtccgcttttcggaaagctcttcttctccatctgggtgatcctccatctctaccccttcctcaagggtctcatgggaaagcagaaccgcacacccaccatcgtcatcgtttggtccatcctgctagcgtccatctt

SEQ ID NO: 403 - DNA, 696 bp, Avena sativa
tttttttacatacatctctgttctcttctttattgcttcatagtgataataagccattctcacagtcaaggacgccaccccccagcaagaccacaatagtacccagctacgccccactttgctagtaacagtagaagcaagaatacgaatgcagccgattaagcagtcgggggaaagaaatatcgtaaaccactcatatagtcatactatgtgcctctcctgcagatcaccagcagtggctatattaattcggtactacgagcgaactgatcacactttcccttcgccggcgcgatagactgatcgtccccccataagctgctgctgcccaaccccgccggccgatcagcagtaggcgatgcacttggtcttgcagtcgactgtgcacccgcccccgcctcctccgccgccgtaccccttcccggagccgctgtaggagacgaagcacttcttggggcacgtcagcttcttcttgtagcagggccccttctcggagcacaccgtggtggaggccgccacgccgccgcgcgagtacccgccgtcgggcccgccgtagccgccgccccacccgcctcccatgcccggcacgttgaacccggggatgctgccgaagcccgggatggtggggatggcgccgccaacgcccccgctgccgccgccgccggagccgggcttggtggccggagagggatcccg

SEQ ID NO: 404 - DNA, 588 bp, Avena sativa
gcagcaggcgagattgccgctgcagtgggcgctgagaagttgctgctcctcacggatgtgtcagggattttagaggaccgtaatgatcctgggagcctggtgaaggagattgatattgctggggtgcggcagatggtatccgacgggaaggtagctggtggaatgatcccaaaggtggagtgctgtgtgcgagcccttgcccagggtgtgcacactgcaagcatcatcgatgggcgtgtcccgcactcgctgctgctcgagattctcacagacgagggcactggcaccatgatcactggctaaggtgttcaatgctttcttggtacttgtagtttctaagcgcccgcccaggtccagagctatgtgcagtgtgatggattgaatcctgaaaccaagtggatggacaaaggactttgatgtggcaccactgcatcatgggtagaattatgcttatcctggaggaggaagaggagggagggggtgactggagatggttgagccctgggtcacgaggatttagagtgcagtgagcatttctcttctcctgtttccaccatggcatacaaatagtaaactccactcacactt

SEQ ID NO: 405 - DNA, 780 bp, Avena sativa
tgtatataccgattttctcgatgtgatagattcatgttggattgccacaaaactcagctttaatccatccatgttgctttgctctttaattgcccatgtttcttgctatctgaccgagtttagctgttcagttattatcttgcacatcaggaatcttcaaaaatctgttgaaatcgtgccaactatgttcgaaccagtaaaaatctttatccagttgcaaggaaaggtctgtacaggggtctgtacaggcaataacaggatgcgcaaatccgagccagatgatgctgcgcgaggaatttgtagacttggcatcggaagtcaagttcaaagactccttcagcaacaacttcatagcgcagacctcacagacctgtttgttgctctcttcctccggaggattagaaagggctacagcaattcgagcgccagtaagagcattgttctttacaagtgcaatattggcttccaaccgaagatcctccagttagtactttcactctgtcaaggatgaagggtgtgatcgcgtttcctgttatctttctatcactggcaaacaaagtgcacaatcgttaggtaacatctataacagcgcgcacacgcacacgcacacacacacacacacagaaggatagcaaggagaagcctactctgcttccttaagggcttgctgtattgcagactctataatgtttcctgaagctgcatgctgcttgggaattggcactgcaatgagtataccagattctagatgcattatttcttgtttgcatctgcatcacg

SEQ ID NO: 406 - DNA, 526 bp, Avena sativa
  modified_base (13)..(13): a, c, t, g, unknown or other
acagcaattcgancgccagtaagagcattgttctttacaagtgcaatatctgaataggctaaggacaaatcgctgcagatttatgggaaaatacaagagggatacacagcagctaaattttgtcgtcccacctgtgccttttccttatataaagtacagctccagctccatatttcattgcaaatatcggaactaaaagtgaaggatactggcttccaacgaagatcctccagttagtactttcactctgtcaaggatgaagggagtgatcgcatttcctgttatctttctatcatctgcttccttaagggcttgctgtactgcagactctataatgtttcctgaagctgcatgctgcttgggaattggcactgcaatgagtataccagattccagatgcatattcttgtttgcatctattatcttggcgcactcttctggagaatcaacgcggcatggcgccttacatccactagtgtctgtgaagaaagcaggaaattcgtccgctccgtaagcagcaacatcc

SEQ ID NO: 407 - DNA, 619 bp, Avena sativa
gctcgacaactattgtgcttcatgccctcaggagcgtgaaattgagtcagtcgcggaagtgtgggatcttgctacagaaccagccttcctactttatgcgactgccgttcttgctgcaacttttgtactcatattccgctgcatcccaaagtatggtcagacgcatatcatggtgtatattggtgtctgttcacttgttggatctctgtcggttatgagcgtgaaagctcttggaatagccttgaaactgacattttctgggatgaaccagctaatctatccacagacttggctgttcacaattgtagttgttacatgtatattaacacagatgaactatctgaacaaggctcttgacacattcaatactgcagttgtttcaccaatatactatacaatgtttacatcactaaccatactggctagtgtcataatgttcaaggactgggatcgtcaaaatccaactcaaattgttacagagatgtgcggttttgttaccatcctttctggcacattccttcttcataagactaaagatatggttgatggtcttccaccgaccttcctatcaggattcatagacatacgatgaaacggctatgcgggtgaaggcattcct

SEQ ID NO: 408 - DNA, 573 bp, Avena sativa
atgacagcgcaaaaactttggccaccacaagagagcctgacaacactgggacgagatatccaaattctaaccagtagctctgtattattacacaacaccaccaccatgacaaacagtcgagaagagacacaagaatcacaagatctaacttctctgacatctctacacgtatcattcctccccctcctgggggatggaaacaacaacggaaacaaggatatgtgtatgaactcaacacgcttgggccctccgccgcaaggtaaacaaaagggggagggcaacatcacgagacactacagcctgtagaacaccaaccgaagctcctgcaagttatcgaaaatatttcctgtacctgaagtgcttttacaggaagagaggccacgatgttgctgttcattgctggctccgcagtgagtttgtcaagcattagcatcgacttcatgtggccgctggccgctacgctatctttctatgggcttgtacaagatgacagttacatatttggactcaaacctgtgggttacaccaagagccaccagggggtgggcaccccaacccttctcgatgaacagg

SEQ ID NO: 409 - DNA, 872 bp, Avena sativa
gtaccacaacttcctctcccaaggaagaatgtgagtatttgatttcattggcaaagcctcacatgaagaagtcgacagtggttgattcagcaacaggagggagtaaagatagcagggtgagaacaagttcaggaacgtttcttagaagaggccaggacaaaaattgtccgtgccattgagaaaagaatatcagatttcaccttcatacctgtagagaatggagagggtcttcaagttctccactatgaagttgggcaaaagtatgaacctcattttgattacttccacgatgatttcaacacaaaaaacgggggccagcgtatagcaactcttcttatgtacctgtatgtattctaatatttgttttttatgtatgtaagttaggtgattcagttgacattctctttttgctgacaattggttatttagttcggatgttgaagagggtggtgagactgtgtttccttctgctaaagttaatagcagctcaataccaaattatgatgagctgtcagaatgcgcaaagaggggtatatctgtcaaaccgaagatgggagatgccttgcttttctggagcatgagacctgatggtaccctggatcccacaagtctccatggtggatgtgcagtgataaaaggtgacaaatggtcatctacgaagttggattcgtgttcacgagtacaaagtttaggcataacaaaatcagaggcctataagttatttgcaggttatgcagtgattcttgagtttgtggacgttatagcacatgatgaggactccagttttccatagaggagcttacattttttttcagcttaaccaaggcttggcctcggtcactttgttgtacattaacttgttacctaggctt

SEQ ID NO: 410 - DNA, 944 bp, Avena sativa
acggagtacaagctagggcagagttagaaaataccatggtgtgctccttattccagaaggactgatagaaagcattccagaaatgtatgcgctcattcaggaaatcagtatccttcacaacagtaatattcctgttgcggagatgccatcaaaattgtctccgtgggcagctgcattattccagttcttgccacccttcatcagaagagagctccttctccaccaagaatccgacaactctgctcagttgtcccagattgacacggagcaactgttagcgcacttagtagaagcagaaatgataaaaagaacaaaagaagggagatacaagggaaagaagttcagttcagtctgccatttctttggatatcaagctcgcgggtccctaccgtcaaactttgactgtgactatgcttatgcccttggccacatctctctacatatgatagcagccggtttgactggctacatggcaactgtggctaatctgaaggaccctgtacacaagtggcgttgtgctgctgctccactaacggcaatgatgagtgtcaagaggcatttacgtggccctggagcaattcctacaggaaagcctgcaattcatccttctcctatcgacctgaaagggaaggcatacgagttgctgcggggtaaagcttcgagctttctcctcgacgactactacaggactcctggaggtattcaatatgaaggacccggttcagatgcaaagcccatcacgctgaccatcgaagaccaggactacatgggcgacatcgagctgctaaaactgtatcttgacaaggtgaggacaattgtgaagcctggttgctcgagggataccctcaaagcagcgataagctcgatgatctcggtgacggacgtgctgacagtgatgtcccatcctctcaatgctgaactgcctctctaccatttcaactgag

SEQ ID NO: 411 - DNA, 578 bp, Avena sativa
gcttctgagcacatcggggaagttctgaggcgtgtaaagaaggaacatctacagagagcttacaaaatacaagactggaccgacgataatgattttcttgtccagctgagcaagatgagtggaaaactgctcaagggtggggaacctgatctgacaacagcagccaagatggtgcttcatgactggcagaggggcaagatcccctttttcgtgcctccgccgcagcagaatgaagatggtccttctgagattcatgaacccatcgagaaatctgctgaggaagtggtcagcagtgaccggactgctgctgccatgaaagccattgcgggaattatcacttcacagcaaactatgaatgtcccttgccagagagaatttagcagaaatactgaagctagtgatgtcgcagagcaatcagagtaatcttttggtagaagactgaaaagagggctagcaattcttagtgataatcaccccttctattttccgccgcgaatatctgcagagtacagtgaagctattctctgtttgaaactgtttgaaacgaaggatacataccagatcagatacaagactac

SEQ ID NO: 412 - DNA, 609 bp, Avena sativa
gacaagaatgatctgagatgcagccacaccatccacaccaacaatgatggcaccatccacataaagtccgactactatgacaagttctggaggcgtagtcccaactggatttgggcagactctgatgaccaaagcagcaacaaccgcgacacattgttccgtatagtcaagcttgatggagaaggcatgtatgcactccagaacgtcggcaatggcaactactgccacaggctgacttgggactacaagcaaagctgcctcaacgcctcttctccgtccatccacaatgaggcgcgcctcaagatagaggaagctgttctttctcggaggatcttcgacgttcattaccgcaccttggatgccaaagttcatggtgagaagctcaacactctgattactcaagatgcaattaaccgtggcagtagggacaacagggaaaccatatcccctaaagtacagtgtcagccgggaaaccaaatgggactcaactgcctccatcaagttaggtgtcaccaccaccgttcaagctggaatcccagaagttgcgagtgcatcggttcaggttagcaactagaagtttactttctcacacagttggggccaagccgt

SEQ ID NO: 413 - DNA, 888 bp, Avena sativa
agagaagagcaaagttgttgagaagacacatgctacaattattgctgctacggttgaaggtattccaagcaatattgacctcttcaaggagcttgtacttccctttgctataatggctgaaaaaatcgacaaacttaaacgctgggagaatccccgttcaaccatttgttttctactagtagcgtacaccattattttgaggaacatgctcttttatattttcccgtttaccttgatggcgatggccctttccatgcttgccctgaaagggctaaaagaacaaggccgtctgggtagatcttttggcaatgtgacaataagggatcaaccaccttcaaacacaatccagaagattgtagctcttaaagaggcgatggcctcggtggaaaattatctccagcacctcaatgtctctcttctgaagatgcgcacaatcttcttagcaggccaacctgaggtaacaactcatgttgctcttgttcttctagcatcctccgcggtccttctcgtggttcctttcaagtacattgtcgcctgctttacccttgatttcttcacgagggagctggcgttccgaagggaaatggtggcggcgttcataagtttcgtgaaggaacggtgggagtcgatacacgctgcccctgtgatagttttgccatacgagggtgacactgaaaacagcaacaagacgctccctgcaaaagctaccgggcaagcagaatctaaagatgtgcagggccaacgtaatagtgacgcgtatgtgaattcaagcaatagactccgcacctcgtgatatttggagggtggagcgttgtgtttgtaatgtacagttttgtatagttgtaacatgtacagttttgtcaggagattgtctgaaaattaatatag

SEQ ID NO: 414 - DNA, 559 bp, Avena sativa
gcaaagttgcgagcagctgcaggattagcctacttggaaacaaagaaatacaaacttgccgctcgtaagtttcttgagacaggtcctgaactaggaaacaacattctgaagtcatggcctccgcaagatgtggctgtatatggtccccctctgtgcacttgcttctttcgatcgttcagatattaagagcaaagttattgacaacagtagcttctgtaactttctggagctagtgcctgaagtaagggagctggtcaatgatttttattcaagtcgctatggttcttgcttggagcatcttgagaggcttaagccaaatttcctgctggatatttatctacatgagcatctggagagtctgtacaaggatatccgccacaaagctatcatacagtacacacttccatttatatctgttgatcttaatacaatggctgatgccttcaagacccctgtggccatgctggagaaagagctggctgcactgatcactgagaagaaaataaaggctcggatagactcccacaacaagattctgtacgcaaggcatgacartkmc

SEQ ID NO: 415 - DNA, 682 bp, Avena sativa
tttttttagtcagtactagtgttttattgcaaacaaatttctccaagtacaattacaaatgggtacacctgtcaggccaactgtagagatcaccaatctttatttttcatactgtatgacattcttcatttcctaggcaacatcggcgtagaaatcttggattgtgatccggactactattgggatccttaccgagtggtgttcgttgcgccaagttaggctgccaaatgtgtagtccccttgcaccttccacagaggtgttatgctaaccttgaaggtgtgcactttctttgtggcattgaagactagagtgggtgggtcaactttgatcttgactcctaggggagactgtatatcagattggtaaactgcatcaacgttgccaacgtttgtgaccgctctctgcaccttaatttgacgccttagttcaggaatagttatagaaggcaggtttaggtgatagcctggcaatgttgttgtaatgttgcaaatagcgtatttctggttgttgcaggtgaagaacttgctgtaatcacttggatcaatgtcgtaaacaaggccaggatcagcagcggcatcaggatttatgtttccccctccatagtcgaatgggtcggcaaccttccggggtagtgcttctgctagcattggattgccatattcatccttggttgatgcggtg

SEQ ID NO: 416 - DNA, 764 bp, Avena sativa
ttttttttcaacataacatgcatctttacagacatttcaggctccaggaacatacacacacgcatgagcgtacattgaaaattactgggaatatcatactgcaggtcaagaacatacatgcatacttcgctctggtaaacttaacaaaccttcgatctgtgcggactaactctcagtctaatgaacaccaccaggaaaaaacagtgctatgtcttaggcaacttaaatatcaaacgtgctatcgctgcagacattcttcttttttcactcaaatggtaagttatttcttcccgttaactgtacatatgtaagagaatcatgctcatgtgacgatatcatcgacctcggagtgaaacacgaagctgggaaatgtagtcgttatgtccttgaggtacgaaagagtcattatcttcaacaaggaaggattcctagagacaaagttctcccactctgttctgtctattttcccgtcctgattcgtatcagcatctgaaaatgtcttgtccaagatcgtctcaataatctcgtctgataacctcatttctgattcacctaaaagagcaatcaacatctgctttacctccttccgttcaataaaccctgtaccgtccatatcatatagcttgaaagaccaatcaattttctcttccactgggaagtttggatgaaatacatttaaggctcgaacaaagtcaccgaaatcgatggcaccccttttcttaacatcgaaaaggtcaaatatccgattagcaaaaagattttcc

SEQ ID NO: 417 - DNA, 917 bp, Avena sativa
tgtcctgggtttcctgtctccatcgaaccggggaggactgatgaccgcaatgcttcttgtctgggtcctgatggggctgcttgctggttattcttcttcacgactgtacaagatgttcaagggttcagagtggaagcagataaccctgcgcacggctttcctattcccggggattgcttttgtcattttcttcatcttgaatgccctgatctggggggagaagtcatctggtgctgttcctttcacaaccatgttcgcattggtcctcctgtggtttggcatctcggtgccccttgtgtttgtcgggagctatctcggattcaagaaacccgccatggaacctccagtgaaaaccaacaagatcccacgacaggtccctgagcaggcttggtacatgaacccgctcttcaccatcctgatcggcggcatcctgccattcggcgcggtcttcatcgagctcttcttcatcctgacctccatctggctgcaccagttctactacatcttcggcttcctcttcctggtgttcgtcatcctcatcatcacctgcgcggagatcacggtggtgctctgctacttccagctgtgcagcgaggactacaagtggtggtggaggtcctacctgacctctggatcctccgcgctgtacctcttcctgtacgctgggttctacttcttcacgaagctgcagatcagcaagctggtgtcgggcatcctgtactttgggtacatgctgcttgcctccttctccttcttcgtgctcaccgggacgatcggcttctgcgcctgcttctggttcacaaggctgatctactcgtccgtgaagattgactagtcgcctgagcggcaagacaggaggagcatagcatcatataggttttgggtcgagataactgtatgattaaggtgaaagcaag

SEQ ID NO: 418 - DNA, 679 bp, Avena sativa
gccggatggtactgcatccgcgccatcctgtgggctgttaactacgagctgcccaggaacgtgatcgccctctgtgaccccgtcaagaaccaggccggcgtgctcctagcctgcggcgcaaccctctactgggccgatggcaagatcgccaccttccactgctccttcctcaccaacctcaccatggacgtcaccgtcgttggcacgaacggtacgctccacgtcaccgacttcatcatcccgtacgaggagaagtctggcccgttcagcgtggcgtcagagtcgaatttcgcggagctgcatactgggtgggtgccgcagccgagcaggcatgtcgtcaagacggagctgccgcaggaggcccttatggtccaggagttctgtaggctggtgcaggaaattagagatggtggtgctggggttgagaggaagtggccgggtatcaccaggaagactcagatagtgatggatgtggtgaaaacttccattgatgacgggtttgtgtctatcgatgttaccagctaaatgtaacacatggatggtcatttcggtactgccaaccatggcttatggttccgtttgtgtatttcccaaaaaccatgtacttactgaaaatgtttcttgtcatattgaggacagtattgcaattatcaagttaaatgttactacgaaaaaaaaa

SEQ ID NO: 419 - DNA, 718 bp, Avena sativa
tcatcaccactgtcactagaaggtcttcaagttggagagaatgtgccatgtaccagtgtgaaaataccaacagatggaggtgatgtttgggaaattgacctgaagctgctcaagtttgggaacaaggtcgcttctggatctaacggcgacctataccgtggatcatattgcagtcaggatgtagccattaaagtagtgagacctgagcgcatcagcgcagatatgtaccgagattttgcgcaggaagtgtacattatgagaaaggttcgtcacaagaatgttgtgcagtttatcggtgcatgtacaagacagcccaacttatatattataacagatttcatgtcaggagggagtgtgtacgattacctccataaaaagaacagttctttcaagcttccagaaatactcagaatggcaacagacatctctaaaggaatgaactacctgcatcagaacaacataatccacagagatctcaagactgcaaatcttctcatggatgaaaacaaggttgtaaaggttgctgatttcggtgttgcgcgtgtgaaagatcaatccggagtgatgactgcagagactggaacttaccgttggatggcacctgaggttatagagcacaaaccgtatgatcacaaagcagatgtttttagctttggtattgttatttgggagctgctaacyggcaagatcccttatgattacctacgccactgcagca

SEQ ID NO: 420 - DNA, 915 bp, Avena sativa
gtagagccacaccacgtccaccccgcaaacccaagaccaccaccagcgacaccacctcctccatcgcccctgatccgatctgacccagccggccatggcggttagggtttggctctccgccatcctgctcgccttcctcctcgccgcctcacccttcgcccaagttgctggagctcagtcagaggaagatgctgctatggcagaagttgttgaaaatgctgatctaggatatgttggtgatgatactccggtttccagtgatgcacctttaagccctgctcctggtgtggagactgtatgtgtcttccccaaaaatgctggcaaaattgtaccagcaggtgaagaaactgagctattggttggcctgcaaaatgatggtgaatcaactttgaatgttgttgctgttcattcaactctccatcttccttacgatcatcgtatgtatggccaaaaccttacggtccagagtttctacaatgcatcagtccctgtctctgtgcaagcaacctttccctatacatttgccgtgagcaagttcttgcagcctggcgcatatgatcttgttggctacatagtgtatgagattgatcagcacccatatcagaatgtcttctacaatggcaccattgaggttgttgaggttggaggtttactcagtgttgaatctgtgttccttattacccttggaattgcacttcttggtctctttggattgtgggcttatggccaagtgcaacagctctcaaagaaaacaaagaagagcccgaaggtggaactgggaactggaacaaatgatgccagcatggatgagtggctggagggcactgcgtttgcaaaggagaaagccaaagaaaataaatagattcaaggttgttgagcctagttaatcatgtgaaagcatctagaatgagacaa

SEQ ID NO: 421 - DNA, 816 bp, Avena sativa
tgtataagtattagatgccaccaaccatctgtagttccatgcgttcggctgagaaaattctcaggatttagagtacagtgaccaatgtgcatgacaaatgaaaatcagcgagacaaggcggcatagacacccccaatccatttccagtcagaaccagtttacatgcgctaaattcagtttttgtaccagtcaagaaacagtacagagaacgtaagaacaaagaagaaaagcaggaggaaggttctgctgctgctgttccgctggatcgcctgggatagttccttgttcccgcgctccacgttgtttgtagcttccattgcctggtcatataaatactgaatctgttgagcttgttgtagaacgtgtgttgacataagatgattaagtgctgacatctctatcatctttgtctccgtttcttggacggtatcaagcagattggtcagttccatctggagagctcgtgtttcatcatccaagagttgttcttgaactcttaagggtgcagtagatacctcctgatctccaatctttgagacatcagattgtaaaacaaggcttgacttgggggtttcagaaagttttgtttctggtctcttcttaatcttctttcttggcatcgccctattaatagcttcttgaaatcgcatggaccgaaagcgatcaaattgtgcagttaccgagtggagacgctcgctcaaaatcaaaaccacgccatgctggtgagctatcaagtccaaccgggaattctcatcacttgtgccaagccatgtctttgcccttctgttcctctcatcttcatggatcctgttcttt

SEQ ID NO: 422 - DNA, 713 bp, Avena sativa
ccgcgcaggcttcgacgccctctcctccgatggcggccctggcccagtacgctctattgaagggtggattgtgctagttactggagttcacgaagaagctcaggaggaggaccttcacaatattttcggtggttttggccaggtcaagaacttgcatttgaacttggatcgccggactggatttgtgaagggatatgctctgattgagtatgagaactttgaggaagcccaggttgcaataaaagaatcagatggaactgagcttctttcacagataataagtgttgactgggcatttagtaatggccctgtcaaacgcaggaatactcggaagagatcaccgaggcctaatcgctcgaggagcccaccgaggagaagatactgagtgtttccgcaccatgagttgcggtgcttagaagcgacaaagtgtgagaattgtggggatccagttgtttgcgtgtcctcttatcgtagcttgatgattgcctttgtctttccatcgcagtttctggttcaggactcttgtagttgtatggcatctttaactcccccctttggtggatggagctgtgttttactgttaaagcttggcttgccattttcagatgattgtaacccctgtgttggatctattatgtgttgcattggaatgttttgtttcccaatatatgccatgcttgtattgtgaagttatcaaacgattgaatagaaaa

SEQ ID NO: 423 - DNA, 935 bp, Avena sativa
caaacttccaagtctgcacgcttgggaaggacgtggtgattacaaagaaaatggtgtcaatcagtatggagaagaagatggaacatcagcgagtctttaccccttcagtcattgaaccttcatttggcatagggaggataatctattgtctgtttgaacattcattctacacaagacctagcaagtctgaagaggaacagctgaatgtcttccggttccctcctatcgtggctcctatcaagtgcaccgtgttcccgctggtaaagaatcaggagtttgataatgctgccaaagtgcttgacaaagaattaacagctgcaggcatatcccacattattgacacgactggtatttctattgggaggaggtatgcaaggacagacgagattggtgttcctttcgctgtcacggttgattctgcaacggaggtgacgatccgagagagagacagcaagcagcaggtcagggtgggcatcgatgaggtggcatccgtggtgaagcagctgacagagggccaaagcacatggaccgatgttgaatttaagtatcccagccatattggtccccaaggtgaccaggagtgagttaacctgtcacagtttgagccgtcacccgagcgtcgttcatgttcctgttggccagttttgattcgacagggtaaacttctgttctccggtgcagttttgccccaagatgagtcagtactggtgtttatgcgatccggcaaggcagagtcctgcatctatacatgccacatagctgcagcacctggacgcccttaagttacattcgcagcgtttcgacatcttacctatacattttgagtgttttaccatacatcggaaattataccattgatcatttacttgtttcagttgacaaaaccattcagggttttcttaaggcttaagttagaagccgtgttgaagctaaaa

SEQ ID NO: 424 - DNA, 452 bp, Avena sativa
cgggatcttgcacatccaaaccctacacacacctacactctcgcacgcctcccgccccggatcgagagcggaatcgacgactcgacgaggaaggagacgaaggaggagcttcgaggatgttccggaaccagtacgacacggatgtgacgacgtggagcccggcggggcggctgttccaggtggagtacgccatggaggccgtcaagcagggctccgcctgcgtcggcctccgctccgccacccacgccgtcctcggcgccgccaacaagtccaacaacgagctctcctcccaccagcgcaaggtcttccgcgtcgccgaccacgccggggtcgccctcgcgggcctcaccgccgacggccgcgtcctctcgcggttcctccgcaacgagtgcatcaaccackccttcgtcctacgacgcgcccctccccgtctcccaggctcgcgctccgcc

SEQ ID NO: 425 - DNA, 827 bp, Avena sativa
tgcttcttgcaggaagcttctttggcatggccttcacaatgggactccaggctattggagcaaatcgtcaccaccttggctctgcaagtgtgtatttttcagttggtggcatactgctgtttgtcttgtcattttctttgggagcaggcccagttccaggacttcttctgcctgagattttcccaaacaaaattcgggccaaagctatggctctgtgtatgtctgtgcattgggtcgtgaacttctttgttagtttgttattcttgcgactcctggagcaacttggtccacaagttctgtacacaatgttttcatcagcttgtgtggtagcagcgatatttgtgcgacggcatgtggttgaaacaaaggggaaaacattgcaggagattgaagtttcactcttacagacacagtaaaggttttatgtgggcaatagcttgtttggtacggtcagaggtcagaattcaacgacatattgttgcggaataccagctgggatagtattcccagattaggtaaactgaccatctcctgacaatagaatgctctacgctggtctgtctcccagggaagttcccagccatgcacctgtgaggctgtgcccaccggagcggcatacaattttacgtgtatacacgacagactactgtttctgtataggctgatagttcgctctacgtgtatttatttatgtgttgtcttgttgaactgtttgtcattttgaataacaatgctgatgtgccatgtctggtgcttatgtatccaccaggctttaaatgttgtacagaaacaaagagctatgcattctggtaattctagtgtaagca

SEQ ID NO: 426 - DNA, 810 bp, Avena sativa
gatgctggcacatgctcctgccttctgtttgacctggtggccaaacaatggcgtgttgtcatgccttgggctgcattcaaagaagacctgccaacgattatccctaaaaacggctatttaaatggtagatgtgtatttgttgatggctttatctacacatgcatcaatggagggcttgctgctcatgaactgcttggtcaagatcattctgtgtacctcagcaagccgatcttgttgccattatcacggcgctttcattgtgtgggtgaagacatgtgtttggattatgctggaaaagatgcggactctggcgctaatctgttctacgtggtgcatggtggatattcttcgcttttgcatggtgtacggatcaccactttcagcatcaccactgtcaaggtcaagactgaaagaacatccagcaacaaaatgaagccggtgggaatcgaccagatgggtactgtcatgcgtatcatacatcacaccgaagccatcaaggcgagatgctgctttgcggtctcttgtttgtgatggatgcatgcccaatttctcaatagtatttgtaaccccttagtttccatggcacttgcacctcttttggaaacgaaattggaggatctgtgacttaacatgcactgagaggacaggttggaactctcttggtaggtgcaattagttgtactttggtggtggtaaaacttacatttgtctagagggccttgtatgtaatgactgggaccttggctgcttgtgctagtgcttttggtcgtatttactagaggcggctcctcgctggtcttctgcgctcca

SEQ ID NO: 427 - DNA, 854 bp, Avena sativa
attctacatggttgatttctcccaacttgcaaaacatccgaatatacaatcttggtgcataagaatactgcaagatattattctacaagtgtagaaattcagttattttatgaccggttcatgcttcagtgcattaagtactagcgaacaactcaaaaatatgatactacctcattccacatcctggaggtctagatctaaactagccaagaatcaggtcgcagaatggcaatatcaagcacaaaatggagaacccgtgttcatacttcaagtgcaataaattacaagagatcattaagcgagctctgtgatcatcgtatctccgggtaccgagagctccaatcagtcggtcaatgtgagctcctaggcaggctgaaagatccaccaccgtagagcatctgatatactggacgaatcctcacggtcagaactatgctcagcaatgtacccaagcaggccatgccagacagaacgtaaaatgtaaatctgaaacagttggggccatggcacgcgatatcgaggtctgtagttgtggaatgctgtttttgcacttcgagatcgtaaatatagcctgcaagactgttaaacaggagcgctccgattgggttccccattgagatgaaattgtagatctttccaaattgcttcaacccaaataattccgatgaagttgagatcatcacggagaattggatgccaaagcatacgccaagcaaggcaacagagacatgaagtgtagaatggagacccaacgcaaagagcaggtatgtaaaaatcatcacaacttgggtgcatacaatcaacgctgtccgtggaagtgtccatgacctgacaagatactcagaaacagcacc

SEQ ID NO: 428 - DNA, 431 bp, Avena sativa
gcgagatgtccagcctaagagatttgagttccaatgtttgggaaaggacttggtggaagggcgaggcgtatggacgtcttgcgctcttctctagaaaggatcagcggcagcctcatgaccctttggatgtatgctggtggtaggtatttggatggctggagcacattttccgctccacctatccatcttcgagagatgtggatgctgggttgcgtgttcttgacgatccccaactggtttggtcaactccgtgaccttcaatccttgcatttcagggtcaggggggcaggggttgaaggatgatggtgttgctatacttgcagggctgccatcacttgtttatcttgagttatacgcagaagaacctatagaagaaagggtgcacatccctggcagcggcatggcattccgagctctcaaagtgtttgatt

SEQ ID NO: 429 - DNA, 254 bp, Avena sativa
aggcaagcaacggcagtaaaatctgcgaagtgatcaagcactgctactagccaaccccaattgcaaaaatgatcgaagttacacggaacgaaagtggttcttatttcgatacttgcaagtgatcctcttgaactgcgctccttctgaagcacgacgttacccatgggctgcaattttgtggaagctctgcccaaggcatctttgggaactggagctcgcagaacccacccaggattcttctgcatgctcttgca

SEQ ID NO: 430 - DNA, 636 bp, Avena sativa
gtcacaagggcaattctcgagaaccctaaatgacaatacgaagatccacttaatctacgctaatgtcacatatgatgacattcttctgcaggaagaactcgacagtctggctaaaaactatcctgaccgcttcaagatctactatgtcttgaatcagcctcctactgtctgggatggtggtgttgggtttgtgtcaaaggacatgatccaaagtcactgtccagcgcctgctgccgacattcagatattgagatgtggacctcctcccatgaacaaagccatggctgcgcacctagacgacattggctacaccaaggaaatgcagttccagttctaggttttgacgggagacaagcctaccaaaataacgttgccacgtggcctttctcattcatttcagtttgacatgggccgattgatgccgtttagctcgtatagatgaacccccatagttgatgcagcggcgtaatttgacgattgatgcagagttgaagccctattgaaccgtgccagttatctgtcgatgttatcccatttcagacgtgaaactactgctccatgtgttatttcttctttctgcaatgttattccctctgaagaatatagggcgcttttcctcttggaacacagaaaaaa

SEQ ID NO: 431 - DNA, 656 bp, Avena sativa
tggatgcagaaccaactttcgcagaacaagacccaggacctcatattggactatgttgataagctgtgcaaccgtctccctagccccatgggagaatcagccgtggagtgtggcagccttggatccatgcctgacattgagttcacaattggtggcaaaaagtttgcactgaaaccagaagagtatgttctgaaggttggtgaaggagctgccgcccagtgcatcagtggtttcacagccatggacatccctcctccccgcggtcctctctggatcttgggagacgttttcatgggcccctaccacaccgtcttcgactacggcaagctgcgggttggctttgcgaaggcggcctgaatgggacgatcgagcgccccgtagtggtggcgagtgcatgcgcccgggagagagcctagcctttttaactccgcgaatttatccggccatgtgtgtatatatgctacatctcctagtgttgttttcaagaccctgaggtgacaactggtctgttcctaagatgtcaagaatgtttgtagtcatgttcgctgccactgttcgatctctgaaactgatggtcgatgcgataaacgtttgccttttaacttgtggtttatgaggcttgtgcactaatgtatgaaattataggtaaaaaaaga

SEQ ID NO: 432 - DNA, 789 bp, Avena sativa
ggaggtgctgctgcgggagtcttgcggcacgcgcgggggttcgcgttcgtgcaggacgtgtcgtacgtggggttccttgaccgagtgcgtgacggcgagctccagctccgcgccgccggtctctggaacgttccgcacccctggctcaacctcttcctcccgcgctctggtatcctcgacttcgccgccggcgtcttccacggcatcctccgccgtggcaacaccggtgccatgggtcccgtcctcatctaccccatgaaccggaacaggtgggacggtgagacgtcggcggtgtttccggatgaggaggaggtgttctacacggtggggatcctccgctcgtccacgccggcatcatcggacggcggccagctgctgaggcgcctggaggagcagaatgaggagatcatgcggttctgcgaggaggccgggatcgcgtgcgtgcagtacctgccgtactacgccgaccaggccgggtgggagaagaaccacttcggtccaagcaagtgggccaagttcgtggagaggaagcgcaagtatgatcccaaggcgatcctgtcccgtggccagagaattttcaacgcaccactggcttgatcgattgatgccgaccgatagctagccaggtacccgatggattctcatgcgtgccaccatggtctgtcctgcgtgcatatatggtccccgccagagcatatcgatagatacacatcccagacatatatatcatcttttggcaatggcaattgtagacagttgtttagttatggtgatgctattgtgttgtat

SEQ ID NO: 433 - DNA, 783 bp, Avena sativa
ggaatggaggctcgaatactatggacgaaatagttgccaggatacatctaagggaggaagcagcagtaaagcgtgagcgagccatggcatatgcgtttaaccatcagtggagagcaaaatctgccacaagcctaggaaacttcaattacggagtcggtaacggtggctggggctggagctggatggaccgctggatcgctgcacggccatgggagccccgatctatggtcaactctgaaaacctgaagaaagggcagccaaagaaagacagcatcagcacaaaccagtcggctcttaagcttcaaggcgcaatcagtctaagcaacaccaatgaccggaaagttcccaagaaaaagtcatctccctctcccgacaagaagaaaccaatggcaaaaacagagcagaaagtaaaggtggttggctctcccaatgcgaagtcgaaggacatgagaaggacccaagaaaagcagcaacaacctgctgttcctgcgctcactgcttgaaatgccccgcggaacggttactgttcattgtatgatacatcctgtgaagttctctttctttatacactctttcttcgtttgtctcttacattgttggtttactggagcaagaagtgaccaatgtagaatgtatgtgggtttgggcgattgcacacatatctgatgagagtggttttggttaggtaggatctctactattcattgtgtgtggatgtgtaatatrtgtctctgtctgttggatttaaaggttttattggaacaaaatataagttacatcttt

SEQ ID NO: 434 - DNA, 766 bp, Avena sativa
tccattaatttcagagacaatttgtagtactgccttgtcactgtatagaggtgaccaacacaagcataataaaatctgaatttctcccaactaccagcaggcaaaacggttgacagtaaatagtagtagtagtgctacgaatgtaatctccagctaccaaccatacaatgttcaagaacctgcaacgacaggaatacatattcatcacagtatcaccacctccaccgtctaaggtttctggttacaaggaagacggtgtgccatttccctctccggctactactacgaaaatccatgtctctttccctccctcccttcttagatttagtccacctgatcaggcacgcaaaaactatccaagaaaatggcatggcatggcatggcatagcacctttcctccccacactgagttagctgctgctgggattcaagatgtcgcccagattcagttgcaagctgttccgcatggttcgcctccctgccgcaccagcattgccctttctcatcatcgccgtgaactcgctgtaatcgatttgcccatcattgttctgatccacgtctttgatcatatcctcaaggtgaacatcgtcaagaccaaattcacggcatgcctgtgatagctcatcgatggttatgaatccacttccatccttgtcgaaaaacgagaaggctgacaccaggttctcctccctctccagtttgttcatgtgcaatgtagctgcgaggaattcaccataatcgatcgttccactgttgtcgatatccg

SEQ ID NO: 435 - DNA, 613 bp, Avena sativa
cacacattagctgcaaaagctagtggagagctgtgcctaaagtatattttttccttgggggcatttgcaaggaaacctcttctgcagagtgcatctgactggaaagtgccgactactttcatatatggccatgatgactggatgaattaccaaggggcacagcaagcacgcaaggacatgaaagttccttgtgaaatcatcagagtcccacagggaggacactttgtgtttatagataacccggaaggtttccactcggcaatcttctacgcctgccggaaatttctgtctgcaggtgcagaggagggcctctctcttcccgatggcctgatatctgcatgaggcgtcatctggtgccatctcatgccgaatagcggcgtgagcataaagcagagctatacgacgataggaactgttaaaagacagatgccactggtttgttttgtatgtatgagttgtgtaaatatgtgtcatccatatgttcttgagtaccgacactgaaacataatagtggtcatatatttattataagatttctctaatggattgttaagagttattgtgagcgaaattcttgattctttcaagctcaactttgtatttgcaaaaaaaa

SEQ ID NO: 436 - DNA, 944 bp, Avena sativa
cgttgtcttggttgtgctatcactctatgcgacctacaggcactggcatcacaggccatccttcgaggctgaaatggatcttcctctggatgagaatgtggagagatctgaagattacaacgaaaataagtacacctaactatgcagtaatggacaccgcaaaaggctcaattactatagaaatatacaaagatgcttctgctggtgttgtggacagatttgtcaaattatgcaagactgattattttaaaggaatgccatttcgtcatgtcataaagaactttgtaattcaaggaggtgattttgatttcaatggagctgcccaagaatggatattgaaagccaaagcaagcggagaaaatactctcagtccaaagcatgaggcatttatgattgggactacaaagagtcctaacagtaaaggatttgatatatttatcacgactgctccaattcctgacttgaatgacaagatcgttgtgtttgggagggttattaagggagaagatattgttcaggagattgaagaaattgatactgatgaccattaccagcccaaaacccctataggtatcattaacatgacgctcaggcaggagctttgagctgaccccacccctgaccttgtatcaccctgtcacctgtgtactctcgatctcaagttgctgccggattgattccatgtggacgcgatgccttcctccatatgcacattggaaggattgcagcttgcaaaggaggcatactctgaaagtcgcgtgccactttgttccagttcatgcagcatttgtgtataaatttaccccttcgtgctatttggctgcggttctttgcaggcgtatttcgtgttggcctgttcgaatgtaaatttcaaccttctttgaaaacatgaatatggcagtgagcttatctaacttgtgctaggaacacgggaatgagtgctg

SEQ ID NO: 437 - DNA, 507 bp, Avena sativa
tagtttgagaagcattaaacattttattcagaaagtgaggcattcccactgcatcatattcataactcttttagcatttgcatccattacaagccgttgtgttattgtaataagagaaaaagactacacaatccacaccagctacatcgcatgcctcctattcacaaagtgtcactctagcctgacctggaactgaactttgaaattggttcaggcaagtctcacctggaactttccggtagcaacacaactcacacgaaaaccatggtcttcgccagatcaagggccctttcccttccgaagagcttctccacaatggcaagcgagaattccatggaagtgcctggaccttggctagtgatcaggtttccatccacaactactctgttcttgcattcactttggtccgcgagtttgttccacatagcaggataggatgtagccttctttcccttcagcaggccatgtggctcaaagggacaaattagcaggggaggcgcatatggc

SEQ ID NO: 438 - DNA, 927 bp, Avena sativa
cgaaatgggaatgcatcagcctgatgcttcagataacttgaaaggtttcttaaaaaaggttgatggaatcgagagcttaatcgctaaactgacggctctcttgactaagctccagactgcaaatgaggaatcaaaagcagttacaaaagcgagtgccatgaaagcaattaagcagcgaatggagaaagatatagatgaagtgggcaaaattgctcgcatggcaaaggcaaaatttgatgaactggagaaagacaacttggctaacagacagaaacctggatgcgggaaggggtctgcagttgaccgatcaagagagcagactactggagcagtgaaaaagaaattgaaggggcggatggatgagtttcaggtattgagagaatcaatccggcaggagtaccgggaagtcgttgaaagaagggtatttactgtaactggtaatcgtcctgatgaagagactattgacgatttaatagagactgggagaagtgagcaaattttcaaagatgcggttcagcagcaagggagaggccagatattggacactgttgctgagatacaggagcgacatgacgctgtaagggatctggagaggaagctcctggagctgcagcagatattcctggacatggcagtgttggttgatgctcaaggagacatgatcaaccacatcgagacacatgtttcaaatgctaccaaccacatatcgcaaggagtgggcgccctccagaacgcaaagaagctgcagcggaactcgagaaagtggatgtgctacgccatcatccttctcctcgtggtagtggtgatcatcgttgtcgcagttatccagccatggaagaagtaactgttgagcacggcccgaaaaccgaagatcttggcggaatatatacatatatgtttcatgtttgtgcaatctgtctagtctat

SEQ ID NO: 439 - DNA, 1009 bp, Avena sativa
gtcgccgaaatacaacaactttaatacttacaagcctcaagagagggcagaacaaagctggcattaacattttctttacacatggaaatcaacttctcaacatgcaatatgtacctctatagattgcaccgtgtaacctgtacgtaactctgacggtgaggtgtgaagctttacaggaaagggacgaaaccggcatctaggaacgggtttggtacgctcgccatgccagtgagctgctgtggctgtaagggtggcccaaagggatttggttgcatcgacatcatgtccatctgctggggctgctgggccatggcggccattcgaactgacggcgggggagctacttgattcgacactccaaaaggatcgctcgccatgaagggattgtgaggtgctgaaccatatggctgttgttgctgcatctgcctgtaggtgccgtcgtcgtacaagctgtcaagtgtgagcttgtcgaacccaccacccaaattactatccacagccagtgaatttgcattgctgctcgaggtagtgacaagagcaagttcccatcctgttggatcaaatcctgtatcttgcattataacagtgctagttgttgaagtattaacaccagtcggggtaatagccaaggccaaagcattgctttcctctatttctgatacattagggcttggatcacttaatcccagtaaatcaccggtatctgcaaccctggtaatgggaggaggtgaagctacttcagttgaagatggtagtggagcaggttcttccacgtgcggtatttcctcctgaatagggacaggctcaggaacttcctctgattcttctggtttgtatgtcaaaagaagcctctcaggaaactccaagggatccttaactggaaccatacgtggagcctccttcacgtactcttccatggttgaaagaaatgtttgtggtggctccctcaaagtgggaaactggaaatttcttgcgagttctaactcacggcagttttcattcccgggaa

SEQ ID NO: 440 - DNA, 981 bp, Avena sativa
acggttcattgccactgctgaccgggacttcaaaatccgagttacatcattcccaaagaaccccatgaaaggggcaactgaaatacagagtttttgccttggacatacagaattcgtttcttgcattgccttcacacgcatttcaggaggatcgagctttctattatctggaggcggtgattcaactgttaggttatgggatcacataaatggctgcctcctcgatacatatgacgtcagagacaaggtgggagaactctctgagccaaatgaaactgaagacagcaatcttgccattgctgacatatgtctggcaaatgataacttgctggttgctgtagctattcaaagtttgaatggcatgatgctcttagcatgtgatctcgtagcaaagaagttgtcttttctaaaggtgattagaacggaacagagctacattccgactagcctatctagcagcttcggagctgatggtcatctctggggtgtcatgggcgcatcaaatatgcctaaccagtccgcgtcccagctactgacccgtgtaagaattgtcccgcggttccagaaggatgcacaagcctcggctgatcatgactctgcggccctcgacaatgctgaagtcccgcacggcgagaagctcctgctggcgctgcaaggaagcctggacgcctcgaagcaggaggaggtgctggcggcggtgctggctgccctgaaggtctcgatgcacaagatgctggtgaagaagaactactcggaggagcgcagggagcagcgaaagaggggcaggaacgataagaagatcaagaagtagcctttgttgggcctgaaacaataccaaactacaggacctcgtcgctgtgttgtaccatgagatgctgagagcactaaggcagaaatctactgacaagttgttaagagtagagtcagaaaccatttatcttgtgacaagttgtgccgtagcggctgcttaattaagctagc

SEQ ID NO: 441 - DNA, 745 bp, Avena sativa
atcttctgggtcttcatttcgcctcttctattccatgagagtgtcatgattgcagttgccactggcgatggctcaggggaagcacttccaatgctcctaaggatacctcgtttctttgacccatggggtggctatgacatgattggctttggtgacattattttccctggattgctcgttgcgttcagctacagatttgacagggcgggcaaaaagggtatcttaaatggatatttcctatggctgactgtgggctatgctgttggccttttccttacctatctcgcgcttttcctaatggacggccacggccaaccagcactgctgtaccttgttccgtgcacgttagggctcatcgttgtgctcggttggataaggggtgaactgcctcacttgtggaactacgggagaagatcggaaaatttaggagtcgaacaagcttgagaaagtagtactgatctgacacagtttatatccgaaagcaattccgggacatccttttgatctaattaatggatggatatgaacatggaatactctattactactgtgtctttgtgagaaatgtatgatgtttctttgtagagagattgtatttttgaactgccaaaatcacttgaaatctgacagacagtttcaactatttacagacacttacacatacatatatacctacctgkttacgaaattacaaattttgtcacgaatttccagttcaatatacatggtcaatgtcaaagagtgg

SEQ ID NO: 442 - DNA, 890 bp, Avena sativa
agattttacagctagaccggacatagctgatgattgctttctgcttgcatcaagatgtattcgttactgtcctgatctatttgtacctacagagatgttcccaagattggttgactgtgcgatggctggtataactatacagcacagggaggcctgcaaatccatattgtgttttctatctgacacctttgatcttgcgaaatcacccgaggggaaaaaatatcgagaactaataaacacaattgtacttcagcgaggttcaacccttaccagagttatgattgcttccttaacaggggcgctaccatcaggtcgtttggaggaggtgtcttatgttctgctgtcccttagccgagcttttggtgggaatatgttcaattggacaagagattgcattgcccttatacctctacaggccctaacagattcagaacgttcaagattcttggcaattatttctgatgcatcatcgggatctagtcttggttccttaacggatagatttgctgaaatatcagaggtttgcagacggaacaaagcggtgcaggaaatagttcaagctgctctgcagcctcatgacttaaccttcatggttgttccacagtattcttgatgactggacgtttttctataagaccagttgaaagtctggacatggagggtgcgtctgtccgcaccatctttgatattttccccttcatacggtttgagtgagttgcggcatcatactgttcagatttgttgagaggatagtaggtcattcagtagtcattgtgattcattttgtattacgtttctgtacatgtgtcgtggtttaatgtatgtcggagaaaaagtgttgtattattattatactaaaaaacaatgtatacgtggagatcacactgact

SEQ ID NO: 443 - DNA, 628 bp, Avena sativa
  modified_base (582)..(582): a, c, t, g, unknown or other
  modified_base (599)..(599): a, c, t, g, unknown or other
tctactgccacatctcagtttcgtgttggctatcttgaacatacagaagtatttcagagcacccctccaggcctgaggacccgtgcttgcagacttatagctgcaaagtcaactctagcagcaaggattgattcgattagaggtgatccaactggaaaagctggtcggaacttgttagaagaaatccgtaagaagattgagaagtggcaagaaccacctcctgcaaaagcttccaaaaaccacttcctgttccagactctgagcctaaaaaagaagaggggcggtcgccgccttcgaaaaatgaaagaaagatatgctgtgactgatatgatgaagcttgcaaaccgaatgcagtttggtataccggaagagagctcattaggtgatggcttgggagaaggttatggcatgctcgggcaggctggaagtgggaaactacgtgtctcagctgcacaaaacaaacttgctgctaaagtggccaaaaaattcaaggagaagagctatggtagcagtggtgcgacatctggactgacatctagtttggccttcacaccagttcagggaatagagctgtcaaacccncaggcccatggaaaccnccttggaagtggtacccagagcacctatt

SEQ ID NO: 444 - DNA, 927 bp, Avena sativa
acccggacgacagccagtgtacgacccacaacgtcatctactactcatctaggcatggcagcagatttcatggcgatccaaggaccacccccctgcttgctgccagtacacgacgaaccgcggcattaacgccacacatcaagggccaaaaacgggcgtgatccagccagccattgcgctcgcacaggacaagaccggggaacacggtcacatggcacggcatggcatttcagagatccactgcgaactagcagtagcagtcctcacgcctctgcagcagattcattcaccagcaccagactctgtgacgacgatgatgaacagcccctctctagtctctctcactctcacagcaccgctaaactgctaagcttggcctggcgattccaaaaatatatatcatagatggaaacagaggatacttatttagctcctacctatagctccatggatcaacggccccccaacagaggtattggatttctctcccaggattttcaaaagctcgaggatgtttgacatttgctgccgatcgatgtccgtctcatggatcgtgctcgggcttgtccgtttcaccgctatcgccgccggccatccggctcgagccgcgggcgatcttcgagatggccgaggacagccctttgaagctgctgctgccgccctcgctgctgaggttgtgggagcgccgggaccgcctcggggcgagctgtggggaggctggcttgtcaggatcgccgtctgtcctcgtctgcgccaccacgagccgcgagatgccgccgcggcagaacgggcaggccggcgagggcaggctcagagtcgtggggttggcttgtggtggcagcacagcgccagcgtgcagggcgcgcacatctggtgcccgcagtcctgcacctcaatggtgcacgcatggtcgaagcagatgcagca

SEQ ID NO: 445 - DNA, 889 bp, Avena sativa
ttggatcaccagcctttgaggctgaaccaagatgaccatgaccgtgtcctgcagattcctgtaaagaaaggagccaatttccgtgacctgacaggtgtcatggtaggagcgaataatattgttgagttcgatcctaagatcaagcgtgtgtacctcaagtctggcaaacctttggttcctgactatgcaatgtctttcatcaaaggcagatcaccaaagccttttggtcggttgtggtgggatgagacagtccctactgtggtgacgagagcagagccacataatcagataattctgcacccaaatcagccacgggttttgactgtccgtgagaatgcacggttacaggggttccctgattattacaggatgtatggcccgatcaaggagaagtacatacaagttggcaatgcagtggctgtccctgttgcccgggcgttgggctactctctgggtcgagcataccagggccagctggaggggagcgaccctctctttgtgctgcctgagagcttcacttatgtcaggcagaatgaggtagtagagcactagagcagagagcttcctttgctgctgggtctgattcaagttcatgctggaagtaaaaaaactgcagcttgttagggttacttaagttattgtagtactgtcattgtgatgttccaaacaatcattgctggttggacttgatctttggttccatataaatgtagaaccaatcattattgctagtgtaatgctccagtgttaatcctggctgttggttatctttgagcttggtctgatatcgtctgcaatctatggtggacgtgaatcgaggaattttatgcacagcatatacattaccttgtttttaattgctagtgaaatgttccagtgtcagtccagc

SEQ ID NO: 446 - DNA, 791 bp, Avena sativa
cgccgctgtactgcatcatacacagccaccctgacaccctccccttctcctctttcccttgcccactcttctccgaaccctcgagctcgacgtccaaaggctgcacaagggagcggcccggccggcggcgtgatgaaggttttccatcaaaaccctcaagggctccagcttcgagatcgaggtggagccaaccagtaaggttgctgatgttaaaaagctcatcgaaactacacaaggacagaatgtctacccagctgatcaacagatgctcatccatcaaggcaatgttcttaaaaatgacacaacactagaagagagcaaaattcttgagaacaacttcattgttataatgttgtgtaagaagggatcaacaagttccgcttcaagtacggctaaggattccacaaagcagccctcagtcgatcgggctatacctgttgcccctgcaaccgaaccaccagctgtgccaacacctgtcatgcctgtgagtgcacctgttccaactgcaacagctgttgcagctcctattgctgctgcatctactgaagcggacccttatggtcaagctgcatcaagccttgttgcgggaagcactttagaaggaacagttcaatcaattcttgaaatgggtggaggagcatgggaccgggacactgttgtgcgtgctctacgggctgcatttaacaacccggagcgggctgttgagtatttgtatactggggttcctgagcaggttgatcccctgctgcagcccaagaacctcctgcaagtgaccaacagctaatccagtt

SEQ ID NO: 447 - DNA, 1027 bp, Avena sativa
gtaaaattgacaatgtttcatggaagaggtggaacggttggcagaggaggtggccccagtcatcttgctatattatctcaaccaccggacacgatacaaggatcacttcgtgtaacagttcaaggagaggtcatagagcactcgtttggggaggaacacttgtgctttagaactctgcaacgtttcactgcagctactcttgagcatggaatgcatcccccaatttcacccaagccagaatggcgtgctataatggatgagatggctgttgtggcaacaaaagaatatcgatcaattgtcttccaagaaccacgctttgtcgaatacttccgctctgcaacacctgagactgaatatggtcggatgaatattggtagccggccatcgaagagaaagcctagtggaggaatagaatcgctccgtgcaattccatggatctttgcttggacacagacaaggtttcatcttcctgtatggcttggatttggtgcagcattcaaacatataatgcaaaaggacattaggaacatccatactctgaaagaaatgtacaatgagtggccattctttagggtcacccttgacttacttgagatggtttttgccaagggagatccaggaattgctgctttatatgacaaattgcttgtgtctgaagatctgcatccctttggggagcagctgagaaacaactttgaagagacaaaacagttactccttcaggttgctggtcacaaggacgttcttgaaggggatccttacctgaagcagcgtctgcggttgcgtgagtcatacatcacaaccctgaacgtttgccaagcctacaccctgaagcggataagagaccctagcttcgaggtgacaccgcagcaggcaccgctgtcgaaggagttcgccgatgagaaggagcctgctgagctggtgcaactgaaccgcgggagcgagtacgccccgggcctggaggacacccgtcattttgaccatgaagggcattgctgctggaatgcagaacacaggctaggccagt

SEQ ID NO: 448 - DNA, 1000 bp, Avena sativa
tccttctcgtccttctcatatgattcttaagggaatcacattgaagctagcaccaggttcaaaggttgcacttgttgggccaagtggtggtaggaaaaactacgatagcaaatttgattgaaaggttttatgaccctctaaagggaaggatcttgctaaacggagtgcctctggtagaaatttcacatcagtatctccaccaaaaggtgagcatagttagccaggagcctgtgctctttaactgctccattgaagagaatattgcttatggattggagggcaaagctagctctgctgacgttgaaaatgcagctaaaatggcgaacgcgcatgaatttatatgcagtttcccggaccaatacaagactgttgttggagagcgagggatcaggttatcgggtgggcagaaacagagggtcgccattgcaagagctttgcttatgaacccacgagtgcttctcttggatgaagctaccagcgccctggatgccgaaagtgaataccttgtgcaggatgcaatggattccttgatgaaagggaggacggttcttgtgatagctcaccggctctccactgtgaagactgccgacactgttgctgtcatctctgacggccagatagtggagagcggcacgcatgacgagctcctcgaccgcgatggcatctacacggccctggtgaagaggcagctgcaagtgcccaagtttgaagggaccagcaatgggacggttgaagtagaacctagaagtaatggccaatagtgtctcctcgctcgatgatatctcccccttcagtcagttaggcagagacaccatttcgttggggtacacggtatatgttacaccccgtgttgatgtacgtattccactctgaatagcgccaacacttcaaaacgtcacacgatgctgatctcctctcctacatctttggttcacatgtactccaattataactgtaacaatagactacccgcaagaaaaaaatactagtaacaatagac

SEQ ID NO: 449 - DNA, 670 bp, Avena sativa
  modified_base (657)..(657): a, c, t, g, unknown or other
  modified_base (665)..(665): a, c, t, g, unknown or other
ctcgcgattcttccccaaatccaccgtcgtctccgtcggagtccggggccgaatcgagccaggtggagagcttgaattgagctatggacaacttgtggcatctcggagatgagttccgtgggcaatcaaaggtggcggaggaccgccaatggtctctgatgacgtcaaagttggctgagatcacaaagtcaaaggctgagaggatgaatgactttgactatgcgcggatgaacactgtccctgatatgaagcaatgggataagctgtcctaccaccaagatgacaacaagatggaccacctcaatcttggcctcatgaacttagattttaaaatgaatgatctcaagatgaatgaggctgccatgaagtaccctttccgcaacatgccctataacatgaatcagatgtatcccaagggaaacaatggtaatgtcaattcattcaagatgaatgttggggtcaacaaatattcgaacaacataaatgggaaagaggcaaatggaaaacacaatggtggtaacaacaacaatggaagcaacagcaacagcaactccattgacaagcgcttcaaaacattgccaacaagcgagatgctaccgaggaatgaagttcttggtggatacatttttgtctgcaacaatgataccatgcaggagntctcaagnggcag

SEQ ID NO: 450 - DNA, 798 bp, Avena sativa
aggagagccattcatttggtgtgcttggcaagtctggacggggccttgctgaacattatggcattccaattgacaaaattgatattatcactgctggaatgggaactgcattagctagtgatggtggcttctgcactggaagcaccaaagttgttgatcatcagcgtctaagcagcgctggctatgtcttctctgcctcattgccaccctatcttgccagtgccgcaatttctgctatcaactacctggaggataatcctacagttctgaacaacctaaggagcaatgttgctcttctacataaagaactttcagctacacctgggcttcatatttctagtcatgttctgtcccctattgtcttcctcaggctgaataaatccacaggttctcttgccactgacctagatctgcttgaaaccattgccgagaaggctttgaaggaagattcagttttggtcgtcccatcaaagaggtcaactttggacaggtgcaagctcccggttgggatccgcctgtttgtatcagctggccacaccgaatcagacatctccaaagtgtgttcatccttgaagaggatttccgtgtccgtcctttcaaaccacatttgatcatcctgcaagactatgtgtggttggtttacgtatgtgtacgccagcctatgtgtggttggtttacgtatgtaacagttctgcacatgcctatactatatgtgtgcatgcatggagcacgagttcccgtcccccacaccaccgctaataagtgctacgttcggtgtttgagattcagactgcagcc

SEQ ID NO: 451 - DNA, 774 bp, Avena sativa
gcttctttgatgagtttgcttgctgcaagttgaccgtccataatgcatgaagcagttcagagtatagatttcccagtagacggttggttcaagtttctgtcatggctatattgcactggcacttttactcttgcaacatgtcaaagatttacgtttattgctgtgttccagtttctgaagaatattttacttattgaatactattcatcttaggtccctaccaccagagctagatcgccaaagcttggtcgctcaaagaactcaacctcctcagcagccacggaagcaagtaccaagccttccagccgtccagctcgtctgagcctcgaccaaagggcctcccaacacagtgccaagacaacagcacctgctgcaagtgccgcgaagaagcctcagcggaaatctctccccaaactgccatcagagcaaacaggttctgttgacatcgcagcgtccatatcttccgcagaacagctagaacttagcaagtcagcggcagaccccgttcggcagccgatccgtgctcaggtcactccggatgagcatgcaatcagcgaatagaaagcaatggagccgagtcatgcctcagcttcctatatctacattttttcttatatttatgcagtgaactggctggtatcatgcacttaaattagtgtagtcagcattagtttgaagaagggcaatgtgccaatgtactgtttttcttctcaggttttgttcaaacgatatgagggaatcagcatctactgctatttgtaagttagtaacaaa

SEQ ID NO: 452 - DNA, 449 bp, Avena sativa
  modified_base (414)..(414): a, c, t, g, unknown or other
tttttttgatcaatcaagttctttttcctcagttatagctaacctttgtttgatagtcagatttcataaggaaatgtaactaacaaggagtgaaccacaacaccaaacggtatattactccaagttaccactccaggactggagcaactcttcaacgcatatatcccggcacacctcatgaaaagggtactaacccctaaaaaaaaactgaaaaatgtactcaaagaccaccaggacatcttagatttgtccacaattactaatacacccagcagtttttcaatgagaaaatcttattcaggacacgaaacagccttagataccccttctccagcattgcacgaacgcgggtaggaagaccgtacaacctgatgaacccttcagcatcagcctggttgtaaatctcccccgttntcaaatgaagagatgtcctccctgtacaggctgta

SEQ ID NO: 453 - DNA, 760 bp, Avena sativa
ttgctataacatatactacttactacgtaggaaaattataaggactgacataggagacgctgccctcggttctctggaaaaatatgtacagcagacagccagacacccgagcaagaagggtcggcactatgtacaaaaggaaggaggtagaacacctccttatcccagccttttattgaagctcggggactctgcgagcatattcttcaggaagggtagcggttcgcgcaaccgaggaagtgtcgctgaccgccacgcacagtcgagtcggcttatggggtagagcgcgagcaagcgtagagaatcacatacagttgcccatgcccacgctaactccgatcctttctgcgacctccttgaatgagtgaacatcgctgccccagagccaggcatcacagccggcgtccctagctccccataagtcgttcctgcggtcatcaccaatatgcacagcctcttcaggtttcacgcccagcaactcacaggccttcaagaatattgttgggtttggcttttcagctgcaacctcagcagacacagcaactgcatcaaaccagtgatcacaattcagggcctgtaaaagtggccggagacgggtgtcaaagttggatacaacagctgttcttaccccagcccttctcaatgcctcgaaaacatatttagcatcagggtcgatgagctgccaagccttttcagttgtatagtaatgataaagttcctcaaagtgttctaaatctgagcaccctgtagaagaactaac

SEQ ID NO: 454 - DNA, 948 bp, Avena sativa
cgtcatcaacgctccaagaaaaaccaaattaccaagattgactggagaatacattactaagttccacgtttaatgggtcgcgacaagattttgtacaaggaaagaatgctggatatgcaacatccttttgtccgcatttctctcatgttctctcgcacagcctttcacccaaaaaaggtccaggatattaatctagcacaatgtgaggttggaactttgcctgggaatcagcaggcccatgtaccaagttggctcacctattttctacgcatgtacaaaaattcagcgttcattcgctgcgcacagagttgtacttctcagcaagtgaagcagtggccgttatcttgttcatcagattcttcaacttcatgctgtagtcgctgccacttatgcggcttagagcagcaattgctcgaagagcactgcggatcatgtcctcattacgatcaatctcctgcttaacggcatcacccttgggtttgtgactgatggttctctcaataggttcaactaatgagtccaaaactgcaagaacagcagaagggcacttgtctgctagctttgagagaatcagatggcacggcatctttacatcataatgatcgcctaagccagataagaggaaaggaacgatgaaggacgacggattcacttgatcaagacaattatccagcaatgtgtccacacattcaaatgcagctttcctaagttcaagcccatcatcaacgacatgcttgaaaggacctagatcaactgtcctgatcaattcttgcttcacaacagtctggtcatacagaagaggcaataattcaggaagaagagctttgatcaaatttggcttgttgtgggcagctgtactcaatgccaggacagctgcacgtctcacgtgcctgtcactatctttaatcaacataaggaaagtagaaatctcagagaacatgattggat

SEQ ID NO: 455 - DNA, 703 bp, Avena sativa
cttagtaatcatgtccagaggaacatcgtatgcacagcaatcctacaaagtaagtgattcatttcccttcaagtggataaacaaaaagtggaaggagggcttctatgtcacatccatggctacagctggaagtcgatgggcagttgtcatgtcccgaaatgctggcttcacagatcaggtagtggagctagatttcttatatccgagtgagggcatccatcaacgttgggataatggttatcgcatcactgcaacagctgccacattggaccaggcagcgtttatcttgagcatacctagacgaaagcctaacgatgaaacacaggagaccctaagaacatctgcattccctagccagcatgtgaaggaaaaatggtcaaaaaatctatacttagcatccatctgctatggaagggcggcgtcatgaagcctgtttacttcagttggttctgggtgagacctactaatatggaccaccggtttctgcgctaagatgggagttgaagtgctaacggtactaatatgctaacccataactaacaaaagataacctgtgacagataacttggttatgttttgatagcttgtgatttggttgtgtataaattatccatagggtaattttgtaaacaaagatagaagtgtaatttgttaactgtcgtgcatataatttttagcttgtactatgttgttttccgaggca

SEQ ID NO: 456 - DNA, 704 bp, Avena sativa
cgcggacgtcggcgtcattcgcctcccgaccgacggcggcgcaggtcttgcaggcaatgaagtgacgctggcggcggaggcggtggcggaggcatgggaggaggtgcagaagcgcggcgtggaggacgcggccccagcggcgacggagaagagcgtcggcttcgtcgtcgacgaggaggagaccaccaggccgtgggcgtgctgcaaccagacccagtgcaccaagtcaatcccgccgacgtgccactgcctggacgtggtcgacaagtgcgacggcgcctgcaagaagtgcgagccggccatagtgtacccgctccgcctcgtctgcaacgacgagttccacggcgaccccgggcccaagtgccccggcggcgacgtcgtccccagcggcgcgtcccggtcgctcgctgctgctgccgcacagttgctgctggcgtgcgtggtcctggtgctcgtccagagtcagtactagctagcgtgtcaagctgctggaagtagtactagctcgctcgcgtgtaccacgtgagtttggctagccgcgccatcatggtcggtcgcctttatttcttcacggaccatggcgtacgtttaggtttggtatctttgttcggccagtttacacgtgtgccgactacgaagagggaaacggaataaatacaggagaataaacattaggcgcagggctccgttatttccataccaaa

SEQ ID NO: 457 - DNA, 729 bp, Avena sativa
gttgctggaagaagcgctgggtaaatcggcagctgaacctgctggcaaacctttaagcatcaatctcatagttacttcggggtccctagttccaagcattgccaaatgtttgctgtatcgcctggacgacgtgatctcatctgataatgtttacagttcgtgggaagtggggaagctgcagtgcttcaaatggatcaaggaacgctactgtgggcctaacgtccgcttctgtgctgtcggagacgggcacgaagagtgcagcgcggcttccataatgaagtggccttttgtcaagatcgagatccgccccgatgcccctcacaggttccccggcctgagcctgtcgacggtccatggtatcatggatgccgtgtaccagtaatcaagcaaagatggctaaacctgggatgtctgcggcggtgtctcgaggcatcggtcgccctggaggaggccagtcagagtaataatctgtgggaactgtagagtgggttgatgccatatataggagacatgatgctcttccagacctgcagaatcggggggctggtgcctgtgcgataaataagaacgtcaaactatatagtatatgcataaattgagttctgcctgggttgtccattttactgtcaatctgtgatccgggggatcatctgctgttgtaagttgtagtcggtttgttggttgagtattgatatttcagatttgttgattgatgtacatatgtggttc

SEQ ID NO: 458 - DNA, 480 bp, Avena sativa
cccgggatctatggctgcaccagtagatccagttgtggagaagtatatctccatggggcttggacgtgaagctgtttcatttgccgtgttaaattatggagataatccgacaaaggtgaaggagtttgtgaagtcctacaacgctctccacgaaatgggcttcaccaccagtaacgtccctgagttgctggcgatccacgacaatgaccccgacaaagttatccagcacttggtcagctcgccatagtccaccacgcatacatgtacaggtcacatcctatgctgctagccagcattgtactactactacatacattatgcatgcaacttgtgttggagttcatagcggttccgagcgtcagctgctacatagcggcgcatcaaaaccgattgccatgattctgtgtaatgatcttcgtcggggtatgttattttcctggatatgtgtgtgtgtgtatgtattgttgtgatgaactacaa

SEQ ID NO: 459 - DNA, 740 bp, Avena sativa
ttttttcctttttattgcacatgtgagaacaagaatcttgttgcattggtttgagatacatgacaatcattgaacaacagagtaatatgaggtaaatttgttcttacattgatgattacatatatgtagagatatgccgcacgtgtatatccccacatggtcttctccctcattaactgtcgttgacaaatgcacattgggttcggacctcccctacggaaggatccgtcactggcctaatattccccactcttgatcatagactgcgcgaagctcctaaagaaggcatcctggctgctcgcaaacctatcgacgatgggcgccgtcgacgtcaatgcaccggggtctgacttgagttcttggtcggactgaagaaaaccgcgattcacctgaagattcgtgtagtagttcttgtcaaaggtgtcaggtgtcgtcggatcgaggtcatttagtgacgatccagcaccgttccttgggcatctctgtgacaggaacgcccggtaggcggcgtttagggtcgggtcgggctggttcgtcccgctgaaattgtacaggcggtccgtgacgaactggcattgcacgcggccgaaagtgtggccacctgagagggcgacaaggtcagtagtatcgtcaagcgtggcgttcctgaactttgcttggaggaccgtaagggcgtcgaaggggcctggtaggttctcggcgtcggcttgctggaggtgaggcttgtcatccggaattcc

SEQ ID NO: 460 - DNA, 599 bp, Avena sativa
ccatacaaatactgctcacagcaaataagtcatattaaccatacatagttataataagttcaaagatacaggcagatttcctgggtttcctcttacccatttattatgtcccaacataatacagatccaaacaacatgagacacaaataacataacagctcaaaatattttgaactgaggatattgccaccccatccctgtaactagggtaagtactacagcgacattagcagcggcaagatcctatcaggacgacaagacaaggaacctaaccatcagggtcaggcccgactacaatggagaaaacaacagagctaccagaggggcactcatgcactaccataagccatatttacatgcatgtgatggcaagtacccaggtgacataacagaagggctgagacaacaatggcttcactggccgatgttacattcattggagctcagtatgctagtaggacgggtatggaactggttgtctgtcagctcgacggctaacatcactcagaacagaaccaaatacgcgtctactatactcatatgtagcatcacttaatcctctacttgctaccccacttgatgcttgmgartggrratca

SEQ ID NO: 461 - DNA, 726 bp, Avena sativa
ctgctcctcgccgccgcttgagcctaccaaaccagccatctcgctgccaccgcctccaccagaaccagccaaaccggccatctcgccgccaccgcctccaccagagcctgccgagccaaccatctcgccgccacccctaccagctatgccgttcgccctcccgttgaagctgaggatgaagctttcctatcctccacagtggaaggacaagggctggaattggtgcaatgcaggggaggtcaaggaggaagccggtagctgccaaggggaggtcaaggagaaaggtgccacctgtgcaggcgatgtgaaggcggaggctgtgacctgcgcaacggaggtgaagatcgaggctggcacctgtgcagacgaggccaaagagggggctgaggtccaggccgtgaagccaatgtgggcgatcatcaccgggaagcgcaagaagcggtctggctgtggcactcgtgtcggcgccctccacgcatcctctgtttgtgtcgaggaagttggcggcgggacctgaaggtccaatttatccgtaattactatcgttagagctttcctcttctgcttagcatcattagaacttcgtatcctgtaatttctgtcgatgtgaaaacccgtgactgcttgtcatatgattggcgatgatttgatgtatataccaccatgtagtatgatttgatatagtcagatgtgtaatgaaaactgatctactatatcttgaataaa

SEQ ID NO: 462 - DNA, 967 bp, Avena sativa
tggagcctgctcctcctcttcttcatcttcatcctgcaccttcctcctcttcttgtggccaccatcctccttcagtttcgtcaacgcgatcctcctcgaatcagatatgtgctcacgaagtatcatgatttcatccgcatctactttacgatcatcaattcggtatccaaggagctcctcaatcatcttaaaccactgaccctcatactgattcaccaaagatacagcatatcctgattgccctgcacgtgcagtcctaccgacccggtgtacataatccttagaattcattggaatgtcataattgataaccacatcaactccttgaatgtcaagaccacgactcgccacgtcagtgcaaataaggacgttgaaatcttttgctttgaacttgtttaaagcacctagtcttttgtcctgactcatctggccactgatggagagagctttaaaaccaagattccttaaagtgagagcaagaagtcttgttgactcacaggtcctcacaaagatcatgatcatgctccctggcaactcattcagaacatgaacaagataacaatccttgtattctgcaggaacgaaataccactcttgtttaagtgtatccactgtagaatatttggaggatacttccaccttaacagggtttctgagacaagcacgttgcagtttgctcacctttttggtcatcgtggctgaaaaaaggtaagttctccgttctttaggaatgaccttcagaatgtcatcaagtgattccttaaactccaaattaagtaatttatcggcttcatcaagtaccaagtacttcactttagtcaggctaaaaccttttgtatctttcaaatggtccaaaagacggccaggagttccaaccacaatatgtggacgttttgcaatggataatacttgctgcatccgatcaactcctccaacaagcactgagcaaaccaagccgatcgcggac

SEQ ID NO: 463 - DNA, 567 bp, Avena sativa
ttagagattccaaaccctgaataataatttcattgcaaagaataaatcaaatggacaagaagggataagacccggcccaaggagcagccctgtctgtctctgtctacagtatgcagccaatcttttcatctctatctacagatttgtattatacataaacgggatgcgtgggggcacaatgaagaagaagaagaatgcgtgacagacagggaaggaaaactggatctgctgctggtgtcgtgcagttcagttagtgcaggtccagctcttggtggggacgcagctgaggtagtggcaccagtggcagctctcgttggcgttggagccccggaacaccagcgccagcccgatcgcgaatctgcaaaaaagggttcaacgcaatcagaccacggaaggaaggaatggcttctttccttgttagtataaaatttgtcctgccacgctgcaaatttattaaacttgccggcttcaccgacagaaacacagcgcgacagcatagctagttgttgagacttataaataatagtatactagtatatgtgaagtgagggttgctgtccatgttag

SEQ ID NO: 464 - DNA, 771 bp, Avena sativa
tttttttttgtatgatactaatgatacttattctgggaaacatattaactgatctatacatccatctttggaacatcataaacagaaagtgaaatgaagtagttgtacaaggcgatcatttagcttcaaattaacctaaatgatccagtgtgaatcaaaactccaaatctatccttcaccaaattatacaaaaataagcagaattgccttttaccaagaaagtgccatgtataggtgcttaatgcttaattgacagtctagagggcctgcttggcaagcattagcgtacatttacacaataatttgagttttgtgaaatactgcattgcaaggactgagaagtccaatagaagcttaggtgtaaatacttataatttcttgaaataaactacttgtagaggccggtaatcatgtcatggaaagcaaatcaggtggaggcttcgctgtcaaggcgaatcctcttggtaccaacctcttcacctgccggcaccctattctcctttgcttccaccgagcacctcttgtaaggcttgaagcctgtccggcgggatttcatattcaggtgtgtcaattcaatgggaaaggaagcttttggcccaacagatgtttcgagttcaagctcgataatcacagggctcttgttgaggtcgaccgtaactttagttgcttcatcttgtccctccttggcaacctccttcgatccttctgcttgcagaggagaaaagctttggggaagctttcctctactgaacagtgcatcgaaagccatac

SEQ ID NO: 465 - DNA, 724 bp, Avena sativa
acttcatcctctgaaagaaaacagtgtaacttcaaaggagtctcctctagaagaaactctcccaaaagaagctgttaccttaagtgaccgagggcttttcagtgtgcagaatcatcaattatctcatgtaacagaagatgttcagaatctgaagtcaaaagtcaataaccttgaatccaaattggaaggggctgaaaagatgataacaaagctgagagaagagagcaggtctatgacccaggagcgggataagttgcagcaagagatggtatttctacagaagaaggggaacccaaagaaccaattaggtttcccattgctatttgtggtttacgtggcgctcctcggcacatccctcggctacctcttgcgcctatgagttcgagtatgttggaaatccagctgcttctgtcttcggcaagagttggaggacagctatacacataaaacttggaaaagcatcgctgttagctccatcatcattattaattattagttcagacggttttgaacataaggctactaccagttgcctgcctgtatagaccggcttttttttcacattgtatagaaccgtccaaagtgtttgctgctccagtagactaattaaccttgggtttcgtactggagaagtttttatagcttgtttgagttacgttctagcgagagagaaaaaacgtgatattctgcattatttaccttggttagcgtcaaaaaaaagaaa

SEQ ID NO: 466 - DNA, 857 bp, Avena sativa
ctgattgttactgtaatacaaattgtgaggatacctaatcttaaggtggggtctgttcttctcggctgttccttcttgtatgacatcttctgggttttttatatccaaaatgttgtttcatgagagtgttatgattgtggttgcacgtggtgataagactgatgaagatggtgttcccatgctgttaaagatcccacggatgtttgacccatggggtggatacagcatcataggctttggcgatatccttcttcctggactgttggttgcttttgcactaaggtatgattgggctgccaagaagaccttgcaatctggttactttttgtggtcaatggttgcgtacggttctggtcttctcatcacgtatgtcgccttgaatcttatggacggtcatgggcaaccagctcttctctacatcgttcctttcacgcttggcaccttcatatcacttggcaagaaacggggcgagctcagaaacctctggacaaaaggacaacctccgagagtctgcacgcacgcgcaacatcccctgaaagacgcggattctgctgtgaacaacttgtcatgaggaacaagctgaccttgaaagttccgctgatataaagtttctgttggccgcggtattgtaacaatatggtctgctatgtagctttggttcctggttgtaaactggcggtagtgtctagttcgaacatctattgccattagtgccagtagctgtatatatatccttgctgcatagaatgcggccggggcggggcggggcggggcgtagggtttcggttatgtattccgggatggtacgagcatattaacttaaacggcatagtttttgcaagatctttaagtgataa

SEQ ID NO: 467 - DNA, 698 bp, Avena sativa
accggatgaacctgataccttccctgggtaaatcttctggccactaaaacggcaaagctcagtcttcagaaccatcttgtcagacttggagaactttcacaagttccttgagcgaggaggaggaggaggcgagttgagctagcgcgtgaagcaggtcgaggggaagacgatggccaccgcgtatgctcctcccatggcgagccagctgctgaagagcagcaacagcagcttggtgtgctccaagccgaggggcctgtccggtgcctcgctcaccacgaggcggccccgcttcgtcgtcaaggctatcaaggctgacaagccaaactaccaggtggtgcagcccatcaacggcgaccccttcatcggcagcctggagacgcccgtcacctccagcccgctcgtcgcatggtacctctccaacctcccggcctaccgcaccgccgtcagcccgctgctccgcggcatcgaggtcggcctcgcgcacggatacctcctcgtcggccccttcgcgctcaccggcccgctccgcaacacgcccgtgcacggccaggccggcgcgctcggcgccatcggcctcgtcaccatcctcagcgtcgtcctcaccatgtacggcgtcgcctccttcgaggacggcgcgccctccaccgcgccatcgctcaccctcacggggcgcaagaaggaggccgacaagctgcaga

SEQ ID NO: 468 - DNA, 821 bp, Avena sativa
cagcctggcccagcacttgactggatgcaaaggatcaaaattgttattgatgctgcaaaagggcttgagtatcttcatgagaaagtccagccttctgtagtccatcgagacatacggtctagcaatgttcttttatttgaggactacaaagctaaaattgcagacttcaatcttgcaaaccaatccccagatatggctgctcgtctacattctactcgtgtccttggaaccttcggatatcatgctcccgagtatgccatgactggtcagctgacgcaaaaaagtgatgtgtatagctttggggttgttattttggagctcctaactggaaggaaaccagtagatcacacaatgccaaggggacagcagagtcttgttacctgggcaacaccaagacttggcgaagacaaggtgaaacaatgtgttgatccaagattaaatggagagtaccctccaaaaggagttgccaagcttgcggcagtggcagctctctgtgtgcaatacgaagctgagtttagacccagcatgagcattgtagtgaaagcattgtctccccttcttataaataagccacagcagcaaccggcagctccagacacagatgcttgatgacatgtgcaatgcgaggtccatgtaaagagataccattttttcgtcggtatgccatttttaatgctatgcgtttgccaccatttttatgtttccttgatcagattgtatatcttcaagaagtaaaatcacatgttcaaatttatcgtcatgtagattgctcagacaattcttcctcgtatttcttgtggtcctcaaggactattgcgaaa

SEQ ID NO: 469 - DNA, 448 bp, Avena sativa
ttcccgggatcggaatggtgtcgtgaagcagttcaggaatcatactggagataaacttcatccacgcatttctgcacccagatcacctgaaccgcaaagaaggggaaaccctcggagattttgacgaggacttcgagaggaagctgggtgtgtatcacctcatggctgtcggactgaagacgttatggttataaactgcaaaggagccatgatggtatcaatcactactatttgacaaatggatgtctgctcaagccacataagtgctaaaatcatgcactttctcgagcaaaatgcagattaactacacaattttcctgttttcccttgtaaatatttatatatcatcagtagtaggatcacatcacatgtttcagctttttggctgctcttttattctatattttctctcacttttctcactttatgcaatcttatttaatgggca

SEQ ID NO: 470 - DNA, 441 bp, Avena sativa
taactgatagtaatacatcatgtaaaatgccaaacagaaggaactagaactacggttcagcaatatggcaccaatttcatagagcacataactccactagaattttcactgcaaccaaaattttcagacacatgtttgaactaccaaaagtaaacaaatgactgaatttctcacacatcttgcggcatacggcccagcaagtcgaggatcggaccggaagattcagcctcgacagccagctctttcaccatcacctccgcggcacacagctctttccgcagctccgcgttcagcacaaggtgggagaaatgctggtccagcaccaaacccatcgcccttgtgacggccccaagtgatggcacgttctcacactgctccaaccccggcattcccattgcttcagggcaaggccgcgcctcggggaacctccagtacttctct

SEQ ID NO: 471 - DNA, 812 bp, Avena sativa
cagatactgtgacatcagcagttcaaggaaactctgcataaacatctctgctacatccaacagaacaaacacgatacgatatttaaggtatctgagacacgacatttagatatagcacataaaacagttctgaacttgtgatgctccaaattaggctaaccctccatagtagaaccagaatgctaagcttcacatcgaacctttcacttcttggatttctttggtgccgctgctgccggagctggagctgcagctgctggtgctggtgcatgatccttagggccctgagcaaaccgctcctccctcctggcattcttcctctctcggcttgccttgctcttggcacgcttggcctcaaactgatcagcaatggtcttctctcttgccttttcagccttggacttgtggatactctccataagaactctcttgttcttgaacatgttacccttgaccttcaagtacatgtcgtggtacatgtgcttgtcaatcttctttgcctcacggtacttgcgcagaaggcgccttaggacacgcatcctgcgcatccacagaatcttggtggggagcctagcctccctggtaccccttctcttaccatatcctgagtgacgtcctttctgcttggcctcatgtgccctccttgcacgagacctggagtggatcttctgaggcttccggataatgaaaccatccttgaccaacttcctgatgttctggcgggagttggccatggagatctcgttgacctcattggggtcgagccagaccttgcccttgccgcacttgaggacgctcgaggccatcccggg

SEQ ID NO: 472 - DNA, 409 bp, Avena sativa
ttgaaggttttggaggctttgcagcagcttgtgtgacctgaacatcagcaacaaccagatgagtagtttcacatcacttgaacccctgacaaagatagtttctctgaaagcgctggacgtgtcttttaatcaaattggagctcacccgattgacacgacacggtatatctgcccgtctccgttttcacacaaagtccaaccatgtgcatcctttgaagagtgccgaaggaaaaacgttgacgtggaggaattctgggacgccatactgttcttcaaatctgtgaacttggtgcagcttgacatcaaaggaaatgctgttgccgacaaggataacttgaggactgttgtgacggcactcagtccttctctgaaatggcttgatggcacatgtgttcattagctgtatggt

SEQ ID NO: 473 - DNA, 1003 bp, Avena sativa
agatggtatactgaaaagccaaatacaacttgctacggctaacttaagcgaggctatagatggcgctgatggttttcagaacacgcaccaatctcagcattatgaatccgcaaaatttagcattgagcaggttgtgttcatcttagaaaagatacacattatgtgggagtcgatactgcctaggtcaatttacaggaaaagtatgtttcatgtccttggacctgtcttttctagaattacagaggatatgcttctgatagatgacatggcagcagaggagaccttacagctgcaaggtcttatacatttggctcttaaaacctctcctcactgttttgtccctggttgagagcgatgatgatggcaagttcttggatcatcatacctgggtccagctggatgagaatgtaccatctttaaagaagttccgaaagctagcagagttgcttgatatgtcattgaagtccattacagctgcttgggaaagtggagagccagttaactgcggtttcacatcatctgaggtgcgaaatttcatcaaagcgatttttgcagattcacctcttcggaaggagtgcttgggatggatcgttatgaatccagcttaggatgcagaaacatatacactcttgttgattgattagttcagtgccttcatcattgccattcaccccgtctgattctgtaacattatctgactatatgtcaaattgtcagttgacctggcgttcagttcgcactgaagtagggtttgttacctcttatttcacagtttaatgttagctcctcgatatatatattctgaacacatagaaagagctaggcctaccatgtccgacgcagccaactctgaatttgggcccatctttagatgaagataaaaaagcagcacattgagtaagattaaggatctaccgtggattctgaaaaatctgcagtgaactgtggaaaagctgctgtgagcagagaactatggggaatcgaaagttgtttggttagagca

SEQ ID NO: 474 - DNA, 565 bp, Avena sativa
gaaatatttgcctccagaataagggccaaggctgttgcgttatcactgggcatgcactggatatgcaacttctttattggcctgtacttcctgagtgtagttaacaagtttggaatcagcaccgtgtacttgggatttgcatccgtgtgcgctctcgcagttctttacatagccggaaacgtggtcgagaccaaggggcgatccctggaagagatcgagcgggctctaagctttgcccagtaaagccgacgctggtgcctttttggtgagtgatgaatgagcatggagcgcaaacatccctggagctggaagacgttcttcttttccagctttttacgtggttaaccgaaataagcgagctgcaagaccacccgatgccatgaaaccatcggggcttagggggggctgcgggtccgccagtgaactcaggctgtttgttctgtcaaacttcggaattgaagagccacagagtgcctggaggcgaaagatatgtaggttgttttctagtagtgtatagttgaactcttgaataaaacatctggtgggaatttgaccgaaaaaaaaa

SEQ ID NO: 475 - DNA, 369 bp, Avena sativa
ccgggatccaagagcgcatgtgaggccaaaccgaacaggttcataatcagcttttaaaaatcggccaagagaagcacgttcaacctcactggagagagagctgctatcagaattaggagaacaagggctgaagcttgaaggctgatagtggaagcagaggcatcaccagcagcttgtcttacaacatgttcttaccagataggtgttgagttacagtgcaatggttgataccagagctcctatccccatgatggcctcaggccaccaatggaagaggcgcctgggctcttatggtacaacagcgccttcttatcggacatcaacaattctctcccgcactgcttccctacggactagctggttatcgca

SEQ ID NO: 476 - DNA, 647 bp, Avena sativa
  modified_base (642)..(642): a, c, t, g, unknown or other
ggccgtgcggtcacggcgcgctggggcggcgacctcccttcctattcaaggtgctctcggtggcgcagcccctctccatccaggcgcacccggacagggagctcgccagggcgctccacgctctccgccccaccacgtaccgcgacgccaaccacaagcccgagatggccatcgccatcaccgaattccgcgccctctgtggcttcgtcagcatccaggagctcaaggatgttttgaggacagtgcctgaggttcgaatgttagttagcaaagaagatgctgcaaagcttttgactgccaaagagcatgatggaggcattggagtgaggtcatatctgcaatcagcttttactaaactaatggcaacaagcaaagaaggagtttctgaagcaatttccaaaactgaagagtcgcctaaaatggagagagcaagattagatccattacagagaaggagagggggagggaggctagagagtgagtcgtgcgtgaatccatgtagtctttgtaggctgagtagtagtgtttttttttcttccaattgagtactgaagagcttcgtcgttctcgggaaaatggtcattagctgaaacgtggttccattattaattcatgatgattaattgtgtggttaaaaaaaanaaaaa

SEQ ID NO: 477 - DNA, 968 bp, Avena sativa
agtaagtctagcgaatagtgttatgcactgaactaagaggattgatctctcctcctacaaaacagagcatccgtggctcaagaatgccaacaaggcttcaaatgtgtcgctcggagcgcttgttcgatccaggcttaagcaattctcatccatgaacaagttcaaaaagaaggcacttggagtaagttgtacagaactgtgtgacaccgttcttaattttcttccagtgctatactcttcagtatgaataatttccaaatgattaatgaagatcgttgccaagaatctaccggtggaggagatcgacaactacactcagatgttccacacaatggacaaggacaaggacggaactttgacgcttgaggagctcaaggagggcatgcgcataaatggtcatcctgaaaatctattttctatggagaaaggcgtgaagtccactcttccaggattaccaagaatcatatctgtgaccatttcagcagtacctagtgacaaagcaagtccacttccttcgtgtcctgttgcaatcaaaacatttgacagatctggaacaaagccaatgactggcttcccatcaggcatatatgggcggtgcccgattcttatttctttgttctcatcaatatcaagacgaacattgttcagggcaggaaagaattcccctgcacggtcccatatactcttcaatattgatttgtcaacctccctcgaaaatcctttaaactctcgactgcttcctagaactaaatgcccctttgtatttaatgttgcggtcattgatatggatgaggcgtcatgctcatcttcgttggatttcgaagacaaaggtaagctatttgacttgtcaccctgatggtcaacatatcctagctccattatgccatgattcagcttaagcttgtcaaatttctccaacacaagcagatgaccctttcgtggctttacaggaatatccagcgtagaag

SEQ ID NO: 478 - DNA, 732 bp, Avena sativa
tgaattagtgcaaggtggtactgggtacttggttatgatgaagaaaaaggatggtgatgctgtcgatgatgacaatgatgaggacgggcctcgtgagcctgatcctgaaggaagaatagagaagtacattggtgtgaaagtcaaggtttccttcactggcaagggagaaactcagtccatgaaacagttgtcagggggacagaagacggtggtggcattaacactgattttcgctatccaacgatgtgacccagctccattctacctgttcgatgagattgacgctgctctggatcctcagtacaggacggctgtcgggagcgtggtccgacatcttgctgactcgacagacacccagttcatagcgacaacattccggccggagatactgaaggtcgcggacaagatctacggcgtgactcacaagaacagagtgagctacatcaacgtggtgacaaaggagcaggccatggacttcatcgagcatgaccagacgcacaatgccagctgaggctgacagaggccgccaattcgtggcttctgctggaagacgatgttaacacaggaagatgtcgctgttcctctatgcctggacatcataggccaagttaaatgtagctgtgtatatttagctaagttagcattggaattggtaacttgttcagagtatgcttagggaacatgtggcgtgttcgatgggagattttcattcagtggtttgtatcctactga

SEQ ID NO: 479 - DNA, 728 bp, Avena sativa
gctgaagtccggctcggtttcgctgccagcacgcggcacctccttcagggcgtgctaccgtcagtggacggctactatggtaactgtgtgtacccggtggggatcacccggagcagcaagactatccgggaggcggcactgccggaggtggtcagcgtgatgcgggaggcgaaggaggcgctcactgtgcgcttcacggactggatgcatggcggcgccgccgaccactacaatgtaccgctggactacggcactgtgacggtgtcagactggagtcggattgggttcaacgaggtggactatggcttcggtgagcctgggtacgtgttcacactcaatgatgacgtcaacatcgttgcatctgtgatctacctcaaacccccgacgcccaagcgaggaatccgactcatgctccgctgcgtggaggaaccacatgccgctgtattcgccgacgagcttgccaagtatgcttaagctggatggttcttctcaaccatggcctcatgtacatgtatatgctcatgcatgtaacaccctctcactgtactttttcttcacattgttgtgtgcaatgttttcatatagatcaccttctggtgctttgtgctgatataagcactgcagtagtgttttaccatgtatttatttcttttcaatgtgcagaattttagactcccagtcacaaaatgaataagtccagattatggtatatattgggcaattgcatt

SEQ ID NO: 480 - DNA, 634 bp, Avena sativa
aatctgttaccatttgaagcctttggaactgatgttaaataagtatgtatctatataatatcctaatatctataaaataatttacacatgatcaacgctgggttgttctggtgtctgaagatagtaaatatgccacttctcacagacgaatctgtgtctatgcctagataagaggatcacccatattcttaatagaatttctatgcttagacaagagccttctacgacagcagacgagacccgtgaagtggcaacatggaggctggcagcaagggcatagcttcaccaacctaagcatatactaaggaggacgccgcatatcagcaggcatcaagctagcatgtagtagatatgaccttatatactccctccgtccaacaaaagatgtcggagttgtagttcaccgtatattttgcaaaaaagtccagcgtatactcaaaacagttcagaatcgtcctccgaattgcaatttcaagttcgagacgtgccatctccatcctccccgcggtccgccgccgctcccctgcggtccgccgtcgctccgctcgccgtgagaagcctcccgcgggggtcgacccacctgacactgccggaggcctcccgcaggggtcgccctgttcggcgcggagctcgc

SEQ ID NO: 481 - DNA, 699 bp, Avena sativa
ctgggcgcgatggacatcgtggtgccgggcgtgctgcccatcggttgcttccccatctacctgaccctctacgggacctccaacggcgccgactacgacggcgacggctgcctcaagagctacaacagcctctccgcccaccacaactcgctgctgaggcggagcctcgctaaccttcagaggacctacccccacaccaggatcatgtacgccgatttctactcccaggtcatccagatgatccgggcacctcagaatttcggcttgaagtacggcctgaaggtctgctgcggcgccggcgggcagggcaagtacaactacaacaacaaggcgaggtgcggcatgtccggggcgagcgcctgctccgacccgcagaactacctcatctgggacggcatccacctcactgaggcggcctaccgctccatcgccaacgggtggctcaaggggccctacgccaccccgcgcatcctgcactgatgataatgtattgtttgatttataattgacttgatgtgttgtgtttggggtttccatggggtgagtgaggcgggatcgatccgtacgtgcgtgtgtgtgtgtgggtaacagctaatttatgatggagttgtatttagttgttgattattcatgagggtagttaattatgttgcttccagagaatgaataaaatttcaatgtgttgtttgattaaaaaaa

SEQ ID NO: 482 - DNA, 538 bp, Avena sativa
gtccattttaggaaatctaggggcgtcgcgtcatgttcgacttcttgcttatgcgaagtgtgccatatacggccttgagaaacagtctagattggagtctggtatgtcttaaccaacttatatgcttctcaaaagtagtttaaatcttttcggatcctgccaacatcctagctaaactaatagtctgatttccctaatataggtgcaatcaatcatatgtctctgcgaattaaaacaaacattagctatctccgtctgaggatacttattgaattagcggggttattggtgcagttcaacgactgcaagcataaggtcatggacaatttgaggtggatgctccagaagttaagtttgggatggtacagatctctgatgtgatgtcctgcagctgcgtaagttcggccatctgagagggaactcctagctaaatccacgaaattgtatagtcagaacattggatgctgatgctactattggcatatatacctttattgtacatatgatccaccatggttaaatattaatctgctactac

SEQ ID NO: 483 - DNA, 842 bp, Avena sativa
agtacatggaagacattaaatacaaagtgcatttggtcttggaagagatcctatcacgaagaccatcgatgctagtgatgagtggtgggaacttgagataaagagatgcccggatgcagccaagtttcgacatgctccacttgctaatgaagataaaatgtgccagattttttgataagcactgtgttaccaacgagcatgcgagggtgccattgccaacatcattagctggtccttctcaaggtgttccctcttttgtgaacattgacgatgatgatctttcagggacagagattgatgtacaagttacacctggtacggcgggacgtgggaaaaaaagagcatgtccttactcacccagccctgctgtagttgaaaagatggagagagacagtgctgaaaagaattgtttgcgccgtatatgtgacatatttgagaagagggaagaaagcagaaactctgtaacttcacaaccctcatagcctgcagttgatccagtgaggcaagagtttttggaaatgatggccaaggttgttgctgatggatgtggacctggtacccgtgagcatttctatgcttcacaattgtttatgaaggctgaataccgtattgcattcagttgttacatggaggctgaaagtgatgtgaggatggaatggatcaggatggcatttgaagagaggaaaaataagtagacgtatgcttgaaccagtcagattgtaatttgctttgaacctacaaatttgtaatttgttttgaacctaccaatttgtaatttgctttgaacctaccaatttgtaatttgttttgaacctaccaatttgtaattttctttgaaccta

SEQ ID NO: 484 - DNA, 710 bp, Avena sativa
gcagaggtcctgcacatttcgaccaaagttggtcaactttcagatatataggaataacttgcatacatttcactacaccaacgagactggacgttcacacttagctagatccttgttatttcagtaaaataaccagaaagagaatgcgacaatcagatgacaatatgcctacaatttccaaatcgcttaacagcaggtaaatatttcaagacaaaattaaagatatgccataccgaacttgtattaaaggagtcctacaaattcactcaaggcaagcacaatggccagaagtcataattccagcacaagtgtcctaggcaacttgttgcttcttgcttttctttttcgagcccttgcttttttcgccagattttattctctttggagcatacatttcggcatcaccgtcatcaagatcagccatctgagttccttcctcatcctctgcaacccttctcttcttctttttcttctcctttctaactgtttcagcatcaccgtcatcagggttgaccattcgagctccttcatcatcttccgcaaccattttcttcttatttttcttttcctttctgactgtttcagcattactgacatcaccgtcaaccactcgggtaccttcgtcatccccgtcaaccaatatattcttctttttcttcttttcctttctgactgtagcttcaacaaccaatgaaggttcaagctgcttg

SEQ ID NO: 485 - DNA, 728 bp, Avena sativa
aaggacacttgaatcaacatcatggtaggagccatcaacgagcactgctctcaaatccacaactgggtaaccagcaaggacaccattgggtaagctttcttcaattcccttcatcacgcctggtatgtattcttttggcactgcccctcccttgatttcactcttgaattcatacccagttccagcttccataggctcaaaccgcacaataatatcggcaaactgccctgatccaccagactgctttttgtggacataatgagtctctgcaattttggaaatactttcacggtagttgacttgtggagctccaacatttgcctcaaccttgaactctctctttaatctgtccacaatgatgtcaaggtgtaattctcccatcccttcaataactgtctggttggtttcgtcgtccctagagaagtggaatgatggatcttcctgagcaagctttattaatccatttgccattttgtcagcatcagctttggtctttggttcaatagcaaccttaatgacaggatcagggaattccatacgttcaagcactacaaggttatctgggtcacatagtgtttcaccagtaattgtatctttcagaccagcaagggctactatgtcacctgtcacagcaactgttatatcctccttactgtttgcatgcatctctagaagccttccgattctttccttcctatctttgtttgaattgagaacgtatsccggga

SEQ ID NO: 486 - DNA, 645 bp, Avena sativa
tttggtctagtagtctagaattcaacttttcctcagctcaggcactacatagtttcttaacaaacacagtcaacaaccttaacaaacgcacacacagttgttctgcagtggacactctcatgccagggtaccagagagttttaagccatatacagaccataaataattccagtagtcaataggaagagcaatttcaactacgtaggatgatgcttgagttagagcggtacgcccgacttgcgcacgaaatcgaccctcatcgcaagacttctggtgcgcctctttgcgaagaggcagacatctcccaggcgcaggtcattgtcggtgacaaacttcgaccagcctgtacgaagcattatactgcgtggcctgacgtgtaatgtcgtgcaccactccttgttctccagctgaagcgtgagagtatgatctctgcttggaagataagttgaagcatactccttacagaatcccatagaaaggacgttgccaccaacacagcatttggtcagcactgccacatagatgggaacttcagatccaatttcctggactttctcctgaactttcttctccagcggccaaattagagttataccttttgctaaaataataagggaaggcctggaaggaccctgaatatcccgg

SEQ ID NO: 487 - DNA, 511 bp, Avena sativa
catggtagctaaaattggatgtgaaacaattcttattgagtttattgttgctcttaagcttggcattttttattttcagttgtacatgttgtttcgatgtaaagaagcacatgttccaaaaaggtgtgctgctagcagacctgcaataggaggaccatttaagctcaatcatacagaaaatcagcgcttctaggatgttggaggctgtctattttggctacccatcgtccgcggatgcgctggcaacatccggtgttgtccgcaaacctaacggatttacatgttcagacattgaatgtgcttgcactgatgtaaaccctcaggtgtcgtcttcggcttctaggtagagatggggtgaagccgagttttgtatgatgggaaggattgctcgagattttattggtgttcttgttcgggaggtcaaactcaataactatcagggacgtgccaattgccaacctagctgttgcagcttctcagattgcacacacgctgcctgagctggccgcta

SEQ ID NO: 488 - DNA, 738 bp, Avena sativa
gagggaaatgccttgttcaaatcaggcaaatatgccagagcttctaagcgctatgagaaggctgcaaagtttgttgattatgacacttcatttagcgaagatgagaagaagctatccaagcaactgaagatcacctgtaacttaaacaatgctgcctgcaagctgaagctgaaagacttcaagcaagccgagaagctttgcacaaaggttctggaactggacagccaaaacgtcaaggctttgttcagaagagcccaggcttacactcaacttgcggacctagagttagcagaggtggacattaagaaggcacttgaaatcgatcctgacaacagggatgtcaaactgacatacaagactctgaaggaaaagatcaaggagatcaacaagaaggatgccaagttctacagcaatatgttttccaagatgaccaagccctccgcagaagaaagcaaagcttgaactggagaggtactgaaggataggagtctctgcttgaggaaggacactgtgtctactcgttctgtgggctggctaaatctaaatccatgatgcacacatgtgctaggagttgctaaaacctaacgagaaattttagttttgaggttgtcgagcgatttattttcttgcaagaacatcatgtttggaccttacatgttggtgttattgtgtgtgctttccgggcaatagctgggtctgctttaattttwgaaatctgcgacaacatccttcatgaaa

SEQ ID NO: 489 - DNA, 762 bp, Avena sativa
gtgagttttctttctttatctccctaaacataatgtatttatgcatgtggagaagaacatcagcgggtcatccattaccttaagtgtatgtctgtaaaagttctttcaaattctgcatgtttgtacaaaaggcattgacgatatgaattcttgagtacgcaaactacagattacgatgagtgagtaagaagttcataggtatgttaatgaatagaatagcagtgtgtatcaaatatagtcacattatgagtgcatcaaaactacatgtaatattaattctgatattattatcatgttcactatttcttccaccttttgtaaacaaaaactaccaggttgttgaaaaaggttggatttttgccgagatgaaattcagcttgtattttcttggctatgaggatttgtctgcagcccctgctgatcctatccagcggacaggatggacttttgggcaaaaggctaccatcgagctcactcacaactggggcacagaaactgatcctgaattcaaagggtaccataatgggaactcagacccccgtggcttcggccatataggggtaactgtggatgatgtctataaggcatgtgagcgcttcgaacgtcttggggtagagtttgtgaaaaaaccagatgatgggaaaatgaaaggcattgcattcatcaaggatcctgatggctactggattgaaatatttgacctgaacagaattggggaggtcacggctacagcgtcctgaagtgttagaacaaccaaacaag

SEQ ID NO: 490 - DNA, 423 bp, Avena sativa
ccgggatgtcaatcctagctttgttcctatgcttgagaaggcaggccttcagttcccgggatgcgatgaaagcggaaataggatggagattgtagagcttcaagaccacccattttacataggtgttcagtatcatccagaattcaagtcgaggcctcggagaccctcgcctccatttacgggtttgatactggcagcgactgaacacatgagaacacttactaatatcaatggtggtgctggagcttctgattctgagtagggcccaatgcacacttgcaaatttcaccaaaggggttgccatcatagtcttgtactgtgatgtacctaagctgggagattcgtctttacctcaggaagtggctaagctaaccgtccatcatgtaatgttttggtaaatcagttggctgttctgagattacc

SEQ ID NO: 491 - DNA, 708 bp, Avena sativa
gtcgcatctatagcccgagcagtggcagcagtgcttggtccagctcccgaagtgtgagtgatgccgaagatgaaggaactggcggtggtgacaaggatgatgatgatgttttagatgattgggaggcggttgcggatgcactagttgataacaaccataaccaccaggatttaggtccagaggaactaccagttgtacctgtggcttgtgtagagcctgctcatgcagcaacacggccagaaccaatcaagacccagagaagagcttggagccctgatgatgatacccgtcctcacactttgcccagtctctcgaagcaggccagcttcccagctagcatggggaactgctgggtgggaatgggaataggtgctgcacaaaagggtatcctcgcatttcagatgtcgtgccctatatgctatgaggatcttgatccaacagactccagattccttccatgtccctgtggatttcatctctgcctattctgccacaagaggattctcgaggcggatgcacgttgccctgggtgcaggaagctgtataagtcagcgcctttagatggagaacccggaaatggacgggaaacagagaatttagtgcagatgcgcctatcccgttcttgtagtatgggtccacgatactagataaagagttatgacctagttaaatgtcaatagttccttctctttgcatggtattgttgtg

SEQ ID NO: 492 - DNA, 633 bp, Avena sativa
gtacaaattctatcaatttcactgttgctaaggatcgctatcgtggttgaagcaacatgtgctggatgttttatgagcttatacatatggtacatccacaaatacaactctttgaatgggcgacctgatatcttacgatcattatattctgcacttcaaccatctagcactttggaagatcgaagatattatgatggccgtctttctgaccagcagatggcattacttcagtaccaaagggagaatattcattacctgagtgaggaggtgctgcgcttacaagaatgcctgagcaaataccagagaactgatgttgggaacactcctcaggttgatcttgcccatcttttagcgtcccgtgaccaagaacttcgagcactctctgctgagatgaatcaagtgcactctgagcttgaccttgctcgtggcctgattgatgaaaaggactcagagatccaccgcattcgtgtgagcaacaatcagaatggagtgctcgagcagcaaagcttgaacgggcactggaggcagagcgactggcaaacattgagttgcggaagaacattgcaaaattccgaagccaactgcaaaaaggagcaacacgcctgattccccctgttcttggaatatatccat

SEQ ID NO: 493 - DNA, 589 bp, Avena sativa
gcaagcctgaaactgtccctgagaacaaggacgctgggtcagatgatgatgatgacgacgatgatgaagatgaggatgatgagactggtgacgctgacgctgatgatgatgatgctggtgaggatttctcaggtgaagaagggggcgaggatgacgatgatgatgaggaggaagctgaccctgaggcgaatggcgaaggcggaagcgatgacgatgacgatgatgatggtgaagacggtggtgaagatgacgatgatgatgaggaggacgaagatgaggatgaagaggaggaggaagacgaggaccagccgccgtccaagaagaagaaatgatctgtccacctgctgttgatccctttggtctgttagttgtctgctgtttagatgatgattgggcaggtctggtaccgacctgtgtagcttgtggcttcagttgttgggtctcatagggtaggagaacgttgaaactctgatgttatcttgtgtttgcccccctttgtgcatgtagtctttaactttgctgtgttctgttattggagttgtgataccgtgtcagtcatgcattcaatctaattcttgttactactaaa

SEQ ID NO: 494 - DNA, 928 bp, Avena sativa
acgcgtgtgatgggaacatacggctattgtgctccagaatatgctatgacagggcaacttacagtcaagtcagatgtctacagcttttgggggttgtgttgcttgagttgattactggacggaaggccattgacggcaccagaccacatgtagaacagaacctcgtgtcatgggcacgccctcttttcaatgacaggcggaagctcccaaagatggctgatccagggctgcagggacgatatcccatgcgtgggctctaccaagccctggcggtggcgtcaatgtgcattcagtcagaggctgcttcgcgtccacttattgctgatgttgtgactgctctttcctacctggcgtcccaaacatatgatcctaatgcgccccatgcctcaaaaaaggctggtggtgaccagcgaaatagggttggcgacagcggaaggacgctcctgaagaatgatgaggtaggaagctctggtcacaagtcggataaggatgactcccccagagggcctcctccgggtatcctgaatgacagggagcggatggtggctgaggcgaagatgtggggtgcgaacttgcgggagaagaatcgcgctgctgccaatgcacaggggagcctggattctccaaccgaaaccgggtagcgacgattgtaaggtccagcctcgtgttctctctatgtcgaccctgcttgctgtctgttggcaggggcagaagaattgggtgctttccggttgagttagatgtacatttctaggggccaaacagaacaaaactaaacaagagggggaggagaattgggtggctttgtactggatatggtcgtacctgtaaattctcggaaaattttgcaacgctggagggcatatctggactcagtctgttgtccttgttccttttttacattgttttgttttggtgagttcaaaaa

SEQ ID NO: 495 - DNA, 611 bp, Avena sativa
ttccgtaggtactaaacaatggcttcagtcttaatagctctggcagtaaatataatggtgccctgttctgtggtaccaagaatgttataaacacaaatatacctgaatgtacaaacactaaatatctactacctagttttaaaccgtcgagtctctctcagtcaggtgccccagcatgctttgggattcagtcttagttagcattctcacataaggcagttccttgtgaacccaaatcccaagccggattacagcctctagtggtaagcagagcttagcaggatcaatgaggacacagacattatacctcactcataatgttctgcagagaaatctggctcatccggcttcttcagtgtaggcaactctttgatggcctgaagccctttcctgttcccagccatgactttcgcggccatcattttcagagagagatccttcttcggtggaggatcatcttcaccgttcgagtcgtctgatctcatggaggggaatgactccctcatactcaggtccttcgccatcttcctctgcttgtaccgccgccaagcagcttggatgaagcacgagccccacgttctccaatggtgcgagtagtaacggtaagtgtg

SEQ ID NO: 496 - DNA, 792 bp, Avena sativa
caaagttccacctgcaaggaagcaagaatcttctactgctggctgtagattatttggaatcgagataagctctgctgtggaagcaacatcaccagtggtagctgtttctggtgtttgtcaagaacaaccagctgcatcagtagacgtcgagtctgatcagctctcacaaccatcccatgtcaacaaatccgatgctccagcggcaagcagcgaccattcaccttatgagactcagagtaggcaagtgcggagctgcaccaaggtaattatggaaggaatggcagtcggaagggcagtggacttgactcggctacgtggatacgacgatcttcaccgcaaactagaagagatgtttgacatccacggagagctctctgtcaacctcaagaaatggaagcttgtttacacagacgatgaagacgatatgatgctggttggggacgacccttggaacgagttctgcagcatggtgaaaagggtatacatttactcctacgaggaagccaagcatctgactcccaaggctaagctgccgaccattggtgacgccgtcaagccgagcccgagcaaaccatcgtctgaatctgacttgccgcaaggtgacctggagaacaatgcccaagttgccgataacaaggactgctgaacgctaactcggccctatcttttcctctcttcttttgggatgttgatcatgatggcctcatggggggccaatgccaccatggtcctcgagactgctaagagttatcggttggtcgcttggcggacccaggagacagtcatccacat

SEQ ID NO: 497 - DNA, 875 bp, Avena sativa
tgttacaaacaaacaagcaatgttgatagatagtaatgcacagttttattgaaatcatttgtcacaaaaagaataatgcagaaaggctttcaattcaccaccagaggtccagaaacctcaatgcagaacataccgaacagcatcaagtaatacaataccagaagggttccaacatagaaaatacaaagcgattgacagggggtaagaacagcagcagcatactagtggtattgcggtgataatatagaaggaacgaagcaccaaacagatcaaactctgccctagatcaacacccagcaaagccacacggatctccttacatgtcctcagcctgcaggtcctcctcttcatcctcatactcaccctcctcatcggcggtcgcatcctggtactgctggtactctgagacaagatcattcatgttgctctccgcctcggtgaactccatctcgtccatgccttcaccagtgtaccaatgcaagaaagccttcctcctgaacatggcagtgaactgctcactcaccctccggaacatctcctggatggaggttgagttgccaatgaaggtagacgccattgagaggcctgtcggtgggatgtcacagacgctggacttcacgttgttggggatccactccacaaagtaggatgagttcttgttctgaacgttgatcatctgctcgtcaacctcctttgtgctcatctttccacggaacatggcagaggcagtgaggtaacggccatggcgaggatcggcagcacacatcatgttcttggagtcccacatttgctgggtaagctcagggactgtgagggcacggtactgctgagatccacgggatgtcaggggagcaaagccaaccatgaagaagtgg

SEQ ID NO: 498 - DNA, 852 bp, Avena sativa
acaacctaggtcatgctgctgtgtctgcaccgtcaagagctcccgtggaccattcagctccttctggcaaaacacgcatgtgcacaaagtacaacaccgcggaaggctgcaagtttggtgacaagtgccattttgcccatggcgagagggagctcgccaggccaccaccatcctacatgtcccaagaaagtccctatgctcctcctatgggcggcagatatggaggccggcacgaaccacctccaccagcttctatgggccctgcaaccggaagcttcggagcatcagctactgccaaggtcagtgtcgacgctgctcttgctggaggcatcatcgggaagggtggggtcaacacgaagcagatctgccgagtcacaggggtcaagctctcgatacgcgaccacgaatcagacccgaacctgaagaacattgagctcgaaggcaatttcgaccagataaagcaggccagtgagatggtgcgcgaccttattgccagcatcagcgccacaatgccgccgaaaaaccctgccagcgccgcgccctctgcacgctccgggggaggccctggtggcaggagcaactacaagaccaagatctgcgagaacttcctcaagggcacctgcacatttggtgaccgctgccacttcgcccacggcgagaacgagcagcgcaagggtgctgccgtctgagaatggattttctctgttggctttctgtgactattctccctgctgctctagcctctaggtgattagcctgttgtattgcagttttcatggattctgtttttagattcagcttttgaacgatgcttaagcagaacgctcgtccacatgtgatcccagtgtagtt

SEQ ID NO: 499 - DNA, 761 bp, Avena sativa
cttcatgagaggtgcatttcccgtgcctaatgcacgtgtcaaggctacagaaagatttgaagcagcctacccaataataaggaactggctcttgctggtcctcctggttctaaaacggtgaaacaagcgtcacagcagcttttgccattgactatgaaagcaatccaagaaaagaatgtagagctcaccagggaggctgctgatattttcatttggtgcctgactcaaagtccggagtccttcaagcagtgggacaaacttcatccagagaatattgaagccagtgttgctgtcctgcgcaaaatagctgctgactggaagacgatctcccccaagctcaactctgaagccctcaaatcaactctcaagagcctaaaggctaagaatgaggtggctctggaagaggcagaagacgctgggaagaaggcctccatcaaggaagcagacaagtactgcaaggtgatcatcgggaggctgtcccgcggcgccacctgcctcaagggcagcgtgctcgtcatcgccctcgctgccgctgcaggcttcgctctctcccccaaccttgacctccccgccgacctggcgatggtccaggagcacctggcgaagctgcctgagcacctggcgacggtcccggagcacctggcggtggtgtctgagaagctccaggcgatggcgtcggagtacctggggtccttctgaacataccgtccatccggctctatttatacaggcagtgaaagggagagaaataataatggaga

SEQ ID NO: 500 - DNA, 784 bp, Avena sativa
aagacagtgatgaggaggataagtcaaaaaatagcagttcgaaggtccagaagaggaagttaagtgattatattggacttgatgctgccgatgcaagccttcgaactctcaagaggctagcaggagccaagaaggctgaaacttcaacagaagaagctggtagaattttctccgatgaagattttaagctcatcagagagcggaaggcgaagaaagaagcaaggctggctttggttcaacatggactaactaagggtgacacaagatcagtaaccttcaagcttccatcttctgatcagcttagcatgaagcgtgtcgatccatcgcatctcgaggctcatgttaaaaggaagatgtcgaaagaagaaagattagagttagtgaaagctggaagagaggatagaggaaaataccaggccagagcagctatcaaacagaaaaagactggtggctcgagcaataagcagaaacaacaccagaagaagatgcccctcgcagcaaagagagcgaaggcagcacgttctcgccaagagaagaaacttaaattcaagcactccgcaaagcaattcaggggtcggaaggcctggaaatgatggctttgtatttgcttctttgcaattgctgtggcctagtggctggaattttgactcttgtaacgataacacatctgatctgtcgtttacagcaaacttgtttttaattttttcacatttgtyttggaaacagtggagcctattgtttcctgcagtatttaccgaggcaatacagatgattcttaacggcc

SEQ ID NO: 501 - DNA, 317 bp, Avena sativa
  modified_base (280)..(280): a, c, t, g, unknown or other
catgggtccattgatcttgaattggtttgcgctatgtggatccagacaaagcaaaggagtaccttttaagtattagaggacttgggctcaagagtgtagagtgtgtgcgtcttttgacactccatcatatggctttccctgtggatacaaacgttggtagaatttgtgtgaggcttggatgggtgccacttcaacccctaccagagtctcttcagttgcatctgttggagctgtatccgatgctggagaacatacagaaaatacctctggcctcgattangcaagcttgatcagcggacattgtacgagcttcacta

SEQ ID NO: 502 - DNA, 752 bp, Avena sativa
tgaatttcaattcattccaggtcacacatggtatctatgactgatgtacaaaccctcgacctagtactggatcaataatttaaccattgccgtgttgcgtatcaggacggtggatggatggtttaattaacttactgtgcgcatacgttgcagctcttcctgcagaaaccaggtgcttccttcgtgcccaccatatagttgggattcttggcgcactcccccactgccgcccactgtgcacacaggacgttctcgtcctcgcacccatcaccggaacctccctgtttgccggggttctcaaacgacctcacatggatccatttcgtcgcagaccacttctggccttcgatgacggggcagctcccgtgcaagctatcaggatctgtcgttgcatccgggtggaggctgaagaacagcagggcatcaccttttatgggctttactgcatatccatttttagcacattcagatgccgtctcatccttgtgttgtgttaccttcccctctgcattgggaaagatggtttctccacccttctcaatattagataggtacatgagcacagtcgcaattcggtgaccccccagggcttggttatttttgtcatggaagtaatcatagtgtggctcatacttctcgccattcttataatgtaatatttgaatggactcgccattctctgatggaaggaaagtccaagcagcaattctctcctctatccttgctactacttcatcctgcctcttctcgag

SEQ ID NO: 503 - DNA, 638 bp, Avena sativa
ttttgtatatgaaactctcactgcactgattccacaaatagcagctactttaatacgtaaaaacttctataaccaattacattcatagatccattcaaatccgaatgtctacacaataactccagtgtgccctatgtaagataaaggaggcttgggccataagggaaatcaagaataagcccgtgaaaatcatgccaacaaaatgggcaaagactggcatactaattttctctaccgcttgaggtaactggagtagccagctgtcatggagtatgatgagcagagggggtcaatcttcatcgcattggtcatcctctcttcctggcttgtctcccctgaatcttgatgttgctccctgtaacagaagtagaaaacatggcactcttattaagaagaggacagggcttcgtttggaaaaaattgtggaagattttatggtgatagatacctcagcttctgtttgaatattctccagttcagccactatatctgtggacagacagttcgccaacatctctgcatcagagttaatagaagatacggaattcttattagcgatagtaagatacagaatttaactctgtagcaaaggtccacttgtaggaaaacgattaaacagaacagaagcacggaattct

SEQ ID NO: 504 - DNA, 1021 bp, Avena sativa
cgaggcggagcagatcgagtggagcaagatccagaccccgaccgatgaggtggtcgtgccctacgacaccctcgcgcccgctccccaagatctcgacgcgatgaagagcctgctcgacaagctcgtcgtgctcaagctcaacggcgggctcggcaccaccatgggctgcaccggccccaagtctgttattgaagttcgcaatgggtttacatttcttgaccttattgtgattcagattgagtccctgaacaagaagtacggatgtgatgtccctttgcttctaatgaactctttcaacactcatgacgatactcaaaagattgttgagaagtactccaactccaacatcagcattcatactttcaaccagagtcaatatcccaggattgttactgaagacttcttgccacttccgagcaaagggcagacaggaaaggatggctggtatcccccaggccatggtgacgttttcccctctttgaataacagtgggaaacttgataccttattgtcgcagggaaaagagtatgtcttcgttgcaaactcagacaacttgggtgctatagttgacatcaagatattgaaccacctgatcagcaaccagaatgaatactgcatggaggttactccgaaaacattggctgatgttaaaggtggtaccctcatctcgtatgaaggaagggtccagcttttggagattgcccaagtccctgatgagcatgtgaatgaattcaagtcaattgagaagttcaagatattcaataccaacaacctgtgggtgaacttgaaggcgatcaagaggcttgttgaagctgaagcacttaagatggaaatcattcccaaccctaaggaagttgatggcgtgaaagtcctacagctagaaactgcagctggggcagcgatccggttcttcgaaaaagcaatcggcatcaacgttccccgttcaaggtttctgcctgtgaaggctacatcagatttgttgctcgtgcagtctgacctttacaccttggtggatggctat

SEQ ID NO: 505 - DNA, 594 bp, Avena sativa
gccatgcttcaaaatgtttgtgatgggaagatgcacccgcttacatctatgcaccatacatctacgtacaattcttccctctgcaaactaatggagtattgcttgagcccagctataactgtacttcaggaccgtgtgaaagaaaatgaacttcggttagctatgctacaggaggaggctaaacaacttgaggccgagaaccagagcatgagagtggagtcgcctcgccgcttgacgcgtcaaggggctagcagcatcggttcagcagccgcttccgccaaccaaggagggcctagaagcccgagcggtagcagccggaggaaggccccttgatgtcaacctttgcttgttacgtcgtgaccatgaatagtgagagctgtggccttgcccgatgctttgtggaacccctcgaccgatgacggacgaatgaaggcgctcgtacgctgccactgtagatacccatctcctttcagcacctgtcctcccgtggatccttttgtatggttgccctgagcttttgaatctccactctgggggcgttaccttgacagctgttgtgccgcacggcgcaacgtttctgtggcaaggcaggca

SEQ ID NO: 506 - DNA, 756 bp, Avena sativa
tttcttttttttttggttaccacaaaaccaggagttcattgttcttattactttctccagtaccacaacacttggaagaaactactaccttaatgttgtccagatgtatcgaaaattgtctgcttagctagcaataacaaatagcataaaataccaaaccaagactccgaaagagaaaaaagaggttacagaagaacccaatgtcgcgaagtatataagtggcctaacgctgacagcaagacaccaaggaccagtcacacgacctaatttttagtttcccaggtatgatccacgcactcgatttgcagatactgcagacctgctgagttttgcgtgcaatgggttccatgttacagcaataggcgtaagaaatatattgcgctaattgctattcgcaacaccactttcagcagcgggtttggaagcgttcggctctttcccagaaacaggggttgcactctccttgctcaccgcctgtggttgtgctgcggaattcccattatctgcattcttctccttttcttcaccgccctggccttgaagcagttgttgctttgctctcttttcctgcatcaacttttgccggttctcgtaaaacggaaaatcatccaaaattgaggtcttgctgacatggtccttgaaaatcttgagcatttgaagaccttgctcaagcttaacctcttgcgtgtcacggctgtttgtcacaggcttattgtcattgttttccaatgtaatgtgcttcaaaatgttgttagg

SEQ ID NO: 507 - DNA, 776 bp, Avena sativa
ggttacttgataaagagaacgcactgcagagcttaacccaggagaacgacgaattcaggctgcgagaagcagaggccatgaagaagatagatgaattgtctggtctgctcgctgaagccatggtaaagaagcatcctgaggaggaagagaagctagtagtcgtcgatgaggtacacagttcagcacgtgaagaagttgccgattcagctgcagaaaccgaaggtacggaagtcgagagcgataaaaaaccaccgaacatggaactcatcgttgccaacgggaactccgatagggtcatggatcaagaggatgagaaagacgacagcaaggttttttcacagcaggaagtgagaaccgaagaaaccacggtacaggagagcaacaaagtcgcggaggaccagccacagacagacaggaaacaagaaaccgagtcttccaaagacgacctgtcatccaaggacgatagcagcaccgagcacgtaaacgggacggcgtcggcagaagttaccagcaaagtggcaatgtccccagtgacaacgaaaccgcaacagaagaagaacaagcctctgctgaagaagtttggcagcttgctgaagaagaaaaacagcaagtagtaggcactagcagcaggtgaacagaaaacacatgtactattactggtgtttactctgatgattttttcttgtttgacagcaagtagtgtgcttgatttccacgcgcttattgtttttgtcaatactgtacctgttcttgtgattgcagtagtttctggctgt

SEQ ID NO: 508 - DNA, 712 bp, Avena sativa
tgcggttggtgcacacaccaagtttgtcaagtgccctgaaggagagctgcagaagcgcaaggaggttgtgcactgcgtcaccttacatgagattgatgtcatcaatagcaggacacaaggctttcttgcacttttcactggtgacactggtgagattcgcgcagaggtgagggagcagatcgatacaaaagttgccgagtggagggaggaaggaaaggctgagattgtccctggtgttctgtttattgacgaagtccacatgctagacattgaatgtttctccttcctgaaccgtgctttggagaatgacatggctcccatcctagttatcgcgacaaatcgaggcatcacaaccatacgtgggaccaactaccgatcgccacatggtataccatccgatttcctcgaccgcctcttgatcatcacgacacagccatacacggaggatgatatccgcaagatcttagacatcaggtgtgaagaagaagacgttgagatgtctgtggacgccaaggttttgctcacaaagatcggcacggagacctccctgaggtacgcgatccacctgatcacctcggctgctttggcttgccagaagcgcaagggcaaggtggtggagatggaggacatcagccgggtgtaccagctcttcctggaccgttcaaaggagatccggaacgcaagttacctttggaatgggagtaccagagcc

SEQ ID NO: 509 - DNA, 953 bp, Avena sativa
caatggaggactacttggtggcagagtacaggcaagttggcgagcatgatttgggtttgttcgcaatatttgatggccatctggggcacactgttccagattttctgcgggagcatctatttgataacatcttgaaagagccagaattcttgagtgacacaaaaaatgctatgagaaaagcatatctacttactgatgaaaaaatattggaaagagcggctgagttgggaagaggaggctccacggctgttaccgccatcttaataagctgtgatgatagtgtgaagctagtggtcgcgaatgttggagattcacgagcggtcattagcaagaatggtaaagcagagcagctttcagttgatcatgagccaaacatggagaaagaaattattgaggaaaaaggtggatttgtttcgaacctaccaggagatgtgccacgggttgatggccagctcgcagttgcaagagcattcggagatcggagcttgaaaaagcacctcagctctgagccacatgtagctgaagaagttatcgatgagagttctgattttctaattctagcaagtgatggcttatggaaggtgatgaccaaccaagaggcggtcgatgagatcaaggacttcaaggatgcgcaggcagctgctaagcatctgacggagcaggccgtgaacaggaggagcaaagacgacatctcctgcgttgttgtgaagttccactgctagcacagctttcaagctgatgccctcccaagtgtacaattgttgttgttgtgtcagattggtttaatcgttttctgttgttccagtaatactgtgtttgatcttttatgcttgggaataatctacccaggggatcaaggcgtgtagagtattttttgttaaaggcctaataaaatagtgttccttttattgcttgcaattcgctctgtaacaattaagtggaacttcaccgaa

SEQ ID NO: 510 - DNA, 218 bp, Avena sativa
  modified_base (151)..(151): a, c, t, g, unknown or other
cagcgacaagagggtgcttcgccttcgcccccagcaaagaatggagtactttacactggaggagaggatcgtggtattacggcttgggatctgtccagcggcaaggtttcatcgcgcattgagggcgctcattcaactcgtgtaaaagggnttgttgtttttgataaccggaatgatgggtctgaactgagcactctagttgcttcggcttcatctga

SEQ ID NO: 511 - DNA, 639 bp, Avena sativa
ccgggattcgccagattgctcttggccatgacattaagaagttccttattgtgattgctggtctatggctgctttccatcctcgggagttgctgcaacttcttgaccctgattttacattgtttttcgtggttctgcacacagttccagtactgtatgagaagtatgaagatcacattgactcctatggtgagaaggggtggattgaggtcaagaagcagtatgctgtgttcgatgccaaggttctgagcaaagtaccaagagggcccttgaaggacaagaagaactagacgctgagtggtgcggtgtaccatctgtatggaattataggactggttcgtggtttttcaggaagcatcgtggctgcccttgtggtatgagcaccaaatttgtcacctgttttcttgtgctatgtaaggctgttttgttgcttgagactttgatgggagtagaccgggtagcttgccctccaacagtaatgcagatgcagcacttgtttgctgtaccgctgtttaatttttgatctgttaagatgtcgaatgtgtagcatgaatatgatttctgtgacactttgctacctgcattgctgcagtttggagtttgatgatatgtttatgaactggttgagacttaaaaaaga

SEQ ID NO: 512 - DNA, 691 bp, Avena sativa
atgccgttgtccaaagccagatccttggttatggagctttggaaagactagtgaagatgggctactccacttcggcagaagaagctgcgaaggcaatgtatgctatatctgccttgatcagagataacgtatatggtcaggaggcattccgttcggaaaggggaagcgcaatgttgcagcacatactggcgagcgacggtaccgatgtccggcttcagaagaaggcggtgtttttagtaacggatctagcggactttcagctaaactctggtaactcggggcttgctttcttaagtgaacgcgttttcctgaagttaatggttgatatgctatcaaagtttgaccttgaccttcaagaaaaggttttgttggccatcaggagtttactgaaccttcccacgaccgatgctagagacttggagccgtgcgacctcgacggcgtgctgtacagactgggggtgcagctggaagagttgccgtcggaggagcaaaaaggagtacgccggggaggtggacgccctccggagagaggtccagatgctctaccagcagaagctcaaggaggggcggagtacagccaccctggctttgtaggatgaactcgaggggggaggcgttcgtttgggatgttccgctgctgagttgaatgcatttggttgatgcaacgataggctagacacttgctggactg

SEQ ID NO: 513 - DNA, 832 bp, Avena sativa
ctctcgcggcgggagtacgacggcaagcacgccgacgtctggtcctgcggggtcacgctctacgtcatgctcgtcggcggctacccgttcgaggacaccaaggaccccaagaacttccgcaagaccatcgccaggatcatgtccgtccagtacaagatccccgagtacgtgcacgtctcccagagctgccgacacctgctctcccggatcttcgtcgccgacccgaggaagaggatcaccatggccgagatcaaggcgcaccccatggttcctcaagaacctgccgcgcgagctcaaggaggaggcgcagcaggcatactacaaccgacgacacgccgaggccgccgctttgagtgccgccagtgccaacggtaatggccacggtgcgagcgcctccaccaatggggcaggtgtggtgccggcgccctactcgccgcagagcgtggaggagatcatgaagatcgtgcaggaggcgcagaccgtgcccaaacccgacaagcccgtgtccgggtacggctggggcaccggcgacggtgaggcctccgacgacgacgataaccaggaggagcaagaggaggaggaggattacggggaggacgagtatgacaagacggtgcgcgaggtacatgccagcggggaattcgacattagcaagctccaaatctgacaaccacgtctcaccacacatggccgccatgctcctccggccatggctctcgatcgactaggtcctcacatgtccaccctgtgattgtacttttggttcttgttctctccctcagatttattatttgtcattttgtcaattgtaacatatcgattgtaacaagtt

SEQ ID NO: 514 - DNA, 669 bp, Avena sativa
agtgtaaaggctctcggaattgcactgaagctaacatttctcgggagtgaaccaatttattctatcctcagacatgggcttttgctctaattgttgccacctgcgtaagcacccagataaactacctaaataaggcactggacacgtttaatacagcagttgtctcaccaatatattatgtgatgtttacttcactaacaattatagcgagtgtgataatgtttaaggattgggatcggcaaaatccaacacaaattgtcacagagatgtgtggttttgtgaccatcctttcagggacatttctccttcacaaaacaaaggacatgaatgacagtactggaccaactttgtccacacggcgcccaaagcatgctagtcagaatgcgtatgccatcgagattcttccacttaaatgtcaagattctgtggatgaggagaccttaccattatcacttcccaaggctgaaaaccactacctaatggaagagcttcctcttagatacaaagacttgaatatttcctgatgaatattcatttgcccacatgtgctaggaacctcatggcagcatttgccacgcacaatttcagacaaggttggttgacgaggaaccggacttggaggttctacctcatctttgccgttggatagaatgaggttatggaaacgat

SEQ ID NO: 515 - DNA, 632 bp, Avena sativa
cgtgctcaacgacgccgtctactgggtgaccttccacgccggatacgacttcgggtacctgctcaagatcctcacctgcaacgccctcccggattcgcaggccggcttcttcaagctgatgaagatttatttccccactgtctacgacatcaagcatctgatgaaattctgcaacagcctgcacggcgggctgaacaagctcgccgagctcctcgacgtggagcgtgttggagagtcccaccaggccgggtccgatagcctggtcacgtcttgtgcgttctggaagctcaaggattccttctttgctgggtcaactgagaaatatgcaggcgtgctgtacgggctcaatgcagagaatggtgtcagtgctcattgacggatgttgctccatttggattatagttctgtgaatgaattggtttaggacagtaagaggttgcagatgagcaagcgagcaaaatgatggtcagttctgtaggttgagttgtctcgctcaatcccatttcttagatgtaatttggatgtagtgttttcagttactcgctgttgaactagtgttttctacttattatgctgttagctttctctgcacatttcatttaaatagaaaagatagcaccttcaaatatcaa

SEQ ID NO: 516 - DNA, 743 bp, Avena sativa
agcatactcttggatgcaaacatggttcccaagattgcagacttttgcactctctagagtctttggccaagaacaaacccgaatatgcacacaaacagttgtgggatcatagtaagctcatcatgaaatttcataacattagtctattcctcggttataaagtatcttctatttttttcactctagtattgtgtatttaacttcgatgttaatgccatccagtgggtacatggctccagaatatctctatagaggtgaaatttcggcccagtcagacatttacagcttagggctgatgattatcgagatcaccacaaaggagcagaactgccctgatgaaaaacaaccttccgcaagaaaatttattgaaaaagtacaaaccacatggaaaccggagaacataccatccaagtactcttcgttagattcagagggcctcgcggaagttagacgatgcatcgaaattgggctggagtgtgttaacattgatcggaaattcagaccctctatagaaaaaattgttgccaggctcaacggaatatactgaactgcagataaggtctcccgtgcggtctgcagtgagcatgaaagatggatctcgagtggtccgctgaagaaaacttgctcctttatttatttggaaataataccgtttaatgtagtgttattgtcgggaccttttgtaaactgctactccagatttgttttatcagcactcgagatgcaacatggttattgttgtc

SEQ ID NO: 517 - DNA, 594 bp, Avena sativa
gaatcttttcgccgatcagatatttgatctgtttgacctgaagcgcaatggtgtgatcgaatttgaggagttcgttcggtccctccacatttcacccggatacacctatagcagaaaagattgcattgcgtctcctactgacatcaaggaatcacttcgaccatatgtcctgcgaggcaccagcagcattgagcgtgaagagttgaaggaaatggtgcttgcaatcctgaacgaattagacctgcttctttctgatgaggctgtcgaacaaactatagatcagacaacaggcagacctgaacagcgatgggaggatagatcgtggtgaatggaaagcgttcgtgagtaagaacccggccttgctgaagaacatgactctcccatacctaaaggacataaccatgtcattgcccagctttgttctctactctgaaactggcgacgaggagttgtagcagcaattctctattgtatcgcttatgttgcttccttcatatcagaacacaggcatctgaacctacttaaagctttctctcatgtctttcgccttcactgtacaactttgtagattatgcgaacactgttttgtagcgg

SEQ ID NO: 518 - DNA, 920 bp, Avena sativa
gatccagttccacctattgctgacaagcatgttaatgcctctggtggatctgtggactcacaacagaaacagttggcaacaaaaaatcctacagtcttactttcaggtgaaagcagtgtatctattgccagccaaaatgctaccggcggagattattctagacagatttctgttccaaataccaagacggtcaactggactatggacaacaatgcaattagattgacagaacctccacctaagtacctgtcagatggaagctcaaaacattttctatctagtcagactacggcagtcttatccaatcaaatgaacagagatagtgacccggcgtacaacttaccattctcgggtggtaatgggtcaaacagtttacctgattggcctgtggatgaattctttagtaacatagaatatggtccaaactttggcttcactgagcatggttcttcaaagggcgacaatgggaagctggggagtgctgggggatctccacagtgccgtctggctgaaggcctgtttgcagaagaactgttaggccaagtgcctgggttagatgctgacgatccatgggcggtgcctgaggttccctcaccaccaacagcctcagatctctgctggcaagggaacttgcattaccctgtgtacgacaacgccatgttcgtccctgaaattcgctccctgcagcagagctcccaggaccactgcactgtgtcttccagtttcaagcgccgaaggagagagttttgagtaaccagaagagcaagcacaggacatatcggtcaagcagggcgccttgaaaggggtctcccgttgagccagactgcataaaactggactagatgatcgttcagatgatgaattctttgctggtcagtcatgttgtaatgcgttgatgatatatttatttgttgagtgaa

SEQ ID NO: 519 - DNA, 923 bp, Avena sativa
gtcgaagttggatattctatccagtacactcactgcatcgatagatcaacaaaacaaacaccttaaagctgtggaagacctatgccaatcttgtgttgattcccatgacatggctacatcagagataaagaagaaggttttagcttcaaagtcattgtatatgtcgcatatggaatcttttcaaaatatggtgctcctgcataaagcaaacacaaattctacgttggaggatgtatcatctctttctgcagcaagctgttgcagtcttgaccagcttctagcttgtgtcgagggagaggcattgaagatattttctgatatccagagtttgctagccgaccatcgtagtgaactggcgcatttcactaaggaattgcgagatagtttctgcatcagtttggataggacgaaggacatgtccagcttcattcttgggctctttgaaaagtacatggaggaaacgtccaagttgcagaatcactcgaatcacactcatgaagtgcaggtcaaaagccttgaagaatttcaaaaggcttatgaggagcaatcaaagtctgaggaacaaaggcttctggcggatatcaccagtttggtgtctaaacacattgttcggcaaagagagctggtggatgttagattaaactctcttggtgatgctgctcgtggaaacaagacgtttctggatgagcacacgtctgctatggagggtgtcacgaaggatgccaagagaaagtgggagatgtttgcagagcaagcggagaatgacagcaaagttggctccagcttctcttcagctaagcattgtcgcatggaaacaattatgcaggagtgcgcatgcactgttgactctgctgctcagcaatggaaaaaatcccatgcagcagttaacgatttgtgcacaaaacaagtgggtgaagttgaag

SEQ ID NO: 520 - DNA, 875 bp, Avena sativa
cttgtataacacttgtcaatagctaagattcagacacaacattcctagattttctttttcatttctttttgttgaagaaaagaggcaataaacctagctagaaagcctaaactaaagggcacttgtgcaaactaggatacccccttgaagtggaacgccgtacgctggttttaccaacacggcaaaatgtgttatcatgtcacggctccatactgtacagagtacaaactggaaataattcaaatactgcccttttttaaaaatgtattcacgaccaattgggaagaaaataaaacacggaatgcctccggccatccaatatttacagtcacttcgctatagtcccgaatcaggtatctgggtggttggccgctggaggaacagcagcaatccgctcgcatagcctgcacaactgcagaacccgctccaaatacgctttcctgagcttcagcaagcttcaacaggaagggtaggaagtgatctcgtacaaatcacagcaactattcccgtcgctcggtcagtataacagcttgaaagaattcctcacggcacggctatgaaactgagggaaagaaggtcgttctcgtctcgggtgtttgccacacattagcttcgaggttcttgcttcatatgagaggcatgtgatgcgccataagattggaccattctgtcaacttggagaagtgtattgagcttgtcttcatgtacaaacactggcagaggaggcatctgacccatgatgccaggtgtctcgctcattctggttaaaattgttctgatgttgttatttgtccgaagaaagatacccgtgttctcctccgccttgaatgtttcaatatttgaagcaatctggttaagtaactgattgttttgct

SEQ ID NO: 521 - DNA, 623 bp, Avena sativa
  modified_base (619)..(619): a, c, t, g, unknown or other
atcgatctacggaccagctccttcaataccaaatggaccgcatcaactgaagcttcagctggacccctaaagtagctgagtgaactatcgatgagtcttctgtaaccttgctcaggggcaatcaaatggggctggtaaccatcagcttcagaaatgacttttcgaacattttgcaaagatagatgtttatcgaatggaagctttttcagtgctgcaggtaactgatggtcaaagacaccataaatgcgatctccacctggtcgaccgccatctaagtgctctttgaaaacacggtcaaatgcacgacacatgtccaatatcgtatacagttgtgccccagcgtcacctccaattggcctaccaagtcgatccaattcagcttcaatttcatcgacggtcttgttaatcattgctataatactcggaatttttgctttgatcacagcctctaaatgctctgacagaagcttagcgagatactcagcacccattttatgtgccaaatgaccataatcaggactgctttggaagtactcttgttctttgcgacgtgctgcgagcatgtcaacacttttgtgatatcagcctgtgaacggttgacaacacccacccaggggtnctgc

SEQ ID NO: 522 - DNA, 630 bp, Avena sativa
gaaatctcacgcaattgatgccttttcacgtgccctgcaagccatcccaacaatcatagctgacaatgctggtttggacagtgctgagctgatctcccagctccgagctgagcaccacaaagagaacagtactgctggaatcgatgtcatcagtggcggcctgggagacatgcaaaagcgtgggatctgcgaggccttcaaggtgaagcaagccatcatcctgtccgcgaccgaggcagcggagatgatcctcagggttgacgagatcataacctgtgccccccgcaggagagaggacagaatgtgatcgatcccacgatgcaggattgtgtatgtttgccaggttttggctggggtatcgtggtccgctactgttttgggtttgactccattttgtctgttttcgaccaaaccctaagcagttggaacttgttgtggtactagctgattttccgtaggcttatgttgtaataccgtagcctttggtatcattaagatgtgatgttatcttgttcacgatgttggcttaataggaggatatcttggtttctgtgatgcggcttggcaactctaaagtgtgaatcagttttaatctcctgtaatgagggtgctatgaaattttgtctaaaa

SEQ ID NO: 523 - DNA, 749 bp, Avena sativa
gtaataaatctctatttccattgattcattgatatcatcaacatcatcaacatcatcatagtccttctgtgagaaacaaacatcataatagccctgctgtgcagcaggagtataatcgaccctgccaatatatctgtatagttacacttggaaggcaggagataataggacacaatcgtccatctatagctaattcaaccatctcatcaaaaacccaaatcccaacaaaccaacaaacaacaacatgatgattaactagtactccatctccttccgaattgaggagaagaggaagccgctgccgaccaatccggtgattggcctatcagtagtatgtatatgtagtagaggtgatcatatatctttaccgtccatgcacgtgaccgatgggagcctacaagtcctcggacatgaagatctggttgtaggacgagtccatctcgtgcaccatgagcttctcgacggtgacggtgccgctggtggcgttgttgaaaaggtacgcaccggcggcggcatatatggcctcggtagggtacacccgtgatgtggcagtcgacctcccgcccatcgcgaagctctctacgatggagtggtccacaaggaccctgagggaaaaggcctcgccgtcgagcaccgggacggtgtagccgactacacgcttcacgacatcctgggccagcgttgaccgcgactcgtcctggcaaaagtgggtctggagggccccgtcgagacccctagacacgtagaag

SEQ ID NO: 524 - DNA, 536 bp, Avena sativa
atcgagcagattctgccttgattagcatcaactgtatttaggattaggagaggtgtcttgtacacaaactgtaatcgatcgttacgttatattaagtattaatcatgtacttagtgatataattaattgatgccagaaagaaaatacaagagggtcacatcacgtcgccctataggcggaatgtgacgcgaccaaatttcgtctcttgggggcctagttacaaacaaagacctgttagcttcatcagagttcttcagagcggctatagagcttcactggccactcacaacaccataatgtactgctagctgtggtacgtagttccatcgtcatcttcttatgtacagattgtcaatacttttcttttcgttcagggccaattagaactccattttcatcgggcctgcttccaactcgccgtggaagctctccgcggaaaccccgttgtcatggctctgaccattatcaacatggaaaacgctctggagatcatcctcccagaagttcctctgctcaaggttaacaagaagcatccc

SEQ ID NO: 525 - DNA, 728 bp, Avena sativa
cgggatcacaggcactgccacaggcccacagtacggcaccacagtcgcgctgtacagatcggaatcggatcctctctccccagtcccccagcatccggcggccatggccgagcgcttcgacctccagggcaggcacggcaagtcccgcgtccgcgtatcccgcgtgtggcgccgccccgccgcggatgggggccacctcttcgtcgagtggagcgtcgccgtcagcgtcgtctccgactgcctcccctcctacacctccgacgataactccgccatcgtcgccaccgattccatcaagaacacagtgtatgtgaaggccaaggagtgcacggaggtggtctccatggaggaattcgcggtcattctcggaaggcatttcacttccctgtacccgcaggtctcggaggcgacagtgacgatcacggagcgcccatgggagcgcgtggttgtcgacgggaaacctcattcacacgggttcaaacttggttctgaaaagcacagcacagaggtcatcgtgaagaagtctggaagcctgcttataaactctgggatacaaggatactctctgctaaagacaactcagtctggatttgaaggattcgtgagggaccgctacacacttcttcctgaaacaaaagaaagaattgtagcaacagaagtaactgcttggtggaggtatccattcgagcatgtttcccagcttccatcaaagccattttgcttcacgc

SEQ ID NO: 526 - DNA, 664 bp, Avena sativa
cgtcgccacagattccatcaagaacaccgtgtatgtgaaggccaaggagtgcacggaggtggtctccatggaggaattcgcggtcattctcggaagacatttcacctccgtgtacccacaggtctccgaggcgacagtgacaatcacagagcgcccatgggagcgcgtgcttgtcgacgggaaacctcattcacacgggttcaaacttggttctgaaaagcacagcacagaggtcatcgtgaagaagtctggaagcctgcttataaactctgggatacaaggatactctctgctaaagacaactcagtctggatttgaaggattcgtgagggaccgctacacacttcttcctgaaacaaaagaaagaattgtagcaacagaagtaactgcttggtggaggtatccattcgagcatgtttcccagcttccatcaaagccattttgcttcacgcaaagataccaggatctaaagaaagttctggcagacacattctttggtcctcctgatgttggtgtatatagtccgtcggtgcagaatacattgtacctcatgggtagagaagttcttaccaggttcccagacatagcatcgatccagcttaggatgccaaacctccactttcttcctgtgaacttatcagaagggaaaagaaatccaggactg

SEQ ID NO: 527 - DNA, 717 bp, Avena sativa
gcggttgccggctataaccacggagcaatctaagaatttgtctggatcattcgacttcatcggcttgaaccactacctcatgcttcaagcacgccacgacgagaccaccttcaacctgaagcagagggactacattgccgacataggagttgtagatgcaatgaaagcatccaagagggcgacggtgaatacgctccttgggctctcgggagtctactggagcacatgcgtgtcaagtacggaaatcctcctgtcatcatccatgaaaacggatgggctgaatttgtccaacaccccagcgagatcaaaaccgacgactaccctagatcagaagtcctgccaggactacttggaagttctctacatgtccataaggaacggatcagactcgcggggatactttgtgtggtcgtttcttgatatttttgagctcgcgaatggaaatcgcctgcgctttggccaggtcggtgtcgacatgaccgtaaaggagaggacgcggtacgttagaaactctgccagatggtactctggcttcctcaacggcagtgagctgcggactccggcaacacccaagaaaccatattacgactctgcgtgaaaaatttgaaaaagtgctaggaggaactagactttttttatatagtataagcagcgtgagaatttcgaaaattcatccctgacagggttgaactctagtcactgggttgaactctagtc

SEQ ID NO: 528 - DNA, 645 bp, Avena sativa
ggccttcctgcggcagatgcggggcacctgcccgctcaactacagcccggccacggtggcgatgctcgacgccgcaacgccgctcaggttcgacaacggatactaccagacgctgcagcagcagaagggcctgctggcctcggaccaggtgctcttcgccgaccgccgctcgcggagcaccgtcaaccacttcgccgccaaccagaccgccttcttcgacgcattcgtcgccgccatggccaagctcggccgcatcggggtcaagacgggatccgacggcgagatacgacgggtctgcaccaaggtcaactaatcaatgaatgatgatcggctagctgcagcatcacaggtacattcagtagagagggtcaaatggatcatcggccggccagctctgttctcggtctcaacttctcccttgcccatatgcgcgcgcacacggtgaatccatcatacagtagcagcaaatttgttcccgcccaattctttccttcatcatgtaataagcgtacgtatactgccatccgtagagtaccctaggatatcttcagggcctgccatgtgataggaggagggtacactttcatactgtaaattggtccggttaatcaagtgagtatatccactttatttttactaaaaaaa

SEQ ID NO: 529 - DNA, 789 bp, Avena sativa
gattttatcagaacatcgcagtattacaagttatctacagaagttccatcctgacgaagatggtccttttggtataactgcccaatgcttagaaacttttatcaaaagctgtgctggttactctgtcattacatatattatgggcgttggagacagacatctagataatcttcttctaagcgatgacgggtgccttttccatgtggactttgcttttattctgggtcgtgatccgaagccatttccacctccaatgaaactatgcaaagaaatggtggaggccatgggtggcacagaaagccaatactacacgagattcaagtcctactgctgcgaagcatacaacatcttgaggaacaacagcagccttattttgaatctcttcaagttgatggaaagatcaaatattccagacatatcttccgacgaaaatggaacccttaagcttcaggagaaattccggctggatctggacgacgaggaggctatacacttcttccaggctcttatcaacgagagcgtcagcgccttgttccctcaaatggtcgagactatccatagatgggctcagtattggcgatgaccacatctctcctttttttttatagatgctgttgcagcggactattagcagataccaaggagagacttgtaaatgctcatctccacccacctggatacttctaactggaagcgtagatttgtgaatagggttgtattttaacttggtttgtgtataatgtaatcagaagaatatctgtgaatttgtgttattaagcctgtgacgac

SEQ ID NO: 530 - DNA, 651 bp, Avena sativa
attcctgtatactgcccagcattgactgatggatcactcggagacatgctgtttttgtcattgcagtccgcaaccctggtcttattattgacattgtacaagatataaggttgataaaatggtgaagccattcatgcgacccccaagaaagacaggggtcataattcttggtggaggccttccaaagcatcatatatgcaatgcaaatatgtttcgcaatggtgcagattatgcagtctatatcaacacagctcaagagtttgatggaagtgattcaggagcacagccagatgaagcagtttcatggggaaagatcaagggttcagcaaaacctgtaaaggtccattgtgatgcaactatcgctttcccattacttgttgccgcaacttttgcgcgtaggtttcacggcacaaattcatccaactgaatttctggtggcgaaccggaccttgaattgattttttattaatctccacccggttacctgaaatctttggagcttgcggggataaagccaaaggttttcgtctgctacgtaccactattagcggttcctttctttgttgtacacctgaggttgtaataccattgcacgtttcggtaagattatgcatgaagtgctaacatgcaatttcttcatccgagtgcgca

SEQ ID NO: 531 - DNA, 437 bp, Avena sativa
cagatttttgaggatgatgatgatatgcttgtggagatctccaggtactcctgttttcaccgcaccagagtgctgtcaaggttcagcctaccacggtagagcagctgatacatgggcagttggtgttactctgtattgtatgattaccgggcgctatccatttctaggagattctttgcaggaaacatacgacaagattgtcaacgatccagtggaaataaccgaggacatgagccccgaacttgctgatttgatgcaaaggctgctctgcaaagatccagcagagcgtatcactctacaggctgctgctgagcatccttgggttgctggggctgacgggccagtccctgaattcatctgtaggtgtggttttggtygcaggaagagaaatgtttcacaggaagccgtacaataacaaagagaccagtccttcggaa

SEQ ID NO: 532 - DNA, 794 bp, Avena sativa
  modified_base (146)..(146): a, c, t, g, unknown or other
  modified_base (197)..(197): a, c, t, g, unknown or other
tctaacttacgggcagacatcattcaacttcggcctttgactcttggaaaagcgcttcttttacaagagcaaccggcttctccatcaaatggtagctctagatgtttcgatcgcgtggcgctcgagaaggtttctccaggggctcntttcccccgcaagcacaagcgcgtgtgtagacgattcagatggctgtggtnaggggttatctctgcttcatcttgcgtgccatgttgcggacataggcatggttgaactactcctgcagtatggtgccaccgtgaattctacggatgctagaggtcggacaccgcttcatcacagcattttgaaagggagacgcgtgtttgccaagctgctcctttcaaggggtgctgattcgcaagccacagaccgagagggtagaacagcactacagtatgcaatcgacagcggaactatcgacgatgaagagattcttgttttgttagaagacccaggtagataatccagtagctaggctaggcagagacctttggttcagcagtatgcgccttgtgctgctgttcgacgcgcacagctccaagctcgcctcgccgatccatgatcccagcttgtgtcacgagaacagcattatttatagctagtgtgccagaggcagaggcagaggcagagccaggactcccatccttgttccggccccttgttttagcgtgagatgatacccccctatgtatttgtggttgcggtgtgcaagatttccgtcgggttttgttgcagatgggatgatggacaacactgtaagtttgtacattgcg

SEQ ID NO: 533 - DNA, 473 bp, Avena sativa
taagtcaggtgctggatcttgcgcttcagccacagcgcgcggacgtcaaggccgagagagacaaatatctcccggttgcccgcctgcatgaacacgtcgggggctaccgatttctccacctgcgacagctccaccatgccgttgaggatctggatgcatctcgcgatgctgtagctgtcttcttgttgctgctggtgcttcattagctgccagtcatggtttgagttcttgttctctccagagacatcgaccgcccggtcgttgccctgcctcttagaagactgccacgagcggtgctgccactgcgtcagcgcctgcggcagcatgtgtgtgtctctgctcgaagccttgttacgaggcggagtgtgttggaaagaagattccttcgatataggtgattgtagacgaggtgagcgctccacgacgaattcgtgttcatcctcgctatagatccagatcatcccgggaattcc

SEQ ID NO: 534 - DNA, 674 bp, Avena sativa
ggagtcttggctgcatgtttgctggaatgatattccgcaaggagccatttttctatggccatgacaaccatgatcaacttgttaagattgcaaaggtacttggaacagatgggctaaatgcatacttgaacaagtaccgaattgagctggaccctcagcttgaagcccttgttggaaggcacagcggaggtaaaacccgtggtcaaaaatttattaatgcagacaaccagcatctagtatctcctgaggccatagatttccttgacaagcttctgcgctatgatcaccaggataggctgactgcacgtgatgctatgggacatgcatacttcctccaggtgagggccgcggaaaacagcaggactcgtgcacagtaagcaataacaagactgttgctcactgttgacgcgaatctttcgataaagccgcttcctttagctactttgtcatgtacaactcggtaatggttggttcagctgggaagggtgggagagcttgtggcgtgtgcctaacggcgcagggggaacctgtgatttgctctcctcctgtttgtgtatggaaacctgattaattgcaagtttgcaacacattattcatgtaatgtgtttggtactattgtatgaatctgcttgtaaagaatatctttggtgatttggtttggattcgaaaaaaaa

SEQ ID NO: 535 - DNA, 967 bp, Avena sativa
cccaaaggagctagtattaccaccaagggcaccgcctagtattcacacagtagcggaagtcacggataaaagtaataccaatggtgtgaaacagcttactggtgtttcttgcccagaggaatgcgctgggactagttcaacagctactgacagtaaatcagaggctactgcccatagtgagactagattaattgagcatgctgacagtaacccacaggcttgtagttacgtacaactactagtctaccgatggccctgcatggaaaagctaactgcatttgcccgcaaggatcttgacccaaaaacagtttttatttttgttgctcccaatgccagcataagtgcagaagcagttaaaaaggtatgcatatgggtaggaggtgaatatgactgcagcaaagctgttaacactattgattggcagcaagttgctggtgattttcttaatcaaaaggggttcagcaacactcttcctgttaaggttttcaaggagcatgaaaccgaggatcttttggaggtgctggatgcttgttaacagtaggtcagggtactctactagctttaacaaactcagctgtgaattatcgattcaatgaaggcatttcctccagcatcgctccatgcaccggcgactgtcagcgaggtacaaaagccatgacaaccgtttcctcctgaacatataggctacagattccattaagtagaacagatggcttagcaatttgtgtgttgcctttcttttacgacctgcttgtgtcaaaaatggcaggaggctgccagagcgttgtatctgtgaattaacacacatggatcgggttttggcggcaactgggtgtatattatccgctccactgtaatgtaagcccataagctgggcgatcgctgttgtcgcttttactcctaaaaaattcatgtacatctcagggaagaacagatttgtaatcctcctggccaacaagtgtctcca

SEQ ID NO: 536 - DNA, 441 bp, Avena sativa
cccgggatctcaaacaacatcctgggtggcaaaggacaggtcaccgcaacggcggctctgacggagctccggaagatcagcaacctgctcagcgagatgtagcacgcaaggcaaaaccacaagtcgcccatccttgcccaaccctctctagctcagcagtcaaatggtctagtgataaacaacaaggtgcctaggctaccaatgctcctgtggaatttccatatgtaaatatatgttccattctattattccatttgagtccaatatgtaactaattaagcactgtatatccaaggaactcgtatcaatcaatctaggtgtcacgacgatgaggaagtagttttcgtcgggattagagagctatttttgatggaagaattttgtaagatttaactggtcaaggaggaaataaatggaagaataagtttcagtaccaaaaaa

SEQ ID NO: 537 - DNA, 637 bp, Avena sativa
cgccccttcatccgtacctggaactgaagagaattgtcccacgcaaacaaacgtcctcaggagcaaggatgaaccatcgatcgactcaatatgtacggtagggcgcatgtaacatgttttttaaattaattacgtttagtatgaactgtatttgattctcgtctctgcctgcctttaattgcagttatgtacccgtatttgatcgccactgtcatttctccaccttcaccatttgcctccaagcactcccctgcgttcttaattcgccccggcacccgcgccccatgagtacctgatcagtgtttctttgaggtcaagatgaagttcagtgctcctctgtgttggtactctgcttttgcttccgtcagttaaaagaaccattagattcaattccttttctgcgtcctgcatcttgctagctcgccagatggatccaatgaagcttcagtctagagctaccttagctcattatcaagtctccttttcaaatgaggagcttactttatgttgcaattctggcttgtacgagtgatttactattgttattactctatttccttcgtagcttgcagttttcagactactttccttcatcgaaaaatcatctaaataaagttggctttccctttggattgaa

SEQ ID NO: 538 - DNA, 1044 bp, Avena sativa
ttatccgcctcttcttccacgactgctcgtcgagggcagcgacggctccgtcctgctgaagaaggttgagggccagccggatccagagatgctcggctttccaaaccttagtctacgcgggtttaacataatcgaagcggcaaaagacgctctcgaggagaagtgcccgggagtcgtctcgtgcgccgacatcctcgccttcgccggccgcgacgccagctacaacctaagctacggcgtcatcgactacgacgtgccggccgggcgcctcgacgggaaggtgtcactcgcctccgagaccctcggcaagaacctgccgccacccttcggcgacctcgacctaatcacggccatgttcgccgccaaggggctcgacgagaaggacatggtcgtactctccggtgcgcacacgatcggccgttccggctgctcctccttcagcacggcttccatagaacccgtcctcggcaaccaactgaaccagacctgcggcatgcccgtcagtgcagccacgatggtgccgcaggacttcaagtcacccgacgcgttggacgtccaatactacaggaacatccagtcccgcgatgtgctcttcaactccgacgcgacgctcgtgacctccgcgcggaccaagagattggtggatttttacgccggtaaccgtcttttgtttggtgcgttattcgggccagccgtgtggtaccaagacttcggaaaagccatggtgaagatgggctacatcggggtgaaaaccgaccccaaggagggcgagatcaggaagaagtgtggatacgtcaaccccaaacccaacccctactagtgcagtgcatgccttcctacaatggttgatcggtgatctgatcagaatgatgttttgctcctcttcggtagtgtcttgttctagttctcctttggtgtttattattatactttctttcaactaaaggtttgtatgttcattcattttgttcawttacaccgtgttgtaatccgtgtctagccactacctccagcatcgacataccttatcaatgagattcatca

SEQ ID NO: 539 - DNA, 451 bp, Avena sativa
cttttttactacgaattataaatcagcctcagatgccaaccatatgcaagtactatttaactcttttactgtacaaagactactgatggacactataagagttacaacaaatttacattgtgactgactggttggtgaagcagctctgctccttattaccctagcaagttgaaagaatggtttcaccttattgctattattacacaataaagaccgcccaatttgggaggaaaaatagggtacccacgcttgtactattcccagctgcaaactgaaattagcagggaccatgtgtcaaccggtcatgcttgttcacgggctcaagcagtgcttccctgggttcggtgtaaattcacctcagctgctcgaccttctcgaacttgaacccgcggatcctggtctcttccttctccgaggtgtccttgtgatcgacaggccggatagtccagcc

SEQ ID NO: 540 - DNA, 712 bp, Avena sativa
gtcatgtcttattgtgttaacaaggtacttggagatgctaaaattatggtgtcctgcggtgtgtgcccaacatcgagggaggatctcttggggaagcagatggagagcctggagctcatatttgtttcgatgaggggaggagttcagtggtattgccagaggtttgagcaaggtgctacgtgatactaatcagatggtgcggggtggatcggcgctcacggcgagacagttgcagttacaagtgggaattttgccaactattgcggactgcttggatggactacaaaagtcatctgatatgcaccaggctgagtatgcggtaaaatcatcgatcatctctttgttgacatggaagagcagttcaggtgaccttgctgcaatgcgtcaactcattgtagaccaaccaaacataccaaaagatgaagtgcaatctattttcgacattatatttgcagatgaaatttgttaagtgcagtcatgttggagccactggggcttgatctacctgcctatccagacaaagcatgaaggctgccacactttcaggtttaatgagcaccatgaggatgctggaattcattgacagaaccgtctacttgtaagggtagtctgctgaaggcgtctcgggaaatagttgggtaggattttgctgggaggctgtaagcttgaggatgattatgactttacctttgctttgtttcccaattgttct

SEQ ID NO: 541 - DNA, 638 bp, Avena sativa
ccgggatgttgttggagcccggcaggcatccagctgctgaactgcagggcagcgatgagagctctggccgtcgcctcgccggtcgcggcgtcggcgcagccccgtcgccgctgcctcgtcgcaggtccaacatcatgccaccagatgaggaggcagctgcacacctcgttcagcggcatcaccgtgcagtgccggccgcggaaacagctccgctcgccgcgcccccggtcgtcatcggcagtgatggtggtggcgatggcattgaggccttcgatccagttcatccagggcacggacgagcagacgatcccggacgtgcgtctgaccaagtcccgggacggcaccaacggcgtggccatcttcgagttcgaccagccgtcggtgttcgactcgtcggcggagctcggggacatcacggggttctacatgatcgacgaggagggcaccctgcagacggtggacgtgagcgccaagttcgtcaacgggaagcccgccagggtggaggccaagtacgtgatgcgcaccgccagggactgggacaggttcatgaggttcatggagaggtactcgcaggccaacggactacagttcgtcaagaattgatcaaaatcaactcatccatccatcgatacatccat

SEQ ID NO: 542 - DNA, 705 bp, Avena sativa
attgtatgaggtggggcctgtcctctaatgctacctctaacgctaaacttagggactgcgcttggaagaacctctatattcagcaagatagagaagatatggttgaattcgtgaggtatacccctactgaattcaaagagtactacatccagatgcaggctgcaaaaaggagtcaagctcccattccctcagaagtcaatgacgacaaggttattcttgataagacagtagctgatcaggtgtctagttggaaaagcagaagaggccttactgatgattcagtcaaggggcattcttgttcaggaagtacttgcttgtacacccagattggtgatgcttatatctgtgagaagactggttgtgtgcatgtctgcgatgatgcctgccgagaatttgtcttggaccaatctagtgggctacttgtctgtacgatatctggccactgctttgagagatttttatgtcctgatgatgaatgggatacttgtgatactgatcagcagcaaggtggtgtgactgatgaagcagagccattcatgggatctggacgatttgctcgtgcttatcagttgggttacgactgtgccgatgagaaggaactcgaacacgccttgcggttctgctgatatgctcacggggatttgatccttcactcgtgctggctatgcgagaccaagtttttgcttggcaagggagacaagtggc

SEQ ID NO: 543 - DNA, 814 bp, Avena sativa
gtctattgttcttcagatctgcatacttgacagcaccatatcctactgtccttgtaagttttctctaactcctcttcagtccagtcaactaattttccattgtccttgagacgctggacaagttctgatttacttcgtgatttggcctcatcaagtaggtctcccaaccgaacaacttcagtactacgagttctgaagcgcttgccatctgctccaagaacgaggccaaacccaacatgacttgttttggggaacttcttctccttcggatctgggagccaaccagccatcctggcagccttgaaaaacatatcaaagtgctgctgctgaccgacatctgttacatatattatccattcagctttctcaacatttagccggtaccaaagagcagctaagtctgttgaggcatagttgaagccaccatctcttttaaccacaatcaaagggattttgtgaccttcaatgaaaattacccgagcaccctcactttccttaatgaaaccttggttactcaatccctccaaaacttgtggaatataaggattataaaagctctcccccttttcttcaagttgtacatctaagagcttgtaaacctgatcaaattcgttcctgctgatttcacatatctttttccaagcagaacgatatttctcatcccctccctgtaagcgaacgacagcttgttgagccctatctttaaattccgcatcattatcgaatttttctttggatgctttatagaaaagctggagatcaccaatggcctggctgccaagttcctcccattccgggaacttttcaaacagaa

SEQ ID NO: 544 - DNA, 798 bp, Avena sativa
ttaacaaaagaaattctatcacatagaacaattcaaaacaatatagacaaacaaagaacattgacgcaactctaaaataacatcaaagcactttgcactcacagtctctaacccacaactcacaccttgatggtttatgcttgctccagcataagaacgtgtagattaccatgcatgcatagacttctaaaatagcagaaggatgagtatataatagacgttgaacaagtgtcgttgggaacacacccaacacaaagtaggtcatccgatcatcatatcaagaccaacagaggaggccatgatccaaaggctgaaacaggagaaactaaaagaccacaagctcttcccgacatcagccacaaaagcctgcaaagacaggttgaagaagaacatgtaaagatccagtgttcccaccttccaacggctagactgaagatgagctcgaagctggccaagaagcccaaaagaagtggcaaacaatcccagctcttcagggagaactgagagacatacaccaccaccttctttgggatatagagaaacttccaaatgctagctaaaaccaaacattgaataccaccatacaatatagcctttataatgttgcaccattggtcaaacagagtctattaggcccacacgtgagcaacagataatataaaaactaaaattgttttttcaacccacatgacagggaacttatttctcagatcctcagagcacaatccaggaaccaggcaagttatagtacggtgcattttgacaaaatttaggaacatagaagctccttcaattccc

SEQ ID NO: 545 - DNA, 658 bp, Avena sativa
  modified_base (657)..(657): a, c, t, g, unknown or other
atcagatcccggcgatcgttccgatcaaacccctcggtattttttcagagggaaggtttgatgacggatcgccggtgctaggatttggtggttgcttaggttcacacgttgctgctcgccttgatctcgtcgttagaggtagtagaggattaattgtttaggggttgctggatttccgttcgtcttctgaagattaggtgatacgttagtactgagtgtgcttcatcagggataagttagtgtgtaataatcgaaggttcaggttcaggttcagtgtgtgtgtgattccaaggttatcttaagaggtaatttatgtgtagttgcgtcaggtcaacctagtgtatagttgatttagcaactgaagagatatgagagagtagttgcatcatcagctaagctacctgtgtagttgatttagcaactgtagagtattattatcgatcatggtccgtcctatgtaatatatatgtgtcctgtgttaatttgtgtctgtatcagtcagttcgttatcagagtggtgaaataatatatctgtggtactacctagtttgcagaaatgagattgttcttgttcttctcatggtgttatcatcagttcgttgcctggatttgtttcgtagcagtttatgaacttcgtgtagaaagaacctaaaaaana

SEQ ID NO: 546 - DNA, 886 bp, Avena sativa
ttttccatcatcaaggaaaaatcaaaatggtcccgagagaacttgcacactcaccattaagttacatttcctttctttgtacagcttaactgagtcgaacaactaaagataggacacgctcgtcaataatactcactctccccatgctaaaccccccaaaaaagaaggaatacataataatcacacagagaaagaaagcccaggaactcccaatacaacaaggggagcgcttgcttatactatacacatacacaaaacaaacggaaccccccaaaaacctctcaccactacctaccaaacaaatatgcatgcatactgaagacgaagaataataacaagagatgttacagctcattggttagcgtcaattggcgcaccagaccgtgcctgcgatatccggtttgcgtagatggttactaggcgcagctgcgtgctgctaagcccttccaggtacggaacaaatgctttcccaagaatgatgtagatatccaccaagcagaatacaacagtctttcgaacatctggactttggttgctaaaagcatcaaagagtgctggcaaaaatgtaggcaattgatccatcaactcctcctgagaaaggtgtgcaacaagctttgtcaaacagttgatagacacaacaagtgtcttttcatcatcactgaccaaaagaggtactacaacagcaagacatctgaaatggtcgtattttgccaacagaacatttatgcatccgtttgcctcgtcagaaatctttgcgaccatatctttggtcacatgcaggagtttttcaagaacaatctcaatagattcttccatagcatctttctgattgttgagcatctcgccaattaaagatacagcaagctcccttgtagacgattcagag

SEQ ID NO: 547 - DNA, 929 bp, Avena sativa
acaagagaagaagagacagagggatcagaagaagctccaggatcaactgaaagctgagcaggaagctctctacggttcaaagccaagtccatccaagcctcagagcaccaagaaccgtaggatgtcgataggtggcgtgaaccgtaggatgtcgataggtggagccacgacgcaagtaccgaaaacagacatactgcattcgaagaatgttcgtgctgccaagagaaccgaagacattgcccatttgtcccctggcagtagaggcctagacattggcgatcttcctatcaagaagttatctttcaacgccagtactctgcgtgacacagagacacctcggaagcctttcgctcagatcatgccagcaagcagcgccccgtcaacacctgcacggccggacaccaatgtcacggcggaagaggagaaccggacccccaaccccaaccccaagacgtttggagcagcgaatcccaagacgccaatgaccgtcgcggctccgatgcagttggcgatgacgcccgctgtggctaacaacaacaaggttacatctgctcctgttgtttcccttgtttacgagaagccagaggcagcgttgccggaggagatcgagtattccttcgaagagaggcgtctcgcctactacctgtccagagaagttgcttaggcgtctgtgttataaggcatgtcacgatctccactctgagagtaggttacttgtcagaggctagctgtttcctatgttggtcgacgacagtcgcccagtgagtgatgttccgattctctgccatattcgattgtttcgatacttagcaaaggaagtttacactttgtctcccgttcagtactactgtagcttgtataggtttcttggcatttgaaccatcatctcgggtctgtatgattaacaggtcagccagcattgttgcgag

SEQ ID NO: 548 - DNA, 671 bp, Avena sativa
ctccaatcgccctactcaacctccaaaatcagtaacagatggtcctgagctggagaagccaaaacaagaggatgcaaaagaaaacactggtagcatgggtggtgggcttgaatctctcactattgcggaagatgttaaagaaaatgagcctgaagacgacgagggcctcccgatatacccatacgatctcctgaaaaccacagctgctgagcctgtcactgaaatcgatgttaccaggcgcgagacctatttgtcttcggccgagttcaaagagaagtttggaatggcaaaggaagcatttagcaagcttccgaagtggaagcagaacagaatgaagatggcgcttcatcttttctagctcgatcttgtgcttcagattcatcttccctcgggcgaaagtgctatttgatgataactagcccttgggtcattgtgcagaatgcaaccaccataccaggcagcacataattttcatgttgcctggaccagttcgcttgtttttcctgctttgagtttttttttctgttataggttcctcttattattcgttcaattgataggtgtgctcttactgttgctcccagtttgatggtcacacatgtttggttgcgaggcttgcatttttgtattaacgttgccttggttgagtttttgtccttttgtagatgagt

SEQ ID NO: 549 - DNA, 633 bp, Avena sativa
aagagatcagtgagatctcgtggcacaaaattgatgatcttctacctgctagtgatgatgcaatatctcgtggagtgaatgggatgaagctttatatggttgcaccatttttgacgggtctaaaagcatggatagcctcgcatcgtcaaccagtataccagaagtcagatgcatctgctagaggtaccgtgtggaaagcgaagaatccatcaggtgttacagtgcctgtcgagaatcctgtaataaatagagcagtgtctgacacgcagcatgtcgacaaccgccctggtaaaagcttcaggaacttcaaattcgatacggggagtatcctacagtctatggaagcttccttcctacgtacctaggatcccgactcctgtaccatcgatgtgtatagactatggaatgacctcgcttgttggtagctgaaatccgcgacggcacggcttttcgtctccccgtgtcctcttctgttggtatatgtaatctagtagaccgaaacatgttcaacaacttccttgagtagttctaataccatgtcgtcttgcatgcttaaagttctcgctcttctgctttaggggttataatatgtgatgtttgaaataaaaaaaagttaattaatcgcgatctaga

SEQ ID NO: 550 - DNA, 481 bp, Avena sativa
ttcaacaagaaatagaaattacaaaataatcatgtccaattagttgatataatcattccacatctgaagcgcaatctgatctctaagagcatttccattgtttgactcaacttgatgttggtggtgggcatcatctccatctggaacatcaacataggccgatggtggaataagtgcaggttggtgatccaaccatgcctcatcgccattttggcctctaattatgttgtggaatgcaacacaagcagcatgaatcttaatttgggatcctatgggataatggtttcccacttttcaaaattaggggaaccgcttcttcaaaacacctattcctctttcaatgtggtttcgagcaagtgcgtgtcggtggttgaagagctcctggtaattagcataaccagtatgagaaccccgacgccttctaaattccccgagactggtaccgaactcctgggtatggagcaagaaaagagggcatgtt

SEQ ID NO: 551 - DNA, 740 bp, Avena sativa
gtggtgctcctcgatttgtgcttgttgctcgacttggaaatgttaaaatactaaatggcagtgaggtaagtgcgcgtgaacggagggaagcagaaatacgatacattcgccttgttatgggaaaagcagaatcagatgacccagaagtgatcaaacagctacaccctaggtttgctgaactgaaggccttgcatggcattgaagatgagaagccaacttcaaggatgttaggcccgcaaaagatggcttctgggcttataagtatcacgttgaaatgtgtagggccatctatgggtgaaaagcaaccgttgacaaagaaattgccttctacaactactgttggaaagctaaaatctttgtgcgagagcttcttcaagctgaaggacatcaaactgagactgtttctcgaggaagagggatgcccgctaccccaactgctcgaggaggagacggcttcgctggtggaactcgggataggcgcaggagcaaccatcatcgtcgatgaagagaactagtcctctgccaggaccagaagaaagaatatatatatgtattttcgtgggtgaataccacggtgatgtttctttgagaatgaatcccccttgctctgtacattaaagacacaagctgttctatgcattttgcatagaggatgtgaacaacgttgtgaacatgtcaggtttgacattcgttcctcgcccaccgtgtcatactaacttgcaagaaatggccttggtttc

SEQ ID NO: 552 - DNA, 640 bp, Avena sativa
gaggaggcggcggtgggtacccgagccccggtggatacccgagtccaggtggaggaggcggcggtgggtatccgagccccggtggaggaggaggcggtgggtacccagcccccggtggaggaggcagcggcggtgggtacccagctcccggtggaggaggcagcggcggtgggtacccggcccccggaggcggtggcggcgactacccgggtcacggtggaggcggtggcggctacccgagccctggcggcggcggctacccgccgggctacggcggtggtggtagcggctgttaccatggctgctgcggctacgggcaatatggctgccgctgctgtgcgcgcgccgacgaggtcccggagcccaagtaccgggctgagacccgcaactgagccgtacgtcggcgacatgcatgcagcgctacgaacccacacgcgtagagctctctacgtgctgtggctctgcgctgcgcacgtagtaaattactggtatatgtgaccgatcgtgtcaataaaaggaaggtgtgcgtgcaagtatttactatgtaactatgtatccgtgcgagtttgcgctgtgatcatgcatggagaacacggccctgtattcttgcaagttcgatcgtatgagttgatatataaaa

SEQ ID NO: 553 - DNA, 953 bp, Avena sativa
gggagagctgtatgacatggatctgaagggtcgtccccttgcatatactccattctgtgataacaacaaggagatggatggctaccgattctggaaacaaggtttctggaaagatcatctgcggggaagaccataccatatcagtgctctttatgttgttgatttggccaaatttcgacaaaccgccgctggggataatctacgggttgtttatgagacactcagcaaggatcccaatagtctatcaaatcttgaccaggatctcccaaattatgctcaacatactgtgcccatattctcactccctcaagaatggctatggtgtgaatcttggtgcggaaatgccacaaaggcaagagcaaagaccattgatctctgcaacaatccgatgacaaaggaacccaagctccagggtgccaaaaggatagttccggagtgggttgattttgacagtgaagcaaggcagttcaccgcacgaatcttgggggagaatgccgaaattgccgaatccacctctccaccctctgatgcaccgaagcctgatgataaagactcaagccaagatgtgaaagatgagctatgagcaaccactgtaacccccttagcttgatcatcttcaaagaaagactactggtctgatgccccagcagaaaacatagttggtgcacaggatagcaaagtgcaggtaccatggcaactgtaaacgcactataccaggagtatactgattgtagccctgaaaagcttgttaccatcatcgatctaccgcaacacagcatttttgtacacccaaaatccatagggtaacttgcccgaaataggttgacaatggatcgatctagtatctaggtggtactgtgatagatgtgtagaatgtttctacaggagacattatttatactcaaagatgttgctagcgctgcaaaatttattggcatctactagttgcaaaa

SEQ ID NO: 554 - DNA, 907 bp, Avena sativa
tgatcagtacttcgaaacggtttcatatctactcttcaggtcttgcactggtcaaaactccaggacgcgcctcttcagctcctggaactcttctccagaaaggctgcttcaaccaaaacctgcgtaacgtcgcctcggatgcttcatcgtagtccttcctcctcttcagaaccaaatggccgctcagctcccagactgccggattgattctcatgtccaggaactcctggctcgcctccccgagggcctgcttctcagcgtagcactgtagcagaaggaaaactctcttgccagattcagagataaggacattgaacggcctgttattctcttgcaggaaaatgcaggcatttgagaccacatctgaaagatcctccaggcccgttcccccttcgaacgcaaagccgcttactgggtactgcaccagctgagaaatgctgacgctattccttaggactgtgagtttctctgtcggcgctttttcgactggatattgcactttcagatagtatgcttggaagtggaggtggttgattgttgcaaaggcacccagactgttatacccaactctgaagaagggatcccttgcctcccttgcaacatacatggccagtaagaaactctcctgatcaaccctctgtggtaagcattcctgtactcgagggatcaaaagtgcatgacagtacccgattgggctcacattgatcaaaatggcgctaggtgaagccagaacagagcgaggagcaccatacaaaatactgggcaggctcattctcagtttcttggaatctgaagatcacctcctcgggtctaactttcgtgaaattgaacttgccactatcaaatggctggatgacttggttcattccaaattcagtcggtcgcttcttctggtcacgcccttcta

SEQ ID NO: 555 - DNA, 626 bp, Avena sativa
ccggcgccaagtacgtcaccttcgacggcctggcacgggcatgcgcaaaggctggagggtttcctgaaccagagatcatccactacaaccccaaggacttcgacttcggcaagaagaaggccttcccgttcagagaccagcatttcttcgcgtcggtggagaaggccagcaaggacctcggaatcacgccggcgttcgacctcgtcgagggcctcaccgactcttacaacctcgacttcggccaggggacgttcaggaaggaggccgacttcaccacggacgacatgatcctcggcaagaagctcgtcagcgtgtgagtcgacctgaagcgtgtatgcctggctcatgagtcatgacagtgtaggcgtgtgagtgtgacccagacacccaggctcagcaggagggtggtgacccagccaagcgtgaagcaagggtccgcaagcccagcccctgttacagtgcaggcgtcttttccaaacgttttcttttcttgcttggtcggcgatgaatttgcttgctatatgttgcaccgacaaaatcgctgcgccttgctgcattcggaatatagtgaagagggcaactgtcctataaatgatacgataatggttcaactaagttttgtaaga

SEQ ID NO: 556 - DNA, 722 bp, Avena sativa
gcctccttgcatacagattattttattcttacattacagctacgaaaagggaacagagaagactagtgcacgttattccaagctcaaatacaacatttgtcagtttgtgaagtacactacatcaactggcaatgccatggggcaggctattgaataattatacctgactggcacactggctgtggcacagatccacacctaagtagtcagccacagcatcttaggatggagtgctgctggctggatgtaatgtcctcacaccagagtttcttgcttctcagatggccgcaatttactgccggtgaatccctcagcaacaagcttactaacagcatctctcagcctctcatactcctccttgacattgtaaacctggtgtgagatccttacatacccagtcaatggatcaccattgttaccctttgccatctcttgctcttcaatccttctggtattgtagtatattggcacttccaccttgaaatccttcctcaacatggtccgcactctcattgcatcatcatcactctcaatgccaagacagttaggcatccctaccataaccatgcttccgcacatttctggcggcgaaccaagaaacgtcccccacgcgtcggcaagcatcctacccatctcaatcaccttctcatggttccggttgcgtatcccctccaatcccaccttcaaccggttcacaagtcaatagcttcaggaatgacgat

SEQ ID NO: 557 - DNA, 451 bp, Avena sativa
aggatgcctggagcagaattttgtgtgctgtacaatcttgttccactggaggtaatcttttgatattatattttcttggcttgaacactccccacagatagggtttcccctggtacatctgatattcctctggtagcacgaaagaagggaagagaaacagcttggccaaaaccaacaatagcttctagaatgataccactatcaacgacatgcttcactagctgatccagctcttcatttggcctcgtatcactcgaaaagaaatacaagccgatactatcagctgagggtatcagtgcctccaagtgctgtggacatgtttccgatgtagaaagttcagttacttctattattggtggcaatgatcttgactgttcctgcaccttcttgcgtgctttggttgacaggtgtgcagccaatggaatatagttcttgtcaatcttcataattc

SEQ ID NO: 558 - DNA, 849 bp, Avena sativa
tctaagctcaagtctatagattgcaagtatttcgattttggaacgggcacttgtccttttgggacaagctgtttctacaagcatgcttacagagatggccgcttggaagaggtcatactgcggcatcttgattgtgatgatggaagtacacttatcgctaaaaacattaggttgtcagacttcctcagtcggctgcatctttagggaccagtggctgtatatataaatatcaagatcttttggggggcattctgggatttcgctgtctaccaaatatttgcagtattctgaagacatcggtttaatttgagacatcttcgaaatctgctgctttgtctccagtttattggtggttgcattgtcgccagtcataaaaagaaattttgaagttcaccgtgggacgcctcgatgaccttataattatatagaagcaatgttggcccgtggaacaatggaaaagaagtattgtcgcgaatctgctcgaaaattgaaaaacacaaaaattagaactcttgaaccgcttttgctgtacgcacgtagtgttgcttcatgggtcaccagtgattcggaggacaacattccctggccatcgtgcggatggtagatgtataatactttcatttccaaactgccattcccttgttgaggaaggccgccgcaccaactactggtgaattgagaatgtttggttgtataacttgtatgcaggaggaaagggggaaagaaaagaaacaagggatactcttgatactgcacggtgtagaatgagtaaataagctgagggtcagatgttccatggactgcctgtgaaatttgatccgttctctgtagacagcctatgaaatttaa

SEQ ID NO: 559 - DNA, 646 bp, Avena sativa
tcctgctgatgctgtctgtcggcgaagtatgacttcagttggtaactggaagctgctggaggaaccaccggatccctcaccacacttcgtccaatgtgtcgatcagcgacacttccattctcgactggtgaggcaatcactcttcctggtctagctgttggaatcctttgaggaacttgggaggtcaggccatttgttggagcaatcggggtagagtgaactgttgtagtccttggtagagaaacatgcttcctctcggttgccacactctttcctccatcttcctctaagttagcaaattgcctccggaaattgtcgacagcactaggatatagaaagctcgttttttcggagccactgacataactctttagaagttgagggtggtactccagtatctccctaaatataagttccttgatgtcttctttcgtaaactttctccgttcaaactcaaactccatttttgaaattggttcgcatgatggttctctctccagcttcgcaagacctttaaaataaggatcagccaacgcctcttcagcagttggtcgatctttaggatcaaatgctagaagcctttgtaagagcttgagccctgaaggatctgcattggggaatttttgtgaaaaaggtactggctgtt

SEQ ID NO: 560 - DNA, 425 bp, Avena sativa
cacaatttcaaagaactcaagttaactgcatctcatttaaaggggaatttttctactaaagcaacactgaggagtgtaagatgcaaagctgctcaaacccagagtgttcagcgcaaatcttcaactgcgactgtcaaacgatctgatcccaaagggaaaactcaaggacctaaactggatgatggaagtggtgggttccctccgttccgtttcggcaaaggaggcggcggaggtggagggggtggcagcggcaacagctactttggtgggttctttctcttcaccatcgtgctgctcctggattatctgaaggagtttgagaagtacctgcttgctcgaaggcatcgtgccggatacgatgaaaacaatgcggacaatgggctgctggagcaatcatcatgagtcttgtttgcggtagtagtcta

SEQ ID NO: 561 - DNA, 486 bp, Avena sativa
ccgggatgtccctccccaattctccacgggttttcgcctcgcagaatgggggaatcgagcgcgctccagtccatcctctacggcctcggctcgctccgccttctcgaccagaggaagctgcctctggaggaggtctacatcgacgtcaaggactccgccgatggatggaatgcgatcagagacatggttgtccgtggtgctcccgcaatagccatagcagcagcattgtcattagctgtcgaagtttttgatcaggatttcactggtacacctgcagaagctgcctcgttcatttctaaaaagttggaataccttgtatctagccggcccactgcagtaaacctatctgacgctgcaacgaagctgcagaatttagtgtcaaggacagctgaaacagcaaaagatgcaaaatctatctttcaggtctttatcgaagctgcagagactatgctagttgatgatgtggctgataataaggcaattggc

SEQ ID NO: 562 - DNA, 799 bp, Avena sativa
tcaccaaaattgtgaacctgaataacacaatgttacaggcgtccgatgtttattactattgtgttacagatgccctatgctactttgccattgctcagtaacttatcatcgatcctattgtcattctatcttctgtgatgacctgaagaatactagttacaacaactcaggaatgtgcaagaattgaatcgatctttactatacattctgaacatggccttccttggaaggctttcaagaccttggcaacaatcaactctattctctgggaaaatgcaatgaccaagctgttgcaatgcccacggaataagaattggcctgatcaaatgcatcaatggggtctagagtacttgctagtatacagtcatcatatgtagtctccacagggtcacatagggatcctctcttcaggagctaggttgatatgtagtctccacacggtcacatacctgtgggccaactagaaagctgggtcgtgaaaagtgtacagctcatgtggtcggtctggtcatagttgatagaccccggcctcccatgggaaccataccaggaagccccatatcaggctcatcatcattcatgtcttcaccagactcggcaccagcaataccgatgcaggaaaataaagatgaatcgtcaactttcaagtgctcatacgcaagatacaagtcctcaattgtggcactttcatacagtgttgtcaattccttaatacaggatatatcctttctaggcacggacgaagattgcagatgggctagcaaaccaagccaataggcatttgcttgtctcagcctca

SEQ ID NO: 563 - DNA, 774 bp, Avena sativa
agctcttggtgtgccccgtgggtctgtgatgttcaggcacgcgctgcgcgctgttgcgttcctcagccaagagaaggtcgcagcccaagtggagaacctgaagaccgcattcaggtggtctgatgccgaggtacgcattgctctttgtaaggctccaatgctgctggtgaggtccaaggaaattatgcagaggaggtctgagttctttatctccgaggtggggttggatccggcgtacattgctcatcggccggtaatgctttcgtacagcctggagggccgggtcagaccacggtcctacgttttgaagttccttaaggaaaaaggattgctacaccaacaacgagactactatagtgcactcatgttcggcgagcaggtgttcatggagaagttcatatgccctcacaaggaagctgcaccacacctggctcaagactatgcagcagcctgcagaggggaagtgccgactagattcagatttacatgaaccaagaacgggtatgacaattggtaactgcctatggcacaaaattcctgatttggtgtccttggcctaaataagtggtggattcatgctattgtatgcatgttagtagttacgtgttgattgggtgttggtaatccaggatgaaattaatacactgatatttgattcctggtatgttcattaaatcattaggtagagaggaaagcatcacattgctatcttgtccatcctcatgtcatattgacacacatataggaactaagagagtgagaccatagctcagg

SEQ ID NO: 564 - DNA, 406 bp, Avena sativa
  modified_base (297)..(297): a, c, t, g, unknown or other
cgggactggaataccacaggttctacaagtaactttgtgcagcaaacttgaaagtataatctggagaccaatagaggtttctgccaaatctgcattgctgaggacaaccacttgctagcctcggcctcgtggctgcccgctgctacaccttcaccaataggatttcccaggtgtcaagttgggggccttctggtgtatctggcatcgctactgaatggtggctccgcgctgtcgatcatcccagttgcttctgtgggcactgtatgtaccatagccgagcgaccgagtcaatcccgntagatcagatggtgaagtctgctacacattgatgtttgactgtatcattagtgtatatacagtttggatcgtgccaaactgccaatacagtcccatgcgtagcaggtac

SEQ ID NO: 565 - DNA, 458 bp, Avena sativa
  modified_base (29)..(29): a, c, t, g, unknown or other
ctgcgcttagtatttccgggaggttttancctttcaaatattacatttcaccatccgtacgcatggacaaagttccatgggaaggaaactggaaaagttaaaagctatctggttccataccctctggttcttgtaagtttttcccttcataacactcacctggctatgtaataaggtgccctccaaaatctatgtaggtccataatccagcctctcccacttgaaggacctaccagagttaaacctcagcaaagctcgcatgaatacacagacacacacgcagactgctgctatggcaagcattgaatggatgtaggggcgagcgagcaatcctcgagaatgcatagggcgccttagcaagccagactccaaaatggcgcactggctgcaagatcttacttccaatgcgtggatcccagatgcattcttctgaccaacattccctcgttgatccatac

SEQ ID NO: 566 - DNA, 723 bp, Avena sativa
aagcatgaaagacatcacagggaccgagaccatgacagaaatcgggattatgaccgggagtccgggaggggacgtgatagagaccgagacagaggccgtgaacgagatagggatagggatcgagaccgtcaccgcatccgagatgacgactacaaccgggatagagaccgagatagagagagggatgtcagggaaagggagcgtcgggatagagaccgtggcaggcatcggagccgttcaaggagccgggaccggcgagaaagagaccgtgaagacggagagcaccgtagaagacgtggccgtggtagcggcagtccccgagggcgtgccgaggatgatggcccaagggaggagcctaagaagagaaaggagaagaatgagaagaagggtgacgggaaaggtccagatcctaatgatccggagattatagcgatgaacaagttgcgagcgtcgatggggatgggaccactgaagtagtgttatgtaatgtattttgaagcaagtatctctgttgcttataaccagcaaggaatagttggcatttttctgacactgcaatacactgtatatgtaactacatgttgtctttctgtcactgcctttctgggtcttgcttgcatttctttcggaataccgagagagcaaaagctggtgagttctaatctcaggatgtgatatgtaccaggtataaggtttgaacgttttagtttatctggctaaaaa

SEQ ID NO: 567 - DNA, 829 bp, Avena sativa
ccgggatctctctctcccgccgccgtcactcgcgcctccccatccagccgcagccgctgctcttctcgcgaccccaggtttctacctcgatctccccttcggttggaaatggcggctgtcgagacgccgacgcaggatgtcaagctcttcaaccgatggtccttcgaagacgtccaggtctctgacatctctctgaacgattacattgctgccaatcctacaaagcatgccacatacctcccccactctgctggaaggtattcagccaagaggttccgcaaggctcagtgcccaatcattgagaggctgaccaactccttgatgatgcatggacgcaacaatggcaagaagctcatggcagttcgcattgtgcaacacgctatggagattattcatctcttgactgatgctaaccctatccaaattatcattgatgccatcataaacagtggaccaagggaagatgcaactcgtattggatctgctggtgctgttagaaggcaagctgttgatatttctcctctgaggcgtgtgaaccaagcaatctaccttcttaccactggtgctagagagagtgctttcagaaatatcaagaccattgcagagtgccttgcagatgagcttatcaacgcagctaaaggttcttccaacagctacgcgatcaagaagaaagatgagattgagcgtgtcgcgaaggccaaccgttaagcacatgctcacgcaaaagaacaagcggagagtgtacgatgaacctgctggctatttctgtatttgtagtgtatttgagaatttagccctgtctgaagtatttggcacatctgtgtctcag

SEQ ID NO: 568 - DNA, 685 bp, Avena sativa
ctcaactgaaacagcagaataaacaagataacttcagtcctacagtagatagtgaatccatctcctcaaatacagtattgaagccttgggacagaagcaaccagcagctgcacgatcgtgattatcttcaatcagtccttcaaaatttcagcctgcataagaatgacaagattgagtctcagaaaaacagagtttctaaccccttaccagttgcgtcgaacttctattcatctctagaaggtcaacacatcagctgtcttacgtctaacatgacacaagggcaggaggattgcatttcgagctcttgggagatgcctcaaggtggacctctaggagagatcttaacaaactccaagaatactgaggagtacttcaccaataagtgtgagtcaagaccatatggttggttactgaacctggaggaccatggaatgtgaatcttcattaagtagcaaactcaccattgaagggaacaatggttgatagtagcaggatgaactagcttagatgtgtgccctatccatgcttgtttttctctcctttctattttcagtcatctgctctgtaatctccaattggttgcaactttctgttttcatcaatttggccgtatccaaaaattctacttgtcttgagtattatatcttacttgctacacctttaataggtgatctataattgacta

SEQ ID NO: 569 - DNA, 725 bp, Avena sativa
gacatgcgtgcgagtcgacgggttacgaaacctgggatgcgcaaggaagctgacgagcgggaggccctcacgggccgcaccgctggccgaccctgatcttctgtgaagggttcgagttggagcacgcctgtcgggacccgaaagatggtgaactatgcctgagcggggcgaagccagaggaaactctggtggaggctcgaagcgatactgacgtgcaaatcgttcgtctgacttgggtataggggcgaaagactaatcgaaccatctagtagctggttccctccgaagtttccctcaggatagctggagcccattacgagttctatcaggtaaagccaatgattagaggcatggggggcgcaacgccttccacctattctcaaactttaaataggtaggatggtgcggctgctccggtgagccgcaccacggaatcgggtgctccaagtgggccatttttggtaagcagaactggcgatgcggatgaaccggaagccgggttacggtgcccaactgcgcgctaacctagaaccccacaaaaggggtgttggtcgattaagacagcaggacggtggtcatggaagtcgaaatccgctaaggagtgtgtaacaactcacctgccgaatcaactagccccgaaaatggatggcgctgaagcgcgcgacccacacccggccatctgggcgagcgccatgccccgatgagtaggagggcgcggcggccaa

SEQ ID NO: 570 - DNA, 928 bp, Avena sativa
cagcacgcggcggccatggaggacgaagagcacgaggtgtacggccaggagatccccgtcgacggcgaggacgtcgacatgggcgccggtggcgatgacgccaccaagcttcacgagctcgacgagatgaagcgccgtctcaaggagatggaggaggaggccgcggccctccgcgagatgcaggccaaggtcgccaaggagatgcaaggtggagatcctgctgcagccacctctgaagcaaaagaggagatggattctcgatcagtgtttgttggaaatgttgactatgcatgcactccagaagaagtgcagcagcattttaattcttgtggaactgtaaacagagtgacgatcctgactgacaagtttggacaaccgaaaggttttgcttatgttgaatttgtcgaagcagaagctattcaggaagctgtcaagcttagtgagtcagagctgcatggtcggcaaatcaaggtcgctccgaagcggactaatgtccctggattgaagcagcctcgagggggtcgaggatacaacccttatggcggccacccctacatgaggccatatcctccgccgtttttcaatccttatggcggttatgggagagctcccaggttccgccgcccgcgcaggcctttctattgaagttctggctctcatggagtttgtaaccgacacatggcactagtcttctatcttaagcagccagtcagagaaaaatccaaatccttatactgtgttccgttacttcacagttagatatgtgacaggtttttatcatctaccgtgttgtgtttacaatgtttaagacaatacatgcagcagcagcatcatgtattatttgacttagaaatcaaggtgtacaatatttgcttgtgattggattgtatttgtttttctgaaggagtgttttgtatgttctaaaaaa

SEQ ID NO: 571 - DNA, 702 bp, Avena sativa
accacattctatttgtgagaagctgggtcctaagtatgcttcagttccaaccaccaaattgaaggatgacccagatttctataatgatcttctgagggaaaaccttcatatcagagttaggttggtagttaactacaatggccttagcatcagtgcagtaagagatgtattcgagaagtcacttggcctgcgtttgaagaagatgaatcccgacactgattaccattgcttgaagacctttggttcttgcttcactgaagatatcccaataccgactggcacaaagattgacttctgccaaacatctgatggccagctaataacagaaattaatggcaggcaaatcagtgctgttcagagcaaagacctttgcagggctttctttgacatgtacatcggcgattcacccgtctcactagaggccaaaaaagaggtagcccggaacgttgcagggctcatgggcagatgttcatgagagagggccggtcagagaattatttcattcttccagtgcagcatgtggataggaaactaggcgaggaggaccgttgtatgtacatatggtgagggagatccgtggcctgtaaagaggaaaagggcgatgttgtgttgttgtgtatacatacacatgggggatgagcatctgccttctgtgcgagggcctcgtcccaattggatggggccgtcttgccattttgtaga

SEQ ID NO: 572 - DNA, 707 bp, Avena sativa
ttttttgacactgccaggcagcaaaaagccagccttgtatcattcttgttcataacaaaatagcatccaatgttttacacatcaaccgtttaaaaaaaaaacataacttacagcagagtagcatccgatgttttacacctcatgtttctctccagcaccgcactgaacaataaagttactccaataaaattaggttacaaatgacagggtgctcgctggcaccggggcgtgcaaggggcctacaatgctaccgtaaggtgcctcatctgaaaattgcctgtccttggtcaagacctaagctggtgaggagatgagcctcagcatcgctgatgcaatggctggagaagtcggagtccaagttggatcaatcagagagccaccgcattttccagaactggttcttacacaagacaaccggtacttactgccgggcatcactagcagtcctttttgatttgtgcttcggcttcttttctttcttcttgtgctcatctatacaatgtctcagcttacggtcagcatgtttcatgtcttcttgagtaagtatctgaagcctgtcaaccgtgtaattaattgcattcatgatctgaacaaactgttcaactggacaatcaaagcgttgccttgaaaaaacactttccaagtatctttcaaagtcgaggaccttgagtggatcattggacttgtacagagcagccaaagccaac

SEQ ID NO: 573 - DNA, 905 bp, Avena sativa
acagactatatgattgcttcagatacactggcccgacaggtatgtggcaatattcggtgaattcggttatgattcatccaaatggaggccaagtgtcccgttgaagatcaactgaaagcttttcaggagctaattgatgaagggaaggtacgcaacatcggtgtttccaatgaaacttcatatggagtaatggagtttgtacaggctgcaaaacttctaggacttccaaagattgtgagcatccagaacagttatagtctaattgtgagatgccgcttcgaagttgatcttgtcgaagtctgccacccaaataactgcaatattgggctgcttgcctactccccattggctggtggtgttctcagtggaaagtatcttaatgctaactctggcgatgcaaagagaagcaggctgaatctcttccctggctacatggagcgctacaacgcatcgttggctaaagaagcaacgaacgaatatgtcaagcttgccaagaagcatgagctaaccccggtccagcttgccctcggctttgtgcgcgaccgtcctttcacggccagcaccatcatcggagcgaccaccatggaccagttaaaggagaacatcgatgcatttaccagcactccacggcctctgccgtcacaagttctagatgacatcgagactcttttcaagaaatacaaagatccagcaatcctctagatgtttaccttttgattcaaaggacatcggtcctcaaaccatacgaagattgagcaagcagacaaagatcatgtgatttctttaatgtttataacacattgatccatctctttccacttatgcttcctaaatgcgtgtgtagcatgcacatacctgtcagcatatgttctttgttttcaatatatatttgtatacttgattat

SEQ ID NO: 574 - DNA, 785 bp, Avena sativa
tacatctgcgagtgcaacggcctccccgacggtggccaactactggaagcaggtcatcaagatcaatgactaccagaagagccggttcgtcaaccgtgttgtgtcctccatgttcaacactgtctctggcaagaaggtggccgttctcggtttcgccttcaagaaggacacaggcgacaccagggagaccccagcgattgatgtatgcaacggcctgttgggcgacaaggctcaggtcagcatctatgatccccaggtgaccggggagcagatccagcgggacctggccatgagcaagttcgactgggaccacccaatgcacctgcagccgacaagccccacggcggtgaagcaggtgagcgtggtctgggatgcgtacgaggccaccaagggggcccatgccgtctgcatcctcaccgagtgggaggagttcaagaagctggactaccagaagatcttcgacaacatgcagaagcccgcctttgtctttgatggacgcaacgttgttgatgctgagaagctcagggagattggcttcatcgtctactccatcggcaagccgctcgatgcgtggctcaaggacatgcccgctgtcgcttaattctccggtgtcacgtcagaagcgcaccaccggcgggaattcggcaaggaagagaactggttgaccatttcttatagtttgcttttgcaggagacacagctacatttttctgtcagcataaaactgggttctgtttgtatctctgtcttaagttttcattcctttcactgccgtctgtagatca

SEQ ID NO: 575 - DNA, 290 bp, Avena sativa
ggatccttcttccacctccacctccacctccacctcctcttctcttcagaagttcagagcccaggcggctgcgagggtgacggacgaccacgcctccggcggcgccattgagacatggcggacaagatctccacggttgtcctcaaagttgaccttgaatgccagcgatgctacaagaagatcaggaaggtcctttgcaagatccaagacaagatgaacatcaagacgatctccttcgacgagaagagcaaatgccgtgacggtgtccggaccgttcgacgccgacaaac

SEQ ID NO: 576 - DNA, 850 bp, Avena sativa
atcgacttacttgaatctcaagagtgaacttgatgatttaatccatcacaagctacaaaacccaaggatggacatccaaacaagtgaggagcttctgtcagctgtacggttgctggtcacggaggacccgtgtagtggtcgatttgtctatggccgacaagaaccaagatcaaagaaagcgaaaacgatgctcccgccagcctcagtctccatggaccgtggaggcggacatggaggggacaaccccaagaaccagctccagactcttctaacaagggctgggaataacaacccgtcttacaagacaaagcagatcaagaacagcctcttcaggtcgaccgtcgagttcaacggcatggagtttgtagggcagccgtgcgcgaacaagaagctcgcggagaaggacgcggcggaagaggcgatcaattggctcacggggggaggagctcctccagaaacgagggacccacgggacattgatcacatgtccatgctgacgaaaccgccacgcaggaagaggcaccaccataggaggacctgattagcgcagaaggttttgtcgcatctcctttctgtaggcaaacagcaagaaatatagatatatcgtagattagcgcaagaaacttgtcaattttttgtatgattcctgagcgtaccacatgcctttgtgcccctgcggtgatgtggtactgaggttacagaggaacaaacaggaggggtttccactgtccgtgatagtgcaagatggaaaatcctcatcttcattgtcagattcaacagtctattcatacggtgactttaccactgttgcgcagtactgtgaaacttgtttagtaataaaggagagcat

SEQ ID NO: 577 - DNA, 909 bp, Avena sativa
gcaagaagataatggacctgaatctgagtggctgtaagaatatatctgatagaggcatacagttagttgctgataattatcaagaactaaagaagttggacataaccaggtgcattaagttgacagatgatgcattgcaagaagttcttcagaaatgttctgctcttgaaagtttgaacctctatgccctttcaagttttacagacaaggcttatacaaagataggatatttaaccagccttacatttctagacttatgtggggcccagaatctaactgactatggtcttacctgtatatcaagatgcggaagtttgacatatctcaatttgacttggtgtgtacatattactgatgttggggtggtagctatcgcacaaggttgtcggtcccttgaactactaagtttatttggaatacttggggttactgatacctgtctggaggctttgtcaaaatcttgctcaaagagtctcacaactctagatgtaaatggctgtactggtattaagaggaggagctccagtgacctgattgagatgttcccgttcttgagttgcttcaaggtgcacagctagcaacagcctggatatttccgcaattatcgttgccctagttggcagtcatggaaatgtcttctctggaaaaacttagggaggcagtttttggccgcctactgccagtttgtatgttaatttgagagagatcacataacttgtataatcaattttcctaagatgtgtggcatgtctcgttacattgttatggaatttagaagttgtgaacctgatgtttcttgttatgtcaacgctggcgttatgtggtcagtgtagtacatatccaatacggctcaattttgtgctaactgagtaactattttgtatgccaaataagtttctagttagttac

SEQ ID NO: 578 - DNA, 604 bp, Avena sativa
cgggatgagaaagggaaaaggaggaagtgaggaaccaacaccaaaccctaggcgccgcgtacgtatcatccggttcgacctggccgggcgttcccatggcgctgcgcaacctggccgcgaggatgcggaaccccgccgccgccgctctccgtcttccgccgccggcactccgcttctcgcctccagccggcgctcgcccaaggttctacggctcctttcagggacgcccagcttcgtcagatgaagatgttaagaggctgtaccaacagaacctagctatactcgagggggtgaagaaacacgaggattacctcaagaggcgtcttcttttcctcgagacaggaaggaaattcctcaagttgtctttcatgttactcatgcctattcccgcgatcggtgcgcttttgatagtaacaacccgttaagaggataggcaattgttcacagctctgtttatttgtcacatgtactatggactagcgtctgtccagtctgtgttatgtgatggcagttttcatgtgagccattacttttgagcactacgctaatgtatgcacttatgagtagcagataaatctgccagccttttgtgtcgaagttgaca

SEQ ID NO: 579 - DNA, 404 bp, Avena sativa
cttttttttttacttcaacaatcaaatctttagcttcatagtgctgaatagcatggaaaacagtacattacatcagttcaactagataaagaaaaagaaatccgttgctggcaaaagaaacttgacagatagtttcagggatcaaattcactgaaagattgcgcataggcaaccttattttactggactatgcagagctagttcttgttctactgtcctgttcgcatctaccaagacgccttcttaacacccatcacttcacccttattgccaaggtgcggaacacgatacgagacatgcggaacttcttgtaaacaccacgagagcggcccgtgaaaatacagcggttcctaagacgcgtcatgttactatttcttggcagcttggacaacttatcgcgaaac

SEQ ID NO: 580 - DNA, 582 bp, Avena sativa
agtcttcataatgctgaatagcatggaaaacagtacattacatcagttcaactagataaaggaagaaaaataccgttgctggcaaaaaaacttagacagatagtttcagggatcaaacactgaaagattgcagaggcaaccttattttactggactacgcagagctagttcttgttctactgtcctgttcacatctaccaagacgcccttcttaacacccatcacttcacccttatttgccaaggtgcggaacacgatacgagacatgcggaacttcttgtaaacaccacgagagcggcccgtgaaaatacagcggttcctaagacgcgtcatgttactatttcttggcagcttggacaacttatcgcgaaacttatcccgcatatctgatggtagatcagggtccctacagatagacttataaagctttcctctcagctcatatttttgctgcaagcaatctacgtttgtgatcccgcaagtttctcttctctgatatcgtcccactatatcctcgagcttggacatgcatggacatgttgggttttggtttgattagcgccccatgatatcctcgagctt

SEQ ID NO: 581 - DNA, 598 bp, Avena sativa
cctgagatgatatctcgcagctttggcgtcatatcaagcaagtccgatgtttatagctttgggatgctactgctggagatggccggaggggagaaggaatgctgacccaaatgcagcaaactcaagccagtcttactacccatcatgggtatatgaccagctgactgaacaagaagtgggtgagatatcttctgttgacgacatgcatgagttggagaagaagctgtgcatcactggattatggtgcatccagatgaagtcccatgatcggccaacaatgagcgaggtgatagatatgctggaaggtggcactgatggcttgcaaatgccgtctaggccattcttctgtgatgaggggcatgtccatgtggatgattcttaccatctatcatcggagctgactgcaatctctgaggatgatgagtgaaagtgtttatgtacgaattaagtgtatgaagaagtgatgcactttcctcgtgaaaaacttaatttatggttgtaattgtaccgattttatgaaataattgcttcagagttctacaaacttgtacgctgaaatgattggagggtatgtcctccaacagctatatccatgcac

SEQ ID NO: 582 - DNA, 812 bp, Avena sativa
cccgggatagcagcagcaagcaagcagccacttcacacactagccactagccaggagcatttgttcaggagcgagcaagctagcaatggaggtgtctaccaagatggtggcggtgctcgtcctggcggtgctggccgcggcgaccggcgcacaggcgaggaacatcaagacgacggaggcggcggcggcggccagcaaggacgcggtcctgcagccgacgaccttcccgcccttcgaccgctttggcagcgcgtcgccgatgctcggcggcttccccggcaccagcggcatgcccgggttcagcctccccggcagcagcggcgccaccccgggcctcggcggcatcggcagcatgcccttcctcggcggctcctcccccggcctcggcggctcaccgggcctcggcggcttcggccgcatgccgggctcccccgccgccgcctccgtcgaggagcacgcccagaagccctgaacagctctgcccgcccggcggtagatctgctagtgtttggcacggtgcatggcggtaatgctagcgatacgtagtgtgcaccgtgcatggttggttggttggttggttctgtgggcgctatacgccgcgcgtacgtctgttggaggactcgatttgtttgtcatgtttgttgtttcatttggttaggtctactatctgtcgatcggtcctacgtgttgaacttcttaatttggttgtagtggtgctgttcttgaggcatgaataatgctatatgtacgtgtcgcttgattgtgttatggtaatgattaatgaatggactattattgtagtgtaaaaaaaa

SEQ ID NO: 583 - DNA, 393 bp, Avena sativa
aacggatcgaagatgatgatgacgatgatgaagaatttggtataccagtccagtcaagtgtgacggcaaaggttaatggatcttctgaaccagtgttaaatccaacagatgtcttgaccaaaactaatggtcctgagagtgcaaataaagaaggaaacaagaccgtggcatctaagatgcccaaattcatagtaaaaccaaaggtcaccgctgtaaatcctgagaagaaacagaagactgaactggcagctgcccaagataatggcaaaagcacctgttgcagaggaaaaaaagtggaagcttgggaagagaagaccaaatgttcttcagtccctctgccagtatgacagcgatgaaagtgatgactgaaagactaagcttcttgagtcacaa

SEQ ID NO: 584 - DNA, 506 bp, Avena sativa
tcgaagctacagttgttgtggagatggtccatccccgtgatgacatcctatcagttacggagatcccggaagatacggattaaatgcgcgcatatggctcttgtacgctcatcccccttgctccctggaccatatacacacctaagaaacacaaggttgctatttgggttgttgtttcctctgctgttacagacagctattgatttcggtgcgcatgttagaggagagacagtttgaggtgaggatccccgtttcaggaccatgttttcgagttcactatcaggcccaggttgatggatagaactggtagaactgcaggcgtatggtcaggccgtgaaccttttagcaggtcttgctaatccatttttgagtctgaggcagtctgatgcaagcgcagatctggttcgattgaatttacttggatccttgcggcggtcaggttctgaatgccgtgtttcgggagtagtagtttttgtatagctgcacgcgtatgacacggagtctga

SEQ ID NO: 585 - DNA, 718 bp, Avena sativa
cagcagcgtgcccaaatcagcccagaaagaccacatcaatggaaagaaaactgcatccatatttacaagtaaatctctaacacctcatttgtatcctctctgccagtaacatggcctcttcactttgcgtgctaattgtcactacgtttaaactaactaccgcgaatcgacatgtaaggaggagatcgttcagctattctcagtgtagtcttgtaacctttgcccgatgatatagcgcgtcatccctaatagaatcatggagtttcaccaggacccctgcagaacgccttggcgaggtagcagagcacacacatggcaaggctgcccaaccatgcaaaatggtacaccgctgagttcaccgcatcagagtagccgaatcttgggaagaggcccttcacgagcacataaggaacacccagagcagtcactagtttcatggtgacaggtaccaacacagtttgcgacacccacattgccctcaagaaaggtgcgtcccatgtcccatgagccaacatagtccatattttcagcaatagcagccccaagaaccaaatgctgaaaaagtctagcactggaatgtcgtcagcaggcacaacaaagggtgatatcactagaaaatctagcaggaacttgaagggtgatatcaggagaaaatcaaccagcactccgatcagaataggaataatgacaatccatatgaacaaaagcggagatctct

SEQ ID NO: 586 - DNA, 764 bp, Avena sativa
gtcaatttaattatataatgtacagttgtatacacgataagaatcgagttggggtagtctatgaacaatgagctataattcacagaagaataggaagaacagcagttaagctagctatgtacatacatgtactagtatcgaaccatgccgtatggaagtgatataccaaggagaactaaaattatactaggaacttgcaggcatccctcctgccatatgaaagtcaccaatgatgccttacaaactgcaaattgctgcggcggaggggaagagttggagaaaagaattaaagaatctgcacacacgattcactctccggccaatgaagtgtcatcaagcacaggaacaactgccgccgagagttcgatgtgcgagaaccgtgcagcgccaaggagttgctccgggagctcatcatacgtgtttgcctgtatgagaaaagccatatcaactactaaactggtaattacaccaaagaccaagcccataacaccattggctactgctgaagatccaatgtctacatctacttccatgtactctggaccacggatatagctgcaatcaacagcctttcccaataagcaagcggtacttccaacactttgccgcactatccaagatcccttcggaacagacgggataagcttcaatctgctgtttcggaaatcatcgtcaccatcagcaaaacgctgcaacagtgatcctttctttaaggatcttgtgacaaagtagaggaccaaactgtgatgagttgacccaggaat

SEQ ID NO: 587 - DNA, 865 bp, Avena sativa
  modified_base (844)..(844): a, c, t, g, unknown or other
ctacaccatttatgctgtttccatcaccatccgtattgtgcttggctttatgcttattgctctcatctggaaattcgattttgctcccttcatggtgcttatcatcgccattctcaatgatggtactatcatgaccatatctaaggacagagttaagccatctcccttgcccgacagctggaagctcaatgaaatctttgccaccggcgttgtgctcggaacctaccttgctctcatgactgttgtcttcttctgggccatgcacaagaccgacttcttctcaaacaaattcggtgtcaggtcaatcagggacagcgagtttgagatgatgtctgcactgtacctccaagtcagtattgtgagccaggcccttatcttcgttacccgttcccgcagctggtcctttgttgagcgccctggttttctcttggtcactgctttcttcctcgctcaattggttgctactctcattgctgtgtacgccaactgggaattcgccaggatcaagggtatcggctggggatgggctggtgttatctggctcttcagcattgtgttctacttcccactcgacattttcaagttcttcatccgttttgtgctgagtggaagggcctgggacaacctcctccagaacaagactgcattcaccaccaaggagaactatggcagaggcgagagggaggcacaatgggctaccgcacagagaacccttcacggccttcaagcacctgagtcgacctcccacaatctgttcaatgacaagagcagctaccgtgagctgtctgagatcgctgagcaagccaagagaagagctgagattgcaaggctgaggagctcaacncgctgaagggccacgtggagt

SEQ ID NO: 588 - DNA, 1032 bp, Avena sativa
tgatggacgtgaagagtcagtcatgaagagaacaacacttgtggctaacacctccaacatgcctgtcgctgctcgtgaagcctccatctatacaggaattacgattgctgaatacttccgtgacatgggctacaatgttagtatgatggctgattccacatcccggtgggccgaagcattgcgtgaaatttctggacgtttggctgaaatgcctgcagacagtggttaccctgcatatttggcttcacgtttggcatctttctacgaacgtgctggaaaggtgcaatgtcttggcagtccagatcggacaggcagtgtcacaattgtcggtgctgtttctcctcctggtggagatttttcagatcctgtcacctccgcaaccctcagtattgttcaggtcttctggggattggataagaagcttgctcaaagaaagcatttcccttctgttaattggctcatttcttactcgaaatatgccacggctttggaaggcttctatgataagttcgattctagctttattgatatgagaacaaaagcacgtgaagtgttgcagagagaggatgatctcaatgaaattgtccagcttgttggtaaagatgcgctgggagaaggtgacaagattacgttagagacagccaagcttctgagggaagattatttggcgcagaacgcatttaccccgtatgacaagtattgtccattctacaaatctgtttggatgatgcgcaacattattcatttcaatacattagcgaatcaggctgtggagcgagcagctaatgctgaaggacataagataacctacgccgttgtaaagagtcgcatgggcgatctattttaccgccttgtgtctcaaaagttcgaagatcctgcggaaggtgaagacgtcttggtcgcgaaattccagaaactgtacgacgaccttaccacgggattccgcaacctagaagacgaggctaggtaaaaaccatcgtgtatgccatcaccgtgtaaacaataaggagcaccaaatggacttgcgagcaa

SEQ ID NO: 589 - DNA, 489 bp, Avena sativa
taagtgcatatcaactccggaaagtgtctttgactcctgagcacctgttacaaagtggataccattgagaaccatctccagttacaaagtgaatattttttgaaattcacaaatatgatttagattttttgaaataacaggagcactggagagctcgggagccaaaaatctctagccatatcaactcttatcaactgggctttgaacttgtccatgggagaggacgaactttataactggagttggttctcaatggcatccattatttagagatgacacaatcctttgcaaagcttgcgtgctcatgcttacaaggatgcaaaggaggatgtattaatcaagctgttttatctatggttactccagttctttggcgaagtcaatattgtccacaaacaccgatttccacccatcagggtccaggatggctgtgatcttggtgttagatcccctggcaagggacctgcctcctgcaccaccttccctcca

SEQ ID NO: 590 - DNA, 919 bp, Avena sativa
taaaggaaggagactgaaaactgagttcccagcaagttctagtgtggagcaagctcaaaaaaagttccggtgtgcagcattcctaaactagcattgtatcgttttgcacaggctgtctcaggcatacgaattcaggattcttttgtccttctgtgagtaccaaagtcattcagtcattttgaacctcaacaaaataaatggtgtttgagtgtgtacgcgtgttgtgtgtatgggtgtgctggggtgggggtacctcctaatcactgatataccacatagacttttagagaaatccacaccagtgtaaacagatccagtgggagttatgacctgcttttctttgaaggaagatgaccaagaccatgctcgacaaccaatcgaatcaaacgatcggcataaatatgaaatcatgtgttgttgtagcagcatcccgtattattgtgtgcatgcctctgatctgataagtagtctgaatgacatataaattggggtgtattttacagagatcattttgaccaagtttagtgcgaatatgctgaacgattaggtcaattgctacactgttatctgcgcctcgtgggatgataatatcagcatacttctttgtagggaggatgaagtcttcaaatgctggcttaacaaactttgaatactgatctaacacaggaataatctgtctacccttctcaagatcacgacggatcctccttgctaatcgcacatcatcatcggtatcaacgaagatcttcatgttcattagatcccggacacgtgaatcatggaaaattagaattccctccagaattatgacatctgaaggattaaccttccgtgcacgtgggacgctcttatgtgttttgaagttgtagttaggaatatccacagattttccatgtttcaagttttccatacaagagag

SEQ ID NO: 591 - DNA, 767 bp, Avena sativa
agctatatgatgggctgaggaagagaaggttagatgagttcatggcaggattcaacaaaatttctctgaaactgaaagagatgtatcagatgattactcttggaggcgatgctgagctggaacttgttgattcactggatcccttctcagaaggtgttgttttcagtgtaagacctcctaagaaaagctggaagaacattgccaatctatctggtggcgagaagacgcttagctccctggctctggtgtttgctcttcaccattataaaccgactccattatatgttatggatgagatagatgcagcgttggattttaagaatgtatccattgttgggcattatgtgaaagatcgtaccaaagatgcccagttcattattatcagtctcaggaacaacatgtttgaacttgccgataggctggttggcatctacaagacagataattgcaccaagagtataaccataaaacctggaagcttcgctgagagcacgaaggtctagtctgtactgggcagtttcatctgtgtatgtaatcttaggtggtgccctcctggaaccgaggttccttaggcatcaggatttattgtactgctaagataggtttatgccatgtaaaggtacgattgacagaacgaggctagtacatttggggttcaaagcaactaactagcttatcttccttgttttcataataaggcaagagatattgcaaatgtagagactagtttcttttagaacaattgacatgtgcatgaattatttatt

SEQ ID NO: 592 - DNA, 768 bp, Avena sativa
gtttgggctttttggggcggcggcggcggcagaggaggaggaggaggagccatgactcggttgacgctggaacagacggcgagggaggcggcccccgccggctgcctggccacgttcctagacctctcccaccgctccttctccgacgtgtcgtgcctgggaaacttcaagaacctggagcgcctcgacctcggccacaactgcctcgtcacgctcgagggtttgtcctcgtgcaccaacctgaagtggctttcagttattgagaacaagcttgtgagcttgaaaggtgtggaagtcctctccaagctgcaggtactgaatgctggtaaaaacaaactgacaagaattgacgaggtcaaatccttgacgaacctgggggcgttgattctgaacgataacaacatttcttccatctgcaagctcgatccccatcaccagttgaacactcttgttctctctaagaatccagttgttactattggtgattctttggccaatgcaaagtctatgaaaaagatctccatgtctcattgtgaaatagaaagtattggatcttctcttgctgcgtgtgttgaactgaaggagcttaggcttgctcacaataagatcactacaattccatcggacctggccaaaaatactaaactcttgaaccttgacttgggaaataactcaattgagagggtgtcagatttgaaggtcctttctgaactgcgctacttgaggaacctaaatttgcagggaaatcctattgctgcgaaagatgct

SEQ ID NO: 593 - DNA, 775 bp, Avena sativa
gagcttgaacctgagcaggcttatgagctattcaaagaatttgaggataagatggtctcagagtgcacagaactaatggaagcagagccaccaactgctgacgaactttctgaaccagataataagagtgttgagttgaatgacccacctggtgcaggacctgttcttaggtgggagtcaactattgtctttgctcctggtggtgatgcatggcatcccaaaaataggaaagttaaactcagtgtaaccgtcaaggaactgggactatcaaggcacgctttccgtcgattacgtgaggttgttggaaagaggtataattcaggaaaggatgagcttacaataaccagtgaaaggtttgatcatcgggaagagaacagaaaggattgcttgaggacactttatggctcgtggtggaagatgccatgaaagccgacgtgttggctgatgatgctagaaatgcttatgttaaagcgaggcttaaggctaattctcagttcatggaccggctgaagacgaagacacagaaattaaggctagctgcataaggtgtgtgcaagggaactgtataagcattgttttctaggttttattactgtattactttcttccatccaagggaactgtagtttattctgaacatacaccatgcccgtgccgccgtactgtccgtgaataacaaagttacgctgaattttctggtcgctgactagtaaaactgttgtaacaaaagttgtggctcacaaataattgataaattccagcatcttctatttca

SEQ ID NO: 594 - DNA, 448 bp, Avena sativa
actgatttctgctatgtctcgtgcaatgcgccccagtgtagaattggccgataacttgatgcactggagggcagactgcttttctggctgtgaacgagtagctacagactccagtagcactccccattgtccatgtaagtgctacatgaccacagaaagctcagattctgacttataaaagaatatctgtaagtgcaactcactactgtaaatctttaaccgtctatcctatggtcaattcagtcttgatgtctactggagggagactatagttatgctgtttttagctactccctccgtcccaaaataagtgacttgagtttatctagattcgcatgtatctatatactaaaacgtgtctagatacatctgaatctagacaaacccacgtcacttattttgggacggagggagtatttattatgaattaataaacaataccattgga

SEQ ID NO: 595 - DNA, 686 bp, Avena sativa
atgatgaactactacatgctgccgtccgggaggagcaggtacacggtcgaccagtaccatgacctcctcatcggcaagcttcgatcttacatacagagtctgtacggtctgggcgcacggaggatgctggtggccggcctgccgccggtggggtgcctcccgctgcagctgacgctcgcggagctgcggcagccgccgaggccggacggctgcatcgcggaccagaacacggcggcgcagagctacaacgccaagctccagcggatgctcgccgagttccggtccgcttcgcccgggtccaggcccgtctacgccgacatctacacccctctcctcgacatggtcgaccaccccgacaagtacgggttcgtggaggccagcaggggctgctgcgggactggcctgctggagatggggcccctgtgctccgacatggtcccgacctgcgcgacgccgtcccagttcatgttctgggactctgttcatcccacgcaggccacctacagggctatcgccgagtacttcctcaagagcgacatcatccggttcatcgattaggtgtgcggcgcagttcagagacacttattagctttgtggcagacagagttcgttgtactgaagttcaagacgattcaaagagtgaaaaccttagtgagttctttcagactatcaacaaaagtgcattt

SEQ ID NO: 596 - DNA, 785 bp, Avena sativa
tatgcagataacaatgctgttggctattttgtaaagcagggtttcacaaaggagatcacttttgacaaagaaaggtggcaggggtacatcaaggactatgatggaggaatattgatggagtgcagaattgatcaaaagttgccgtatgttgatctggcaacaatgattcggcgtcaaagacaggcaattgatgagaagatcagagagctttctaactgccatattgtttattcaggaattgattttcaaaagaaagaagctagtattccaagaagactgatgaaaccagaagatattcctggtttgagggaagctggatggactcctgatcagtgggggcattccaaatcacgttcatcattttcctcggattacaacacatacagacagcagcttactagcctcatgcggttgttgttgaagagtttgattgatcatactgatgcctggccatttaaagagccggtggattcacgtgatgttccagactattacgatattatcaaagaccctattgatttgaagacgatgttaagaagagttgagtcggagcagtactatgtgaccttagagatgtttgtagccgacttgaagagaatgtttgtcaatgcaagaacctacaactctcctgatacaatctattttaaatgctccactcggttagaagcctacttcacaaacagaatccaagctcaccttgcccaggctgcctcaaccaagaactagactgatgaccggcgaattggatatggttgttgtaaagtgtgatagctgcagacatacta

SEQ ID NO: 597 - DNA, 977 bp, Avena sativa
ggaagcgaatgaattggcaatgttgatggcacggctgtacagcgggaatctcagtatggttgcattgaggaacggatatcacggtgggagtgctggaacaataggattgactggtttgcagacgtggaagtatccgattcctcagggtgaaattcatcatgtcatgaatccggatccttaccgtggagttttcgggtctgacggtgcagcttatgccaaggaagtcgaagaacatataaattatggcagttcaggaagggttggaggtttcatcgcagaaactttccaaggtgtaggtggtgctgtggaactagctcctggatacctgaagtcggtctatgatactgtccggaaggctggtggtgtttgtatagctgacgaagtccaaagcggttttggtcgtaccggaagtaattactggggattccagacgcaagatgtcatccccgacattgtaacaatggcaaagggaattggcaatggtctacccttgggtgcagttgtaacaactcctgagattgcaagcgtgatgtctcagaagatccagtttaacacatttggtggcaaccctgtttgttcggctggtggactggctgtgctcaaggtcctcgacaaggagaaacgccaggcgcattgcgcagatgttggcgctcacttggtggagcgtctgaaatcgcttcagcagaaacatgaaatcatcggagatgtcagaggaaggggactgatgcttggggtggagctcgttaccgacagaacggagaagacgccagccaaggccgagaccgctgtactgtttgagaaactcaaggatcttggcgttctagttggaaagggcggtctgcacggcaacgtcttcaggataaaaccaccgatgtgcttctcaaaggacgatgcagatttcttggtggacgccatggactacgccatgtcagggctatgaggactcttctgcccctgaaccatcaccagctgagatg

SEQ ID NO: 598 - DNA, 707 bp, Avena sativa
gttagtagctggcctggtatgaaatatagtgtttcatcatgcaaatcgattcatattccaatacaacaatctggcagtgatttttattctggtcacactagacaaagataccaactgtctatattttggaccctactcctgttgatcccaagtaccaactcaacccacacgcaaaatatcttcacagacttctatggattgctgaacacttaccaaaagctatgtcaaagacatgccctgggtctacatggaacgagaacattttactatgacaacaaaaaatagtacctaatatttcagggaactgtatggatatcttgttacactattcatgtcaacatggaaagacggaggactgcagttgccatttttaaaggatggatatgaactcagaaaacaaattttgggacaactgctaacattcaaggataatgaaagtgaagacaatatgcctaccggtgtccgggatttcatcagttgtatcaaaaaaatccaagagaatatgaatttcaagatgtgaagatcaaaagccaaccaagaccaagaaactacacctcggggtccatctcaagctgctgcccctcaatcttcaccacgctcctagagcactcctaaatttattatgctcggcttttagaactacatatgtttagcaaagtagtgttgttttgcttcatgttcaacctggttctggcctccaatgggtt

SEQ ID NO: 599 - DNA, 934 bp, Avena sativa
cgtcaaggtccgcgccatcccccacttcttcgtctccaccaacgcaggcttcgggctctacatcttcctcgtcatcttccccttcatcgtgctgtgcctgctctatttctaccgccagaagcaccctgtcaacctgctgctgctcggcatcttcaccatcgccatcagcttcgccgtgggcatgacatgtgccttcactagcggcaaggtcattctggaggccgcgattctcactacagcggttgtcttcagcctcactgcttacacattctgggctgcaaggaggggccaggacttcagctttcttggtcctttcctgtttgcttcactcataatgttgctcgtgtttgggttcattcagatcctcttaccgctgggcaagctctctcacatgatatacggcgcgctggcagcactcatcttcagtggctacatcgtctacgacacggacaacatcatcaagcgcttcacgtacgacgagtatgtctgggctgctgtctcactctacctcgatgtcatcaacctgttcctggccctgctgaccctgttcagggcaggcgactaagcccatcgccccgcccctgatcgatcgacgcctctcttgcgccgtgcatatctaccaccgtaaatcccatggacaaatttcccctaccctgatgagtccttagacttgaagaagtgtataggtgcctcgctagtatgttgagaatgttgctgagcttagtggagttagagtcgaaccctgcctaggaacccacgaaatttatgccttggttctatgcttgatgaatggtggatttgccgttgagtttgggtgttattgacatatgctggtttagttgtgctcctgctttgtggccttgtttaatgttcgtttctggtgtcatttgtatgggagtaaaatacattggacatcatgaaacttgtaccgtaa

SEQ ID NO: 600 - DNA, 718 bp, Avena sativa
gattgaggcccaggtgaaggcagctgaagctgctgcagagttcaagttagaggaagaaataaggatgaagagggagcagcaaagagaggcagcacgcctggcactacagatgatgaagaagacggttgatattgacaacagtgattttctaaaggacctggaaaatatgaccaaaaagtgggagctgacccccctggcaaattaattgtggattttgtcgatgggatggagcttccacctggcctgggcagcccgctggagaggcttggccttttcatgaagcaagatcttgaagaagaggtcgagcatgaaatggaggacagcatatcaccctccatggatgtcgacgtggaggacggagagattggctgctgtgggtagcacatctcttaagcatgcatttatttcttcctttgttcctcaggttcatagtcaacatgctccccagggttataagattgcgtgattctatcctgcaatgaggctgtgtcataagcggagtgaagggctcttgtggtttgtgtgtctaagcaagtcccctcgtcatgtctccgccacaacaatgagatggagtgattctcgactttgtggttgttagcaaccatatgatggcactgcatgttgtaggtttacggagtgtatttatagttagttcattgtacgaccatcctgtaaaaacaacagaaaaattagtgaaatgcaattatttagtaaaaaa

SEQ ID NO: 601 - DNA, 795 bp, Avena sativa
attcccctcgccgcaaggaagcagctgacccttgtcatgagaagagctgcatcgcttgtgccagatctctatgctgtagatgcggattatgcactttcggagttgtgcaaagacgagcaaaagcttgagagagtgcttctgggcagggagttccatgtaagcttaggaagaactgttggaattcaggtgcatcagattgactccgtcatcgctatgcttcgtcagaagtttcagtcacaacagcggtattggatggacttcaacaaatgggagcattttgtcaatgacgattctacacgatcatttctttcactagaggttacaagaactgggttaccggagataagtaaacagatacatatggttgatgaagtatatcgattgcacggtcttcctgagttctacaagaatcctcggccacacatatcattggtgtgggcattgggtgatgttagctccaaactgaagcaggccatcaaagaaattgaaaaaattcagaacagcaccagctcatccaaaaactgcaatctgagatgcaatttcggtcgtgtagtgtgtaaagtaggcaagaaggtgtacgatatctgcaagattgcagactgagacagcgttcttgtacacttaacttgccgaattatggacttctgtggagtcaatccctttggttgtaacaaggaactaagggcttgtttgattcacaaggtaggaaaaatggagggataggaaaaatggaggattggtgtggcatgccccattgaatcctatgaaaatgagaaccatgggaattggcataag

SEQ ID NO: 602 - DNA, 696 bp, Avena sativa
ctcaaatggatttgcaggctatggatcgatgccacaggattggccaaacccagccagttcatgtttaccggttggcaacatccaattctgtcgagggacggattatcaagagggcttttggaaagttgaagctagagcatgtcgtgatcggtaagggccagtttcagcaagatgctgcaaagcctaatgccttggatgaggcggagctgctggcgctgcttagggacgagcaggctgaggaagacaggatgatccagacagacatcagtgatgaggacctcctgaagctgatggaacggactgacctcacaggcactcctgcagctgcgggtgccgcccctcttgtccccctgaaagggcctggctgggaggtggtgcttccagcgaagggcggcggtggcatgctctctgctctcgccagctgagccctgtggcagcctatcaaatgacacaacgccttggtgttttggtcctctcggcttgttcgccgctgattagcctatgctactagtatgtaacatgatgacagtatcccctaagtaattatcgaccgggcgttgcactatctagattaggaagctgatgttttggcgagctgtgttgtaacttgagctcgtgccttgaaccaaaggccaacctatgtaagacttttatgttgtggtagcctatgctgaaggagtttrggaaatggcagtg

SEQ ID NO: 603 - DNA, 754 bp, Avena sativa
gaggacgcgggtggtgtggtggcaccgagcttttccttccccaaggattctctccctccctctcccatctcccatgttgtcagccgctctgctgtgctactagtcgtgctcaccgccagcccacaacagcgccaccgcaacaacgcgcaccaaagaaaccaaagcaatggagacggcgcgcctcctccccgtccccgtatagcgcctacagctctccctccacctccccgcgcggcggctcctcctcccagctagctagctcctcgaggtattctggtcaccaaaggatggcgatgacggcctacacgaatcaagcccaggccatgatgagggactacctgctagctgatccactcgttccatacacctccgtgctcattggcgttgtcttgtgcaagatggcttatgatctcacaaggatattgagctcattttacttcaagggctattcttctttgacaaagatacagcgtgttgaatggaacaacaggggtatgtccagtgcacatgcaatctttatcacggctatatcattatatcttgtcgtgactacggatcttttctctgatcgcctaaagggtcctattacattccgtagttcgatcatctccacttctgcattaggggtttctgtgggttacttcatcactgatcttgcaatgatcttctgggcttatccttcccttggtggaatggaatatgtactccaccataccctttctctagttgcaatagcttacacaatgttgtcagg

SEQ ID NO: 604 - DNA, 521 bp, Avena sativa
  modified_base (434)..(434): a, c, t, g, unknown or other
actataatgaaatgaggaaaattaggacctgaagcttctatttcgattgaaaaaggcgaagtgacgagtacacactacaagcattttctgctgatattcgtgaaataccaaaactagatacagttattcgcatggctggaatggatcctagcttgccgacctttataattgccgagtgtgtgctaatttacttagatccaacttcaaccgatgcgattgttagttgggcatctgaaaagttctccactgcaatttttttcttatacgagcagatccatccagatgatgcatttggggagcaaatgattagaaatcttgagagtagaggatgcccgctccttggtataaatgctacaccaaccttaggtcacaaggaaaaactatttctgaaccatggatggaagagagctgttgcacgggatatgctgaaaatntataatgatttcatcgacagtgcggaaaggcgtaggattgagcggctagaattgttgatgagtttgaagagtggcacatgatgcagg

SEQ ID NO: 605 - DNA, 837 bp, Avena sativa
cttatcccgcagtctggcacgttttgctgcacagcttggacctgtcggttgggaagttgcatcgaagcgaattgagaaggcccatccctcttggaataacatttggtcgcgggtgggtaggagatgacgaatcaccgaacacattgcagccacctgtagcgacttcttcgacagcagtaacacccccaagcagcacagcggcatcgagtgaacagcaaactgttgatcctgccggcccaagccattcagcagggcctcatccgagcgtcgattctcagacactaccaagtatgccgtgtggatcgttgccgcaggtttcagtagaccaaggtgaacatgctgtggagatgaagagcagccataatgttcatgaacgggcagccaagcaccaagctgtgaatggttttaattctgtgccaggatcagtcatgtttgcatctaccgcgcagctggtcgcgagccggatacagacacatacagccgattgacaagagcatagacccaagctcaacatggttaatttgacatttggaaacatgattccagtcaacgggtactgtgggcgccaagcaaggacttcacggaatcctattgctctagtgttgattttttcgagtcgctgttgctctgcagtccgtggcctggtatccccattgtttgaatatgtctgtcgtgtaattgcttagtttacttagttaggatagcatgcagattgcagaggagtgtagagggtgtttaacagcataattaagttgcagtcagatattaggcaagctctgatgtgtagaaaccacaggggaaccatctgtatagattatatttggtgttattatgata

SEQ ID NO: 606 - DNA, 596 bp, Avena sativa
ctggctctcaaaggcccccgaagacttaacgaagaaccatattccggcatatgaaattgatgagcatgcgaggcgtgaaagaatccctatggtcctcaaggcttacgcacaccagttcaatcaagattttacaagtttcctcaagatgcggtccaaggaactggtgccaagaggccggatggttttctcccttatagggaagcgttcagaaaagattggctctagattatttcatatgtgggaaatgttagctcagattctttgtgccatggcttcagatggtctcctcaacaaagagaagtttaattctttctatctgccaatgtatgcaccatccgaccaagagttgagagagataatccaagaagagggctccttttcaattcatgagatgcacgtgaatgaccttacaggtgatccagaactggatgtgaccccaagcaattatgcaaacatgatgagagccgcctttgagccaatacttgtgcatcattttggtgaggtaatggatgatttcgtgaggacagtggaggagcggtggagtcttgaaggaagcttgcatgaagagctttaaaatatcagtggttgtgctcctt

SEQ ID NO: 607 - DNA, 1055 bp, Avena sativa
aaaagggcttgatccagaatgtctatccggtttgttgccatcagaaccttaattttgtttgaagcttcaaaaccatcaagttggttaagaagctcaagcatggtgcgttgcacctcactatcaccgttgccagttccagactccattctagcagatccaatggagtcaatttcgtccatgaatataatggatggtgcatgctccctagccataacaaagagctcacgaaccatccgggagccctcaccaatatacttttgaaccaactcagaaccagatactctgatgaaggtacagtcggtgtgatgagcaactgcacgtgccagtaatgtttttcctgtgcctggtggtccataaaggagaacaccctttggctgggcaattccaaggctctcaaataactcaggatgcttgataggaagctcaatgacctctttgatctccttgatctgctgatcaagacctccaatcatatcatatgtagaatctgggaccttctcaactttcataagattgaccaatggatcaactttgcttggcaggatcaaatggagcatatagctatcattccgaagagcaactcttgttgaaggtgtgatttttgtaatatcgatgctcttatcaatatctacgacatatttgccttccggatgcaccttgactagaacctttgacttgcccatgaccttcaccacctcaccaacataagagccgggttcttgaagcaactgtagctcttccctaagagctctaactttggagttgaggtcgttgcgctgggcctcgaggcggttgaggttgtgggtgctcgtccggatctggagctgcaggtcgtggatgtgctgcaggtagtactgccgcagcccctcccctccgccgcgcgcgcccttggccgccgagtcgtcgccggacgcggccggcgtgggcttggagacgtccatcgccaccgtcgccatctcctccgggtcaggagctgggctctgttcggtttcttctgcttgcggtcgacgagagctcgattcctcgggcgcctcttcctgcgccatccccggctc

SEQ ID NO: 608 - DNA, 870 bp, Avena sativa
cccgaccacgagccccaaccatggtggctgattgaggaccacggttcaattcttgtttcaatgcaacggaatacaatgttattggagtgcatttcaatcttagctctgtgcaagggtcattgcaaccagtgtgtacgtgtccgggcatctcggctatggcattaccgtgatgaccttgagactcgtggcagccttgagaccggtgaagtgaaagacatacacatgcttatcatagatgaacctgtcaaaaaatgagagtaatcagggaccactaggagaagcgcgagtgaataggttaagatagctcagatcatatgaattctataacattctttatttacggcttctctgaagagtcagcatttatctgctagctctctacaaggtcatttcagctcctacataaaatgaagtgacctcctcctctgcggtgctcggcacgggcacgacctcactgtgttgcgacgtcgggccaagatgctgttgtacagtcaccagtccttccacgatgtacacgtctacaagcatcggtctttgtctgtgggagcaaaagctagagcagaagattttagcttatttcaattcaatgatggccaataggagtcaactactcttcttcactcagagagcacaacagatattgcttgcccgccgcacttccttatcaacttccccaaggcgacaaaggaagaattcacgtcaaaaaattcaggcataaaacgaattgagttaaacaaaaagaccgatggcctagcctataccatggctgatctaaattttgattgttaggtcttcaaattcaaagaattagaaaaccattttttctgttaacatggtcgtgagtataaggtaaaaggacttgtatacaaa

SEQ ID NO: 609 - DNA, 504 bp, Avena sativa
cttagtgtccttccaaggtgaatgcgctgcctgttcctgttgctgctgttgcttgtggtggcttcttcacccttgcgctgacctcagatgggcagctatggattggggagcaaactcaaacttcgaactcggcagaggaagcaattccagtgattggaggccacaaattatccctagccttaaaaatgtccgtgtaatccaagtagcatgcggtggataccactctttagccttgactgatgagggtgaagttctctcgtggggacatggtggacacggacagctcgggcaccccaccattcagaatcatagagttccacttgccattaaagctttatctgaggagcgaattgtctacattgcctgtggaggatcaacttctgctgctatatcagacaaaggcaacttgtacatgtggggaaatgcaagagattgccagttaggcgttcctgatctcccagaagtgcagccgamtkccsgtkrawgttaattttctcgccgacg

SEQ ID NO: 610 - DNA, 654 bp, Avena sativa
gtcgagaaagtattctcatctttcttttgtacatctaatcccgtttgcaaagagttgacatttgcactgaattttacattatatccatgatctacaattttcctgataataaaaattacaatggtgaaaactcgtgtatacatgtggcatgctatctctttgttcatttacatagttacaatgctgtatgtagaggtagttcttcatcctgaactcagtttccatcatgattcttcttgcgcctcccattagatcctctgttccataggacttcggagtcaattgtggtgagatgttgatcatcaagcctcttccacgtcttgatagacttgactccttgccactcgccgctctccgtcttctcaagctgcacagacaccacccttgctctcctcgaccacccggcctccccgtatgcatggtaaccgaacccgccagcgtagcacagctggatgccggtgagcttcccacagaagtcgtttaggtgatcatgccctataaaggcagccttcacatctccagcttccaccattgtggtgaagaagccggagttgatcgatgcagagctgataccctcctgcttcactcctgtgaaattggatgccgtgaagctgctgaactccggcaatgggatgtggaagtacgcgagagcag

SEQ ID NO: 611 - DNA, 814 bp, Avena sativa
cacagaataactgcaggttgcgatatactgttaatgccatccagatttgaaccttgcggtcttaatcagctatatgcaatgcaatatggtacaattccggttgttcatgcaactgggggccttcgagatacggtcgagaccttcaacccttttggtaaaaaaggagaggagggaacagggtgggcattctcgccattaacagtggataaaatgctgtgggcactgcgaactgcaacgtcaacatacagggagcacaagccctcttgggaggggctgatgaagcgaggcatgtcgaaggaccatacttgggaccatgccgccgaacagtacgagcagatcttcgagtgggccttcgtggatcaaccctatgtgatgtaaacggggcctggtaggttcaagaggccgtctcttcgagctctgaagacatgttcctcatcggtccgcgacttggaaactggaaagatacaccctgtacattacatgggaggcggtcatgttatacagtagaaagacccaaacgaccgttcaggtttagccctgtgctcctgctgcttgtccggttcggagtacagtaaacgacagttatgctgcgggtgacagattcgggtgaatgacagtaatagttctggggaataagaagaggatgctggtgggagatgtgttggttgggcacttgggcttcacatggttaaacactagacgggcagcctctcagggtcatcagaaatcgaccagtaactgtttagttttagtcaactttgttacctctgtatgttgtctctagctgataaaattttggtgagttggagaactg

SEQ ID NO: 612 - DNA, 888 bp, Avena sativa
catcaaattttccaaagaaggtaatatatatgctatggttaaatgttctaggtgccattagggttaacatctggatgtccatttgcatatcgttgcttctgtgttcagtctatcatgcctttcagcccattgcacaggccctggtaccacatgttcttctctacagacacaggttggagtgaattggcctagaaaattgttgctcagctagctgcgttcaatctttttgaaaactaggtgtttgtcgatttacatgatagggtactgtcgtttgtataagtttttttttgttaccagtcttctgatcctgccattgttgttctctctgtaggaatcaaagttccgctgcagcgtcaccatatcaagaatctcctcttgccaaaaatggtggtacgctggttgtaaccgctgtcatcaaatggctagagtgtccatgtcatcctatgcagaactgcatacgttacttgttgtgatcacttatgtccatccacggatgcaaccctcatgtactggttctcggtcattgcctcagaccgaacaggtgaggttgaatgtactctgtttggctcgctcgcaacatagatgattggaagtcatattcaacgagtgatagaacttaaccagccaaccaaggatccgatatttaattacgagactactgctaggcaagtacggttcccacctcctgaggcttctaagatactatcttgcaagtatagatttgttgtgtcggtatctgaatgaagtttctagaaaatgcaaccatcattcgtggtctggaaggtcgaggcttcttttccaaggattcaccgcctttccttgatcgacactgttattcctgccacttcttgggctatagttccacctgtcattcccctggtcacttct

SEQ ID NO: 613 - DNA, 481 bp, Avena sativa
ggaccaaggactttgtgcaatgcatgcggactaatgtgggcaaacaagggtttcttgagagatgtctcgaaaaatcctcatgcgcctttgcaagtagtgccaccagcaaccaatgacgctcagaatggaactgccgaagcaccaattgccgagcaggaaactctggcgctagaggcaccaccaccagatcctgctcctgatgccaatggccatgatggccatgattcatagccatcaggtgatggtttcttcaagagtatgctgcatatggtcatagaactggaggcttgccataggcaccttatggacgtacggatgaacttactttcttgctacaagtgtagataatagtctaggtcagacatttgaatctttcacaaatggcgctgttagcaacagcaatgtcctcctgtatggttgcttttccgttttaaaatagtctgatgttgatgctggtgcctgatagccaaatgactcgagg

SEQ ID NO: 614 - DNA, 892 bp, Avena sativa
tcagcttctcggctaccgcgatctgagtccgtgtgatgcttgacaggtataccagcgcaaggttatcctgaatcctgtcattgaagagtctatcgaacgatgatggagacagctttggcatggaggaaacggcatcagcaatgaacctgcctatcttgttgtcccctgccacacggccttccacaacatcatcagaatatttgtagatctcatcaataagaaggtatagcttttgcatcgaggactccattccttccaagtcattcgggagcttctcaacaatcgtagacttcagcaactcaaatccaactttttctgcatcaagcatcttcaggtccagaggaatttcctgaaattgtgcggcaaggtgcctatctcctaaagacaggttggatgagacataggctttgatggaagcctcgcccatagtgaagccagtatcgacagtcagatgaatagggctttgcacttctcttgaataaaattcgtggataagcgtactaccccctgaaacaccaaagccagtagagaaccatcccacaatcacttccttggggttcaccttttggtgcgacacgtacatgttgtggtggtactcgatgtcgagagcaacctggtcggcggactcgctgtgggggacgacgtaggagttgcggacgtggacggtgccgtcggggaggacggagcccaggagggtgccgatgacgcgctccgcctggtcggggcggcgcacgaagctgtcgcagatggtgaacacgacgacggcctccacccgcgcggacgtcgaggaggaggacgaggacgacgggaagaggagcgcggggcccgcgccgcgcgcggaggtctccggtgccgccatggtgcaggcaggtgagggcggcgagakcccggg

SEQ ID NO: 615 - DNA, 657 bp, Avena sativa
cctgggcaaggttgtgagcctgggagcgtgcacgttcctcgcctcatggacgtggagtcatataaagcagttcacaccatggtgagcaccatccgcggaacaaagaagcctgatctcagccctgttgactgtgtgaaagctgcctttccaggaggctcgatgaccggcgccccgaaagcgagatcgatggagattcttgactcgcttgaaagcagcccaagaggaatctactcggggtcgatcgggttcttctcgtacaaccgcacgttcgatctgaacatagtcatcaggacagtcatcctgcatgatggggaagccacggtcggggcaggcggggctatcgtggcgctgtcggatcccgaggcggagtatgccgagatgatgctcaaagcaagaactcccacaaaggtggttgaagaatgtagccaagaaagagctcactgcaatccggatcgatcggattcggtgcggacgactataagttagaagaagggatgacgacatgagcctgtttctcactgaagctcgggcagcagtgactatagcacggttttgtctctgctgctaagtggtcctttggcggaagaatggctggatggaagtcaagatgatgcaagagcatgcagaaaatgaagatttgatgttggcactgcatac

SEQ ID NO: 616 - DNA, 344 bp, Avena sativa
tttttgtctctaaaatcaaagactgcatgaacccagtagtaaaaagtatacatcatccggaaaaaaaagttgtacatagtgtcgggctctaaaggtgcaaaaactatggcaggatcctccagctctgtccagccaagctttgccgcctttttgttttttggtaatttgccacaccagaggtcgaattggatttttggccttcggtacaaaagtgaagatatccctttgaacttcacaagacatgctgataattcaaacttgtaccatccaattttacttcaaaattttcagcatccccgcaaaacatagattaccatcatatatttctgtcaagatgcagaaca

SEQ ID NO: 617 - DNA, 819 bp, Avena sativa
gacggcctcaagaatctcacactcaagttcaacgacgtcgggcttgacactaccgacctcgtcgccctctcaggtgcccacactttcggtcgcgtgcaatgtcagttcgtcacggaccgtctctacaacttcagcgggacgaaccagcccgacccgtccctcaacgcggcttaccggtcgttcctcatccaaagatgcccgcggggaggcaacggatcttctctaaatgacctcgatccaaccacacctaacaccttcgacaagaactacttcacaaatctcgaggtgaatcgtggcttccttccgtctgaccaacagctcaagtctgacccccttgcgtcgacgacgacggcgccgatcgtcgataggtttgccggtagccaaagtgccttctttaagaccttcgcgaattctatgatcaggatggggaacattcagccgctgacggatccctccgtgggagaaatccggaagcactgcgcatttatcaactaaacttggcgagaagattacgtgtggattgtacaagtgtggcatgtgttgtatgtgtaaacatggatgtaagagataaatttatctcttattttccagctgaataattggcatgtgtctcaagccaatgtaacatcccttgcatgcatgctagcttcttgttgtcggttgtgcaataaaaattgcaaaattgtataacccttttttcttgcttttatgtgcatcatggtcttcgatccgaagcttgacaacgatgtcgagccgggtgatctatagtcgcctcgtctcatttatgtgctcaattacaatcattcaacatttcaagca

SEQ ID NO: 618 - DNA, 645 bp, Avena sativa
ccccagcgctgacacgctcaaccgcctccgcggcgaagttagcgagatacacactgtcatggttgacaacatagacaagatactggacagaggcgaccgcatctcgcttcttgtggacaagacctccaccatgcaggacagtgctttccacttccgcaagcaatcaaagaggctcaggagagctctttggatgaagaatgccaagcttctagcggtgttgactgttgttattgtgctgctactttacttgctcattgctgctttctgcggaggcctatccctttcatcatgcagagcatagaacactgtgggtgcacctcaattggagctcctgctcagcctccagagctaaaacctgatgttttgagcaaacggatgcgaagctgagctgtccatagagtgttctagtcatacaagtcaatatgaaatgtttgtacaggacggggtctgcatgcaaagtatgtcgtttgttgtttcgggtacctgaacaacaaggtgcgggtttacacttcgctgtagttatccttttgatgcggtggttctgtgcatgaattgtgtatcttcattctctcttgctgccattgtgtttccggatcttgtggcactggttatgaatgctcaatgcacctgttcacaagaaaaaaa

SEQ ID NO: 619 - DNA, 769 bp, Avena sativa
ctaaaacccattcacaaacaaaagttcccttatgagattaatgagattgcatggaataaaacaggagatatgttcttcatcactactgggcttggatttgttgaggtggttaactatccttccctagatgttgtctgcaaattaaatgcccataccgcaggatgctattgcatagcaatggacccccttgataggtattttgctgttggaagcgcagattcacttgttagtctttggaatgtcaaagaattgctctgcattaaaaccttcacaaaactggagtggcctgtaagaacagttagcttcagtcacagtggagaatttcttgcatatgccagtgaagatcctttcattgacattgccaatattcagactggacgatcaattcatcagattccatgtaaggcagctatgaatagcgttgaatggaaccctaaatacaacctcctggcttatgcaggagatgacaagaataagtaccaggctgatgatggtgttttccggatatttggtttcgaaagcacataatctgaggcggaccggattattatcagcaaggtctctctatagagaccagattttcatcagcaaggtctctctcactctatagatacagctatctaaccttccagatgtaacttgtgttcagatggcttgatgggggtgttcggtatgagggactcaacctttagcacctttttttcggttgagagatggaatagacctcgtcctacattagcactaagctagttcaaaatgtataggtcat

SEQ ID NO: 620 - DNA, 850 bp, Avena sativa
ccgggattggaatttgctcagtcccagggttctgcccttgcaattgatgaaaatggccggatcatcttcactggcagtggagatgagatgacagacttactttccgttttcttggagttcaatgtgcctaaaacgagaaccaacgggttgcaaggctgcatatttagttccatactttgacaggaaaaggggccgaaatagtagccaatccaattcaaaattagcaagcacagctgttgatgcttcagaaagcacggcaaatgtgaaggcaaaatctccattgaagaagaaacagaaggggaaaaacgtcaatgaacgtgacatgtaccagaagaattacttccatgctagtgaagcaattttgtcgatcctcctgaacaagaaccagaacagctctacaatggtctcactgagaaaagcaggccctgagatcagtgaactgttgacacaatgctctattggcatcgctggagctggcttggctgttcttctgtcagtcgtctgcaagattgctatcggtggaaggactccttttgccgctacccggctgctgaacacaggtgttgggtttggactcttctggctatcatatgcagtaaacggattgcgggacacgatcaccagcatatttagaggcccagctgacacaaacatggaggatgaagctgcagtgagaatacagcgaaacgtgaacgatattcttttcagagctgtaactctcttggcggtcgctgcgttgaagtttgcctgagctgttcacacttgggacggatggtttacctttttggttcaggggtacagtaccagtacttgtgtaggattaagtgccaaatgcattcatcataataca

SEQ ID NO: 621 - DNA, 753 bp, Avena sativa
agataacttgctgtacattgttttggttgtgaatctgatgagatgtgaagttgtaaaccaagccttagagctttggtaaacactgaccagcaggccgcatacaatcctaaaacactttgttgtatcggtatatgctagggagcaaatcttctaaataagataatgaacttttgttctttgatgctacagttcccggaggtgaccaatggggttctcctcttgcagacgtggatgtattatgagcggggagatttggagaaaatcatagacagttctataggcgatgacgtggatgttgtacaagcctgtaggtttctgataattgggcttttatgtacacaagatgttacaaggcatcgacccactatgtcagctgttatggacatgctaacaggcgaaaaggatgttgactctgggaatataagcaagcccgctacgattagcgacttcatggaccttaagatcaggagcatgaggagagaaaataacttggctttagcttcaaccagtaagctgatgtccaccatcatagcacaggcttctcctttgttgtctcaagagacaacacgaggctccataacattcactgcaatagcggatcgcgagtggtcagaggttggtcaggaaatatgaagaccatgcggacaagtagcatagctgaattaccttttttcctatttttcttactggtggatagattcacttcgtttgtagtgtaacaactattgttggtccaagagtccatgaagttgt

SEQ ID NO: 622 - DNA, 771 bp, Avena sativa
gatcaactcacccctctgtgataccgttatatcagaggtagctcagagtcatgttgatttacggtttcttactttgaagcatcatgcatgactaataagttttttattttcttggattagagcctagcttccgtcgcgcctaaaagttcatacgcaaaatccattgatgacgcttcaaatagatacctcttttcagatcatacaagtgcttaatccggctagccgttgctacaactatcatctacctcaggtgttctcggttgcactttttgtagatggatttcggtcacgcggtcgtctgcttttgatagttctggctttggtgagatgatggagctcaaatgcactggttctcgaagaagaaacatcagcagcaattccttcgaagcctcgaaaagtcctggctgctccgagacgaaacatcagcagcaattccttcgaagcctcggaaagtcatggctgctctgagaccacacttattcttttgttttttttaccgggacttatttcaggacattcaaatgtgcacaggatgtctttaaacaaactttggagatcttgtctctgaaaatccatgaagacaaggcgtgcattgtcggcgataatcaggtgattggactctgcttgcatcgatatccaggcacacggacataatccagtgttgcatcgaagaaaatacttcagagaactgacaaaacaggaagtgaatcccactcagcaaaacttgctgccattacctatctatagaagaaatacattgttgtagataac

SEQ ID NO: 623 - DNA, 799 bp, Avena sativa
caagtgcctccagcgatgctatcttaaaagccagtgctgctagcgaagcaatcgagaaggtttacaagggacagtctgttggtccctccacatttgaagcgaagttgcagcctcatcttctatggaatcttgatcaggtgaaagagaacatcgatacccagacacatcaactgatagatgctcgagggaagcctagatttgacggtgcagttccagagccacgcaagggaataagaagtggacacgtgcctgggagcaaatgtgttccttttcctcaggtgcttgacagttctcaaaagctattacctgcagatgagctccgtaaacgatttgagcaagaaggtatatcactggatgaaccccttgtgacctcttgcggcactggtgtgactgcatgtatattagctttgggtcttcatcgccttggcaaaaccgatgttgcagtatatgatggatcatggactgaatggggtgctcaccctgataccccagttgctactgctgtttagtcttgtgtgcagttgatggagggccatctatggtagttgcacttcaccgcggttctatggaagaagggcagaaggcaaaggaaactgaagaggtctggtggggaaacgatgctgttcgacgttttcaatgtaaattatcgaaacagagaaaggtggaatataagctatgtgaattataatacttaatgatgactcagagggtctcttctttgttcctgggcaataatatacaacaaaataacaatgccaatgtttatagacgtagctttggaatttaaaaaaaagaaaaa

SEQ ID NO: 624 - DNA, 738 bp, Avena sativa
tttgaaaataatgatgttatgagaacaaaatcaaagggtctctctgaaatacagacaacgatgaagatgttatgcctgttggctctaactggcctgcaacccatgagtttagttactttttacaaattaaatcctaagatccataataccaacaagaacgacggacagtaagggtaaatacaacacatacagtaacaattgcacctgtatcactaccatggtggtacggtttctgacaattttaggtcaatcaataggtataatttacaggagtccgggccgtctcgcgttgcgggtcagtgttccatgtattggcatgccggcggggttacctttgtcgtctcaccatatgcaccacgaatctttacttccctccattcttgtacaagcgcacagcaacagcacatcacatgtgaaaggaaatcgtcacagcaccctcccgcgatatttaacctttgacgaagctttctccttacacagcaagtgtaacagcaacaggataatatcagggagtatgccataatatcattgcaggcttctgccgaagacatgggtctgttcttggcgattgatgcaatccttgagaacgttccacaggggaaaaagaaggtctttagacacaaagatggctctgaacagcagccaagtaaatctgcatgccactcatcactgtgtgatcctgtactcgagaccatatcatggttgtatggtacaggtgtagaactccgctgagactgc

SEQ ID NO: 625 - DNA, 596 bp, Avena sativa
ggtgtatgtctgctgattttgatgcactaattttcttgctgcagcattctcctaatatagagaggctttttctccaacttaaaataaacttcaacaccaggaaggcattggaaacaggtatcaaaccgatgggaagatcgtttacttgcaaagaccttggaatggtgaagatcaaatgctcaaaggatgatgccagagtccatacgttggcacatatgttcatggcaaatggtgtaccattttgagaagatttatgtccgtcggagtgggaatgctcatctacgtggccagaagtttatgagggagctcgccagggatgaactcattgaatgtgggatggacgactggatgtaagtatgtaacactacttattgtgcggttagcaagtatctagttgggaaccatgatccccatgaagtacgatggtgctttcaaagcttcgacggatcctagtgcttttttggtaacatgtatgatggtaccgtgtgtgagtatcaaactgttggaatgttctgctacatagaattctatgtagtaactctgcttcagaacagatatgggtactcctcgtttgtgcaactaagttgtgtttcaga

SEQ ID NO: 626 - DNA, 819 bp, Avena sativa
gtctgttccccacccgcagcagcagcaaagcacagtcctctccctcgtgctctccgccccagatcggatcggatcggatcggatccctgtcccgcagtcctcgccccatcgcattcccccgagtccacatctgctgtgtttctacacaaagcaaaatgggtgcatctgcagctactggtatgcagatggtggcggcgagcccttgcatccctgcctgccagcgagttcttgggtcaagatctgtagtttctgcattcgggagggcacttagcaccagaactggctttgcgagctgtgtgcaactgcatccgcaagaccacttgttgcttcaattacaagaggtttgctgtgagggcaatgtctcagggagctgtccaaggactccccattgatctcagaggtaaaagagcgtttattgctggagttgcagacgataatggttatggttgggcaatagccaaggctcttgctgcagctggtgctgaaattcttgttggtacatgggtgcctgcactaaacatatttgagacgagcttgagacgtggaaagtttgatgaatcacggaagctgcctgatggatctcttatggagattactaaagtctatccgctggatgcagtttttgacaccctggaggatgttcctgagcatgttaaaacaaataaaaggtatgcgggatcctcaaaatggactgtgaaggaagttgttgagactgtaaaggatgattttggcagcattgacatccttgtgcattctcttgccaatggtcctgaggtaacaaagcctttgctggagacatcaagaaatggctatcttgct

SEQ ID NO: 627 - DNA, 701 bp, Avena sativa
tgcatctggatatgaggagaggatcaggcaggtcatgttgagcacccgttttggtggcccccacaggcgcatccatccggagtctttcttacacaaactcatggccggagtgcttctgccagatgaaagctaggaatcatgctgaccggtgcccactcgacaatataaatgatgtccttgaaagtcagttgcagtcaaccggtgaggcgtcggtggcggcaaacgccaagataggtgatgtgtagttaaaagatggctccgtggtaagctacgatttattttcctcctcgccaaggttgaagtgtgctggcggtttgctgtaaatcgcgcaagggatccttgtttttgcctgtgtcaaactggagactcaaagaaggcgaatggctgagaggtgatatatgtgttttttgggcgtgtcgaaagggatggaccgaactcgtacagttgagttgtgaggggtgttgaatgctaatgtgacttgaatatttgggaactttgttcgttttgctcagtttagctttgatcttggttcgtacattgtgtatgattgctgacatattctggaacgattaggtgtctgataactattgtggatgacagtgggatcactgcaatgataagtacctgtaggcagttgtgaaattttagttttattactagcaaaattcttgttccctgcggaaaagaattgctgaacctat

SEQ ID NO: 628 - DNA, 702 bp, Avena sativa
tatctccgtggctccgcgcttgtgcccaagccggtgctgcgggtccttgaccagcagtccccttatcatgtccctcgctgagaagctcactagcggggactctgggaaccgcaagggttggccaacaacattaaaaagcgtagcccggttacctgaacccttgaaaggggtcttgccaaacaggagctcgtacaggaatatgccaaaggtccaccaatctaccgcactgccatggccttctcccttgactatttctggggccaagtactcgtgggtgcccacaaaggacatggaccgagcatcagttggctccgcgatcatctcagggaataggttcacttggtttgatacctctggctttgcttttctccttcttggattttggattttggacttggacttcgagaagaaccgaggcccaaagcatgtggttggaacaacacacgatggctgaatgcaagcaggttggacacagtatgctgcattattcctctgcagcgcatccagggcaggatttgctcccctgataacggtggggctcgttgaacaacgaagagagaggtcaaaatcggtcagcatgatgtggccatcctcccgaactaggacattttctggcttgagatcacggtatataatcccaagcatatgcaggtactccaatgcaaggagcacctctgcaacatagaactttgcatcccggga

SEQ ID NO: 629 - DNA, 883 bp, Avena sativa
  modified_base (883)..(883): a, c, t, g, unknown or other
ccgtgatgtcagtgagaagattgcccttggtatggcaagtaatgtaggtgcaaagggtggggaagtcatgtatgaccagaggctctttaaccaggacaaggggatggactctgggtttgctactgatgatacgtacaacgtctattccaaggggctcttcagcgcacaatccagcatggccacactttacaagcccaggaaggatggtgattctgaagtgtatggtggcgatgcagatgaacagttggataaggtcatgaagacggagaggttcaagcctgacaaggcattttctggtgcttcagagaggtctggcaaaagagatagacccgtggagtttgataagcaagaggagaacgatccattcggtcttgatcagttcttgactgaggtgaagaagggaaagaaagctgtggacaagatcgggagtggaggaaccatgaaggcaagtggtgggtcttcgaatagggatgattacgagggtggaggatctggaaggtctcgcattaactttgaaagaggaggccgttgaggttttgcaatgcatgttgtctctgccttttttgcaggttctccgtgcattttcgagtatcatcctgaacgacatgaactttcttacataaggaagaacctgatgttttagatgttggcatacacctgcttgttatattttcgatgggcgtgttgaacagtgtacctgccttagatcctgtgatgcttgtatgttgtatatcttcttatgacgggatccgtgaacatcattgtttacacatattcataggctcttccatgttctgttcactttaaagttgtatcaactatcgagtgacaatatatcttgctgaaatggtatgttccaacaaaaaattaaaaaaaaaaaaan

SEQ ID NO: 630 - DNA, 943 bp, Avena sativa
ttccacttcctcaactgcgccgtcctcacccttcggcccccacgtcgtctactactccgccacccccctgtcagagtatgatacgattggcactagtgtaaaagcagctgttgtttatcttggagcagcacttgtaaagcttgtttgtttagcgacgttcctcaaagtacctgatgcaaatgatagctttgatccctaccaggaattaatgaagatcctaattgggtttatagatgttgctggcctttattttgctttgacacagttgacccacagaaacatctcccagaaccataagttccaggctgttggtcttggctgggcttttgctgactcagttctgcaccgtctggcaccactctggatcggggcacgagggcttgaatttacttgggagtacatatttcaaggagttgaagcaaatgccaatcttgtgatgaccctttcccttgctgcattaggctccttgatgtggttgaggaagaacaaaccaaagactctaattccaattatttatgcatgtgctctgcttctggcaacaatgccatctatcaccagttacttgaggagatcattagagtggcagactcccaaggtggttggattcgagctcttctcctcgctggttatggctttcatcagctggcagctgttctctgcttgtcagagaccgatgtaatgaacggacgaaggactacagagtttaccagcactttgatgctcctgagatgcccttttttgtacttaagcaaaattaggttgctgcttccagcttttgccagaacgataactaatcttgggaggtcaattgcagaacatgttacttagcattcttttctttgtgggctattgtgtagaaacatatgatcttatgagtgctactgttacagatgctcttgtaggaattgagctaaaatgtagcaacatgctcgatagcattgca

SEQ ID NO: 631 - DNA, 868 bp, Avena sativa
  modified_base (4)..(4): a, c, t, g, unknown or other
tttnttttttagtggagggtatcgtatcattgttctgtattgatgatgatggtgatgatgttagttttgtactatttcgttgtagtgtttatacctacgtttgtacatttcatggtgcttacatatactgtacgtgaacctgaccaatacctgggttttcaaggcatcgaccattattggcacacttcttacatatgagtagtatatatcggatagtatatcacttgaaatcatccggttctccttaattagtttggcttcctgcagttgagcctgatctccgtccgtgtcccggacgacggcagcaggtttcccatcttcaccatggccgtcacgaagtcggtcgagaacctggtcggggtgttgctgtacgtcctgaccagcgcgtcctgcgagccgccgttgaagagctcctggtcggagtgcagcaggccgcgccgcgccaccaggttctggtagtatgcgttgtcgaagccgtcggcggtatgcacgtcgaatggcgcgaggttgccgtcgccgcccgagagcgggcacgtctgcttccgcagcgcggcgaagctggcgttgacgttgcgctcgttgtagatgcgggtgcggaagaactggcactgggagcggccgacggtgtgcgcgccggagagcgccgtcatgtcctgcggcgacaggttcttgttgccgaacatggagatgagcgtggcgaggctggatgtgggccctgggaggttggagttggccgcgctctggctggccgtgcgcgagtccttgcgccccagcggcacgttccaggtgggccctccgagcaggttgactccatcacgggcggcaagggcgagaatgtcggcgcaggagacggtggccttgcaggaag

SEQ ID NO: 632 - DNA, 614 bp, Avena sativa
gcagcggtatgtgtactgcacgatcctcgacagcatagcgaaggtgacgggcatcataaagttcgacctgcacgcggagccagagagcgacaagaagcagctcgaagccgggggcaacgtgtgcggcatatatgacctggggcctggcaggtacggttcggaggctgttttcgtgcccaaggagccgggtgtgaccggagaagaggatgatggctacctcatcttcttcgtgcatgatgagaacacagggaaatctgaagtgaatgtgattgatgccaagaccatgtctgctgatccagtggcagtcgtcgagctgccgaaccgggttccttacggattccacgccttctttgtcaacgaggaacaactggaacgacaagcagaggactgaactgaaccaggatctccatgttctacacgctggagaaataatggctcaaatatttgtacgtacgtatataggaggtaactagtatatatatataccaccaaatccatttgtaaaatgaattaattgctagtacgtggaacgggaatacgagatacatatacatgtactagtgattttacatatagtattatgatgaaaatcgattttacggaccctagaaaaa

SEQ ID NO: 633 - DNA, 1007 bp, Avena sativa
caacgcagaaggacataatcctaacatgttaaaacatccaaaattccagatgcagttctcagacttgacagcatttctagatcatatactagttaacaacaaaaaagaagaaaggggccttaagtcgtggccactgttttattcctttcactgacaacgtttccaggccgacacagagcttggcgaatttgcagcatgagaaaccaaccatggatgcattggaggccaccatgagcatgcaagccaaccttatatacatgctggtgaaggttgcctctatatgactgtcccactaggaattaaggcgtccttgatcactgtgacaatgccgcttttgatgaagtacccatcagactcccttgaagcttcttggataccatcgacattgattatcttcacattttcaccaattcgagcattcttatcgattattgctttcctgatgtgtgcattttttccaattccaatgggaatgccgccagtttcagaaaggactttcttgtcattttccgtctcataatagtctgcacccattagcagggaatcctctatcactgcgccttccgatatgcatgaacgaagtccaacaactgaatggttgattttgcagtgattaataacacaaccttcaccaataacactgtcagtcacatcagcgtcaagaaccttcgaaggaggcaagtatcgagattgtgtatagattggagcggaacggtcatagaagctaaaatctggaaccggcttcttggttattcccaagtttgcgttgtaaaatgcctcaatagtcccaatatcttcccagtagccatcatataggtaagcttgcaccctcaatccaatttctgttgcaccaggaataacctcacttccaaaatcatttgccaaaggaaaattttcacggagaagccgaagcatcgcatctttgctgaaaacataaatccccatactagcaatgtaaggtaattccttggccctttcagtatcaaggcccagtatggtggtatcaa

SEQ ID NO: 634 - DNA, 963 bp, Avena sativa
ggacttgggagacggaaacacattccaaaacgcagtgtctcgtcaccagcaccggtaacaatagtctgtccatcaggggagatggctaaatataatactctgaatgtatggcctgtcaatgtggcaagctttgacattgttggggactagttctagatcgcgattaattaactttttttttttttgaacgcaaaacagcagatgacattgaagcatcccatacaatttataagttgtggctactacatacaagagcagcagcagcaggcacatattgagcaacgattgaagttcacgctgccagcctaaaaagaaacagaactctcaacgcccgaaggtaaccaagcaactcaactcaacggttgactgtagttgtactttcagtgcagttttattacaaaaagcaagaatatcatccattaggtgtagcttgcagcaccggctgtcgcttgaaaagaaaaatcacagatggatcggcatttcgaaacaccgtgaggattatcatcaatcaggacctacaggaagtttctaatgtccaacttcctgacgtcaggcatcacctcatctttaaactcctccctctttagttgaccctccattgcttcaacacattccttcttaatttctgacagctcgcttttagcaatttgcatttcaagttcttcctcgatcttgggaagatcctccttccgaatgccaagctttttgttaatcttatcaaactcagcaacaaggagagccatattcttcttgtcactcctcagaagtggcttcttaatgtctttttcaactttctcgagagcttccatcatcaaagcctcaacaccaagatcatctataagcccactctttttcctgatctcctgcagggtattcaagtacgaccttgcatcagggatgcccttcgtgaaagtctcaatagtatacttaattctctgagaatcagaaagaagacctgccttc

SEQ ID NO: 635 - DNA, 481 bp, Avena sativa
tgactagcaaatacactcaagaaatgcaaacgattgatgagcttctgaatgaaaggaatgtaatccatgcatgctataccaataatccacctctaaaacggagttcgagcaggaacaagacgaaatcaccttcaaaagtgtccaaatttgatgaagaaaatattcagaggaaagaaaagaaagtgaaggatcagcccatggagggatgcgggagtgaagatgataattcaagtgaaaagaaaaccaacgcaaggaagagatggttaaacattgctttcaaagttgacaggaggaaggcgtgctaagcaaagtaaacgtacaactgaaatacagatcattcattctgaccgcatggaaggactcccttgctgttgatcggataaggacatgagaacctcgttccattttttgtgccgcctagtttgtttcttgcaaagattgggctcaaggctgcaaagcctgagctcgagatgtatggtta

SEQ ID NO: 636 - DNA, 528 bp, Avena sativa
cctcgttgtagagcacacgagcagagcacggcagcagcgaacaactccgccgcttcccctaggcgccgcctctaccgctgtcccacccccggccctagacccgcccatctctgctgccgaaggcgctgcgttcagatcccgctcgccgccgaggtcctgctatccttcccgttcccggccgtcctgctcctggagtgattccggtcatcgtcccggccgccgcacagctcggcagctcatcatagtcccggtggctcgtccttctacaagatcttgctccctctggccgtcttcttccccttacccgtgaatcatggaagaggaagaagggtctcatgaagtgaaccacccccatggtagctcattgttgatatccagtgaaacaatgacaagggctccaccacccccatggttgtctccttcttcaataaacatttgcagaccttatcatgttcctttccagactcattttctctgatacagatgatgagggatgtacaagtaacctccagtagatgatgaaacaat

SEQ ID NO: 637 - DNA, 731 bp, Avena sativa
ttttttttacttaattttcaagtccgacaaaatttttcgtttaattttattttacgtagaatacagctaaaaaaactagtcagtaacagagagctctggtttgccataacatcagcccattttcaacagcatgtgcaaggtatcaacgcagcaactcagcaaatgttcaggatcaaacaatcaaatagctattaacaacatatgaattgaagtgtaaaaaagagcgcggtgagatgagatgagtcaggctagttaaatcgtcttccgaacatacacaacaaattgatgccgcatttacacaagagctcctaaccaggtcagagttccagctggtctcagatccttggcctaaccctacggccactcgtgtcaccaccatccgagagctgcccccatacgctctggctcttcccgccactactgcacggctcctcgcacccagcgacagtcctcagtatctctgactgcagagatgggcagttgtccttgaggtaatcaaatccttcggtccggatcacagctgaaagattttctgcagcaaattttaggcaaacagatttaagctccatagcatggtgactatcagccaatgctagggtactcgccactgagaccacagaaatgcctttgcacaagtaagattcacacagcaattttagccttgctaagtcatacttgtctgctgcagccaacaattttgacgccaaagtatcaaaaatagaacccctgga

SEQ ID NO: 638 - DNA, 865 bp, Avena sativa
atgttagattcccaatgatggttagctgacacaagactttctttaatctacatacagattgcacaatcttatatatattcagaaaataacaaggagaaaaagttgagattgtatgtacggttacacagaaatagaaaacaacatggtggttgatctcagcggcttgtctgtagccccagtctgctgattgagtaatcatgcacgagggcaattgggacaatcaacagctcaaaaggcagaattagttgttgatgaaaattcctgattgcaaaggtgccgatgcatcatcaaagcatttaacagtttgctgttggtgcaggtcctattgctgttattccatcttaatgcttgcgccaatagtttctgagctgagacatgtgcaggagtatctcgtccctgccttggttggttacgctgctcgtcattatccagggaggtgctgcctcaaaatattcacggatcaggctctggaaagattctacgttttcttctggtcttttgccgccgtttttcttcttcttgcgtttgtcgcatttcgtgaacaccagtgtcatggggaccttgttttgcccaagccaactagcatagtcaagatcaatcttcttggcaggaatacttgcatctataaggagaaaaactgacaccaaattatccctgctgaggaaataatttctagtaaattcgtcccaatctttacgagcttcctgcggcgctgaagcatatccataaccaggcaagtcaacaaggtaccagctgtcatttattataaaatgattgatacactgggtcttgccaggcttttggaggtgagcgcgaggcgcttgcggcggacaagcgagttgagcagtgacgacttgccgacgtt

SEQ ID NO: 639 - DNA, 636 bp, Avena sativa
  modified_base (634)..(634): a, c, t, g, unknown or other
cggacattttctccggcctatgactattgttctcggatatcgtttttcgatgcttctccttccttggagactttcatcttgaatgtgtttcagatgaaaatggagcatgagtcaattgtgggagatccttcacatctgaggcagatgccagcacaccgccatgataacctcaagacagtgaagatcatgggcttctccgctgcgaagagcttagttgagctgacatgtcatatcgtggagaacacgacgccactcgagtaccttacactggacaccacacgaggacatcctttcgctagctgttcatccaacaaatctgggaagtgcttatcgatgcgcagggatgttttggcggaagctcgtgaagggctcttagctatcaggacatatgttgagccaaaagttccctccagcgtcaagctaactgttgtggagccttgcagacggtgccatggtcctgatctttagatgcaagttatcataagtgccctatgctctctgtgtaatttaaattagaatgtcgaggagcttcttgatcttcaactttagatgcaagttatcacaagtacgctatggcctatgctttaaatttaagaatatcgaggaaccttgctgctgtctaagttaaaaaaanaa

SEQ ID NO: 640 - DNA, 657 bp, Avena sativa
ccatcatggacgccgaggagcgcggcgccttcgcgtcggtgtgggtggacgagcaggggtacgtcgccgaggggcccatggtcaacgtcgcattcgtaaccccggccggcgagctcgtgctcccggactttgacaagatcctcagcggctgcaccgccaagcgactgctcgcgctcgcgcccaagctcgtcgactccggcctgctcacggccgtcggcaccaagcacatcacggtcgacgatgccaagacctccgtcgagatggccttcgtcggcagcggcctgcccgtgctgccggtcgtcgagtgggacggcaagcccatcggcgaagggaaggtggggaagctgatgctggcgctgtcggacctgctctgggaggacatgaagtccggcccggacagggtcgccgttccttacaagtgagaaccatcccaagagctagcgagatcttgtgcgcccgggcaccgtgccaagagccgagcacagttaatttgtgtgtgacagccgagctccatcagtgtgttgtacgtactgtttgtcatcacttatcaagtggagtagctgaacccaaaccttgtactagtagtatgattgtgttgtgtgtgcgcgatgatgaatggacgactcagcaaatgaataatgtattttacgaaaaaaa

SEQ ID NO: 641 - DNA, 744 bp, Avena sativa
ccagatcccgccggccagccttggcgcgttcgtgacgctcactatgctcgtcgccatccccgtctacgaccgggtcttcgtcagggccgcgcggaggttcaccgggaacccgagagggatcaccctcctaacgaggatgggcatcgggctgacggtccaagtgctcacgatggcgacggcgtcagtgatcgagagccggcggctgacctttgtgcggagccacgggctggtcgagaccgacgcgccgctgccgctgaccatcttcgtgctgctgccgcagttcgtgctgatgggcctggcggacgcgttcctggtggcgggcatgatcgagttcttctacgaccaggcgccggagagcatgaagagcctcggtacggcgctgtcgctcacgacgtacggcgtcggcaacatcttgagcagcttcctcctgtcgctggtgtcgcgggtgacgcgcgagagggggaacccgtgggtgaccaacaacctcaacgcctcccaccttgactactactacgcgttcctcacggtgctcgccgccgtcaactgcgcggtgttcgccgtgctcgcccgtaggtataagtacaaggtggagtcgacggagacgatcgaagtcgacatggacgtcaagaagattcaacccgaagcaatagcctgatcgagctgattaattaacaagatacataacctctagtataaaacactgcaaaactccacagtataatgtagtacgtacaagattgcaga

SEQ ID NO: 642 - DNA, 817 bp, Avena sativa
ctgttaaggagctgcaccaagctccggagatttgctctctacctgagacctggagggctctcagacacgggcctcgactacatcgggcagtacagtggaaacatccagtacatgctgctgggcaacgttggtgagtctgacctcgggttgatccggtttgcagtagggtgcaccaacctgcggaagcttgagctgaggagctgctgcttcagcgagcgagccctgtccctcgcggtgctccagatgccctcgctgaggtacatatgggtgcaaggctataaagcctccccgacaggcctcgagctcctcctcatggcacggcccttctggaacatcgagtttacgccccccagtgcagagagcatgttgcgcatggcggttgatccagaaccgtgtgtggatagtcaagcccaggttcttgcctaacactccctcgccggacagaggccggactgccctgattgggtgaccccattgcatccagccgcatgattgtaaatacatccaggttgtgtgtactactaccttatcgccccttgtcccttgggcagcgaccttgtcccgatatggtgatttgtacggatctagatatgattaggtagctgctttttgtgccgtaataagctagtactgtagctgaggtgtagtgcaataagttgtcgctttgtactactatgtatgtataatcgtgtatgtacactaagttgctctgtgctagccttttatctcctcgctttgtactactacatcatgtaatcctggaaaggtgtgtgtatgctaagctgctcgatctgtgctttggtccttgagagctgta

SEQ ID NO: 643 - DNA, 749 bp, Avena sativa
ttttaactaaacagacattcacaattttcttctcattttacttcttatccaaagataatcatacacgaatttttcttgaaacatagaagtttcatcgcctaacagaactaaaaacaaagcacaaaaatctagctttaggagcttattagttctgcaaaggaatccaatccggctgactgtttgatcttttcaatggaacagaagcaacgccgatgtgtatggcagatgagctcagcagaggaccaaacaccaacttggtttggccgctggaaggaatcacaacccctcgaagaactcgcttagctcagcatcatacaagccagggttgtacattgcccggtcctctgatatccacactggcaagggctcagccgaatgcagcatgccctccagcatggttggatccacgccatccaggtacaggggttcctgttgaacaatctctgcgcgagtgtcggctccgtcctggcattcgttccatgagcccgtggttgccggctcaacttccactgggtcggcttccatcattctcaacagctcctcaatatcgaagccctcatcttcccaatctggcagactggaaattggctccaatggctcaaaaacctcctcctcagatgtgctcctcgtagtacttgatccagcttcaggaaaagactgttgatggttgcagtcagagatgacagattccaccacttcagtttgggccttcagtggacttgaagcctcatgaggttgaagcatatctt

SEQ ID NO: 644 - DNA, 955 bp, Avena sativa
cccgggatatcgagactcgagacccgagacttctattctgcagcagcaagcgcagtagtaagctctgctcattcagtgttgcaatcatgccggggctcaccatcggcgacaccgtccccaacctggagctggactccacccatggcaagatccgcatccacgactacgtcggcaacggctacgtcatcctcttctcccatcccggcgactttactccggtgtgcacgacggagctggcggcgatggcgaactacgccaaggagttcgagaagaggggcgtgaagctgctgggcatctcctgcgacgacgtgcagtcccacaaggagtggaccaaggacatcgaggcctacatgactgggtgcaaggtgatgtacccgatcatggcggaccctgaccgctccgccatcaagcagctcaacatggtggatcccgacgagaaggactctgagggcgtccagctcccgtcccgcaccctgcacatcgtcgggcccgacaagaaggtgaagctgagcttcctgtacccggcgtgcacggggcggaacatggacgaggtggtgcgcgccgtggactcgctgctcacggcggccaagcacaaggtggccaccccggccaactggaagcccggggagtgcgtcgtcatccagcccggcgtctccgacgacgaggccaagaagctgttcccgcaggggttcgagaccgccgacctgccctccaagaaagggtacctccgtttcaccaaggtctaaggagcccccagaccatcgccggcggcccggtccgtgcgctcgccgcctgttttcctgttcttaggtccctagctagtactagctccttatgttgtccaagccggtacgccccgcatccttcgtgtaatctcgtgtcgacgaccatggatggactatatgtatgatcataaaagttgatgcagtagcagtactcgccgaactatgtatcg

SEQ ID NO: 645 - DNA, 710 bp, Avena sativa
aaacactctccgaagcttactgaccgtctgagagagatatcaaactccctgaagcttcttagcactcgtccagttagcataacggcacaaaaagtaggcatggaaatgccacaaaaagtaggcatggaaacaccacaaaaagtaggcatgcaacatgtgcagcagatgaacatagatgtacctgaaccaaaaactcctgcgatgcagctgaaatttgcgcaagcagaagacccaagtaattcctttaaagctcgcagcacggggatcaagaattccctagctcaagagtgcttgacttttctaaacagtgccaataaggaggaactaaaaagcttaaggggcattggagaaaaaagagcaaattacataattgagcttcgtgagaactcacctgagccatttaaagaggtagagcatctcaggagtatccttggaatggatcgaaaagagataaagaagatgatgtcggggatcatcgagtcctagaccgatgataacctgtactggagtggaggaccactttcttctgcataggaagccaagagaacgaccaggcgacaggggtatatgaacaacggttgttgttgttgagactgctgccactgtgggtcataagctacatagtttcttttaccctccgtttagagtgcaaatctatgtgtttgctttggtttcttgtgttgagcgtgagaataaaactactgaagtgt

SEQ ID NO: 646 - DNA, 699 bp, Avena sativa
tttaattatgtctcacgcaaatacagaataatacattaatgttcatatagaatatggctacaccgctggagttacaataatcgctctcaccgcctcggttgtttccttgcacgtcctctgtatatgtgatctgaaggataacttaatgggtccgttggcctaggattcgtgcgaagatttggcggggatggtataaaatgatccctgatttctgaatcttgatgagtgtcaggaatttggctcgtaccaatattagtatataagaagtccatcattggatcatatgttgattgcgatggtccaagattgtaagactgaggttgctcgtatgcctgatcatatgtgtagtaactgtcatggcctataattgggtgaggaggtggcatgttggaattaaatccagcatcatcatcattccatgcatcgtcaggagtggcctgtacaggaacattaaatattagaatggttaaaatataataataagttagtatgattatagaaacacgtatcggtgtctcctgaaatagttctctagcagtttccaaaaatattcatgtaggtgttggttgatgcgttgaaccgaggtcaatctaaaaagatttgcatatataaaattattgaactcacacgtggcggttgtcttgaagattcaggtctagagggttctacggtaatcctcgatgatgtacaaagaagagc

SEQ ID NO: 647 - DNA, 821 bp, Avena sativa
ttccatgaccactatggaatatttcaatatatgtggaccaccggcttgatttctgatcaaacatacaagctactgaacattttctgcgactttgagtcctttgtgcattcatctccacagtgtgataagattcttgacattgctagcactgaagctgggaacattgattcatatagcatcttcacgcctacttgtcattcatcttttgcctcctcaagaaacaaagtggtgaaaaggcttcgctctgttggaaaaatgggagagcagtatgatccatgcactgaaaagcattcaattgtatacttcaatctggcggaggtgcagaaggcacttcacgttaatccagtcattggcaaatccaaatgggagacctgcagtgaagttgttaacactcattggagggactgtgaaagatctgtactgcatatctatcatgaacttatacagtatgggcttcgtatatggatgttcagtggagacacagatgcagtgattccagtaacatcaactagatacagtattgatgctctcaagcttccaacagtgactccttggcatgcttggtatgatgatgatggcgaggttggtggctggagccaagggtacaagggtctcaactttgtgactgtgaggggtgcgggtcatgaggttcctctgcaccggcccaaacaagctcttactctcatcaaatcattcttggctgggagcccaatgcctgtgctctctgatctacacagcgatatgtaatatgtttgaccacggttggttcaaggcacacaggggatagtcataaactccagctccaccaaggcattcagtag

SEQ ID NO: 648 - DNA, 449 bp, Avena sativa
gatgggaagaagagcaggggaccgacagagagtgcgggggcgcctcctccactctctccccactcctgccgatgctctcttcagctcctccgtcgcctcctcttcttcctctgcatcgagtgaagtttagttatgtttctcattagccagccacgcctgagctgattcatcgttgctgtaaaagtatacaggactcagacgcaatgatctcatccatcagcttgctcgatggccagcttattcacaaactgtacagaaaatgctggccaggtaagtcacattccatgctgaacatgcattcgactgcaaaatctgggggcaaaaacatgaggataaagatggcacatctcaagccccatgcagctggcttcaagaggaaccctcatgcccacgaggaagacaatgtgttttacaaattagttataggctaccctgaaagccttagctgg

SEQ ID NO: 649 - DNA, 865 bp, Avena sativa
ccagatcgacccgacacgacctgatcacccatggcgctcaagcagaaggggagcggcgacgccgccgccgctgaccccagcaagcggcgccgcgtgggcttcgccggcatcgatgctggaactgaagcaaatgaatgcatgcaagtgttcattgcaagaaatcctgatgacgtgggctcagaagactgcacttctatcgaaccatttgacctaaatcatttctttggtgaagatggcaagatatatggctacacagatctcaagatcaatgtgtggataagtgctatatcattgcatgcatatgctgagatttcattcaaggaaacatctgacggagggaaaggaatcacagatctaaaacctgtcctccagaacatttttggggaaaacctagtagaaaaagatgaatttctggagacattctcaaaggaatgccactatataagtgaagtcatgaagaatggtacttccattaaacataatgcctcaaacgaagatgatttggcagttgagatcgttcgagttgagctccaaggtgctgctgcatttctttattctcgtctgatatcacttgttcttcttctggttgaaggttccacacctatagatatcacagaagacggatgggaaatgctccttgcagtgaagaaggcggcacctgagtcatccgcttcaaaatttcagttgctaggctttgcagctgtccatcatttttatcattaccctgagagcacccgcttgcgcatcagtcagatactggtcttgccaccttatcagggtgaaggccacgggcgtcgtcttcttgagtcaatcaattctatcgcagaatccgagaacatatatgatgtaaccatagaagaccctt

SEQ ID NO: 650 - DNA, 775 bp, Avena sativa
aatggattgcaagagtattctatatgttatgcttccagttgtggtgcatgctgatgttacttctccattaagctaattgctagagggtcaaccgttaaccacttcaggataattgccagagggtcgactgttaaccatttcagcatgtttacttcgtgtattctggttgggttttctacctattgctgtatactaaccagttgtgtatttaactatttatttagagtagtgtatctatcgattctttaaattaatctagagtattgtaccaacaagattaaacttaattcatttgtgtctttcttgtgccgtgatttgaaatcaatttaatttaagtgacgatgtgttgtattttgtttgcctgcagttattggctctcctattgttccagctgacagggctactgccagcataacgatgcaccgccgtcttgcagctgttgaaacaggccagtcgatagctgacaagcttcctgtctttagaagaaatgtccagcttcctacgatagctgacgagctttctgtctttagaagaaatgtccagcttcctacgtctttgaactacttagctacttggcctgagtgatccagttatggtttggcgatggcatcgccaactatagatggcccagtaccaaaatgaccgagaagttgtgtagacaccaatcttatagtcctactttattgtctctctaaactatgctcttctaaactgcttaccaaagacgacaccacgagttatgtaatccaggtttctgtttttagaaataagaaaa

SEQ ID NO: 651 - DNA, 655 bp, Avena sativa
  modified_base (633)..(633): a, c, t, g, unknown or other
cccgggataaggagaagcagaaaacgagaggagtgggagttagagcaaaggtcgcgagaaaagctcgagcttttttcttgcggcatgcacggcggctgggcgcagccgtgcgggctgctgctggtgatgttcgtggccgtggtggtggcggcggacgacagcggcgagaagtgcagtggggactgcgggaacccgtgcggcatcccctgcacctactccagcccgccgccgcccgtgcccgacctgccgccaccggtctactaccctcccccggcgcccgtctactccccgccgccgcctgtcccggactacccgccgcccacgaccacgcccaccgcggactgcccgccgccgccgtacggtggaggtggagggtacacgcccacgccagggtacaccccgacgccgtacacgcccacgccgtccggtggtgggtacaacccgacgccgtctggcggtgggtacaacccccacgccgtccgggtggttcacgccgcccaacatgccgtcgtacctcaccccgccgggcccgctctacccgcaggaccccgggttccatcccaacgccgcccccaggccgcaccgtgggctggctcgccgcgacccttgcggctgctgcggtggccggcggcnccctggccttgtgatcgatcga

SEQ ID NO: 652 - DNA, 836 bp, Avena sativa
gtttgtcaaaaggaagccaaggtagaagaaacagtcaagcacgcacttgcagttcattctgctgtttcatctggaaactatgtcatgtttttcaagttatacaagaaagcacctggattgaattcgtgtcttatggacctttatgttgagccggatgcgctttgaggcaataaaatgcatgtcgaaatcgtatcgcccgactgtgcccgtgagctatgctgcacgagttctgggattcacaagggttgttgaagtttgtgagtctgaactagcgggtggattagaagagtgtgaggaatggttaaaagcacatggtgccattcttgcagtagatgaaaacaacggggaattacagatagacacaaaggtttcttctgctagtctatacatgccggaacctgataatgccgtttcacatggtgatgcatctcttgccgtggatgattttttggctcgagcatcgtaaacaacgtgagggtgattcgggtgagcgtctttctactctttttgacaccgacctttggatgtgttgtgttagtacatattgtcaatcctggtagaggaatactctaatattgcaagacatgcacatgaaatggaccggacgaagggatagctctggctcttgcaccaagttggcttcaagaaatgaatgcactcggcacttgagtagcctcagactgtgctccaatggtgttgaaatcataggcaaggcgtacatgtatgtgtgttggttattatagtccaattcagtgttgtacttacaatttttagaggttgagttattcttcaccgattaactgcaaatagttaaaggtatactgatgtcctgaaat

SEQ ID NO: 653 - DNA, 974 bp, Avena sativa
catcatcagaaacagatggtactcaactaaaggtcatcacaaactgatagctgaccgaaatgacacaacctgacactcaccgactgctgcgcataccaccattactatgctatatatgacaaaactcgtccatcttgtaacttcattttcccaatataaatggcgcttttattgactcaaaacgatccgccgcattttggaagttaactataccattgatcgattgattctcgacgcaccaccatttgcataattgcattatacttcatcaggagatgatatcttctgttcacatgttgctagagatccatgccggtaagcaccatttggctgggaaactgaagcaaagggatggcgcaggagctgccagctgcggctcagccacgaggatgtagaacaggcccataacgccggtgtgctggcgatcgctgctgtagttggacaccacagtaagcacctcgccgtcgctgaccttgatggagcctggcttagggtagcacgtcgacatgccgacgatgtagttcgcctcgttccctgcctcctgccctgtgccgtaggtcgggagagattcacatagaaggcgtccgtcctggccatacaaagaagaaccgcttccgccagagtgctgatgtgcaacaccaaacacgatatctcctccacgcggtaacaccactctagaagtcttaacatgcgtgcaatcaccgttggctcggtttactgagctgcattcttcgacttggtactcaaccttgcaagaatgttcaggagttccatcaagcagagcactgtcggtaacatcaaatatgtaaatcttgacaggcaccaccgcatcagtccagtcgagccacgtcaccttgtactgcaagaacagcttccgcacctcgccattaaacccttctttgacctgacactgggtcttatcatagcagcaaaacaacccaccagtgtagttctttgagattgtgcgcccatac

SEQ ID NO: 654 - DNA, 552 bp, Avena sativa
caggggcaccaatgctgccatacgtgcaggtgttccagtgttgggcttgtggttcgaggctggtgaacctgtgcttcttatttgactaggtcgagtggagcaggtggcttcgcaatctcacgggcgtgggttctgtccaatggtggttttgtctcaccgttcatggcgagcttctcttgtggatccataagaagcattagccctagtcggagttgtctattgttggcgccgtgaccaactgtttggcatagaccgatgtggacttcagggctatccccgggaggtttgcgcctcgttggttgtcttcggcaagtcggagtcgcgaggatgcgagatgatgggtggtgacgatgcgcttcaggcggcctcgatgttcttcccttctcggtggtgtgttctatgtttagttcggtagccaggttagctgtgtgtgccctcgcgtcggtcgtgttccatgacggtcgtcgagggtggttgtgttggttttgggccagtttttcgttaataaactggccaaactctgtaattctgctttatattctgttgtacatt

SEQ ID NO: 655 - DNA, 825 bp, Avena sativa
gtggcctgcctcctcctcaagatcgccacgggcggcgaggccgtgggcgccttctctctctccgccggcgtcggcgtctggaacgcggtggtgttcgagatcgtcatgaccttcggcctcgtctacaccgtctacgccaccgcggtggaccccaagaagggggacatcggcaccatcgcgcccatcgccatcggcttcatcgtcggcgccaacatcctcgccgggggcgccttcgacggcgcctccatgaacccggccgtgtccttcggcccggccgtcgtgagcggcgtgtgggagaaccactgggtgtactggctcggccccttcgccggcgccgccatcgccgccctcgtctacgacatcatcttcatcggccagcgcccccacgagcagctccccaccgcagactactgaacaacctgaacctgttccatccatcgccacggtcatgatcgagagattattaggaccgctcttcaaagaatcaagcaggtgtcgtcgtgcgtgtcaacaaccagtaagaaccaagcaagtgtcgtcagtaagattgctccttcaagaatcgagcagttttagtttcagtgttgttctctgtttctctcctgtgttgagaagttcagggtgaacagtgtgagtcagtcaggaataatgggtacattatgcatcttctctttgtaatcctcaattatgcttccattccatggtcatcaagattagtgtcattttgtacaaatcgatctgttgtatgtattgtctttccagcgacttgaggtctacgtaaatcttgtgtaacgatttatttcgatgcattctccaacttggtat

SEQ ID NO: 656 - DNA, 354 bp, Avena sativa
gatcaagtttctcgttgcgaagcttacattgatggaatggagacaaaactgcaagtttgccagtaggggaagagatggaccatgatgctgaagagaacgaatatgaagatcgggatagtgtacaggtggaacggctgctcaccgacatagtgtagtacgggcctgctctgcatcgtcttctgcaagacgagaaagtggtgtgagcatgtgatagcccaagatggcagtctccctctcccccctcagcttaggtacttggcgagtgagctacggcagatcgtagcggacctcttmggcggaaggctccgcggtgtggcaaagacgaacgtgtaggagatgtccatagatgtcggt

SEQ ID NO: 657 - DNA, 500 bp, Avena sativa
gtgtccgggcaacaacagcgtgaagctgcccgcgacgagcgaggtgttcgcgtgcacggtggggaagaagcccagcatggccaagtactacctggacgacacggtggacgtgatcaagatgctgcagggcctcgccaacgcgccgtcgcagcagcggccgtggccgcccgtgcagctccgggtcaccttcgagagcacggcgtgaggtagcaaggaagggaggggagaatttcactgcacagggaaggtcgtcaaataaccaatatgaagaacgatgattcagttcgtgtggtttttagggttagtccgacagcataaacaggtttctttctctgttccttttttctttcttttggtgttactacttttccagcctccttctctcgcgcgtatgcgtatgcccatgcccgtatgataaggggggtgaggagaaggtttctgtcacaatgtacatgtagttgacgatgacgatgaaatcagaagatgaaagaaaagaaaaa

SEQ ID NO: 658 - DNA, 549 bp, Avena sativa
  modified_base (358)..(358): a, c, t, g, unknown or other
tcatatgatttcgtggactaacctattaacaagagccacagtgccagttgcctgtttctgctgtttggttccaggaagtcagaaatgaatattctcagaattggacggcacaaaagccaaagttactattttcccggaacactcaagaagccagaaggagaatcggagaggggccacagggtggccacaccccccttggcgcgggccagcccaggccgcgccagggcatggtgtgggcccccctggctggccaccgaccttgcctccttcgcctataagagcctcccgataccaaaaccctaatagtcaatcatccagccacgaaaagttccacaacaccaccgccactgaagggganattcgggggacagaaagtctctgttctggcaccctgccgggacggggaagtgcccccggagccatctccatcgatctccaccgccatctccatcaccattgctgattcccatgatgaggagggagtagttctctctcgaggctaagggctttaccggtagctatgtgttcatctctctctctctctatgca

SEQ ID NO: 659 - DNA, 555 bp, Avena sativa
ggaaggaaaatacgaggaagcgttggacaagttcgagtcggtgctggggtcgaaaccagagatcgatgagtcttccgttgctagctacaatgtcgcatgctgttattccaagctcgaccggatacaagctggcctttctgcactggaagatgccatgaaagccggctatgaagacttcaagacaattcgcaccgacccggatctagcaaacttgaggaaatcagaggattttgcacccctgctaaacaagtatgatgaatcatttatcaatgagagtgccatcaatgccatcaaatccttgtttgggttcggcaagaagtgatgacgataggatatattggcacttctacttggtctcgcggtttgcacacttggccacgcagtacagttttcctctctctcccactagttcaaaacagtagttttagtttgttcttggtgagacttgggagatatctccaggaaaggttttagccttcccttgtacttcaaccatttgatggacataagctttgtacatccgaatagaaaatcctccaatatagtaaaaaaaaa

SEQ ID NO: 660 - DNA, 570 bp, Avena sativa
tgaggtgagaactgctattccggtggaagggcgatttgagcatattgtgttatcgtgcagtacgacttccgatcatgcgcttgtttggattgagcgggaatcaataaaggctttagagctaatgaagaaaaatgagaacgcaacaactccacctgctccacaaaagatgttgaagtggcatagttttgaggaagaacacaggagcgcactcgagagagcgaaaagtttggacgttcctcacgcgatagacatttctgaagaggaaaaccatgaggatgcctgccctgcaccgtcccccgatgcgctcagcgaaacgatctcagaagctaaatctgcagaaagaaccagctggaatgagctagtggacaagcttttcaccagggatgaacatgggaagctcatcgtgaacagggacatggtggagagggaagttgctgtggagtaagccccagctctttagactccttttttcacacggtattccattctttttcgcgatctgtatacaggagtgcatagggctaaatcatgtttttgttttacctctcggatattcttttcgctaagtta

SEQ ID NO: 661 - DNA, 807 bp, Avena sativa
tttctttttttaggaggcataaatgttatgcattatgagcaagaaaatgtaattaaatccgaacactgagacagtttatttctcaaacggtgaaaacaatcagctaattacaacagctcctctacatcagaaaataatagaggataaatcaggcaaaagaccacatgtggaatcacatcttctgcggtaacacggtaaatagagcagtgttacagcagcaagtatcacgtgaacaaaggcaaaattaacagttaggggtgcgggtacctcactaggcagtgttagtcagatctacaagtgcttcctctagcaggtcctccaaaaccgccgcgcaaaccatggcgttgatctcaaacgtgtctaaccgtgccgtgtcggcgctgcccgtctccaccagctccctcttgaggatcatgtccagcagaaggttccgctcgatgacttcgccaggcgggtacttgtccagtatcgaccagctcctgatgactcgccagatttcgtcagccgccgaattacagggaccatcatcatcgcaatctctgcgccgtgaacttgcctggccccatgggtaagcacgcaactgcgttgtccaagcaagctcggcgagtgcctcgttgacagcgtcgaaaagaagcttctcttttgcccgcctctccctcggcttgattccctctgcttcgtgatctgataactgctcgagcagcttcgagtccagaggggtggctaatgcgcagccctttctgtccatgccagctgaggagactaacgtctggataaacgtcaaggagtcttgatcttcgtcagcct

SEQ ID NO: 662 - DNA, 977 bp, Avena sativa
gctcaccaccaccgccgccaacggagccgcaattactgttgcaggcacaaagaaaatgaagttctattcagtgagatccagagccagctgaagggcaagtgttatacagtggatgtgaaagcaacttcagactcaaaggttataactacagtcactttcaatgagttgtacacacctggcttgaaggcaattgtatccgttcctaccccctaccagaaggctgcccctgggaaggctgaactccagtacttgcatgcacatgctggcatcaatgccagtgttggcctgaatgcaaaccctcttgttaacttttctggtgtagttgggactaaagcaatagcttttggcattgatgctgcatttgatactgcctctggagagttcaccaagtacagtgctggactgagccacactaatcaagatctcaccgcttccctgaatctgaacaacaagggagacaccctcgctgcttcctactaccaccaggtgcatggaaccacagccgttggaggagagattgctcacaccttctccagcaacgagaacaccatcaccgtcgggacgcagcatgagctggaccctctgaccaccgtgaaggcgcgcttaaacaactccggcatcgccagcgctctcctccagcacgcgtggaggcccaagtccctcatcaccttctccaccgagatcgacaccaaggccattgagaagagccccaagtttggtctggcccttgccatcaagccctgaacgtgggtggggtcggcgcgcgttaggatgctagcgttactaccatcagctctagtccagcgaacaatgcctggagaaaacttgtaatcccgactttggtgatgtgtcgcaaacttatccatcgctgccttttagcatgctctacaatgaggggtttctacccagttgatccgtactactggtccttttcctagcgtacttctgtgttctgaaatctgaaattgtcacttgga

SEQ ID NO: 663 - DNA, 306 bp, Avena sativa
tttttgaatcaataatcaatctgaaatagcatcttaatatccatcagatcctcgtaaacacaacatgtagaattacaaatagatgatcttgatcatgaatggagctcacaagatctaaacatgatagcacaaaggagaagaaccgaccatctagctactacacggacccgtagtccaaggatgaactactcacgcatcacaccggaggcttgcatggtgatgaagaaggcctccagggtgaattctccccctccggcaggggtgccggggaagagacttacagatccctccgatctagggatggag

SEQ ID NO: 664 - DNA, 699 bp, Avena sativa
cgtgcgcggatcgctcccttctctcggccttgcccacccgccctaccgccctcgcaggtcgccgcgcgtcccagctctccgctactcgtctctccaagctggtgacagtcttggggaggaggaggtcatgcgcatgttccttgaggataggcagatgaatggggacttcatctccaaagtcactgacatggttttgaggagaaatggcacaggtcttgatgtggtagacactaccacgtatcaagaaaatgctgcagatttcagagaagatgttacgagtgacactggagatctggtgtccgctgatggcagcttaactgacaaaaggcggcgtgcttatatggaaaggaagaaagagagcgacaagaggagggaattcaaccttatgagatatgaagcaattaaggatgaactattgctcctgaccgcaggcattggggctgcttgcactatatactgtgtcctagtcttctctctggaaggctggtatcagttatgcttttggagttgctttcagctggttgtatcttcaacttctgtaccgacgcgccgataacttgtcaaaggaagatgtccctgaagttttcttgaggaagacagtgaagaaaaattggtattcgaagcgaggatttgaagaatacagtagagaaaacactgggtggctctatatttgttctttcatccccaaggcttataatt

SEQ ID NO: 665 - DNA, 847 bp, Avena sativa
agcagtccagatgatgtttgctacaaccagattcaacttgaacaaatggcaggacatctgagatcactgactcatgttaccttcgctggtgcagttcttgctgtatatccatatctagatcgatatgtgttggcagcagctggtaatacgctttgtgtatttggttttatgaatgaaaatcctcatcgtatgaaaaagtacgccgtgagtagaacacgatttacaattacttgtttgaagacgtatgcatcacggattgcggtgggtgattgtcgtgatggtgttctcttctattcttataatgagaaccttaggaagctggaacttatttacgctgatcctgctcaacgattggtgggtgatgttgctcttttaaactgtgaaactgctgtggtatcagatcgacgtggcagcatatctgtattatcctgcccaagacttgaagtttctgaaagtccagaaaagaacttagatgtacattgctcattctttatgggtgaaattgctatgagcatccggaaggctgcatttaagtatcggcttccaattgatgatgagatagacccggtgttggaatcggcttataattgtgttgtggcaagtactttgctggggagtgtttttgttatgattccactcacaagtgaggagcatcatctgttgcaggatgtccaagaaagactttcagttcacccgttgactgctccaatcttgggaaatgatcatgcagagtttcgccgacgtggtatcccgtcgggagtaccttcaattctggatggcgacatgctcgtgcaattcctggagctcaccagtgaacaacagcaaactgttcttgatgctgctcctt

SEQ ID NO: 666 - DNA, 875 bp, Avena sativa
ggttcttgattttctgaactcgaaaaatatgactgatgctggtccactagatctaattgatgatgaagatagtgatgttgaggatgggatcgatcaacaaacaagaggtaacttggggcatggtttacctggatccatggcgaatcgtggaagacctgttgctcggacaaaatgcgtgaaatttgctccaacaggaagatcttttgccgcagcgaccactgatggtgttctgttgtactctgttgatgaatcatttatattcgatccaacagatcttgacattgacgtcactcctgagaaagtggaggaagctcttgcagaaaccagcagcagagagcccttttactaagcctccggttaacgagactcgttgattaagaaatgcatctttgctgtggatccgtccaatgtgcgagcaatctgttcgtcagtaccctttaagtatctccagagattgatcgatgcattcgccgacctgctggaaagctgccctcatctggaatttatccttctctgggcccaggagctatgcaaggttgacggaacctacattcagcaaaactctaggaccttgcttcctgctctcaagtcgctgcagaagtctataacgaaaatacaccaggatttggcggacacttgttcctctaacgagtacatgctgaaatatctgtgcgctgctgggacaaagaagtaggtcatgggttggcatatataatgtctttcatatgtaatagcaccaccaacatcatcatcggcagccgaggtttatctgctgcccagccctcctgctgccggatgcgcactcttgcttgatttacatctgcagtcctcggcgtaccgtctatgctaccaaagaaatacggttgattctcatt

SEQ ID NO: 667 - DNA, 838 bp, Avena sativa
cgtaaaaatgttttcttctttttcgtacagggaaattgtatacatatatagtgtatgagaaaaactagagctgaatctttcttatttcatacaattacagaatcaaatggcttaaccccgtccccagaccagtttctcgacggcctctgctctgacctatattacacgaaagcaatgcgcctacagaacctacaatctggagcagcgatgaatggtgcatataattaaactttcttttatcttctattttacattatgatgataccagaacacgagtggtgatttagatgtatcgcctgtgacttgctgtggagtcccaacaaattggctgagctgagctgagctgccttgtgttactcaagagttgagatatctcggtacaaggaagcacacatacgcatcagtagaggctccacaaatcagacaagccatagaggtctgattttgcccagatttctattgtccacaaaaattttgctctctaatgaccatcttcagtatttactgcacccagttgacgtgaagcggcatttacaagaggagcatcaaatttccattcgtgtgggaatttgacctcgcgcagggcatcggaccggagcgaccacgcgagcgcggcctggccgcagccggcgagcggctcgacgcggccggcatcggtgaccagggcgagcgggctctcgaggtgcgcggcgccgtcgacggtgtcgaggtcgcgcacccactctggccgctccgccgcgccctcccagagcacccgggcgtccagcacgaacccggcccactccagcctgctctgcagcagcatgtcgctccgctccgccggcagcagcgtctcctc

SEQ ID NO: 668 - DNA, 372 bp, Avena sativa
tgaagagttcaatccatttaagatgctagatcagctgtttgaagagtgtaagcactgtggtaaggctctggttgctgaaggagtgataacactgaaaaatattgaagaatcaaagtcaggcaaagtcggcagaggtgtacttaatgtgggtttgccagcatatgttattcttaatgcactcctacggtctgcaaaagcgaactctgatggcctaattctaagcgatggctgtgaaataacatctgacaacaggccaaagagtacaatattcgattggttcttcgaccctctgatggtgatcaaagatcaaatcaaaagccagtaattttacagaagaggaggaagtgtaccttcaaaaaccgcgtagctgtt

SEQ ID NO: 669 - DNA, 892 bp, Avena sativa
cctgggtgttactttcagaacttgcaccagcagaggaatgtttccgcttacgagatgtacactttgcaggtttgggctgcatagttgctgatgttgatgtctgcttctcgtttgtgttgtcaccagaacaaggaacggttgccatgtctttacaaactacagggtttcttttggttctcttatgcttctttttcttttgtagctttagtgaacctagtaataattgtcttggcccgaaccacaagttcactactggatatctcacatgtttctttgacttggagtccacccttttggtcattctaccattacatgtttcagctccaacaaccttcaaggtaacttctgaggagatctgttttccaacatcaacttgttcaactcctgatactatggtgttatccttcttgctgagtttcttcactgtattttcattttgcttcagagattctgtcaaatccttcacttccatactagaaacttgaactgcactgctagtgcaagggatgacaccatttgaaacaatagcatccttggaactcaaatatgcttgagagcaagaagtttgtttatcagtctcagacggtcccactggactactaacaattgatgaggcaagagaagtactgtttcccagcttagccaatgtttgattgctgctcacagtgataagagctgcaggttgacctgctgaagaggcctctttatgactacctgaagcaacttcctttgatttagttgacaagataccaccaccagtttggggtaatggagctttctgcctggcagacaggacactgttttggggggctgcagcagtttcagttttatcaccattctttgaacagtggtctactgaagttatagtactgccaccagaatggccattgtt

SEQ ID NO: 670 - DNA, 664 bp, Avena sativa
ctacgggcaggtcccagatagcgaaatggctgcaacctggttgatggaatggggtttgctccccgaggatgaagctagaaaggtctttgggaagaaacaggcccagaaactgaagtcaccagtaaaattacttactgcaccgagaaagacaagttctccaaccaggaaagcactgtcgttaggtgataagaaaaccaacccagctacaaagagcgctggaaaaaccacagcacagaagaaaaggagcgcatctagtgacacagatgatgatgaggacgacttcatcatgccgctgaagaccaaaaactcagctacaaagagcgctggaaaaaccacagcacaaaagaaaaggagtgcttctattgacacagatgacgacgaggacgacttcgtcgtgccagcgaagaccaaaaagcaaaagaaaaggaaggcatctagtgacacagatgatgacgatgaggatgacttcgtgatgccgacgaagaccaaaaggcagaaggtctagctaagtatctgatccgtaaacaaggcatgtcctttgtttatcattgtcattatgctagatcaggataaccgtagaagacgatgagaaatttcaacttctgtgtgaacctggagcaaactattgtgttgaagcagtacaatgtttccatgtattaccaaa

SEQ ID NO: 671 - DNA, 822 bp, Avena sativa
atactctgacttctaaacttacaagcatgaaagttcagttcatataacctgcagtatattattgatttactgtcaccatattttgcattctgcacacactgttatcccttgcaacagtcttttgacttgttaacaaacaagttggtgaaaatgctgataatgtagtgtctatattcaatttgaacggcaaatcatagctatctgatcaattggaaaaggggtgtctcatcttacgatttggtttatactttgagctgtttctgcaaactggtcacaccattatccagtgagatcacacattccaaaacgttatcagttgcagcctgccgccgtggttctcctaagctcctggcattatgttccatcttactttcacaaagaccgagatgcgaatctctaattttgtctcattgtttcaggttttatggaggtttgggaccagcagcctccagactacgcgaaattcttctgatctggcatgaaaccttgctgctgaaactgttcaggaattttgacggatcgacacgggctgttttagtataggtggaaataaatagatagcttgctgcatggttagcttaacacacacaaacccacgtccagggtcatgttggccgcttcgtgaggccaaggtctgcacgctcggcccaaccagtagagtagagatggtcagtgttctcgtcgtctggacccggcgcacgagtgtgtaccatgtaattcgtggcatacatttgatccctgttcaatagtgcatccatccaacatgattgttctttcttgtataaacagttggatatgcaatacatacatttgttacttaaa

SEQ ID NO: 672 - DNA, 687 bp, Avena sativa
ttgagcaagaatataaaaatatattacaatagtcacaaatagaagttgcaaacctacatcggtcaaatactcaaaggagtagcatccagatccatagtggggatataaatttatcggaagattacagtggtttatacacacccaaaatattgaagacctatattttatttcacctaggaaccacatgatagccttttctaaacattgcttcctggtcaatccggatgctcagcaaagcatggcaatccttcgcaagtaccagatgtccaggtaataagaaaagcggaacatgaagataagggaacctacaaacaaaaatagtcagtggtgcgacaaagactatagatcttaaactgcagtctgcgtcttatttgtttgaaattgatgtcaacatgtcaacataagtcatgtacgaagaggcatcttagtgatgcaaaccgtaccctcatacacatcgatatcatgttatggcaatcacttgtccatggtgggaatgctatcattatctagtgaacaacttccatgatcctctagccctgatcatgataatgtataagttcttcatattgatcgaaggtagttgacacttgatagttccatgcatacctttatcttgcactaaattatttgattcgatggctagtctctaaggtctgaggtggtctttccaagctgaagagcatcagg

SEQ ID NO: 673 - DNA, 827 bp, Avena sativa
cagcatgatgctgcttgccgtgttatcgccagactaaagaaggaaagagatgagtctaggacacttttggctcaagctgaaaggcagattcctatttcagctgctggacctgcacctgtagctattacaaatgggaaaagagctttggaagatgaagtgggtcctgatgggaagaagatgcgccctggtattaatcctgtcatgatcgatgaattaacagagtgtaattctatgctctcggcacagcgcaagaaacggcaggttcctccaagtctggcaccaatcgatgcacttgaaagatatacccagatctccagtcatcctcttcacaaaacaaacaaaccagggattttatctattgatattgatcattcaaaggatattattgctactgggggtatcgatacaaatgcagtaattttcgataggccttcaggtcaagtcttgggcactctcactggtcactcaaagaagattatcagtttgaaatttgttcctcgggatgagcttttgataactggatcagcagataagactgttcgtatatggcaaggtagtaaggatggaagctatagttgcaggcacacactgaaagatcatggtgcagaggttgaagctgtcactgtccatgctactcagaagtactttgtaactgcttccagagataacacatggtgcttttatgatatttcaacagggtcttgcctcacacaggttggtgaggcttctggacaagatggatacacagcagcagctttccacccagatggtcttatccttggaacaggcacatctgaagctgttgtcaaatttgggatgtgaaagtc

SEQ ID NO: 674 - DNA, 879 bp, Avena sativa
ccgccaatcccccataaattcgccgtggtcggcggctcgctcgaacccgatccgacgattccgttcccattgccgctccaattccatcccgagccggccggcccagctggaatctgatctttctacatcgcgcggcgagcggggtagccggtggtgggtggtggcgggggcgtgcgcatggcggcggcacgcggcggcggatcggtggggagggtcggcgactgggacgtcgacctgggggagcgatgggactggcgcgccatcccgcagctgctctcctccgcctgcatcttcatctgctccggaggctgttttggatgctgccaggacgccgtaaaacatgtcagcgagctttccaagagcttgatagcacatgcccagaatcccacggtcggggaagagttttggagcacaaccaccatcgaggttgatccggcagatctccgagcttctacaatccacctgtcttcgtgggaccttgatcagcatggagtgggaagcagtcacaacgccgcggaatctgccaatcatggttttaatctttggaaacaaactagggatgagtggactgataatgtaaggcagcaacctgtggtgaagcagatccaggaaccagtattaagttggaatgcagcatatgagagtttgcttggatcaaacaaaccatttcctcaacccatccctctacatgagatggttgatttcctcgtggacatctgggagcaagaggggctttatgactagcgcaaatgcgttccacaagaataacataggtttaggcttgatgaggtaacgagggtgtggcctgtcatacttgtttttttgaatggaggcctgtgtgcttttgctgtatacagtgttgtggactggtggttgtat

SEQ ID NO: 675 - DNA, 755 bp, Avena sativa
tagtctcgcagaatcatgtctacagaaacatacgaatgcactgtcactcaaatgtacagcatacacagaaacgtaccaaggtgtctgttatctcggccgatgctttacaaacacaaacaacgtgtcaaatataatttgccagagtgtaccaaccactcatgtacataaccaagatatggcaaatcctagtttaccgactcccgaattctccactcgctggacacacgtagacaactcatatatcggtcatcagctgcattttatttccctgaagtattctctcgctgacacaagcacataagggttagtgtgcctcatccattgcaagcggcacgctcttcaccagctcacgtagcttcagtatatagaacatctcgaggtagcgcctagtctcccgcctctcaagcttcgaaacatacttccagaagccataaaccccagccagtgtcatcaacctctcggagtagatcttccatgtatacttatcgtatatacgctgaaggcccctgtcagatatcttaacccagtgatcggggtcttgtttgcattgttcaaagaagtcagccatcaaagtagcagcctgatcaggatggtaaggatcaatgtggaaaccggacactccgtgctctataatctcggcaggccctccgtggagtgttgcaaaagtaggaagtccacaggtcatggcctccacaacagtgagaccaaatgcttcatacaaagctggctgcacaaaggcaccgtgagtatcagcg

SEQ ID NO: 676 - DNA, 509 bp, Avena sativa
gggtaaaggaagacaagctgcaaaaaacggagattgagaaattgaagctttctgagctgacctgcagggaaggcatcgttgaggttgccaagataatttatggtgtgcatgacgaagcgaaagacaaatcttttgagctggaactgagctgggtatgtgatgaatctaaccgtcagcacgagaaggttccgagcgatcttctggagcaggccaaggcagcagcgcaggcagccctcgaggagatggacgccgactaagacgagaccaccgaccatgctctgaaggcttcacatttcctttcacgcgtggtgtaatagatacaggacctggttgatgaatttattttcagcgctaaaaactacaatcaggatgttgttgcttccggtcgagttagcaagcagggcttctcaagtgctgtctggggtgttctagcagatcgtactctgcatgttgtttggtcgcacattgattctgaatctattgaactctgaatgaccttgaaatctaca

SEQ ID NO: 677 - DNA, 725 bp, Avena sativa
  modified_base (698)..(698): a, c, t, g, unknown or other
aattgccaactgctatactagtacatgcttctcttaagaactactgcagttatcttactctccggcggtcatgccaaacccaaatttgtaatctttcctccagtgatcaacctctgcagaaagaacgaaattgaggccaggggtcaatctctcctccaaaagagcagaaactacgccattggtatcaaactttcccctcaaacgagactgtctcagcatataatcataaccaacacttgctgttacatcttttgacaaatgattgtacatgaaatcagaagcaagggaaaccttttcagatactttctgaacataactcagtgaaacaactccagtgcttgcaatttgtccagttgcaaccattttctttgtgtcatatctagcaacaaaaccaactcctgatttcctttgttgtccaagccaaaaagcttcagttcccaaggagaggttcttcgtgacactctggatatagtttgctccatagaagccattattcccaaattgcaattgggatctaaaatcttttcccttaaaatcaacactacccatgccttgggaataatgaggctcgtttgtcaactgggcatttatttttaggtcaaatatagtctgcgagatcatacttgacacgcgcattcaaccttccgtcacgcgacaacctaccgatgagcatcaacttggaatcaataaagttggcnccaaagtcgtagcttgtggtggggacc

SEQ ID NO: 678 - DNA, 380 bp, Avena sativa
aagagccctgaaagaataaccaattggagtccataaccctgcccaggccaagccgaaagggtaaccctgctaacgacggcaatctcaaacctgctttaaaaaaaggggtgccgacaaagggcaaaggaaaaaagagagcgatcagtaccgaggccagtacacggcgagactaggattcggcggtcctcgcctacataggtatggtggactgaagcggcagcacaacatgcactaaacaacctatagagactcaatacaactggcaaccattagatagggataagaaagacctattcggatctaacctgaaactatcaccaagcatacccatcctggtatttccccctcgagaccaacaaggaagtcaaccgaggaactca

SEQ ID NO: 679 - DNA, 593 bp, Avena sativa
aatttctgcaccaacgacaagccaaccacagcaatctttgctaccgtctgcagcaacctcttcgagtgccttctcagcttttagcatgccggcttctgctccatccacttcgagtctcttttcaacaccaactactccaagtctcttttcaacgccaactactccaagtctcacgactaacctttttggtacaactgggtcagctcagctgtccacaccatttgggacatcctccactcctactcttggatcaacaccagctccatctggatttgggactatcaccccatctttcccttcaacacctgctatagctgggacgtcacttttttcgacgccattcggaggtggagctacagcttcagggtccagctttggtggcacatctaaagggaggtcaaaggcccggggccgacgctagatgtaacttcctaataatcagctgcgaaatgcaggggcctcatgtatctcctgtcttgtgagggaaaaaagagcttgtaattagtttgcctggcagtgctagtggagtttgagtgatcatcttgtcaaatgctcggcatcagaccgacttttctaacatttgctattaggtt

SEQ ID NO: 680 - DNA, 946 bp, Avena sativa
cctgactttcaagctggatcaaacttttctttgcttatggaagcctggaaccattttccatgggcttcaaaagagatggtgggattatattgctttgcctgaggatgttgatgcttctggtgaagattcatttaggcaagaaataagggatctggcatttaagtcactgcagcttctcaaggatgctatcttcgatgctgagtgtgcaccgttgttttcccttgaggtgtatggccatataattggcatgtttgagctgaacaatcttgatttggtcgttgcatcgccagttgaagactatttcatacatatttatgatcttccagatgacgagaaggatgaagctgagaaggtaacaatgccaattgtagatgcgctaggtgaagactattcagttaattgtgacgggacggcattctttcctctgcaaagctgcatgaatcattcatgctgtccaaatgccaaagcatttaaaagagatgaggataatgacagtcacgcagtgataattgctctggggcctatcagcaaaggtgatgagattaccatctcctacattgatgaagatcttccgtacgaggagcggcaggcagagctcgcagattatggcttcacatgtacatgctccaagtgccaggaagaaaagcccaactgaatggagactgactcgactagcttgaattttggtcgctattggagtgcatcctgcttgtagtttatgccactgggtactttgacggctctaaaatattagggtaggatatgaagaaagaatgagaagatgatgtactgattttggtgggcttatgctctgcccatgttgaagcttttactggatattcactatatctcatctgtagttttgtgttgctggagattttgaatgctacaaattacaaaatgtaagacttagatagaggtgcttgaacttgagcaaaatgtaaga

SEQ ID NO: 681 - DNA, 655 bp, Avena sativa
gatagataatttcgccacatccatttcagaattggcaaattaatcatcataagaaattacaaaacacacagcaacaatatcagaaaaggcacacaaaaattagggactttagcccaagataaatttaataaataaaatactcttggtgactgatataacatgaccataccaaaccataatccgctaccaaatagcagaagtagagcataatgcaagtgcacaagtctcttgctgtggacgacgaccttcgcaacaaatggtcaacctgaacactagatgagggattctagaactttcttaagggccttggacttggattctagcaggaatgaaggtaagagagcccatcccaaagcacactttccaggttgttgcatatagcaggacccccaaggaacatatgttgagaagccagcaacccatgaaaataaacaattgcatcctccctcctgacagatgattttcacggggcaatgaagggcagaactcaacaaacaacacttcaacgcaggccaatgaatcaagtggttcactgggagcagaagagccatagaacagaatagagcgagcattaggacccatggttgaacagcaaattattagcactaagccaagcagagaccaacaggaacataaaggccatatgccctttgtt

SEQ ID NO: 682 - DNA, 901 bp, Avena sativa
gtcagttatcaagaagaagtatgggcaagatgccaccaatgttggtgatgaaggtggttttgctcctaacattcaggagaacaaggagggccttgagctcttgaagacggcaattgaaaaggctggatatactgggaaggttgtcattggaatggatgttgctgcttcggagttctacggagagaaggataaaacctatgatctcaacttcaaggaagagaacaatgatggctcccagaagatatctggagatagcctcaagaatgtgtacaagtcatttgttagtgaatacccaattgtctcgattgaggacccatttgatcaggatgactgggttcactatgctaagatgactgctgaaattggagagccagtgcagattgttggagatgacctcctcgtcacgaacccaactagagttgcaaaggcgattgcagagaagtcctgcaatgctcttctcctcaaggttaaccaaatcggatctgtaaccgagagcattgaggctgtgaaaatgtcaaaacgtgctggctggggtgtgatgaccagtcaccggagtggtgaaactgaggatacattcattgctgacttggccgttggtttatctacgggccagatcaagactggagcgccttgcagatcagaacgtcttgcgaagtacaaccagcttcttaggatcgaggaagagcttggagccgctgctgtgtatgctggactcaaattccgtgcgccagtggagccctactagatgggaagcgaaggagcctctctgttcctaaattttgtcaaaacgtgcctactattttaacttgtctgctgcccagattgtgctcgtaggatctaagcaataagttcactgtcacgtgagtaaacaacgaatttaattttgatataatttggctgg

SEQ ID NO: 683 - DNA, 809 bp, Avena sativa
tatatatacaggaaaggaaatccatgatgatccgcgttacattggcttcagatacaaagcgaactgtgcttccacaggaggcgtcgtcatgtaacgggaaacatatatatacagatctcaaagtgcaatgtacatgataaaacgtcatctagtcttgaccctcaagcaagccggcgtcaaattcctggcgctggtcacagttcaagccgctttcttgctcttgaatttgtttgcgcacaggatgtacaccacaaagttgagaaagctgaggcctgcaaggagccagaagaagtaatcgagatgacctccgttcaggttgtcagggatccatccagggtttcctccccttgtcgtgaagtaggcaaccattgtcagaatgaacgcgctgagatagtttccgagcgctgtggtcaggagttgcagcgcgctgcagaggctcctcatggcatccggcgactggtcatagaagaactcgagagctccaatgaacgtgaacacctcggcggcaccaaccaggaaatactgagggatttgccacaaaatgctcaatggaaccgggacgttttggtccaccaagtgtgcatccctggcaatggccagcctttgtatctcgaggactgctgctgctgacattgcgaggatggagatcaacaagccaatgcccatcctctgcagcgctgtaaagcccctctcgttgccagtgaacctccgagcgagtggaaccaagatgctatcatagatgggaacccatataatgacactaaccacgtcaaaggtggacagagatgctggaggaatttgaatgaccc

SEQ ID NO: 684 - DNA, 473 bp, Avena sativa
cgaggggaagaaggggaagaagaaggccaagaagagtgtcgagacttacaagatctacatcttcaaggtgctgaagcaggtgcacccggacattggcatctcctccaaggccatgtccatcatgaactccttcatcaacgacattttcgagaagctcgctggcgagtccgcaaagctcgcgcgctacaacaagaagcccaccatcacctcccgggagatacagacctccgtccgcctcgtcctccccggcgagcttgccaagcacgccgtctccgagggcaccaaggccgtcaccaagtttacatcctcctaggctgctgtgttgtgttctcggagagtagctcctcatcttttctgttccgtcttgagatgaatcggtggtactctatgtctttctgtaagaaatgtgctgcctgggggaacaacaatgtctttagaatctgaagaaatattattgttgttgtgtcaaaaaa

SEQ ID NO: 685 - DNA, 976 bp, Avena sativa
cgaaccctcgtggtatcgcgcaagtactgatcacgggtgaggttcccaggttgatccattccattttcagttatgaagactgctggattaccatacttctgcttgatgtaattcacacatccgtacatcccaaatggagcgatgtaaagccaatcagaattcgccttaggtcctattggtttcccattacgtgcatatgcataagtaacctgccaatcagcggagtagctagtgggcgtctgctgcagcaatttctgtcccttcatataacttgcggtgtattgattgatcccaatatagtctgctgagcctttgatcattttagcttgatcaggagtgaacttgggcaacctctctctcacaaggtcttgcattatttgtgggtaatgtccatttattagtggatcaacaaaccaaccaatatggaagtctctggctctttgtgctgcagcttggtcttcaattgagtttgtaagagcctcataccaattgaagtccagaactattccaaccttcccttgctgagctgcctgatacttgcttcggtatcttgcaactgcataaccatgcgctaagagaaagttgtgaccaacaatgtaaggttctgtcgctgagttcccaccagctgcacatttggtgcacctttgaggaggattgctccctgcatcataaccaaggagcgaaactatacgtggttcgttgaatgtaaaccagtgctttactcgattgccaaaggtcttaaaacaaaaatcagcatagtttgtgaatagttccaccgtctttgcgtttaaccagcctccgtacttcttctcaagtgcaagagggagatcgtagtggtaaagattgatataaggagtaatgcctttctgaagcaggtagtttatcagattgttgtagtatgctacaccttcttcgttaacttttccttcaccgtccgggaagattctggaccatgagatagaaaagcgatcccggg

SEQ ID NO: 686 - DNA, 625 bp, Avena sativa
ttcaaaagaaaatccagcacgtatctcaagccatataatgatgtctgcaaaatgtacacatgggttgttacagtaataagatgatccacttcagatgctcaaaacaaatcaactgagcactgtttgccctagtagtgccttcttttccttcagaaccactactcaagacacttgccactaatgaaagttcaccacaaaaatggctacaatctatattaatacaagttaatacctcatgcttcgcgattcaacttttcacttttctccataattcggtaagctatagattgaaaaaatgacaggtatcatcaagcactgcttgcagctagcccattcgaggcggtatgctgtgaggtgctgttgtctctgtaaagtggtactccaccacctagttccttcagtctccttaccatatcatgcaaccactcaaatgtgagcttgttctgcgcattgaattcctccctcacttgcggatgcactctaaaccagtcccccagcatcttgtggacatgggatcgaatcattctccatggcaccgggtattgctcacacagtttcaaatactcaatggcaagatcagcctggtctaaaccactatcttcatcaccatcttctttatcccggg

SEQ ID NO: 687 - DNA, 832 bp, Avena sativa
cgccgccaccgggcgtcgtcgtcatcgccgacacagccgaccgcgtcgcgccctccagctgggccgtcagctccgggtcgcacggcgtggccaccgccgagtgcttgtgctcgacggcgcagtccaccagcctgtcgtcgcacctctgcatgacgatcctcgagaagcttgtcacgatcgtctcccgcaccttgtcgtccatcgcgcgaatgtccaccgtgaaattcacctggcccggtatgacgttgctcgcgctgggccaggtcagcagctcgccaacggtgcagaccagcccggcgagggactcatccgtgaagcagccacactcctcttcgtaggtcaggaaccggctggggtctttgcacaggctctccagcgtcaccaccagctctgcagctgcaaccatcggatcacggcgcagtttcattggaaccgtgccagcgtgcccttgagaaccatctactattaccttcaatcttgtctgccctgcaattccttttacgacaccgaggggataacggagggcttcgaggacaggcccttgttccaagtgaacctcaacataactccccaccaactccgggctgtacttgacttgaccaagagcagcggcagtagcctcgaaggagttcaacttaagaacatcttgaactgtatggccacagctacagcggcgcttcccagaaacgtcgtctgaaatctaacaccctcctcgtcgctgaacgcaatcacctctactggtctagttagcctctcaagtttcccggtgaccttcaaaaaccttgagagcagagattgcgcagataatacccaaagctccgtcgtacatgcc

SEQ ID NO: 688 - DNA, 876 bp, Avena sativa
  modified_base (739)..(739): a, c, t, g, unknown or other
cggtgttcgcctacgcggacgacccctgcagcgccaactacccgctcatgcagaagctcagggccgtgctgatcgagcacgcgctggccaacggcgaaggcgagcgcgccctggagacctccatcttcgccaaggtcgcggagttcgagcagaatgtccgcgccgcgctgcccaaggaggtggaggccgcgcgcgtgtccgtggagaacgggacgccggtggcgccgaaccggatcaaggactgccgctcttacccgctgtaccagttcgtgcgcgaggtgtgcggcacggagtacctcacgggcgagaagacccggtcgccgggggaggagctcaacaaggtcctggtggccatgaacgagcggaagcacatcgacccgctgctggagtgcctcaaggagtggaacggcgagcccctgccactctgctgagcaaggtaatactgtactaccaaaggaaaggaaaagaaaagaacacgtacacacacactgaatatagaacacattccaagactgtgaaggaagcgggagggttcctgttattatctagattggcgatactctgtctatgtttctttgtagttataagttgttgatgttactgttgttgtttccagctgccgcgatgtcatgaacaggcaaaggcaggcagcttctcaaactttgttgttgttgtaacttgtatgatgggaaatcatgaagtacgtacattattttgtttcaaaaaaaaaaaaaaaaanaaaaaaaaagtttaagagaagaccggtcgccggggaggagctcaacaaggtcctggtggccatgaacgagcggaagcacatcgacccgctgctggagtgcctcaaggagtggaacggcgagcccctgccactctgct

SEQ ID NO: 689 - DNA, 637 bp, Avena sativa
ccgtggtgatgttgtccccaaggcgcaatgggctggcagttgcgaccatcaaaaccaagagaactgtccagttcgtcgactggtgccctactggattcaagtgcggtatcaactaccaaccaccttcagttgtccctggaggcgacctggcaaaggttcagcgggccgtgtgcatgatcagcaacaacactgctgttgctgaggtattctcgcgcatcgaccacaagttcgacttgatgtacgccaagcgtgcattcgtgcactggtatgtcggcgagggtatggaagaaggtgagttctcggaagcccgtgaggacttggctgcccttgagaaggactacgaggaagtcggcgctgaaggcgcagacgacgagggtgacgagggggatgactattaagttagctggttaataagtagtttgctggttaaatgattggttttgtgttctgtctactcggtacggtcccattgcgttgcatattgctctcatgcgtgcgtgtttccttttctgtaatgtgctaaaaaaatgctgttagtctctcctggtgaccatgattgttcatacctcctggtgaaaacgtttgcatcttgtagccattgtattgcttgtagactttgataccatgacaaaaaaaa

SEQ ID NO: 690 - DNA, 804 bp, Avena sativa
ggagaaatggcattaaaaaagggagatggtagagaagattcagaggtacgacggggagatgagtctgttgtgttgttcgagcatgatgatccgcggagttggaaaccatttgcccctgactggatgcaaccggtatggtgggaaatgttgtgtgaccattgggccaaagacgaatttatgaaggtttcttaccaaaaaagaaagaatcggaatgcaggaagccatccccgtgatgctgcagcctcaagaagtacaacaacacaccagcaggatatgacatatcaggatactgaggaggccagtgatactccgccagtcccccatcctgtgcaggagcaggtagggagctcgaagcgtgggaggcactatggtactcctgttgtcagcaagaaggcccagactgattcgtcgtcaaaatcctcccctgattgttcgaacaagcagggaggacaaccaagattcacagaggaacaggtgcagcagatgattaatcaagctctacaaggactaaatgagacttgggagaagaagtttctgtccttggagcagaacttgcgcaacatgtcatcatcacgtgttgctcctgctggtgctaagggatcagctgtgtctgttgcatgggacaagcggtgcctgcttgaacggcaggatacattagaccacgcggagggagataaagaccccgctgccgacggcgaaaaccaggatgagcactggagctgacccaacgtgagcttgtcgcggctcattttctcagcagggagcaagtagctccgcatgtagttcaaggtgtaaattccgtgc

SEQ ID NO: 691 - DNA, 651 bp, Avena sativa
accccagaagaaattagttatctcacttctcgcatacagaatggtgggacagaagtagttgaggcgaaagcaggagcaggatcagcaactctttctatggcatatgcggcagctaaatttgcagatgcttgtttgagaggattgcacggcgatgctgggatagtggagtgctcttatgtagattctcaggtgacggagctgcctttctttgcatccaaagtgcgcctaggtcgttctggcatcgaggagatcttgccacttggtccactcaacgagttcgaaagagctgggctggagaaggcgaagaaggagctgtcggagagcatccagaagggcgtctcgttcatcaacaagtgagttacgtacatactacacatgatcatgatcatcgtgttgggggatgcacgccctcaagtcaaacgcagaaaatcaaaatgcatatgctgtgtgtgtgataatatacctgtagaactatcacgaataatctttacgtctgtaacgaaatatgacaagtacccttgatatatggtaataataataagtagaaggtgcagacgaatgctcttttctagcatgggaaaactgatgctctttgttgtttattactattgttaccggtgaagaaactatacatttgtatcattctcggga

SEQ ID NO: 692 - DNA, 772 bp, Avena sativa
aagccgcagcttcttctctgcctgctcgtcgccgccgccgcgctgctgctcgtcgcctccgccaagacggccgccgacgtgtcggagctccagatcggcgtgaagttcaagccagagtcctgcagcattcaagctcacaaaggtgacagagttaaagttcactaccgtggaaaacttactgatgggacagtttttgattctagctatgaaaggggcgacccaattgaatttgagttgggcactggtcaagtgatcaaaggatgggatcagggaattttgggcatgtgcgttggtgagaagcggaagctgaagatcccttcaaagctcggctacggggaatcaggatcaccacctaccattccgggtggagctactctcatattcgatacagagcttgttgccgtcaatggtgaaccggctagcaaatcggacgagggcgatgttggcagtgagctgtagagagctggaacagcgcaatcatccttcagatcaaccaaagcctagttttcgaatcgaatagatcaatgcagtgcacgggattcttagtcgagtagggcaaaacgctatgaattcagtagaggccggaacattatcttaccatgatcaattatgagttctgttgtcataatggaatagatgaagtgactttggtaccctgtgcaactcttgccctcctgaacaactctccagtctataattctatgttcgtgatcagttgtgatatgtttgccttcatggaatggttctaaattaagatgagttatgtcgaaaa

SEQ ID NO: 693 - DNA, 753 bp, Avena sativa
atcgctcaggtgtgtcactatatgggcgagatcctgccctgtcagcattacgaccttctggaatgcatggtgctggccctctacttacacagataacccaaaccatgcaaatcccacttacctatgcagaagatatcataggagtgaaaggagcaaacattgcatatatacgagctaacagtggtgctgttgtcacaattcaagagagtttgggaagccctgatgatataactgttgaaataaaggggacgtcgtcccaagtacaagctgcccaacagctcatccaggactccttggctgcacacagagaacctgtaaggagcagctatgcaggattagatccattatataggtcgagctacacgcagtatggcagttcaacctatcagtcatcgtccctgccatcttattctagcatggatggtagcggatattcttcgtcgggtcttggcgggtatggtacgacttaccggtactagctggtacctatttgtcatcaagccaccctgtatccgcccctgggcgatcgttgtatatgtcagcaacatttgctctgctgacttcgtgttcctctgagagggactgctagggtcgtatcgtatcgtatccagctgcgtgttttagtttctacttggtctgtagatgctcttgtttccaggaagtctactgtttagtcttttgtgtgtggtgaatgatttgatgacgatcgcctgtcctgaaagaaatgtaattcatctgttggtaacaaaaaaa

SEQ ID NO: 694 - DNA, 716 bp, Avena sativa
ggtttgttccagcaatactgcagattgaaacatgaattggatgattcattcataagacaagaggaagcaagcggcttcctcaatgctcacggttacatgacaccgaaagggaactacttcactgaacaaactacagctacacgactctgaatcaagtcgctgagtacacagtcacaaccacacatacagagcctagttcatcctgagaccggtccggatctaggccttggcggccttcttgggggacttggcagtcttcttgggcgacttggtggcggccttctctgccttctcgacggacttcttggggagcagcacagggttgatgttgggcagcacgccgccgtgggcgatggtgacgccgccgagcagcctcccgagctcctggtcgttgcggatggcgaggagcaggtgcctcgggatgatccgggacttcttgttgtccttcgccgcgttgcccgcaagctccagaacctctgctgcgaggtactcgaggacggcggcgaggtagacgggggcgccggtgccgacgcgcttggcgtagcggccgttcttgaggtaccggccgatcctgccgacggggaactggagcccggccttgacggagcgggtcaccgacttcttcctcggcccgccgagcttcttcaccgccaccttcttcgccttgctgccgtccatctccttgctgctgacttgcttgctccggcgagaatccc

SEQ ID NO: 695 - DNA, 869 bp, Avena sativa
aactggactataacttgtagaaataaatccagcaaactattcagaaattatttccacatgtatcaaaaatttgacgcatgttccattaatttccttgcattttcagaattattccatcgagtatttcacaagtatcaactaaatatctacaaaataatagagaaacccgtccatccatgaactgtttcgattttttttccaaaaatatcaagaaggaaaattaaaagggacaaagagggtcctacgcacctacaaatacagatcaagcttgccatggcagatctggctataactagccaagatcaggcccgccatgaccagatcaggcacgagctcgcgggcaattgctcgacgttgggcgagccgtggcttggaagtcggagtcggagtcggatgacgaagaggagggggaggagccggaggaagaggcggggcccttcttggcggtgacggcgagcttcatgccggagtagcagtagccgtagctgcagatgaagaagtagtccttggcctccttgagctggaaggcgtagctgatccccttgttgtggctggtgatggcgctctccttgttgcagttgtcgtacccgacctcgtccacctgcaccacgtcggaccgcccgttctggtaattgaacaggagccagtcgcccttgtagaagggcttgtgcttcttcacccaggcggtgtagtccaccttggggttccaccccttctcgtcgcccaccgtgtagttggtcgccaccgccgccgacggcagcaacgccagcacggccagaaccagaacgccagcactggcagcagcatcctgcttgctcccctcatcctccggtgcgctgctcccgatctagattgttggacgatgtggg

SEQ ID NO: 696 - DNA, 685 bp, Avena sativa
gcttgaatgggacttcaggctaccattggtgaagagcatcaatgttagtgggcacaagtatggccttgtctaccctggtgttggatgggtcatctggcggagcaaagacgatttgcctgaagaactcattttccatataaactacttgggagcagatcagcccacgttcacattaaacttctccaaaggtgctagccagatcattgcacaatactatcaactgatacgtctaggcttcgagggatataagcacatcatggagaattgccagttgaatgcaaccgcactgagggagggcttagaggcaactggccgattcgacattctgtccaaagaggacggtgtgcccctagtggctatccggctcaaggacagcagcaagttcagcgtgtttgacatctccgagaacctgaggaggtttggctggattgtgccggcctacaccatgcccgcggacgcagagcatgtggcggtcctccgtgtcgtcatcagggaggacttcaaccggagccttgcccagcggctcctcactgacatcaacaagattctgcaggagctggacgcccacgcggtccatgccattaagatcaccactgctaccgcaacacagaccagcgaggtgccgaggacgttgtggaaaccaagaagagcattctggacatcgagaagaggttcgcggcagcct

SEQ ID NO: 697 - DNA, 707 bp, Avena sativa
gccatgaacaatgggagctccgtcccagcgctcgccactgcagcagatgcaccgaagaaatttgctatgccagagggccctgttgaaacgggtgaagagaacgaacaggctgtatttactgctgactctgcaatatatgagtacctcgatgggggctggaaagaaagaggaagaggtgaactgaagctgaacatcccagtcactggtggtgagagatcccggctcgtcatgagggcaaaggggaactatcgactgatcctgaacgcaagcctctatgacgacatgacactgaaggacatggacaagaagggcgtgacatttgcttgtatcaacagcatcggggaatcgccaagcgcgcttaccacatttgctctgaagttcaaggacactggcatcagggaagatttcaaagatgcggtggagacgcacaaggtgaagaaggcttcggacgcgctgaagacacctgagaactctcccaaggcgtctgatgattgaggccgcaccctggtggtgcgttttggtgtgtatgtgtcaaaggaaggaggttgcgatgctccttgttcttctggagtcttgaattaaaacatttgtcgtccctatgtcattattattatgccttaagacgcaccctttctggtttcctgtcgtttcggaaccgtgggtaatatgttgaactaactttaattaaagtcaaagagtattagtaa

SEQ ID NO: 698 - DNA, 798 bp, Avena sativa
ggttctatgaccatgtccccacgccagtagaaggagtgccccagccagatgggattgttggacctgacccttactacttcaagtttgagcggcttggggtgcgcgtgcccagtttccttatctcgccgtgggttgagaagggcactgtgatccatgagccaaatggcccgttgccaaactcgcagtatgaacattcatccattcccgcaacagtgaagaagctatttaatttacattccaacttcctgacgaagagggatgcatgggctgggacctttgagaactacttgaagattagaaagacaccaaggactgattgcccagagaaactcccagaggtcacaaagtctctgcggccgttcggtgctaacgaagacaagtctctctcagagtttcaagtggagttgattcaacttgcctctcagattaacggtgaccatgtgctcaacacctacccagacattggcaagacaatgactgtagtggaggcaaaccgctacgcagaggatgctgtcgcgcgattcctggaggccggcaggatcgcgcttagagctggcgcgaacgaatctgcgctagtgacaatgaggcccgcactcaccagcagagcagcaatgtcctccggtttaacatctgaactctgatagatgattgttcacgattggcactatgtcagctgcaacatatggttgcatcgcatattggatagagaatcttaaacatggcttttgtacatagacaccatgatacttcgtatctgaagcttgcttcagcggatcgtcgtggtcacgctgtgatatc

SEQ ID NO: 699 - DNA, 770 bp, Avena sativa
tttacctctaactcaagttcatatatcaaataatggaggtcacgtgattacataacttaaatagtgcatatcctcgaaacaaaaatatccgatcagaaaagaaagaccattccacgatggttaaagaaaaggaacttacttgataccagggggccatgcgcttaaaaaaatgtactccaccctgttcaaggaagctgagcaaagtaccagttcttggtataatcagagacaaaaacacaatttcggattaaagaacagaaacagagagaccaccaacacagaaagtacaaggtctgaatatgatattaatatgtacttcgaaagcatctccagatacaagaaactgaaacaatgagcagcattgcactaacagcacgtagcggtggtagtgttactcagcagcaaaagatattaataagatcgacactgaactgtactgctgatgtctttgtctttccttggggtaacaccaatctaacatctattgttgatcctcgaactcgtggccatgatccaaaagatagttggcagccagttcttcatccctgttgcacgcaaagaagacctccaacacaagctcacggttgaaacccatcccctcgagccgctggatggcatcccgttcttctggagtaactgtaaccggctgtggcaattgagctgctaacgcgcctaatatatttgtggacgcgccagcaccactctcaggagtttcgttaaccaggcggagaaactcagcctgattttcctgaatcaaccgcaggatctgt

SEQ ID NO: 700 - DNA, 817 bp, Avena sativa
cgtatctgtggtgatccaaattctgtgatgcgttttgcctttatcgagtttgctgatgacgttggtgcaagagcagctcttacgcttggtggaaccgttcttggtttttatcctgtcagagttctgccatctaagactgcgattttgcctgtgaaccctaaatttcttcctcgaacagaggatgagaaagaaatggtatctaggactgtgtactgtactaacattgataaaaatgttccggaagatgttgtgaagaatttttttgagggaatttgtggtgaggttgctcgactgaggctgctcggtgattatgtgcacgcgacatgcatcgcctttgttgagtttgttcaggcagaaggtgctattatggccctgaactgcagtggcatgcttcttggctcgcttcctgtcagggtgagcccatcaaagacaccagtccgtccccgttcacctcgcgagatgtcgcactgaatctggtgattgtctgaagctggcgtccagggcagcaattctgggcaacaaacccctagtcgtggccttagagactgtctcgtcgcggatcagtaactgtccttgaagagagtgttacccttttggttatctaggctagtagaaggcccttcctcgctgatgtttcttggatcagatgagagacccatctgtatgttctttgctgggagctctattttacttcttcttttttgtctatatcgttattaatccgtttgttaattctggatgaatgctgtagcagcctttcgacaggcattggaacaataatgtctatggcttgtcctatttcgacttcctgtgaatt

SEQ ID NO: 701 - DNA, 768 bp, Avena sativa
ggcggtcgtgacagtagggtttcctgattcccgtcccgcgtacagcttaggcgaacccttctcctcttagctctcccttccacacgactcgtttcgtcccctctctcctcgtccgccgccgccgccgccaaccatgggcaggggcaagttcaagggcaagcctaccggccgtcgcaacttctctaccccggaggagatcgctgctggaacttcagggcgcccacgctcgtttaagaagaatgtagctgaagcagaagaggaagaggaagaaatagaagaatctgaagaggaagaatccgaagacgaaggtgaagagaagaaacataaaggaactgaaggtgttattcaaattgaaaatccaaacctggtgaaagcaaagaatataaaagccaaggaagttgatctttcaaagacaactgaactctcaaggcgtgagagagaggagattgagaaacaaaaatctcatgaacgctatatgaagcttcaggagcaaggcaaaacagatcaggcaaagaaagatttggaacgtcttgctttaatcagacagcagagagcagatgctgcgaagaaacgcgaagaggagaaagctgctaaagaacagaggaagactgaagcgcgcaagtaactgtgaagattgtggaggcatgagctgagctgtgttggctggatatttatttttattgcatctagtatatttaaactcgggtctctattcaatctatatttccataaaatcatgcattgagaaaatgtaaagtagtcctgcgg

SEQ ID NO: 702 - DNA, 911 bp, Avena sativa
ccggaagcgcgtcgtcggcgtgctcctcggcacctcctcccgcggcaccgtcgacgtcaccaactcctacgccgtgcccttcgaggaggatgacaaggaccccaggatctggttcctcgaccataattaccatgagtctatgttctccatgttcaagaggatcaatgccaaggagcatgttgttggctggtacagcaccggtccaaagctaaaggagaacgacttggatgttcatgcgctgtttaacaactatgttcctaatcctgtcctggtgattatcgatgttcagcccaaggagttgggaataccgaccaaagcatactatgctgtggaagaggttaaagagaatgctactcagaaaagtcaaaaggtgtttgtgcatgtgccttcagaaattgctgctcatgaagtcgaggaaattggagttgagcaccttctgagggatgtgaaagacacaacaataagcacacttgcaacagaggtcagcagcaagcttgcagccctgaaaggacttgatgcaaggcttagggagatccggggctatctagatcttgtaattgacgcgaagctcccactgaatcatgagattttgtaccacttgcaggatgtgtttaatctgctccccaatctcaatgtaaatgagcttattaaagcctttgcagtgaaaacaaatgatatgatgctggtcatatacctgtcttctctcatccgaagtgtcatcgcactccacaacttgatcaacaacaagatgctaaacaaggaacacgagaaggctgaggatttgaagccgtcaggcggcgagctcttctcccggtccagcagcgaatgaagaagagtttgctctagcttgagttggctccacgttgcaaagttcgtcgaagcaaacatttcaccagcagagcctatatctg

SEQ ID NO: 703 - DNA, 855 bp, Avena sativa
gacctccattggcgctctcagttttcttcatggattagagggcaacccaaacgaagggaacatttacatcgccaagaacacaccaccatacatagtaaaactataccaggagcaatttcgaaatgactttctgctcttcctcaaacttcgatacgaagaacttgtgtttggtggacaaatgctgctgacatttctcggaaggaaaaacgaggatgcatacagtggagaactgaaccatgtctatgggttacttgcacaatccatacaattcctagttgaagagggtctcgtggagaaggagaagcttgattccttcaacctacctctttacgggccatcggtcgatgaagtgaaggcagtgatcaagcaaagcggactattcgacattaacaggattgaattgttcgagcacaactgggatccttatgacgaatcagagagcgatcatgtagacgaccctctccaaagtggcataaacgtcgccaagtgcttgagagcagtgatggagcctctttttgcgagacattttggtgaatctgtgctcgatgccctcttcgataagtacgcgcataatgttgctgaataccttgagagggagaagaccaagtactcaatcatagtcttgtcactgaagaaaggataacatatagctatgttcagtgtgtattgtatgaaataaatgtgcatgggtctgatgtctgaataattgcatctacgctggttgcatgtaacgagctctgaacatgctgttgtccagtgaggcagtgacgtgagtctttaaagtcgggtgtgggttgtatgtatctgcgttccagtttgatgaaatctcataatgtatgtgtactgtatgacgtg

SEQ ID NO: 704 - DNA, 706 bp, Avena sativa
tttacaagctgcaatgcttatgttaaattttaaatttttttatttttccctttaacttagttatttactacagaaacatgatcgagtagcctaaaagtacaaccgtactaaaccttgagaaataaacaccatcggttaaaaaggaaatcgaagaaggggggaactaatgtagcccctaatgtaaacgtaacatagaagagcaagtaataataccagtgtttttagagtacacgcactccaccgcacaagacacaaccaacagcctgaacctgaatacctgaagacctgatgcacgaactgaacctacagactgaagaaagcacgcactgaacctacaaactgacgaatcacgcttgctacgtaccggtacacgccgcctcaccgcctgccacagcaagcgctaacgcaaaaggcttgtggatggatggatctacttccctttgggcttgccgttggcctcggcactgccctccttggggttgagcgtgtcccatgcctcgatccaggtgaccatggcgtctgcgagcttggcgaagtaggggtcgatcttgccgagcttctccctgacctggtgcgagagcgctatgtagcacttctgcacggtgtcgcagtccttggtcagcgtggcggcctggaagaaggggatgatgtcctcctgccagaagatgcccttgtactccttcttgaggttcacgaacgggttgct

SEQ ID NO: 705 - DNA, 670 bp, Avena sativa
ttttcactgagggcaagactaaatcgccaattgcattgctggtaccacatcatttcgaataaaggctagaataaacaatatggcatccaattctgtaaccaaaagcaaatctagcctacaaaattagaggctaatcccgacgatcaactcaacttcaactccggtatacaaagtctagtaacaaacgttgaaagaaaaccacataaaacaccattatttgttctgattaaccgtgacacaataattcaacgtcgggcaaaatttaaaggcaacaccagttaagacaatgcagcgctggagacagcacaggacctttcacttccctcctcccagggtcgggaactgtgatttatcttcaatggatggtgcggcagctggtccgcgctggtatccccctccaaatccacctctgaaaccaccacggtctccacggccctcaccgcgtccccttccaagaccacggccaccatagtaccgttctccctcagcaggtttcaggaactcattgatgctcagcgacttcttggcacgctcatcgcgctcagtactttccttcttcttatccttgtcagcacccaatttaatgaaaatctcatcattggttttcttggtagacagtggctgcagagactgcaggtccttgtcaacttcaaccttcctttcttcagtc

SEQ ID NO: 706 - DNA, 925 bp, Avena sativa
aatcgaacatggaaacaatcagctacttctctgaatttccttatatttggtacctaggagagctcttgaatgagagtacaagaatgaggaaaatgaaatttctcttctgtgttgatcatcacttcaacccttatttacattcacttgtgctgtcatcatgctccatgccctgagttgtggcaccctgaccgtggtgcttccattgttgaaggcatacatgtggaccctgtcgtccgcggcaagtgccactggatacactctggccattatgcagaccttaccaccaccaccaaagctctccaccgccgaccgatcaatcagagttctgagagagatcttcctttccttttcaaggtcaaattcaaagaagcctccataggctggtgtgtacagttctggtctcagagaagaccttcttaggtcagagcacatgaggaccatgtagctttgctgtgatttgtaaactctgaagtgcacagcagtgtgctcctccatgctgtcagaggccaggacaacaagcccaaatggccctatgccaccttgaaccgatgcacctgcttcccggcaatgcttctcgacatccaaaagccaggaaggatcaaaaggatcggcactgtcaatggacgtcagctcaaaatctacctcaacgtcagcctgcaaagtgtcagttcccttaatctcaaatagatctcccttcttcagctctagttcttgatggctgatttcatttcttcggagggattcaatctcatcaattggccattgcagcaattgtttgccatcgctgtctaaccaaattgtcctggggattgcatggatacctgcccagccttttgcaacatcatctaaaggactatctgtctcgttagaccaaccccatacgatcctcctgcccttttcgagtcgaagaacgatttggaagcat

SEQ ID NO: 707 - DNA, 817 bp, Avena sativa
agaattatcatcttcaatgatttcgcattcatttggagttgctgatatgggattcaattctatagattctgcaatcaatgatcccacattgttaaatagaaattcccggccaccagctcctgcacaacaacgcatgcgaacctacaccaaggtgcacaaacgtggtgctgttgggagatctatcgacatgaacagatattctggatatgatgaactgaagcacgacattgcgcgaatgtttggtattgaggggcagcttggtgatcaaagtagagttggctggaaactagtatatgaggatcacgagaaggatgttctactagttggtgatgacccatgggaggatttcctgaattgtgtacggtgcatcaggattctttctccacaggaagaaatgcaaatgagattggttggtgactttggagatggctttttacccaaccaagcctgcagcagctcagatgggggtcaaccttggtaattgtaaactttaatgacccatgtagtgtctggcgctgcgacatttttctcggtcagtctaatgaatacagatgccgatgatgatagatgacgataatttaggctctgaaattctgagattgagtgaacatgaacatgaacaacggttcatactcttgtctcatattttttgtcgaccttgcgatctacatatatggccaacccatattttctgctcccttgtacatgtcattgctgtcagatgtaacagtttgtcacatacccagatgtatgaaactacgtgtaacttgctacagattctaaatgaaaaagaaatcatattttcccttgttcaaaa

SEQ ID NO: 708 - DNA, 631 bp, Avena sativa
  modified_base (610)..(610): a, c, t, g, unknown or other
  modified_base (623)..(623): a, c, t, g, unknown or other
agaagcggaagactgatgaggatgatgtaactgcttctacacctgcaaagaaggtcaaggtggaggaggtcactgaggttgtggaagaggagaagagtgagaagaagaagaagaaaagaaagacaagggagaaccaggatcagctgtttcagtgaaggaggaggagaagatggatgtgtctgaccaggagaagggtggcagcgagaagaagaagaaaaagaagaagaacaaggaaggcagtgatgttgctgatccagagactgctgaagttgagaaaagcgagaagaaaaaggagaagaaaaagaagaagaaagatgcagaggaggaggcacaataggtagggcgttagtctacatttcctgttcttatttggttgcagttatgggggagtttgaactatctttcttgttatgtaccccttgcaatccttcatggtttggaagtcctaatgtactatcattagattacttgccattctactgaaatgctatggtaattagagagatttcccgttaagtttcttggacaatgaggcctgttttgctgtatcagttatcagttaatgcagtgaattttgctctacaaaaaaaaaaaaaaaaaaaaaaaaaanaaaaaaaaaaaanaaaaaaaa

SEQ ID NO: 709 - DNA, 656 bp, Avena sativa
cgccttctccgggaaggaccccaccaaggtcgaccgcagcggcgcgtacatcgccaggcaggccgccaagagcatcgtggccagcgagctcgcgcgccgcgtcatcgtgcagatctcctacgccatcggcgtgcccgagcccttgtccgtcttcgtcgacacctacggcaccggcaagatccctgacagggagatcctgaagctcgtgaaggagaacttcgacttcaggcccgggatgatcagcatcaaccttgacctcaagaagggcgggaacaggttcatcaagaccgccgcctacggccactttggccgtgaggaccccgacttcacatgggaggtggtgaagcccctcaagtttgacaaggcagcatccgcctaagaagtaagaacacattgattggcccacaccactggctttcattagtgactccgattgctccacactaccggctttgatgacctgggaaccacaaccagtatgtggcgccaagttttcttaccggtcgacctgtctggtcgtttatcctatctgtcttttgttttggctgtggctattggacggctagctgttctaaaattcaggcacattttcaaaccaataaagagctcacaggtgtatgagaaaatctggagaccsaaattggctttgtctgagt

SEQ ID NO: 710 - DNA, 943 bp, Avena sativa
tattagcacagatctcaacttcctcgcacattatttattccgcataggttcacaaagtatgaaagagaaactaatctacagttcaaaactgttcggtgcacggtacataaaacatgacgctaggtggagcaaatatcaacctccatcaggcttgctcaagggctttacattaccatcccaccatcaatggtaagcacctgtccggtgatgtagccggccgcaggattcagggccaggaactcaaccaacccagcaacttcctctggctggccatatctccccaagggaatagtcgacaagattttcttctcgatctcctctccaagttcagcggtcatgtctgatgcgatgaatccaggtgcgattgcattcacattgatattcctgcttgcatattccctagcaactgtttttgtgaagccaatgaccccagccttggcagcactgtaattagcttggccagcattgccagtaagaccaacaactgatgctatgttgataactcttccctttttcttcttcatcattattttagtggcagcctgtgtacataggaaaacaccagtaagatttagatcaattacgtcttgccactgggatttcttcatcctcatcaacaatgtgtctcgtgtaatccctgcattatttaccaggatatcaatggttccccatttatcaatagctgctttcatcatagattctacatcagcttcttttgaaacatctcctccaaaggtaatagcctgaccaccagctgcttcaatctcttgggaaacttcttcagcctctttggaggaccgtgcatagttcactagaaccttgcagccagcttttcctagggctaatgcaacagctttgccaatccctctggaagcacctgtaacaacaacaactggagcttccagctctgtaacagcttgcacaactggagcttcaacagcag

SEQ ID NO: 711 - DNA, 636 bp, Avena sativa
cgcaacacgaactacgtggatgctgtgatgacagttcctctcggtgccatgttgcctgtgagcgggattaatgttgcgttcaaccgtgaggttctgggacccgtgatgttccctggcctgaggatacgcaaggaagggaaccacaggtgggatacccttgaggacatatggaatggcctgtgtgccaaaattgtgtgcgacagcttgggctacggcatgaagactggactgccttatgtgatgagaagtgatgcagaggcaggcaaggccctggagagcctgaaagactgggaaggggtgaaactgatggacgatgtcctccccttcttccagtctgtcaagctgtcgaggaatggagttactgttgatggctgcgttaaggagctagccggcatcgtgagggagaagctggcaccgaagaatcccatcttcgccaaagctgctgatgccatggaggaatggactaagctgtggaaatctcatggagctcagagcgcgtagtgactagccatcatcaggaacacctaattttttttcttataagacttttaaattccatatgctgtcatgaagctgaataaacaatgttcctgtgctagaaatttgtgatgtagtaaccaggtgagttcggctgtg

SEQ ID NO: 712 - DNA, 320 bp, Avena sativa
  modified_base (295)..(295): a, c, t, g, unknown or other
  modified_base (312)..(312): a, c, t, g, unknown or other
atcatctgcgcagtctaagcctcagggaggcgagattgttgtccttgttggagggggcaggactattggggataagaaggtggaggtcagcataccgactggatctcaagttgtatattccaagtatgctgggacagaggtcgaattcaacaatgccaagcatctcattatgaaagaggatgacatcattggtattcttgagtctgatgacgtcaaggacatgaagcctctcagcaaycgggttctgatcaaggttgctgaggcttcagataagactgatggtggccttatcctnaccgagacaaccaaggnaagccatc

SEQ ID NO: 713 - DNA, 811 bp, Avena sativa
ggatccgttgcccgtttattattccccttcgtgcagccgccctcgtgtttcgccttctcgaagcaccccaccccaccccaccccatggcggaccagctcaccgacgagcagatcgcggagttcaaggaggccttcagcctcttcgacaaggatggcgacggttgcatcactaccaaggagcttggaaccgtgatgcgatcccttgggcagaaccccaccgaggcagagctgcaggacatgatcaacgaggtggacgctgatggcaacggcaccatcgacttcccagagttccttaacctgatggcaaggaagatgaaggacacagactcggaggaggagctcaaggaggccttccgcgtcttcgacaaggaccagaacggtttcatctcggccgccgagctgcgccacgtcatgaccaacctcggggagaagctgaccgacgaggaggtcgacgagatgatccgcgaggccgacgtcgacggcgacggccagatcaactatgaggagtttgtcaaggtcatgatggccaagtgaggagcgggtcctgtgaaataatctttgctctggatttggaattactagacactcgaaagttgtattttggttgctatgcggcccttttaaagtactctctgctcgtgggctggaatgtttcggtagtgatgatgtctggttaggtggtgtagtcgtggggagcaatatctggacacctggttttctttcgattgtggctcttatcttgcagctgttagggtcgtctcatatcatggattttagggctttgtgttgctaaatctcttctatcagttta

SEQ ID NO: 714 - DNA, 814 bp, Avena sativa
tttttttttttcaagatatcaccaacgtgcgattataagaaattatattagtatatcatatcaatgggatatattatctcccttctcctaaagttcagggaaacaccctaagcccttcaaagatacatggcagctagccagatacactgactgctttcttattatttcatctactcaagaattgaagaccatcctcgccatcttggctcatggaagtgctggcagaaccttccccgtgcaggatccaaatccaacgttgtagtcctcacccttgcagcaagctgtcaggatgacttcatccccatcttcgaggaacttgcggatggaattcccaaccggtatctccttctgcccgttccacgttatctccagcaaacaacccagagagtcgggttcaggtccactgagggtgccagttgcaaacatatcccctggtctcagattgcatccattaacagtgtggtgtgctagttgctgcgtcacggtccaatacatatgtttgaaatttgtctttgtgacaactgatggatcactttgctctttgggcttaatccaagcttcaagaggaatgtcatagttgatgtgattcttttcagctaagtagggcaaaggctcaggttcctgcttaggagcctcacaagcaaaaggtttaagggcatccagggtcacaatccaaggtgatactgatgtactaaagcttttgccaaggaaaggtccaagaggtatggtctcccaggcttggatatctctggcactccaatcattcattaccactaagccaaatatatgatcctcagcatcatcaataccaata

SEQ ID NO: 715 - DNA, 574 bp, Avena sativa
cgcatcaaccttaacaaatcccgactcaaaacattggtatcaaatacatcaaggatgcaacactgacataaaggcacttggaaattcatggacggatacggtcactccatggccttacacagctttcctctgtgcaacgacgttgtcaggctccttcttcacgggctcttccttctctgacaagatcagctcaatgtggcagggattggacatgtaaggattaatgcgtccgtgagcacggtatgtgcggcgcctctgcttcatggcttggttcacctgaatgtgtgaaatgtagaggctgtccacatccaagcctttaacctcagcgttactctcagcattcttcagcaaatccaacacgaactgggctgactttgcaggccagcgaccctgcccatttggctggcggttctttgcttgtgcggtacggccaacacctctgcagtacctcctgaagggaatagcttgcttgtgggccaaaacatcctcaaggtacctcttagccttgttcaaaggcatcttgcgaagggcaaacgctgtctcacgtgtgttcttgaagtggacatcccgggaa

SEQ ID NO: 716 - DNA, 554 bp, Avena sativa
aaacacaggtctcacagggcagtatctctttgattcagctaagttgggtaaaagcagaggtatcgttctaagaacgcattaatactgagccataccaattttaagattcccggtacaaagcaaataccacacttatccaaaagttttcacacactcaacatctcatagtcacggcaccaacattgacgagttaactgacaacgatagaacagaccaaaaatactgaagactgcatagattttagcatacagtgcaattagcacttgatctcgttgaggccatgcgcgaagtagaggaaggttgggtcggtggctccatccttgtagtaggcaaacaccaagccaccatcatcatgcatgctctcaccaacaaagaactgaaggtccttgagcttgccaagaagaaacttggtagcagactcgatgttcttcttgaaacattcaagctcctctccttcgagcttggcactgaggttcttgatgtagcgcttcatgaaggtgataaactgcttcttttcaaaagtaggttgctcctgaagacggaaggtggttgac

SEQ ID NO: 717 - DNA, 784 bp, Avena sativa
cgatcgagcatagcaatggcgccctccaagctcgccttctcctcaccgtgaacctggccctcctcgccgcagtgcacggctgcgggtcacatagctgccaaccccaccccggtaccaaccccgccgatcgtcgtccctccgccgcctcctgtcggcccccacgccggtgcccccaagcccgtcgaccggcggcggtggcacctgctcgatcgacacgctgaagctgagcgcgtgcgcaaacgtgctgaacctgctcaagctcaacctcggcgtgccgtcgaccgagcagtgctgcccgctgctttctgggctcgccgacctcgacgccgccgtctgcctgtgcacggccatcaaggccaacgtccttggcatcaacctcaacgtgcctgtcgacctggtcctcctcctcaaccagtgcggcaagacatgccccgccgacttcacctgccccgcctgatccatccatccatcagtccaacgcaagccatgcatatatatatatagtcgtccacatcagcaccatctgcatgcaagtcatattcgtaattaagttctgcatgttatatatataatttccagtccatgcatctatacatgcatgccagcatctaagtaattcctatatatatgtttcggtgtgactacgtataagtcaccattgtatatcgttgtggtatccaagtggttcctatatatgtctgtaaaaaaggatatataacatatgtggagtacatgtgtccgtggaataataaaactttgtgttcgtgttctctcttaaaataaa

SEQ ID NO: 718 - DNA, 1007 bp, Avena sativa
catacggtgaatggagtggccgagttgcacagcaacatttgaaggaagagctgttgtagattatgtctctatctggcccaagaaattccagaacaaaaccaatggaattacacctcgcaggtggctccgtttctgcaaccctgagttgagtgaaatagtcacaaaatggctaaaaacagaccagtggacaagcaaccttgatcttctcatcgggcttcgcaaattcgccgatgatgaaaaacttcacactgagtgggcagcagccaagttggccagcaaaaagcgcctagccaagcatgtgttggatgtgacaggtgttacaattgacccgaacagccttttcgatatacaaattaagcgcattcatgaatacaagaggcagctgatgaacatcttgggagctgtgtacagatacaagaaattaaaggaaatgagcgcagacgagaagcagaaggttacaccacgcactgtcatggaattcccgggaaggcatttgcaacatacaccaacgctaaaagaatagtgaaattagtaactgatgttggtgctgtggtgaacaacgatcctgacgttaacaaatatctgaaggtggtgttcattccaaattacaatgtgtcggtggccgaagtgctcattccgggtagcgaactgtcacagcatattagtactgcaggcatggaagcaagtggaacaagtaacatgaagttctcactgaatggctgtgttatcattggaactcttgatggagccaatgttgagatcagagaagaagtgggagaagacaacttcttcctattcggtgccaaggcagatcaagttgctggtctgaggaaggatagagaaaatggcttgttcaaaccagacccacgcttcgaagaagccaagcagtatatcaggagtggtacttttggtacctatgactatgctcctctcttggattccctggaagggaactctggatttgggcgtggtgattacttccttgttggctatgacttcccaagcta

SEQ ID NO: 719 - DNA, 618 bp, Avena sativa
  modified_base (10)..(10): a, c, t, g, unknown or other
tttttttttnttttttttttattattgtacttggatattttagttttaaaaaaaattactaaacaataaaaatagtattttttttgtaatatttgtaaattcgagcttccttttggtagtttccgttgcaatgagagcattgtattgtacagaagaagctttcgttgatctggtaaaatagcgtccccaacagcccaatcccaagagaaaaaatgacacatagaaccagaggccaaatacaccaatggctctttatttcctcccaatgttgcagcgaacaaattatttaatctacagtacaccacagctgcgaacctctccggccgatcatgagttcaaccaccaccatttgcaaagcttcggctggaccacctcagaccttcgatgggggatcctggataccgcaaaccagatttgccggcacaactacatcgatcatctttgggtaagacaagttcaggttttccataattgtcttgaatgtttccttatctttcgttaaccgtgcattgtaggcagactcctcttcaacagttgttactgtgaaacctttgtagtcatggctggataaagcagggtatctttggcaacgtgaaaaatctgtgaatggactgactg

SEQ ID NO: 720 - DNA, 849 bp, Avena sativa
gatgtatttttccgcacacatcgtcttttacataaaaaaacaaggcgttgagttccagtaccacaaagcattacagcagcaaagccatacgatatacacaaggtacgcattaaccatatggtgggatttaatcatggcgtgccgacacacgagcctcttatccgtaaaccccacacatacaatactcgtcaaaacagaccaaggtcacacaatgcttgactcagccaattacaagtaacacaatgaaatcaccaaaacagaggtataacaaaagaaatcaataggcatttaacagccggcaaacccagaaataccagaatactacaaatgctctcgcctgaacgctcatttgaagccaaactggtacttgttgtagttcgccaagctctcgatgccaccgccttgtgtagatggaggaattccagacatccctagaccagatccccctgcgcccatgctccatgagggttgatgagccttgtcatctgacccatcaccgaggccgcccacgatcccaacgtcggctaagttcaccttctttggtccagttatgttcagatcaatcaatccacggctcaaagagtcggcccatatgctagatttgacctggacattttctttcttggtgttagacttgggagctgccagaggtgtttggcctgtccttccattgttgatactagaagagagatcgaaggggtccttagcagcttctgcagtgtttgctacgaatgcaccaaaatcagatgcgtcggttttgggagctgccaaaggtgatacatttgttttgccaaaattgccacgggaagaaaaatcaaagggatccttagctgcgcctccagtgttaga

SEQ ID NO: 721 - DNA, 864 bp, Avena sativa
tttttgtagaatgatgatatcatttattgatccccgggtctctcacttcggcacaaaaatacatacatctacagacatagcgtactcaggaacaacagacagccagtacttaaatcggtgaagcctgctacataaaacgtcctcctttttttctccttttaatacaatgatgactatcgaggaatcaacttatcactttcaacgaatcaagcagatgttctataaacttacataggaattcctttttctcctttctgtcgaagctgttgcatatacttgtcaggtcgagtgcttggcgatgagtttatcaacgtggatgatgacgtcgtcgatatggggacgaactgcagggtgtggctgcagcatccaggttacgaattggcggagactgtcagggtaggacgagccggtctcagcagaccatttaacctgtgcgcttttgatgacagttactaagctctcgccagcagattcatcaagctcatagtcaaatggggatttcccgtacatcatagcatagagggtgcatcccaaagaccatacatctgtcctctcgtcgatatctgcatggcttgggcactcccataattcaggtgcccggtaatgcgcagaacagtgctctgaagcccattcctgcagctgcaaagcttctgcttgtgacctaatagctcttcttgcagggcgagcactttcaaagtccatcaagatagcaagatgctggtccttcctctgagttatgaggacattgtcaggtttaaccccattgtgagcatatggtggctcaaaactgtgcatatgcttcaatcctgcacatagttgacgaaatatctggagaatagtgattgttggaaagtattctttctt

SEQ ID NO: 722 - DNA, 696 bp, Avena sativa
  modified_base (67)..(67): a, c, t, g, unknown or other
  modified_base (69)..(69): a, c, t, g, unknown or other
  modified_base (71)..(71): a, c, t, g, unknown or other
  modified_base (73)..(73): a, c, t, g, unknown or other
  modified_base (75)..(75): a, c, t, g, unknown or other
  modified_base (77)..(77): a, c, t, g, unknown or other
  modified_base (79)..(79): a, c, t, g, unknown or other
  modified_base (81)..(81): a, c, t, g, unknown or other
  modified_base (83)..(83): a, c, t, g, unknown or other
tatatatatatatatatatatatatatatatattatattattattatattatatatatatatatatntntntntntntntntnttttttttttttttttagaatctcatgatgcatgaccagtgctcgtctgtctttatacaaattatccatttattactttgaaacttatacaagccctgtaaaacgtcgacgctcacataaaatattcaatacaacaaaaggttgcaacggagcccttcatggccagcatctcacagcagtttcaccggccgcaccacccactgtcatccaacttacaggacagcacatagaacattcttctaccctgctagaaaaccctacattgttctcttatataaaacctgcgacccgaaacgatataggattttatagtctcgttaagctcatgtttctcttgattagagctgcactttgcggtcgtagacccagctgaacggaatcacaggcccctgtttcgccctcgcttgcgctctctcgtccagccgcctgaatcttgtcgccaaggtgcacacgtagtcctgcgcccgtctcccttcacctgacaatccggtgagatccgcaactttccacctctggaccaagaactcgaggatgtccgcgtagtcctttgctgtgtacacgccgagccgctgcgccaccgaactgaagtgctcgaataggttgtcgtccatcc

SEQ ID NO: 723 - DNA, 962 bp, Avena sativa
gcgcatgacatccgggccagcacgtggccttcctggcctccttcagctcgcccgcggtcatcttcgagcagatctccgtcatcttcgcgctgcccaagctcttcatcgcctcattcaccctcgtgctgcccttcttccccacgggatccttcgagcgcgtcgaggaggagggagacgtcgccaccgccttcacgctcgcgcgcgtcctctccatgatccccaagtcgcgcggagggcccaccagcgtcgtcatctacgacatccacgccctgcaggagaggttctacttcggggacgacgtcctgccctgcttcgagacagggataccgctactgctgcagcgcctcagccagctccctgacgccgacaatatcaccattgccttcccagatgatggggcgtggaagcgcttccacaagtcactggtcaacttcccaatggttgtctgtgcaaaggttcgtgaaggcgacaagaggatagttcggattaaagaagggaaccctgaagggagacatgtcgttattgttgatgatttggtgcaatctggcggaactcttagagaatgccagaaagttctggctgctcatggtgctgctaaagttagcgcctatgtgactcatgctgtgttccctaataagtcatatgaacgcttcatgacagctaattctgctgggcctggtgaccagtttgcatacttctggatcacggattcgtgccctcagacgataaaagccatcaaccaagaacctccatttgaggtgttgagccttgctagctcgattgctgatgcccttcagatataaatttgtactgggtaatgggcttactcccgtatgtaagatttcatttccagctccagcagaacaaataatgtggagcgagttatctaattgtgtcgaatctgaagcttcgataaacagccccatgtttggacaataaaacccagtattaaatattcaccc

SEQ ID NO: 724 - DNA, 581 bp, Avena sativa
ctgaacataataaattggcagttcacctatagactgaatttcacacgagctctcagtctttcttcactcggtcccgtgctgctttagcggagcttgagcgctccgcctgtgagaacatgatgaatacatgcataacggtggtcaccattgccagtccagtagcgaagaggatgacccctttccacgtcgacaagagttgggcccattgtaagaatctatgagcaccatataggaggagacatgaccaagacagaaccaccaccaaagatttcactggacgaccaattggtataatttcctcatcaaaagtaccagttgctatatgcctgtccaataacgcatccttctctacgaagatgtctttacaccatttagaaacatcctcatctgatttaggcatatcactcattgcatggcgttttatgcggacatgaacaactgatgattgtccctgaagaatacgcagcattgtcggtttaggcgaatcttcgggaataatcactgttgtatcgtatatagccgggacaaagtcacgcataatacttacagctgacacaaatccctttgttcgtggaatcccg

SEQ ID NO: 725 - DNA, 600 bp, Avena sativa
tgccagctgttgcacagcttgagaaagatgaaaagtataagccggtttatgagctattaaagatattccttactcagaggcttgattcctatttggagttccagtctgctaactccaccttgctgcaaggatatggactggttcatgaggagtgcataaccaaaatgcgactgatgtctctgcttgatctgagtagccattgtgctggtgaaatcccttactctgcaattacaaaagcacttgggatcaatgatgatgaagttgagtattggattgtgaaagcaatatcatccaagattttggactgcaaagttgaccagcttaatcaatttgtcatcgtcagtctgcatactgagaggatttttgggataccacaatggcagagtctacgctcaaagcttctagtgtggaggggaaacattgcgaatgctatcagcacaatccaagctaacaaggtgactgaagatggtgggcaggggatgcaaggattgatgatccgctgatttgatgggagtcccttaatcgagattatagcctgagagtttagatgagcaattccttttgtattagatatcttgtaatccaaatacttgttcctgt

SEQ ID NO: 726 - DNA, 882 bp, Avena sativa
agtcataccagacaacagaacacctcagaaatcagcttgagaatacagggtgccggggcatcataagctaattcttcctacgagagccagaaatatgttgcaagatgattctattgcagcttcccttctctgtctcagaaataatacaaaatggagatacaaaaaaaataccaatgcaatgtactttttaacatgtcctatgaggtcctgagaagcagcaaccaaaatctccaaacaaaagaatgagaggggtacacaactcggctcaaggaaacccattttctaaggacatagatctacagatccaggcactgctgtggacaagaggagcaccggcggcagttgagttaaaaaagagtcaacaccacgattacaaaaagtagtcgggggtcttgcgagttgtatccggctcgatttgtcgtggtgctggatcgaattggaggaagttctgatccatgttctctcctatttcgagaatcgcagccatgttaccacaacggtaacagtagtttggcgcgctgaaaactgtgacaacgttcttctcctgggcccaattaaacccttccatcacaagttgatgggcccttgaaataagggtaagtccatttgtatggttgaattgttgagcaatatcttgtccaaatgtgtaccctgctcctcttggcgaaatcccccatccgcatcggtcatccgggtcagaccacaaaagatcacacatgggtccttcatgcgggacctcttgtatgcgatcaagagaacggatgttgtccaatgtatccaatgatggagagagaccaccatggaggcaaaatacctggttttctataagagctgtgagaggtaataatcaacaatccgtgaagtacttccaaacatttactc

SEQ ID NO: 727 - DNA, 665 bp, Avena sativa
gtggaggatgccaatgcagtaattatctcagaagacggaagagaatttaatgttgatgaaatttacaaagctgagtcttcatttattagtggtctaaaatccatggaggatttcagtcatattgaaattccatctaatgacccaccagagattgatgaagaaatgctcgaggatggcaaaacacagagtgctcctgtccaggaaaaccctgaagaatccatgcgtgatgtgaatgaccatgaaggaagcaagacaactagtggtaacacacagcatgacaagctgtacaccgccaagggtatacttgatcctcgcaagaagaaaatagagaagaaacggcggaaggagaacaagttcagcgtgctgaatgacatggatgccgattacgatttcaaggtggattatcagatgaaggatgccggtgtggatgatgaagatgacagcgaaggtggagacaaaaccaaggagagtgagcccatgactggtgtttgtgatgcgtgagatgaagtgcatgttgaaaatgctttattattatagtgatagttcctgatggactgccaacagtgggcgcaggatgttggactttttgttcgccgttagttggaagaactgtgagaaaaatacaaaaaatatatatatttgaacttccccartgcattacgaaa

SEQ ID NO: 728 - DNA, 781 bp, Avena sativa
agacagaaccctcaaaaaatatcagagaatggaacacgaaacacagaccaaagtgaacatagatccacaagtcaatacagtcacgataatagaaagagcaactgggcccattacaggaaaccagagagctcatcaactatagtagagttcacagcgcacacagactcaacacacaccaccaacacggtccatcaaagttcataaagcaaactgcaagacatactgcaagacagcaccccaggaccagcagtggtaccactctgtctcgttatttacgcatgcataattggaaataaacaactacatgctcgtgctcgagcgcacacgatcttcacttgtccttctccctggcgataaggtccatcacagcacgcttgatgcttcctccattcttctcaagcagctccttgttcgtctccctgtcctcgaatcccatctcattcagttcggcgagcagagggtcccattcattgacgccgcacagatcatccacggactgctccaggttgtacttgttctgcctgagtatttccttattcaaatcaacctgcttaaagcccatttcctccagctcctgcagcagtttctcttccctaaggctgtcgatgtcaacagcctcagctggtacagcatccacagctgtggttgcagctacaagaacagtagggagcgaacttgttggcacatcagccggtgtagtcacagccattggaatgagttcaggtgcgagcacatgaacacttggcgcagaagtagcagcacctgcactggatgagggaac

SEQ ID NO: 729 - DNA, 699 bp, Avena sativa
agggagaatccttcgatccgaggcgcctcttcctcctcctgccctctacgactgacgtggagtgtagatccatccgaagggattcctttgttgatacacaggtcaaatcaggttcgtggtcttcggtaaggaagagagatgcaggcatctagagctaggctcttcaaggagtacaaggaggtgcagcgagaaaagtcagcggacccagatatccagttaatctgtgatgattcaaatatattcaagtggacctctgtaattaagggcccatcggagacaccttttgaaggtggtgtatttcagctcgcattctcaattcctgagcagtatcctctgctgcctccacaagtccgcttcatgaccaaaattttccacccaaatgttcacttcaaggtgaaatatgcctggatatattgaagaatgcttggagccctgcatggaccctacaatctgtctgcagagccataattgctttgatggcccatccagaagcagatagcccccttaactgtgactcaggcaatctcctgcgctcaggcgatatcagaggctaccaatctatggcacgaatgtatactaggctagctgccatgccaaagaaagattagtccagaattgacaaaaaataaaccagaagcaagtggtgaatggctgattcatgtatcacttgcaagctgtcaggtgtgactcttgctgcct

SEQ ID NO: 730 - DNA, 657 bp, Avena sativa
gactggtgctgatcgagaagttcagcgtattctgatggagctactcaatcagatggatggatttgaccagacagtaaatgtgaaggttataatggcgaccaaccgtgcagatactctagatcctgctctgttgcgtcctggaaggctggacaggaaaattgagttccctttgccagaccggaggcagaagaggcttgttttccaagtctgtacttctaaaatgaacttgagtgacgaggtagatttggaagattatgtctccagaccagataaaatcagtgctgctgatatcacagctatttgccaagaagctggtatgcatgctgtccgcaaaaatcggtatgttatcctccccaaggactttgagaagggttaccgaaccaatgtgaagaagcctgatacagactttgacttctacaaatgagtcaaaggaagtgttcagcagatgcttatttcctacttgcgacatgatcagcactagagatgaatttatggatagtcgcctctgtgacattaatgttcttgtaccctgaggctcatacataccctaatagaagtgtttgctcataccatctcagccgtgttgttataagataacatgttctgtctgtactttttattatcgcactgttgaactatcgttttatacaaaaaaaa

SEQ ID NO: 731 - DNA, 661 bp, Avena sativa
ggcatcctttctgttcagtactgcagtctgcaaagaatccagtcatcatcgctggagctgggttatttgaacgggaagaccagggtgctgtgttctcaacaattgaaactgtagcgaagaagttcaatgtgacgagaccagactggaatggtcttaatgtcctattgctccacgctgcacaggcagcagctcttgatctgggcctcgttgctaatcctaccgagagcgtcaagtctgcgaagttcctttacctgatgggagctgatgatataaacttggacaaccttccagaggatgcctttgttgtctaccaggggcaccatggtgataaggctgtctacagggccaatgtcattctgccgtcttcagcatttagcgagaaagaaggcacctacgagaacaccgaggggtgcacccagtggaccatcccggctgttcctacagtcggcgatgccagggatgactggaagatcatccgtgctctttctgaggttgccggggctccactgccttacgacagcgtcgcaggtgtgaggaaccgcattagcatggtggccccgaaccttgtgcgtgtagacgacagagagccatccaccatctctgccgaggtgaagcctccggtgaagcaacaaagtagagctcggctccatttaaaactgtc

SEQ ID NO: 732 - DNA, 661 bp, Avena sativa
gatgttccaagatctcactcgagagagatctgagacagggggtgcttccgagatgcacgacttctgcttcacgatcccctatgggttcgcggtcctggccggcggcttgctgggctacctccgccgcggcagcaccgcctccctggctgggggagctggcgtaggcgggctgctcctcctggcgggcttcgtcagcctcaaggctttcgagaagcgccgcaactcctacctcgccctcgccctcgagaccctctgtgcgcttgccttgacctttgttatgggacaaagataccttgaaacttcaaagataatgccagctggtgtcgttgctggtctcagtgctgtgatgtctctgttctatctgttcaaaactgctaccggcggcaaccatatctcaccaaagaaagagtagagcagtactagtacaacttctaaaaaggcttatattgtggaacagatgtagtagtattttgcttgtaagacgtgcttcgccaaactcgacgaccgctgcatactgtgctatgcatccacattgtaactccagtgatgttattttctgtttgcttgaatgcatgcacgtggatttgtaatgtgtacgtaaaagaatgaacaattcagatgtgcttcgcagaggcttatattgatcttaactgcatgttaa

SEQ ID NO: 733 - DNA, 582 bp, Avena sativa
cagtactgtgcaagtggaacttggaagcaatctgcgttgtccggatttggattcatcgatccacaacagcatgatatggttcacatgagcgagaacggaagagaaatggcggcattatggcgccaaaaaggtagaagaaagaaacaatttggttggaaaggggccagtgacttcatcttgcttcggtcctggctcccctctgtttgatcttatctgatctcactatacccccacatatgtatatctaccatatgtatgtaccccttgccgacattatttgctaactacgtacatagtagcttaagatcaacatttataaggttacagacaagacagattaatgcatgcctccaagaattagctagggagaaggaatggacacttggtggtggtggtggtggtgtcggtggttttagggctctctgtctatgtatttgtaactgcatgctagttggactgctgttatgtactccctccatttcaaaatataagatgttttgaaacagagggactatttgcttgtgttgtcttactgtcgtccctgacgtcatttctaaaccggtgataatcatctgttgcctg

SEQ ID NO: 734 - DNA, 985 bp, Avena sativa
cccgggatgtcctataggatagctcatgtgttatggaaccaaggccgtaaggttctggcgttggcactgcaaagccgtattagtgaggtttttgcagtggatatacacccagctgccaaaattggggagggaatattgttggatcatggaacaggtttagtcattggtgaaactgctgttgttggcaattgggtttcattaatgcaggcctttgctacagggtgttacacttggaggtaccggcaaggagcatggagataggcaccccaagatcggtcagggggctcttcttggagctggtgctactatcctcggcaacataaatgtaggcgaaggtgccatgattgcagctggttcccttgttttaaagcatgtgcctccccacagcatggcggtaggaaatcctgcgaaggtagtcggctatacagagaaggaggatccttctttaagtatgaagcatgacgcaagacgagattatttcgagcaagtcgccggtagtttctcagaagacagatccaacggaaagtgtcttctgtgcaagaagtgccgtgaactgaaactccgatgaagtggcgacacaaggaatgcatctctcttgaatttcctacttcctggagcaggagcacgctgctggatgttcggtgatgcatgagtgcttctcctcttcgttgaggaaccctcttgggaggaggccatgcacgcacgacggtctcccctgaagcttcccagatgtatattttgctgcgcccttttaactggcgcaataatgtggagatgtatttctgtaaagctgggaggaatggtacaagtcttctgtggagatctccagctgcagtactgtgtacctgagagtagcgcttgtgaccttaaatacctggagcaacttatctgaatcaacatagaagtaaggcagttgtcagtgtactgtagtctttgcattcccatgtctgaatacaaatctaattaacccctctgtctagatttg

SEQ ID NO: 735 - DNA, 497 bp, Avena sativa
ggctgctgggaaattttaaacctaggtttccagcactagtctttctgtgcaatgaccatagtccacaagctgcagaagatacattcaaagttcatgtgcaatcctcgttctcatgtgcaatacattttttttttcactctatagccattaatacattaaacaggatcagacgtacatataccattgttctgccattgtcgctcccggaatagctactgccggtaggttaatacaggtactactacacttactactaaggctagctaacatagatagatagatagagatatttacatcatcatcaagttgcgagaaagagagagcaagcgttcgttcaagcaaagggcgaatcttggccctaaatctttctgccaacgaccaaccaaaccagcggataaacaattaagaagcacaagtctctacatttcctaggctggactactaaattccaaacaagggggaaggagggggcgatcaccgatagcaataagacatca

SEQ ID NO: 736 - DNA, 778 bp, Avena sativa
ggttcagcggcaacggcgtgggcgcggccatcttcggcggcggcccgttctacctcgccaagccggccgaccgccccgccatcaccacgctcctctccgacccggtcccgctccaccagcccttctccgggaaccccggctacttcgtcaccgccaccgccggcatcgccgtggacggcaccaccgccgtcgccggcccgctggtcgtcggcctctccacgaccaccccctacacgcagctccgcgccgacgtgtaccgcgctgtcatcacggccttcgaccacgcccagggccagaccgccaaggtcgccgccgtgtccccgttcgagctctgctacgactcgtccaagctggggtcgtccctgtcggggtacttcgtgccgcaggtggacgtgatgctggagggcgggaccaacttcacggtgttcgggggcaactccatggcgcaggtgaacagcggcacggcctgcttggcgttcctgcagatgaaggcctccggaagcacggggccggcggcggtgatcggagggttccagatggagaacaggctggtggtgctggacaacgggaagcagcagctcagcttcaccgggtacgtcccggccatggggttctcctgcagcaacttcaacttcaccaccgcagcctagtctagtgaaattaatcattcactcgtctcgttacatacatctggtgtgcttccattacttgtccacatggtgttgtaaagaaataataataaaaggaaaataaaatacatgttgataggaaaaaaaaa

SEQ ID NO: 737 - DNA, 680 bp, Avena sativa
cacaccctgaaaggtctggatttgatggtgcatggacccgtgatcctctgaagtttgacaactcatactttcttgagctactgaagggggaatctgaggggcttctgaagctccctactgacaaggcattgcttgatgatcctgaatttagacgctatgtggagctttatgcaaaggatgaggacaccttcttcaaggactatgctgaatcacacaagaagctctctgaacttggcttcactccgcggagtggtggcccagcatctacaaaatcggatcttccaactgctgttgtactcgcacagagtgcagtgggtgtagcagttgctgcagctgtagttatcgctggctacctgtacgaggcttccaagaggagcaagtaaggttgtcaagttctccaaactggcatttgccttatttaggcatttgccttatctagtagtaagtatatcaagatcaaataacagaactatagtcatgaactacccgcaccatcatctccgagtattttaagaattcttaaggacatccctttcatgtttacacccatactcagcgaacatttcaatgacaatgcatagcttactattaaaatcactttcggcaatatatttatcgtggtgtaatacaaaagcagttgcttgtgtcctgagaatattactggaccagttatctaaaaa

SEQ ID NO: 738 - DNA, 757 bp, Avena sativa
aaaacacaaacatagcaaacaatattctaatagttcacacgatctcaaataaccacataaatgcgaggttcagataacacccatcaggtggatggtttaggacgaccaacgaacaaatgatccagttctagaacatatcacagagtacggtactgacatcctacaaaggactagtattactagttcacgacacacgataagtgttcagcagtaaaagaagacacacggaacattgatgcgtccagaggcattcccagagacaaaagcacctaagccctctcgccacggatcctcctagccagctgaatgtccttgggcatgatggtcaccctcttggcatggatggcgcacaggttggtgtcctcaaagagacccaccaggtacgcctctgcagcctcctgaagagcaagcactgcatggctctggaaacgcagatcagtcttgaaatcctgggcaatctccctaacaagcctctggaatgggagcttccttatgagcagctcagtgctcttctggtacttgcggatctcacgaagagcaacagtcccagggcggtagcggtgaggcttcttcactcctccagtagtgggagcagacttacgggcagccttggtggctagctgcttccttggagcctttcctccagtggacttgcgagcagtctgcttagtacgagccatgagcaaaaacttaggttatctcgcgcaacttcaaaatcccaaatccgccgagagagaggttgcaacttccatcccgg

SEQ ID NO: 739 - DNA, 660 bp, Avena sativa
tgcagctgccatagatgtgcctggcccagaggttagccgcttagctgcattggctggaaaatacaaggtcttcttggtgatggggttgttgaaagggcaggctacacactgtacaacacagtgctctcctttgattctcttggaaaatacctgggaaagcaccgcaagctcatgcctaccgcattggaacgagtattctgggggtttggagatggatctaccatacctgtgtatgatactccacttggtaagattggtgccgtcatctgctgggagaacagaatgccacttctcaggacagcattgtatgccaaaggaaagattatcctcccccgcctgagtatacctttggtggtcatgatgaagaaccatccccagaaactgctgtttgtcctggagggagttccatcatttcgccatctgggaccgtgttggcaggtcccaactacgaaggagaggccctcctcacagctgacctagaccttggagaaattgtccgagcaaagtttgatttcgacgtcgtgggacactacgcacgacctgaggtgctgagtttgactgtgaagaccgaaccgaaacacgccgtgtctttcaccggataagacttcagacgcaaggcgtgacaatactttgaagacctgacggccagtaatcttgcat

SEQ ID NO: 740 - DNA, 310 bp, Avena sativa
  modified_base (258)..(258): a, c, t, g, unknown or other
gtttgcccagaagagggctgccgcggccaccctgttgacttctggcaatgccgccttggccccgtcaagctcactgaagcgatccacccatgccgctaggagcggagtcttaacggggtcaaagatctttgtcccagacatcacctccgtcgctttcagccacgagagcgtgctccccagcgaaacgtccaccagtccgacactctcgcctccgaagtatccctcccccttggagcactccctcagggcctccctccngaatctccacagcaacaaacatctgcttcttcccctcggacttctcctcatc

SEQ ID NO: 741 - DNA, 647 bp, Avena sativa
  modified_base (16)..(16): a, c, t, g, unknown or other
tttttttttttttttnttttttttttttttttttaactatcaaacctaaagatccaataacatgggttcctcaatagattaaacaccagttatacaaaggtaaaaggtacacagttgttaaaaaatagttaaagaggttacacaaaacacttcgcagggtacaactacaacagcttgcttggcagtgttctcaccacaccaccaccgattaagtacaacaaattctagaaacccagatcagttcaatgggtttgcacaatggttgtaatacaacatcaccaatacagctcgcactgcaagtacttacaatacccgcactagaaccgccttcgattttaacagtaaaacatgacacgcttcacgttttccttgagggcggggagaggcctgacaggaacgtttccgaacgccctggtactgcgggcagggccctgtgcagggccacgggcaccactcgccacggacccactgtcagaggtatctggctccatgtaaaatcgagctcggaatgctgccaaatgagcataataggccggaggaacaattgatacagagcgggtgcacctagcatacgtgtagcacaagttgtttgtgagagtttgcaactcgtcagcagtaaacttgttctcatcccacagaacatgata

SEQ ID NO: 742 - DNA, 621 bp, Avena sativa
ctgggcaataagcaataaaaaagtgcatagaatacttgtaagtgaacagccgaacaagacacgcatattcggctataagttccaataggcactgctcaaatatatgaaacagttttagcatataacgaccattcgcaatcacaaggatcgcatcaaccttaacaaatcctgactcaaacattggattaacttaaaggcaattggaaaggcaacattgacataaaggcacttggaaagaactacagctacaactcttggacggattcttggttggataaggtcactcccatgggcttaaacagctttcctttgtgcgacgacgttgtcaggctccttcttcacgggctcttccttctctgacaagataagctcgatgtggcagggattggacatgtaaggattaatgcgtccatgagcacggtatgtgcgccgcctctgcttcatggcttggttcacctggatgtgtgaaatgtagaggctgtccacatccaagcctttaacctcagcattactctcagcattcttcagcaaatccagcacgaactgggctgactttgcaggccagcgaccctgaccatttggctggcggttctttgcttgtgctagtacggccaacacctc

SEQ ID NO: 743 - DNA, 886 bp, Avena sativa
ttttttttagagtaatgtacagtacacaattagcctttatttatcaacttcaacatataacatgttattattcagatacaagacaacaaacaaagctaattaactatagtaaccgactgactttgaggattatttgtatctcttaaaccacaaagaacacactaagcaatgtttcctttttgcgctttcaaaactgctcatggaaaagccaccattttagcctctctgaagttctagacatcaaggtacttgctggctgtgtggacatccttgtctcctcttccactgcagttcagcaccaccctaacaccatctggcagcgtcgggcagagcttctccaggtaggcaagagcgtgggacgtctccagggcagggatgatgccctccaaccgcgaagtgcgcttgaaagcgtccaatgcttcctgatctgtcacactatcatattcggcacgtccaatatccctcaagaaactgtgctcaggtccaacgcctgggtaatccagaccagcactgatggagtggggttcaataacttgcccatcggcgtcctgcaatacatagctcagagatccatggagaactccaacttcgccctttgtcaatgttgcagcgtgtttgtcagtgtctacaccatgaccagcagcctccactccaatcagtcttacatcttgatcatcaacaaactcatggaagaggcccatggcatttgatccaccaccaacgcaagcaaccaacacatcaggcttcccaccccacttgtccatggcctgtctacgggtctccttgccaatcaccttatggaactccctcaccatcattgggtatgggtgtggaccagcaactgaacccaaaatgtagtgtgtagtctccacattagtgacccaat

SEQ ID NO: 744 - DNA, 752 bp, Avena sativa
tcatgcagcagagataaatggcaacagaggaagcactgtaatgttgctaagagtaacttcaaaatctggaacagattagttcaaggttcacatactgctgctccataaaacggacggtatactcagaaactcataacaaagaggtgctactacaaagacacgataagagcactgaatcctggagctcaaagaaagccatccctgacaactctcacttgagtggaatgaaccttgaggagtgggtggcaccaataccaggccttccgtgcttgactggcttgtaggagagggagaactctgccaggtagtggccaatcatctcaggcttgatctcgacggagttgaaggccttgccgttgtagataccgacgacgcttccaatcatctcaggcatgatgatcatgttgcggaggtgggtcctcacagactcaggcttctcaccagcaggggcatcgcttttcgccttgcgcagcttcttgatgagcgccatcggcttcctcttcagacccctcccgaaccttcggcgagcgcgggcagggaagagctggacgaggtcctccgtggacatgtcgaggagcgcgtcgaggtccacgccgcggtagctgaacttgcggaacgtcctcttcttcgggccggcggctgccacctcgggatcgacatcaacgtccgccatggtcgaagggagagagctggagctcgagccgggggcgggcggcgctgcttgcaggaggaagaagaggagacggcggatc

SEQ ID NO: 745 - DNA, 909 bp, Avena sativa
tatggagttgatcaacaatgttgctaaggctcatggtggtttctccgtctttgctggtgtcggagaacgtacccgtgagggtaatgacttgtacagggaaatgatcgagagtggtgtcattaagcttgatgacaagcagagcgagagcaagtgtgctcttgtctacgggcaaatgaatgagccccctggtgcccgtgctcgtgttggactgactggtttgactgtcgctgagcatttccgggacgccgaaggacaggatgtgcttctcttcattgataacattttccgtttcactcaggcaaactctgaggtgtctgccctgcttggacgtattccatctgccgtgggataccaaccaacccttgctactgatctgggaggactacaggagcggattaccaccacaaagaagggttctattacatccgtgcaagccatttatgtgcctgctgacgacttgacagatcctgcccctgctactacttttgcccatcttgatgctactaccgtgctctcacgacagatatctgagctcggtatttatcctgctgtcgatcctttggactccacatccagaatgttgtctccccatgttctaggtacggagcactacaacactgcccgtggtgttcagaaggtccttcagaattacaagaatcttcaagatattattgccattttgggaatggatgagctcagtgaggatgacaagttaacagtcgctcgcgctaggaaaattcagcggttccttagccagcctttccatgtcgctgaagttttcacaggtgcacctggaaagtatgttgaccttaaggagggtgttcaaagtttccagggtgtactggatgggaagtacgacgacctttcagagcaggcattctatatggttggaggaatagacgaggtcat

SEQ ID NO: 746 - DNA, 902 bp, Avena sativa
tgacccccacgctagcattgcaggattaatatcacaagagcaagagcatgtcttccaataccgtaagctttaccaatacacagcataagtttgtaattcgaaattcagaagacaaaggtagagcagaagtaacagctcagacaggaaggttttttcactaatgtctgtcaagagtacagcttagagtactcaagaaccaaaccacatgaccgttgatcttttagacatagctgtcaatcagcgacttcctcatatcatcgacaatcgctgtgggctgaccttctctcaacttgaagacgctctcgattacggagagctcagtagctgttgtgtctgagccacagaaggcagtccagtcattcactgtcatgcctgcagcaatgacctcgctacctcggttcactgttccagcaacaagaggcacttggaggagtgtggacagctcatcaagatcttcaatggatgtgttaggatggaccagtccacccctgttagagaatgcacagtagctcccaacaaggatatttccagcaacagtctgacggaacacctcaaccccaagcacatcaccaataagctcctcagtcgccttgtcaaggtcagggtgtgtcagcgcaacatggtcattgcaggatatgcagttgccaagtgcagacagcctttcatcaatgcgctgaacaaccacttgatcaggcaggcagttcctcagatgctgtagctcttgatcagtggtagtatgtggcaagagaagtccattcttgtttccaacgcacagccgaccaattattctagtgcctccgatagaggtcttgaccacaggaatgacatctgcaagctcagactcaaatgtactgtagaagttctctgatcctccgattgcaaccagacagtaggcattgatc

SEQ ID NO: 747 - DNA, 970 bp, Avena sativa
gatgaacaggaagccaggagactgggactgcaggtcatgccagcacctcaacttcagccgtcgggacctatgccagcgctgcggcgagcctcgtggcgtcgctgaccgtggcagcgttggtggtcttggtggtggtgctcttggcggtgactacgccaactttggcggccgtggcggcggcggttcctcctttggcgctggctttggtgccggctctgacgtccgcccgggcgactggtactgcacctgtggcgcgcacaacttcgccagccgctccagctgcttcaagtgtgccgccttcaaggaggaagctgccatcaacggtggcgctggtggctttgatggtgatatgtcacgctcaaggggctttggctttggcggcatgggtggtggcatgggtggaagcatgggtggcggcatgggcgccggcgcagccggtggtcgtgccagccgccctggctggaagtctggcgactggatttgcaccaggtctggatgcaacgagcacaattttgccagcaggctggagtgcttcaggtgcaacgcaccgcgggactccggtagcgccacgccattcgaaaacttcttgcactgatgcgtagggagctggcccacatgacagcagcggcgagcagaagcagcagcaagagtgtccgtttcctgtagtccatccatccacataagaagaagacgacgaagaagaagaaagtagaatgagtgcaaaagaaatcctcctcgagtgcaatgctatcgctagttttgtcctttcccgttttagatttggttgtcatttcccatttgggacagtccgtccgtccgtctgttctgttctgtccgatgatgacctatgtttcccgttttattatttccgttattactttcgtcatgcatgtttgcagttcagagttatgtaacccaaaagacgtatgcttattgcttgagaagtattattaactactactagtactgt

SEQ ID NO: 748 - DNA, 997 bp, Avena sativa
cccaggccaactctgaggtgtctgctcttctgggacgtattccatctgccgtgggataccaaccaactcttgctactgatcttggaggactgcaagagaggattacgacgacaaagaagggttctattacatctgtccaggctatttatgtgcctgctgatgacttgacggatcctgcacctgctaccacctttgcccatcttgacgctactactgtgttgtcacgacagatttctgagcttggtatttatcctgccgtcgatcctttggactcgacatccagaatgctctctccccatgtgctgggtacggagcactacaacactgctcgtggtgttcagaaggttctgcagaactacaagaatctccaggatattattgccattttgggtatggatgagctcagtgaggatgacaagttgacggttgctcgcgcaaggaagatccagcggttccttagccagcctttccatgttgctgaagttttcactggcgctccagggaagtacgtggagctgaaggagggtgttgaaagtttccagggtgttttggatggcaagtttgatgacctctccgagcaggcgttctacatggttggaggcatcgaggaagtcatcgccaaggccgagaagatcgccaaggagaatgcttcataatgagatacaccttccattgttacaccctgtacaagttaaaattttggatttcagctgttggctcgggtcagacgtgctcacaagcaggagtgccatcttctgctgagggatccttgtttttgttctttcttactccactttactcgtaataagcaactgcagtgacattgattttgtctgcatagcaaaaagtactcggctttgaaaaattgtgccctctgtaatgcagaaatccaacagatcatgagtttatggtttagttatgcttggtcaagttttttgtgttctcgttccaatacagtttatttgttctgtcaacatagaaaattcatccgaagcaa

SEQ ID NO: 749 - DNA, 309 bp, Avena sativa
  modified_base (299)..(299): a, c, t, g, unknown or other
cccgggatctcactaccagttcaattgcctattctctgaacacactgagagcaagcaagatgggtggtggcaaggttcttctgatcagtgctgtcttggtggggcttgtttcactgagttcgtgcaggagcctgggggagttgaatgaacacaagacatactcttctgcgccccactatgggggctccccaactcccacacatgggtcaggaggaggctacaaaccaactacgacaccgacgccaacttacagcgctacaccgactccaacttacggcaccacaccgacaccatcctanggcaccacac

SEQ ID NO: 750 - DNA, 831 bp, Avena sativa
caacatttcatcagtggaattcatactgtatttaacttagggcaagtgcttctggctgaagcattttagcagatcctaatattctattcatgggtgttacctagagcaaataaattcgacatctgaccagtctataacttcatatcatgcatattcaccacacccccccaccacccccaccagcaactttagaacaacacctcctgtgataactacctttgtaaccaaccactcaccttttctatgcactgagtagatgcaccaactaacagttcctttatccttcagtttatagcttgcatctaggtgggtttaggctctaaggggagcctgtaccccttatcaaacaggttcaggagtgctaatgtttgtttttggcacttagcactgcctcctgccatttctaacacagtgatggagctccaagaaggttttggagataccaaacactgctgtgtaactcaataaccccaatggaccacagacatatttttattgtcttgggtcacgcactcatctagatgttcatcttccccagtgtcactaccatggttaggtccaggatcccctcccttcctctctctatgcctgcctggagaggggccttaatgtttttaatgtactattatcatacatggtggttgtaataataaagtagtactatgctacttctaggacaagaactctattattttgtcgcgcggatctagctaaatactctattaatctttagtcagtacattctctaccgacaatgtagctcaccatgtaatgcaatgtaaaatctacccgctgtgttgcacatttcttattcgatggtcttttatacca

SEQ ID NO: 751 - DNA, 547 bp, Avena sativa
gaaagcattaccagatcttcttaaagaatatgacatgccggcaggcctcttcccaagggatacaactaattatgagttcaatgaggagacaaagaagctgacagtatacatcccttcagcttgtgacgtcgggtacaaggactcatcagtggtgcggttcttcacttgtgtgactggctatcttgagaagggaaagctttctgatattgagggcatgaagacaaaggtgcttgtatggaccaaggtgacctccatcaagaccgagggctcaaaggtccacttcactgccggcatgaagaagacccgcagccgcgatgcatatgaggtcgtcagagatggtatcatcatagacaagttctagagcatacttggccagacagacgagcatacctggcctgacagatgcgatgtaattacttagatgatgctctctctgctagcttatatcggaatctattgtgctatcagcctgtaatcaatggtggttgcaaaacctttgatgtcatgactgtttctgtatcttaaaaagttggcgaattattttact

SEQ ID NO: 752 - DNA, 750 bp, Avena sativa
ccatgacacgactgaatattaacagttccttggacatgtatgactaggtttcttgagatgtgtagattcttattatcatgtacgacgtttagagtagaatctgaagtaggcaatatatttccaactgggcacacgttctagaaaaacttgtgcatcttaatatggaataacattctcggatatctagtttgcaagcatatacatatttggacatcattcatttttttagttggatcaaataattacatgttcctgtcacgttgtaaagtaagacccattgtgaatccgtcgcaggttgagatcgtgatgggccttgaggaggagtttggcatcagcgtggaggagtcgagcgcgcaggcgattgcgacagtcgaagacgccgccacactcattgaccagcttgtctctgcaaagtcgacttaaggaagggggtcatgaatattattggatcaatccttgttgttctgccataggctttattattatgtggactctggaaggcttggtgattttcttaggactattgtcccctgctgtgtggtaataagataatcgctgaagtattcgatggtgatgaacatctgggtaataggtttcgttgtgcatgctgctgtatacatcttttgtgccccaaaagtagcatctgtgggtacaatgcaactatgtctgcactgcatgtggggttaatttacagtgaacgtgtattaaatttctgcttcatttgacaagaaatgcctcgcatgctttgta

SEQ ID NO: 753 - DNA, 828 bp, Avena sativa
agagtatcacgttatagatagagatagagtaagattacatcctagcaccgtgctcacagacgagacaatgtaattcagtagagtggttcagttcaggtgtggatgatgcatcgtcaattctagatatctattctagatatctaccacccgcttgccccatgaactctgaaaggctaaacaacctcaagaaccctattattcatactgtaactacaacactgttaacaaatcaaaacggcagtaagtgtacaaaaagggaacttctgaaacaaggcaagctgctaatttgagctatagctagagtatcattaagaagctaggtaggtacatgggcgaaaaaccccgtatcatgatgatgcgttttcgcacggaaaaaaatggacgtccttcaaaaccatcacatttccagcaagtgaccttctgcacctagaccaacacaacagagctaaaaagagacaacacaactacagctcgtccttgtcatactgctcgtactccggctcctcggcggccttggtggcctccttctcttccacctcgggttcctccacctcctcttcctcctccacggccgcgtcggggctcaggtccaggctcttctgcaccgaccggtagatgctggaggcgaagtccttggggtcgggaaggttgaacccgctctccatcagagccgtctggtacaccagcctcgccgtctgcttcaggttatcgtcctcgctgtcctgagcgaccttgtcgcggagctccttgatgatggggtgcctggggttgatctcgaggacccgcttgccgcgcatgtacgcctgcttgctcacgtccgacagggtc

SEQ ID NO: 754 - DNA, 633 bp, Avena sativa
ccagaggcagggcgacacgagctacgctcagatgttcacggacgtgggtgtgtactacacccccgccttcatcttccgcggcgaggagttcgacggcgcggaggcggtgcgcaggctggagcagtggctgatcgagaaccacagctaccagccccagtacgcggtgacggagctgaacgagaaggacttctggcgcatgttcgacgcgtcccactacgagctgtgccgccagaagtacggcgcggtgggcaccttcatgagcgtctactacaagtccaagaaggggcgcaagaccgagaaggaggtgcaggaggccgaggccgccatgctcgagcctgcctacgctgaagaggcctaatctggtttccgatgatctcagggtgtagtcctcaccctgctagtctggatgatgagatgctgcgcagagctcgggactactctctgttttgcttgattattattagaactcttgatcgtgtagcgttgattattcgtagcactctgcagtactaccgtcgtcggtacttcgttatccttttatttgtcgaatttcttataacttaatcaggaagatgaactatgtggtacctgactggaataattatgtgatgaacgctttgtggtgaaaaaaaa

SEQ ID NO: 755 - DNA, 922 bp, Avena sativa
cgggattccaaagccgcctcccctcctccccctgccaaccccaaatctccctttccttcgctcgaatcctcccccaagcagccaccatgtcggcctactgcggaaagtacaaggatgagctcatcaagaacgccgcctacattggcacccctggcaagggtatcctcgctgcggacgagtccactggcaccatcggcaagcgcttcgccagcatcaacgttgagaacgttgaggacaaccgccgtgccctccgtgagctcctcttctgcacccctggtgccctccagtacatcagcggtgtgatcctcttcgaggagaccctctaccagagcaccaaggctggcaagcccttcgtcgaggtcctcaaggaggccaatgttctccctggcatcaaggtggacaagggcaccatcgagctcgctggaaccgacaaggagaccaccacccagggccatgatgaccttggcaagcgctgcgccaagtactacgaggctggtgcccgcttcgccaagtggcgtgctgtcctcaagatcggccccaacgagccatcacagctgtccattgaccagaatgctcagggtcttgctcgctatgccatcatctgccaggagaacggtctggtgcccattgttgagcctgagatccttgttgatggtcctcatgatattgaccgctgtgcctatgtgaccgaggtggtccttgctgcctgctacaaggctctcaatgaccagcatgttctccttgagggtaccctcctgaagcccaacatggtcacccctggatctgactccaagaaggttgccccagaggtcattgccgagtacaccgtccgcaccctccagaggaccgtcccacctgcagtgcctgccattgtcttcctctctggtggccagagcgaggaggaggcgaccaagaacctcaa

SEQ ID NO: 756 - DNA, 763 bp, Avena sativa
cagagtgagttgcttatatcttacaatgatgagaaaattacctcttccctaaaaatggagggctgggacctgatccgaaatcgtctaccaagattgaaggcaatgaagggtccaaatcagcaatgtttacatctagcgaatctgttgatcgatctgcacctcaggtatatgttgggcaccgcaattgtgagactgtgaagggtgtgactttcattggcccaaatcatgaatatgttgccagtgggtcagattgtggtcggttatttatttggaggaagagagacgggaaattcttacgggcaatggagggtgatgaatgcattgtcaattgtattgagccccatcctcatgttatgacgattgcaagcagtggaattgataacgatgtgaagctatggactccctctgccaatgagcgagcacaagtgttaaatgtcgaggagttgaagccccgaaagagaaaagcaaagctctggcactttgccttaccggaggaattggtctggcacgtgctagcatcacgacggaggcaatcagctggtgaagattcatctgcagatctggaggacaacacagaactgcttaatcttgtattgcaagctgcagacagagatagcttgtctgacgacagcgatgaggatgaagagacctctgactgctccggaagctagagccaaatgatcagttgtcctctggaatattgcaaaattgtatatagacaataataataattatgctattcctatgggtgatactagtatgt

SEQ ID NO: 757 - DNA, 919 bp, Avena sativa
acaactctagaacatgtcaggtacagtagcaagatgacaaatgaggtctgcacggaaaattcactggaccattgcgtcagggttccctgcggcgagaatatcaagcagagagttctgtggctccagctcttcatgccacagtggcagcttgttaccagggtagaagctcctcttaacaccgtcggcatttatagtgacggtgcgaacaacccctccgctagcaccatcacgtgcaatagcaagggaaaccaccttcaccacaaacttctcagcttcttcctgggtcatcccctctctccattcatgatccatcaatccatacaggtaactggaaccagatcctccaattgcaaatggttgcctaagaattgttccaccaagagggactgagtagatttggcctccctcatatttatcccatccaccaactatcattccagcttgcaacatgctcttgttctgataggccagcagcctaaccaagttggacgcaactttcacagtagctggctgcccagactgaatagtgtgttggtggagaaaataacgcacataatcggaaataacttgtgtatcagcagcagatccagagcggcagacatagacattatcagtcagctgactaatcttgtccgaagcacggttcgccacatacattccggtgctggtcctggagtcggcggcgaggacgacgccgccgtcgtagcagacgccgacgatggtggtgcccatccggtgctccccggaggtgggcgcgtcggaggaggagcccatgagcggggaggcgtccatggcggccggggacggggggagatcggcgggagaaaaccctagcgagttccgcagcgggcgagcgagcgagatgtgaagcgcgacgaggtgggcggtagtaaagtgtggggtttggtttcgttcgcag

SEQ ID NO: 758 - DNA, 841 bp, Avena sativa
gcttggcggtgcctctcgcggccatcctcatcttcggcctcccaaatgaccggtccacggccatcgcgcacgcactcgtcctctccgtcatgggagctatcctctcattcagtccagctgctacaaacggcccgatattcgcggagatcgtgccggtgaaggcgaggacgagcatctatgcgctgagcatgtccttcacctccatcctgtcgtcgttcgcgccaccggccgtgggcttcctgtcgcagcacctgtacgggttcaagccgacggacggcggcggcagcagcggcgccgagggggaccgggagaacgccgtgtcgctgggaaaggcgctgtacaccatcatcgcggtcccgatgaccatctgcacgctcgtgtactcgttcctgtaccgcacgtacccgcgggacaaggagagcgcgcggatgcaggcgcgcgtcgggtcggagctgatggaggagggtgacgcgttaccgtgcgaccaaccggagacgggcgacgacggtggcaggactgccaagctactggcgatcaagcagtagtgacacggaacaaggacgccagtcgatctgctccttccacaagggcgcgcgcgctggatatgatcttgtgttgatactttattaagtaggtataataagactagttatagtaacatgcgactatatgcagttcttaactagccattttggtgacatagtattgtcattaaatgagtatcatttagttgtattagttttatgttattcaattattgtagaatctcaatgcaattttgtgtatttgacattaaattttcttgttacacttgctataataagactagttaccgtaaaaa

SEQ ID NO: 759 - DNA, 834 bp, Avena sativa
attcaagatagatttgcatgtataaagctgattacttcagttgttgccaaacaacacatatagcttcattcataacagtgtcttaaaaagttatcagatcaaacattttacactctttcgagtggcaaacttgatcgtcataatctcggggacaaacactaacaaataaataaaaaacccgatacacggcgcaaaaaatagattatgttgttgctctcaggtgttcacctcctgccaaacctcccaccgcctcccctgcctctcccgccgaaaccacctcggccaccaccaccgccgccaaaatcctcctgccctccaccaccacggccgccacctccaccaccccacctcgacccaccacctcttgactgctgctccctctcttgcaaggctggcagttccttcacttcatcaagtgtcacaccagctgcgttctcagcacctagaagataatcttggacctctgctgaaggaacgtcaaatacagcgcctctcccatcagtggtcagagctacaccctgtacatttgaaagtctatcttctggcatgaaccttttcaaagtagaaataacatacgatggtgtatacatcgaactgccagttgtaagctgcaatgttgtacagttctccatagaagaaagcaaagatctcttctttatgtcagtgtacccaactgcctttgcaagggctttggctagtagatcaactgcggacatgctggaagagcttaacagctcctctgcttgttgccggaagacaggaataacactgtcagacacgcttgcaatggcttctgctgcttcattgccagcagattgtgccacatcgctaggc

SEQ ID NO: 760 - DNA, 1001 bp, Avena sativa
atcagaatctcttggccgcacccaccgtcagccatggcgaagaactacccggtcgtgagcgcggagtaccaggaggccgtcgagaaggccaggcagaagctccgcgccctcatcgccgagaagaactgctccccgctcatgctccgcctcgcgtggcactccgcggggaccttcgacgtgtcctccaagaccggcggccccttcgggaccatgaagaagccggcggagcaggcgcacgccgccaacgcggggctggacatcgcggtgcggatgctcgagcccatcaaggaggagatccccaccatctcctacgccgatctctaccagcttgccggagttgtcgccgtggaggtgtccggtgggcccgtgatccccttccacccagggagggaggacaagcctcagccaccacctgaaggtcgccttcccgatgcaaccaagggttctgaccacctgaggcaagtctttggcaagcagatgggcttgagtgatcaggatattgttgccctctctggtgctcacaccctgggaaggtgccacaaggagaggtccggttttgaggggccctggacaaagaaccctttgaagtttgataacacttacttcacggagcttctgagtggtgacaaggagggtctgcttcagcttcctagtgacaaaaccctgctgactgaccctgtcttccgccctctcgtggagaaatatgctgcggatgagaaggctttctttgaggactacaaggaggcacatctcaggctttccgagctggggtatgccgacgcttaagaggtgcctacaactgctgctactatgggcgatcagggtgatcttgttctgcttctagactagggtcatttgaaccagcagactgctaagtaaccatctctgtaataaagttcgttggcatgaggccatcccctgtacgctgtcaagtgctttgatgaaccgttgtgctaaacttggttgcctgatgcaaaagttatatcggtatgaaatgcagt

SEQ ID NO: 761 - DNA, 857 bp, Avena sativa
gtttgtaattcgaaattcagaagacaaaggtagagcagaagtaacagctcagacaggaaggtttttcactaatgtctgtcaagagtacagcttagagtactcaagaaccaaaccacaagaccgttgatcttttagacatagctgtcaatcagcgacttcctcatatcatcgacaatcgctgtgggctgaccttctctcaacttgaagacactctcgatgacggagagctcagtagctgttgtgtctgagccacagaaggcagtccagtcattcactgtcatgcctgcagcaatgacctcgctacctcggttcacagttccagcaacaagaggcacttggaggagtgtggacagctcatcaagatcttcaatggatgtgtggggatggaccaatccacccctgtttgagaatgcacagtagctcccaacaaggatatttccagcaacagtctgacggaacacctcaaccccaagcacatcagcaataagctcctcagtcgccttgtcaaggtcagggtgtgtcagcgcaacatggtcattgcaggatatgcagttgccaagggcagacagcctttcatcaatgcgctgaacaaccacttgatcaggcaggcagttcctcagatgctgaagctcttgatcagtggtagtatgtggcaagagaagtccattcttgttaccaacgcacagccgaccaattattctagtgcctccgatagaggtcttgaccaccggaatgacgtctgcaagctcagactcaaatgtactgtagaagttctctgatcctccgattgcaaccagacagtaggcatttgtcagcttagagaaaacaccaacttcacagttgttctcaaactgaat

SEQ ID NO: 762 - DNA, 556 bp, Avena sativa
ctctgctccttctcctctcgatggtgatcttcttacagtagatactagtactacgatacggtgggcaagacgggagttgcctctccccctccccgccgccacctcgcgctcgcactcctcctctccatcgcagaccccaagaccaccgctcgtccaagatggtgctccagaacgacatcgatctgctcaacccgccgccggagctcgagaagcgcaagcacaagaagaagcgcctcgtccagtcccccaactccttcttcatggatgtcaagtgccagggctgctttaacataacgactgtgttcagccactctcagaccgtggtggtgtgctcgggctgccaaaccgtgctgtgccaacctactggaggaaaggctaggctcaccgagggatgctccttccgcaggaaggccgactaggttgcatgtccgtttatgggaaaattaagcctgctgaacaatactttctactactcgtttatgtgtacttgtcggattttgtaagtatgccttcctgttcgctgccctgaatgttctagcaacgtgttatgtgctac

SEQ ID NO: 763 - DNA, 963 bp, Avena sativa
aggttacagagcacaatcaaaggcatgctgccagaataatcccggacgaaaaattacacaagacacacaggtccgattcaccgcaaagcccaagatgttacagagtgattacagcgggcgggctaactacgcgacggcgtagtactccctctggtgatcgtcccggtcgagcgcgacgagcacatagaccgcgtagaggatgccaggaaggtagcccaagatggtcagcagcaggcagatgcagaactccatgctgcagcagccgtagtggaagaagacgccgagcggcgggaggaggatggcgatgaggatctcgaggaaggtgcagctccgggacgccatggcgggggattccgatcggatcggggaatctctcttgccgcttctgctctggttccccgggatgtcggaatcgccttcctcctcaactgctctcgcatcacgcaggggtcacctgagatcacatacacaatggtgaaggctgtagccgtgctttccggcagtgagggtgtcaagggcaccatctttttcacccaggagggagatggcccgaccgccgtgacaggaagcgtctctggactcaaggaagggctccacgggtttcatgtgcacgctcttggtgacaccactaatggctgcatgtcaactggaccacacttcaaccccgctggtcacgttcatggggcgccagaagatgaaatccgtcatgctggtgatcttggaaacgtgacagctggaggggatggtgttgctaccatcaaaattgaggactgccatattccccttactggaccaaattcgatcattggccgtgctgttgttgtccatggtgatgctgatgatcttggcaagggtggacatgagcttagcaagagcactggaaacgctggtgcacgtgttgcttgcgggatcatcgggctccagggctagatgctgtctttgccagtcatgtcgtacagacct

SEQ ID NO: 764 - DNA, 958 bp, Avena sativa
caggttcatcaaccaaataggcaaagttctcctgcttccgagaaaatgctttacaaagattacaaaacaaaatccgcgtgtaacaaataatgaatcggtccattacaatcagtatacaaaaaatctgatctcaatctgtttttatctctcagaaaaggtacaacaaaagaacaactttctctgccgcctatttacactgatgcacaaacatggtagcatttagcagaggaataaacaagaaaaccactcttcaccttatatattttaacttacacagggcacctaattctgtagatactgtcttcatttgtttgaccattggaattcgatttccaggttcctatttgcaccgcttttgctctccggtagcaaggtgtactctccggcaactgaacccagcatgacgacccgatcaatctggattgtcaccttaccaaacgatttctttccgaatttgctgttgtttttgcaagagatatggagcttctggcctttgggagggctatcaaaagcccatgcaaaggcttcatcccattcgggtgcctcaccagtcgagacaatctttgtcaaccttgcaggattatttccaagagtaagcttgcagaatgcactagcatttcccacagactgcctcagattgttgccacgctttatagtaactgtaagtgtgccaggcaagcactgaagtagtagctctgccttttcttgaaaccgtggtgggccagactgtatcaagtactgaagtagaggaatagcctctgatgcagcaactgattgagctttaaatacttcagctgggcaagccgtccacgcttgcctgagcagatatagcgaatccagtgctgcttcttgagttgcttcagaaccagttttaagggacgttacaagatgtggaatgcatattgtagcaggttcagtgactctcagacgagggaagttgctaagtagagcattaagc

SEQ ID NO: 765 - DNA, 856 bp, Avena sativa
  modified_base (837)..(837): a, c, t, g, unknown or other
gggtaacaggagcgcattacattaatcaatcgcagatccacataaaaatacatcagttactctatcaaggagggctacccaacgaaattagacaagaaaaatggtcaatagtacagtaccaagaagatcaaaataaaaacagaatcccgcgacaagcagaaagaaaagctcttacgcaaatggtacaggaaaaacagaaaataggaaccgaaaatgagggaaggccagggcttgcatcaaacaagctgaacactacaaacgccattcctctcataaaccctatatactagttgtagtacataagctgctgagccgacgactggttcgggtagccgtcgtagagggcctgggaacccgcagcgagaagccccgcggatacctgaccagcgaggccgtgctggccagcaaggtgcccggccgcagcctggctcaaggcgagctgcctctggtaagccagtagttcagctgctgagaagccttgtggcacaccggccatcgctacaggctgataagaagcaaccggaggtggcagtggcttagaagatgtcccaggaggagttggtttgttgccccatgagcactttaatggcttgccacgaacaaccaatccattggccatctgaatagctaatgctgcttcaccatgggtactgtatcttataaatccaaaccctttatcttgttgaacacgaacttcctcgatagccccaacacctaagttgtagaattgacgatgaagctcatcccgattaacctcgtgtccaatgttgccaacatacaccgtagtgaaatcagggttgttctctggattctctttacttcctgtatcctggttcncctcattgctgcactactc

SEQ ID NO: 766 - DNA, 669 bp, Avena sativa
cggccgcatcgcgccctcggagctcggtgtcctcatgcgctccctgggtgggaaccccacgcaggcgcagctccgcgacatcgctacccaggagaagctgacggcgcccttcgatttcccgcgcttcctcgaactcatgcgcgcccacctccgcccggagccctttgaccgcccgctccgcgacgccttccgcgtcctcgacaaggacgcatcgggcaccgtctccgtcgccgacctccgccacgtactcacctccatcggcgagaagctcgagccgcacgagttcgacgagtggatccgcgaggtcgaggtcgccccagacggcaccatccgctacgacgacttcatccgccggatcgttgccaagtagtggacctactcccatcccatggatcggccgatttcccccagacttcttcgtatttaataactcttttctccccgtgattttatttcaatatcatctgatctgatttgcagcgcatttctctgaattctgttttgtgctctagtttcggtgtgattcccaactgcctaggctttggatattaattaatggtgtgattattgattgatggatctgcctgatggtactgcaatgtaaagtttgggccctatttactttctatgatcgattgcttgcttaatcagaaatgagtacaaaaaaaa

SEQ ID NO: 767 - DNA, 678 bp, Avena sativa
aggtccgcacgagctccggcaccttcttggcgaagcgtgaggatgaaattatctctggaattgaaaagcgtgtagctgcttggacatttctccctgaagaaaatgctgagtcagttcaggttctgcattatgaagttggtcagaaatatgatgcccacttcgattattttaatgacaaaaacaacctgaagcttggtggtcatcgagttgccaccgttcttatgtacctgacagatgtgaagaagggtggagagactgtgtttccaaatgcagagggaggacgtttacaacacaaggatgaaacctggtccgagtgcgcaagatctggcctagcagtgaagccgaggaaaggtgatgcgctactgtttttcagtctccacgtaaacgcgacaacagatccaagcagtctccatgctagctgcccagtagtcgagggtgagaagtggtctgccacgaaatggatccatgtccggtcattcgacaatcctccggatgtaatgacagacacgccgtgttctgatgacaatgagctctgccccaagtgggctgctgtaggggagtgttacaagaacccaaaatacatggtgggcaccaaggattccgtcggttttgtccgcaaaagttgcgggtctgcgatgcttgaacctccgccaaactgaactgactatgtatagcgta

SEQ ID NO: 768 - DNA, 794 bp, Avena sativa
gaaggagtttgctccatctatccctgagaagaacatcagttgtttgacccgccttgaccataacagggcacttggtcagatttctgagagacttgatgtccaagttagtgatgtgaagaatgttattatctgggggaaccactcgtccagtcagtaccctgatgtgaaccacgccactgtgaagacttccagtggagagaagcctgttcgtgagcttgttcaagacgatgaatggctcaatgcggcgttcatcgccaccgtccagcagcgtggtgctgcaatcatcaaagcaaggaagctctccagtgctctctctgctgccagctctgcttgtgatcacgtccgtgattgggttctgggaacccctgagggaacctttgtttccatgggcgtgtattctgatggttcatacggtgtgccttctgggcttatctactccttcccagtaacttgcagcggtggtgaatggacaattgttcaagagctcccgatcgacgagttctcaagaaagaagatggatgcgacagcccaggagctctcggaggagaaggcgctcgcctactcttgcctggagtaaatgcatactaaggagcagctgctgctctgatgttttgaataaaagaaacagtcaggccccgtgaaactatctccactcagaacagttgcacatcgcggtgcttttcactgggttttccagtgtgtatgaatggggcttttgtagctctatatattttgcctgatggatgatttaccggacagaatattggctggaagacgggagcaatatgacacct

SEQ ID NO: 769 - DNA, 675 bp, Avena sativa
aaagaagctatccaggaagccacaagaaacaaatcagatgttgttcttgttgatacagctggacgtatgcaggataatgagccactcatgagagcactctccaagctcatcaatctcaacaagccagatctagttctgtttgtgggagaagcattggttggaaatgatgctgttgatcaactcaacaaatttaatcagaaattagcagatctttccactgttcctacagctagactgatagatggtatcctgctcactaagtttgacaccatcgatgacaaggttggagctgcgctgtccatggtttacatatctggatctccagtcatgtttgttggatgtggtcagtcctacactgacctgaagaagctcaacgtgaaatccatcgtgaaaaccctcctgaagtgaacgctacatgttgtactccaatatgtaccgcctactaagtctctattatctttaaatcccccatgacatcgtcatttttatgttgggtctggaactgttgtcccttgcaactgttgtgtctgtttaactagtatggaatcggtgtacttggttgcctaagaaatacaatatatgtgacttcatatttggtttatgtatgtgcgtgcatgtgtgttgggcgaactggtagttaggttccaaatggttgtttgtgtacacwrmmaaaaa

SEQ ID NO: 770 - DNA, 416 bp, Avena sativa
tttttcaatgcaaggatcatcatacaacaagagagcaaaagaatggtcgacagtatataatataaccagtgtacacttgtggatcatacgacagcaagttaatacagagcacagcagcaaggcaaggaaagtttcagtaggatgagctaggagaggactgaagactaaaaacgcatggactattttccttgtctttgcgcgtttttctttttgaacataacaaatgttggtcatgcctgcttgttttctgaggtagaaacttctgcgctacacatagggcataccttatttatctgaagccactggtttatgcactcggggtggtacgaatgcttgcagggaagtgcaaccaaagattcaccatcttcaaattccacacggcaaatcacacaattagctcagtgttgccatcttgc

SEQ ID NO: 771 - DNA, 662 bp, Avena sativa
  modified_base (65)..(65): a, c, t, g, unknown or other
tagccaagcttgcggtcacgatgcacaagccaatagtatagctcccaccaagaggaccaagcacntaaacgcacaacactctgacgccaattaagtaaatttactcatcatataacaatagaccaaaggtgtcaagatccaagctatacatacatagcgtccaccaaaaatacacgacccgctgacccagccaccaccaccaccaccatccagcagcattcattaagcaaacacccaaacacaagacaacgtaaacaccaccctcaaaggcaccacgaaccaggccagagcacactagtagagaagaaagaacaaaacaccacatggtttttgctcgaagaagcagcagagtaatatagtgacagttgaatgtgtgttctcggacgacctcgccgccttcagttgctgcacttgaatccatggcacaccgacaggatgatgatcagaatgagcgcgatgattatgcccagcacaatcagcttgatcttcatgttctgtagccacatctttctccttacctgtgttccttgctgcctgaaatcttgagcctgggagcggagattctctgtcttgtcaacaagcagctcaatcttctctccacgatcaagaaccttctcaatattttccatcataacgtttttgacttctgaaacttgtgcttg

SEQ ID NO: 772 - DNA, 636 bp, Avena sativa
aacaagcacagccgcctcaaaggctcagatagaggagtccgacgaagcaaggaaaaaattctctaatgccaaagcaatctcatcatcgcaatttttcggtaatacagacagagaacagaaagaggcccaacaatcgcttcaaaagttctcgggttcttcatccatttcgagtgctgacctttttggtcgtgacacgaatgattctgatctggacgtaagtgctgcggacctgatcaacagaatatctttccaggcctctcaagatttatcatcactcaagaacatggctggagagaccggaaagaagctcacatcactagcctccaatttcatcactgatctcgacagaatcctttaagctgtcggacactgtgatcaattcttctcctacctgcacaaaatcactgtttcgaactgtggtgcatctttgttctgtcccaacacatttattgcgtagctctgtagaggatagtaaatctgaacgattgtcattgttcaaaccttggccacctgaaaatattgttatttttttcatgacaatagcgaaaatgtacgattttgtaactattacagtttgatgtgtcttggaagatatttccttattttatatgagtgactgtgttaaccaaagaaaaa

SEQ ID NO: 773 - DNA, 915 bp, Avena sativa
cctcacgccctgcgtcctcttctcccaggataaaatgtagccctcctgcgcgaagccatttcagatgctctctggatgaggaagcgccactgagaaacaatgggatatccaagcatgttctctcctgcctcgctgcttcgcttgtgttcgtcgctccacctagtcaggctattcctgcagacacctttgcccagccaagcctgtgccaggttgcagtggtggcggccatcgataaagatgccgttcctctgaaatttgacggcccttcggatgatggtggctcaggcatgatgatgatgaagggtatgactgccccgaactttgatccggctcgctactctggtaggtggttcgaggtagcatcgctgaaacgtgggttcgctgggcagggacaagaagactgccattgtactcagggagtgtatacatttgatgagaagtcgcgcgcaatccaggtggagacattctgcgtccatggttcacctgatggatacatcaccggtatccgtgggagggtgcaatgcctttctgaagaggacatggctagtgccgagacagatctcgagagggaggagatgatccgcagcaaatgctttctccgcttcccgacactcccattcatacccaagttaccctatgatgtcattgccacagattatgacaactacgctgttgtgtctggtgctaaggacgcaagcttcattcagatatactccagaacacctaaccctggaccggagttcatcgagaagtacaagtcctatgctgccaacttcggctacgatccgagcaagatcaaggacacaccacaggactgcgaagtctcgtcagaccagcttgcgcagatgatgtccatgcccgggatgaatgaggccttgtcgaatcagttcccggacctcaaactaagtcgtcagt

SEQ ID NO: 774 - DNA, 899 bp, Avena sativa
cttatcttgcaaagatttacgccactcgtcaattggtcaacttcaacgagcttttgggactcttcgtgaatttgaaaatgcctatgggaactctgagaatattgatacagagctcttctcaccgttcacttccttgcaaccacttgttgttgcttgctgcaaggatggtttcaccactctggacacggtttacgttcaattagagaatctgagttctgcagatccaccatacaaatctgttgctgctcttaactgtgtcatactaggctgtgcaaacatttgggatattgagcgagcatatgaaacttttgaggcaatgaaggaaaagtttggacttacacctgacatacattcgtacaatgccctgttgcatgcattcggaaagctgaaaaagacagaggaagctattaatgtattccagcacttatcaagtcttgatgttaagccaaatgcaacaacatactccctacttgtagacgcacatcttgtcaaccgagatccaaaagctgctcttgctgttattgacgaaatggtcgatgcgggattcaccccgacaaaggagacacttaagaaggtccgaagacgctgctctcgtgaatcagactttgatagtgaggagaaactgcaagccgggtgtaaacaaatgaattgccgactgggtggcgaggtccgtagggaattgctctataagattgaatacagtgccgagtactgagtactgaagcattgattttgatgatgccggtgttctttccatcctcgagtaggcatagcgtgtaccgtttgctggcacttgaagagcacggaggccgtagtctgtaaattatactttgtaacaattttcctaattattcttcactatcaccaagcaattcgtttttgctgggaagtttgggcaa

SEQ ID NO: 775 - DNA, 824 bp, Avena sativa
gtggtcaggcgggaagacgtcttcatcacctccaagctatggtgcagcgatctcgcgcctgaagacgttccatctgcaattgacagtacactggaagatctgcagctggattatgtggatctgtacttaatccactggccattccaggtcaagaaaggcaccgagatcagccccgagaactttgtccagcctgacatacccaggacctggcaagcgatggagcagctgtacgactcaggcaaagctcgcgcgatcggcgtcagcaatttctcctccaagaagctgggtgatctgctcagcgtcgctcgtgtacccccagctgtcgatcaggtcgagtgccacctcggctggcagcaggtgaaactcagagcgttttgccactcccatggagttcatctgtcagcgtatgcgcccttgggcaggatgaaagacgtcgcgagtaacccggtggtgtcgtcgatagccgagagcctggggaaaactccggcgcagatcgctctgcgctggggtcttcagcagggtcagagtgtccttcccaagagtgctaacgagtccaggttgaaggagaacattgatctgttcgactggtctattcctgaagaactgtgcgccaagctttctgaaatcgaacaggttaagcagatcaaaggcgatgcgtttgtgcaccctcagagcatttacaaaacctatgaagagctctttgatggagaaatctaaaagaaggcatcactgatgtgaaatctgatgcatcaccagaatggaaaggataattgtaaatctgctgttgtttctccccggagagaaataggtcatatcacagcatc

SEQ ID NO: 776 - DNA, 833 bp, Avena sativa
gttttgctgtatatgagtggtgcattactgatcactatgatccaaacaatgcaacccacaagaggatcaaggatgaaattgagcttggtaatggtctaccagatatcagaagtactcagcaatgtcttcaagctgttaaagatgcagggtttgaggttatttgggataaggatcttgctgtagattctccattgccttggtacttgcccttggatccaagtcgattttcgttgagtagtttccgtttgactaccgtgggacgacttgttactcgcaatatggtcaaggcattggaatacattggtcttgctccggaaggcagccagagggtctctaatttcttagagaaggctgcggatggtcttgttgaaggtggcaagaaggaaattttcaccccgatgtacttctttgtggttcggaagcctctttcagaatgaacaactttcaggtttgaagccagacaaggccacaagatacattttgaagaagcgggcttggggagtttggttatgcctagaatcctggattctgacctgtagatttgaaatagtaaacttgttaagtttctgtttgttctgtgttcaatgttgagctttctgtttgttgtttttgtctagtgcgagagcttttgattcaagcagtctgtctgtggattgcttgtctagtcatatcaaaacaggaaagtgaatttgggtttgatcctcaacggtcgacttatgcacgtatgagctcagactcccactttgaaggtcataaaatatgcacaacagtgtcctccccaattttaagacagtggacacaccaacacatatgtgtatgcaacatcttcactg

SEQ ID NO: 777 - DNA, 843 bp, Avena sativa
atcagctgccacccacccgacaaccatcaggtctaatcggaagcaccaaccatggcggcggcggcggcgaaaatagcgccgtccatgctgtcgtcggacttcgccaacctcgccgcggaggccgagcgcatcggtccgcctcggcgccgactggctccacatggacgtcatggatgggcactttgttcctaatttaactcttggagctccagttattcagagtttgaggaagcacaccaaggcatatttggactgccatctcatggtgacaaatccttcagattatgtagaggcatttgggaaagctggcgcctcaggattcacattccatatagaagtagcaagagataactggaaagagcttatccaaagcattaaatcaaagggcatgacgcctggtgtatcattgagacctggtactccggtggaggatgttttccccctggtggaagcagaaacccctgtagaattggttcttgtcatgacagtcgagcctggctttggtggtcagaagttcatgccggagatgatggacaaggtgcgtacgctgagaaagaagtacccttcccttgacatagaggtcgatggtggactgggtccttctaccattgacatcgctgcgtccgctggagccaactgcatcgtcgctgggagctccatatttggcgctgctgaccccggagaggtcatatcggtgctaaggaagagcgtggaggtctcccagaaccaaagctgatttgtagctgttcttccctctggctgtttctgctgtaaactagaactactctctgcacgtagcccagcatcagtttgcaccttcgcactggagatagatgggtgaag

SEQ ID NO: 778 - DNA, 745 bp, Avena sativa
caaactcccgcttccgatcccagggccttcagggggccttttgctcggtggtgcgtgctagttttgtcgattgaaatttacaatgggaggctgtgtgggcaaggaccgtagcatcgtggaagataagcttgatttcaaaggtggaaatgtgcatgtcataacaaccaaagaggactgggaccaaaagatcgcagaagcaaacaaggatgggaaaattgttgtggcaaatttcagcgcttcctggtgtgggccatgccgtgtcattgcacctgtttatgctgagatgtcaaagacttatcctcaactcatgttcttgacaattgatgttgatgacctaatggatttcagctcaacatgggacatccgtgcaaccccaacgttcttcttcctcaagaacggccagcagatcgacaagctcgtcggcgccaacagacctgagctggaaaagaaagtacaagctcttggcgagggcagttgaactgtgctgcagacaattagaaccgagccagcttgacatggcttatccctctgtaccgccatatgcttgcgtctcttgtgtgcttcatggcagtttcctggtgtacagtttccgtgtcgtttcggtccgccaagacgaatgttttacaattttgcgccgtgcatatggatgcatgcttgtgaaactttaaagactaagctgtgctggattcagtgctgtaaaatgctagttttgtagattgtcacgtgctggggaaattgtttaact

SEQ ID NO: 779 - DNA, 1003 bp, Avena sativa
ggatctcgtgtctacccccttatccccttctcccgctccaccatggccaccgccatgtccctcgccatggccgcggccaccgacgcatcgatcctccaccccgccttccccgcccaccacaagctcgccccggcctccgcctccctcccgcttctcttctctcgcgcgcctcttctccgctccacccgcccccgcctccccctcacgcccctcgtcgcctcctccgacgcagccgaggcgggcctcgactgggccgagacggaagaggccgaagagactgtaccggaggaggttgtcgcggaggaggaacccgcggtggcggcctccggtggggatgagggttacgcggcggagccacccgaggaggccaaaatctacgtcgggaacctgccgtacgatgtcgacagcgagcggctcgcccagctcttcgaccaggccggcgtcgtcgaggtcgccgaggtcatttacaacagagagtcaggccagagccgtggatttggatttgttacaatgagtaccattgaggaagctgacaaagccattgagacgttcaactgctacgacattagcgggagactcctgaacgtaaacagggcagctcaaaggggttcccgtgtggagagacctcctcgacaattcgcatctgcttttagagcttatgttggcaacctgccatggcaagcggaagactctaggctggtgcagttgttcagccagcatggggaagtactgaatgctacagtcgtgtacgacagagaaactgggcgttcacgaggatttggctttgtaactatggcttcaaaggaggatcttgacagtgctatttcagcacttgatggagaggagttggatggccgccctctccgagtgaacgttgcagctgagcgaccccagcgagggttctaattcagtggagagatggagagcatggctggatctttatcattgacagataagaacagaatgctgaaatgtaactgcggaagaatgcggccagatcctg

SEQ ID NO: 780 - DNA, 484 bp, Avena sativa
ctttctaaggatacccacctgttgcttactggaggtatggaaaagattttgcgtgtatatgatttgaaccgtccagatgctgctccaaaagaactagccaaatcacctgcttctgtccgaactgttgcttggcttcataatgaccaaactatactgagctcctgcacggatacgggtggagtaaggttatgggatgtgaggagcgaaaaaattgtccaaactcttgaaaccaaggcacctgttactagcgcagaagtaagccaggatggcaggttcatcaccacagccgatggctcgagtgttaaattttgggatgctaataactttgggcttgttaaaagctatgatatgtcgtttactgtggagtcagctgcacttgaaccaaagtccgggagcaagttcattgctggaggagaagatatgtgggttcatgtatttgattttatcaccggtgaagaactaacttgtaacaaagggcatcatg

SEQ ID NO: 781 - DNA, 688 bp, Avena sativa
ccagggcgcggtcgtcgcagatcaccacggagccgtcggcggccacgccccagtgcagcggcacggcgccgtcggtgctctgcgcggcgaagacggcgccggggacggacttgccgtcgaagaccacgaaggcgaaggagcccgagaggtccttcaccacctggtccgccgggtaggggccccggtcgcgcagggtgcggtaggcctcgatcaccagcagcgcctcgttggtggaccggcccgtgaggccgtactgacgcatcaggctgctcaggttgtccagggaccccatgaagacgcagtagatgtcgtccagcccgcagaacatcctcgggtagccgccggagagggagcgcggctgcgcggcgacgcaggcgagggcggcgccgccgccgaaggaggtggagaaggcgtcctcggggtgcgcggcgtggaagtcgcgcaggatctggtccgggttcttgggcttggcggcgccgctgcgggggctgttgagctcctgcggcgcgtgcgccacctgcttctggaagatggccaacatcctcgaatcaaatactaatcacaacctttcttccctgcaccggacagacaaaaagaggcagagctagcaagaaggtttgctcgagctacaacaatggggaaaaagacgatcgaggtggagctaggagacgaatgggagatcccggga

SEQ ID NO: 782 - DNA, 854 bp, Avena sativa
cccgggatgagagccagccgctgcaggacccgacgtccgagggacacggcgccgcagccgccgccgccgcctctggagctccccccgccgtggttcccgggaaggagttcaccaagacctgcaagggcctcgtggtcgtgctcctcggcggctacgcgctgctccacttcgtgccggcctccatcgactacctcaccatcgttcccgccaagacgattccctttgtgtggaccgtcttcacagccggttacatcgagcaagttcttcctggggctattggaagttctcttggtctgctcttctgcgggaaggatattgaaccagtctggggccgcaaggagttcttgaagtttattattttgatcaactccatctgtggtgtccttgcattctgcattgccgttgcactctactatgtcaccggaaaagagagctttcttgtcacgccactttctggcttccatggtgcccttgctggctttctggtagccctgaagcaattgttaccacaccttgagcttcccatgtgctttttctggaaaataaaggccaagtggatgccattcttcgtcatgtgcttctcaactatcatggccttcattgtgcctgattccatcaacttcctgcctactttgttgtctgggatgtacatcagctggctttacctgagatacttccaaaggaacccactgacaggacttaagggcgacgcaagtgatgacttctctttccccagcttgttcccagatgccatgcgaccagtcacagacccagttgctaatgtgttccaccggatgttgtgtgcgagttctaagccttcagaactgtccctcccagttattgatcctaccaag

SEQ ID NO: 783 - DNA, 946 bp, Avena sativa
atatcagcaagcgatgtattattgcagattgctattggaggagcaaacttggccatgggatgaagaacttgctgcactttctaatcttgaagctagtgatctagagaatttcttgcctcgtatgctggcaaagacatttgtagagtgctattttgcagggaatattgaaccaagtgaagcgaaaagtgttgtccagaatattgaaggcaccttatttaattcgtccaggagtgtttgcaaatcattaccaccatcccagcatcttacaaaacggattgtaaagcttgaaaggggtttgaggtattattatccagcaatgtgcttaaatcaccaggatgaaaaaaattcttcgcttctgcattatattcagattcatcaggacgatctcaagcaaaatgtcctacttcagttgcttgctcttgttgctaagcaaccggcttttcaccaattacgttcggttgagcaacttggctacataacactgctaagacagagaaatgattcgggagtccgcgggttgcaatttataattcagtcaaccgtgaaggatccatcctatctggatgccagggttgaagctttcctcaagatgtttgaagtcactctacaccaaatgcctgatgcagagttcaagagtaatgtcaatgctctcattgacatgaaactggagaaatacaagaatataagggaggaatcaacattcttttggcgggagatttctgaaggaacactgaaatttgatagaaaggaagcaggggttgctatactgcgagagcttaagaaagaagagctcatagagttcttcgataatcatgtcaaggttggcgcaccagaaaagaagacccttagcatacaagtctacggtggtccccattcctccgagtacgaaaagatgcttcatgatgctccaccacctcattcgcatcgaataactgatatattcagc

SEQ ID NO: 784 - DNA, 702 bp, Avena sativa
ctgatgcactggtcaacactggtctcgcgaaattgggctatacatatgttaatatagatgattgctgggcagagcagaacagggattaccagggtaacatggttccaaataagcaatcattcccctccggcataaaggcgcttgcagattatgtgcacgcgagagggctgaagcttggtatttacagtgatgctgggacgcaaacgtgcagtaagagaatgccaggatcactcgatcacgaagagcaagatgttaaaaccttcgcgtcttggggagttgattatctgaagtacgacaactgcaatgatgctggtagaagtgtcatggatagatacactaagatgagcaaagccatgaagaaatatgggaagaacatcttcttctcactctgtgaatggggaaacgagaaccctgctacatgggcacgtggcatgggtaatagctggaggacaactgccgacattgccgacaactggggcagcatgacatcccgcgcggaccagaacgacagatgggcctcctacgctggacctggtggatggaacgatcctgacatgcttgaagttgggaatggtgggatgactgaagctgagtaccgctcgcacttcagcatctgggcacttgccaaggctcctcttctgatcgggtgcgatgtgcgctcgatgagccagcagacaaaggaaataatcagcaactgggagg

SEQ ID NO: 785 - DNA, 928 bp, Avena sativa
tgcctattgcaggtacatgttgggcaataatcgccagacaacaagagcttctccacaaatgaatgaccagggtgaatctggtgagtttgctccagcacagtctgcaccagctgctatacaaaaattcccttgcagtggtaccatggatttctgttctcttgggtatgtgtgtcttgcatattttggttggatccgcacacagggatgttcccaatgaaattatcatacctgttggaagaaagcttttagctttagcggatgatcatgcagacattggaagtggaattggaagctttcttggttgggcgatggcagtaatctatatgggcggacgacttccccagatttacttaaatatgcaaagaggccatgccgaggggctcaatcctcttatgtttacctttgctttggtgggaaatacgacatacgtagggagtatacttgtgaacagtttggactgggcaagacttaaaccaaatctcccgtggcttgtggatgctgcaggatgtgttctgctcgattctttcattattcttcagttcctttatttccattatcggaagcaaagtgggtgtgatgaggttgacaatgtggataaagcctaatgcatagcaacatagtatttcaatttttcttcttcagtgaaaaagacttgagtttcctgtgagggttacactctcccgtgtcagaaatgccctggtgcattttgcttggaagcctgtcttgcacaagagccacaccccgtgcagaactgcagagaagttcaaacgcttggttggcggtgaatgagcagcggggccacatgattatgagctcgtccctggtaggataccagtagcgtcgcgcactggactatgtctgtatatcatatggtgatttatcttttctttttgttgcttcctctattttgtaagtggtcttgtctcgt

SEQ ID NO: 786 - DNA, 845 bp, Avena sativa
gatgcagttgctcatgggtgcactggaaagggcaatgatcaggttcgatttgagcttacattttatgccttaaatccggaactcaaagtggtggcaccctggagggagtgggatatcacaggacgtgaagatgcaattgaatatgcaaagaaacacaatgtgccagtcccagtttcaaagaaatcaatatacagccgagacagaaatttgtggcaccttagccatgagggtgatattttggaagatccagcaaatgagccaaaagaagatatgtatatgatgtctgtttctccagaaaatgcaccttcaaaacctgagtatctggagattggtatagttggtggtgttcctacttctatcaacggaaaggacctctcgccagcatctcttcttgccaagctcaatgaaatcggtggaaagcacggtatagggcgtattgatatggtggagaaccgcctagtcgggatgaagtcccgtggtgtctacgagacccccggcggcaccatcatggcagccgcggtccgtgagctggagtccctaacactggacagggagacgatgcagtggaaggatatgctcgccctcaagtacgctgagctcgtctacgcagggcgctggtttgacccactccgacagtccatggacgcgttcatggagacaatcaccgcgacgacgactggctccgtgaccctgaagctgtacaagggctcggtgaatgtcgcgtcccggaagagctcctacagcctgtacagggaggacatctcttcatttgagaacggggagatttacaaccaggctgatgctgaagggttcatcaggttgtacggtcttcctacccgcgttcg

SEQ ID NO: 787 - DNA, 731 bp, Avena sativa
caaacaggcagtttcacaggcacgcgccggtgctgatgtagtcagccctagtgacatgatggacggccgtgttggagcaatccgtgctgctttagatgctgagggttttaatgatgtctccattatgtcctatactgcaaagtatgccagttcattctatggtccattccgagaagctttagattcaaatccacgattcggagacaagaagacctatcagatgaacccagctaactacagggaagcccttctagaaactgcagcagatgaggcagaaggcgctgatattcttctggtgaaacctggattgccgtacttggatatcatccgactccttcgggataattctgctctgccaattgctgcataccaggtgtctggcgagtactcgatgatcaaggcgggcggcgccctgaacatgatcgacgaggagaaggtgatgatggagtcgctcatgtgcctgcgccgcgccggcgcggacatcatcctcacctacttcgcccgccaggccgccaccgtgctctgcggcatgagatgagccagctaggggggtcaacccccggtgtaaaaagttgggaagctattactgctacttgagtaggctttgacatttttgaactctataagcacttgaataatcggcggtttcgtagtagtgcatgattgttactgagcagataaaaaaaaattccgattgaaagggaggtactgtattaagcagagtatggtac

SEQ ID NO: 788 - DNA, 783 bp, Avena sativa
cacaactccggctgaatcttcatataggttgtggtggtaccaagtttgcagtgaggtttcgtacttccaagtggcaccaaaaaaatgatagcgtccgttctgcaaagcttgatacaaggtaccatttggacttgtgcagaaatgtttttggggaaggagtttaccctgatgtgtccatgacaaacttatactatggaggcacaagaattgcaggttctaaaattgtttttgcaaatgggtctcaagacccatggcgccatgcttctaagcagaaatcatcggaagaattgccatcgtacttaattgaatgcaagaattgcggacattgcagtgatctttctggatgccctcaagcaccttcaaatattgaaggtgattcatccaaatgctcatctccggaagctctcaacaaagtacgaaagcagattgtggatcacattgacttgtggttgtcagaatgccaagaacaaggacacgacagggaggcgttgcaggggagtagatggagcatagctacttactaatctcccctgcaaggaacaagcatgatatcacacttatgaaaataatacaggcagatgagtgctccacacaatcacagccatcctgaagcattctcctgctgaaacactatgccatcatggccgcaaaatcctggcatattttctgagtgcagaccagagactccttgtgtaccttatgggtaggcatgtttttagacttgcagagaataccatgatatgtaaatgtaaccgcattgtccaccaaattactcaatattag

SEQ ID NO: 789 - DNA, 849 bp, Avena sativa
gaccgttgacgtccttctcttcttgcaaagttgtaatatctactaatctgtctccgaaattttggcatgtatctgcaggagttaaaattgttttgcaactgactaatatttttatttcctatcacttcatacaaaggattgacaattactatttagttagcacactgcttctgaaagtgctagcttgtatcactatttggcttcccatgtagctcgttagtgcttttgtctccggagatttcacccgatccaaaccacagttgtaagttgaactttcgtgcgagtgcgaaataggatcacaaagttccaggttcagaggtgcagttgctggtgccattggatcacaaagttccgttgctggtcccttcacatgaggaagcccttcaggttccaaaggtggcctgtgtacacatgacttcgcttgaaggccctctctcatctacataaacaaagctttccgaagaatacaaggcgagctctgatgcagcaattagtcaagtctattgccgctgtacaaatgatctaggcttcagagctgaaagagtattagataaatgaatcatgggaacgctgaactttggttccagcaaaactttgcctccttagcaaagttcttttgaccccaaagaaaccattttgtaatggtcgcggctatagtatttacagaaaatgcagagaaaatattagtgtgcttctcacagattgtttgatgtaattgttttccttgtaattgcgcatggccattgttgtaccatgaagtttcagtattgtcaaaccatggcatgcatgtatagtttctgaattctgaagaaaaagagcagtatgttaacttcagtaggttctggtgat

SEQ ID NO: 790 - DNA, 843 bp, Avena sativa
cagtctcacttctcccgcctcgcagactccatggtcgagttcgtggaagcccgcaccggcctcgaggtcgggcccatcacccgcccacccctcatctcccgcaaccagatgatcctactcgtcatcttgttcatcatctccatcccgttcggaatcaagaggatcttagaaggggataccctgctccatgaccgccgcctttggatggccggggcgctcttcgtttacttcttcagtgtgtcaggggggatgtacgggatcatcaggcatacgcccatgttcatcacagaccgggcagatccaaacaagctcgtgtttttctaccagggttcagggatgcagctcggtgcagaggggtttgcggtcgggttcttgtacaccctcgtcgggctgatgatagctgttgtcacacacttgctagtgaaggtggagagcctgcagacgcagcgatttgcaatgctggcagtcatgataatcggatggtgggcagtcaggaaggtgattgtcttggataactggaagactgggtatagcattcataccttctggcctagtagctggaggtaaaatgctggctcaaccaacggccggtacttctttcctttggcttcagaggatgtggagtttctcagattgaccatgccgagatgagaatcatattgattgtgacacctgccaagtttaagctttgaactctgatgctgtattgtggaatatcgagaaccatgtcattctattatacttccgtttcaaaatataagatgttttagctttgtgaagcaaatgaatctaaacttcttttagtattggttttgaaatgaatctaaagataaaagaaaaaaa

SEQ ID NO: 791 - DNA, 687 bp, Avena sativa
gctaacagtacactcatcttccaacagctacaataacaaatctaaaaatttgaaccggaggaacaagaaatggagtaaatcaaccggagaatgcaggaacatggaagactgggcagttttctctataactggtgctgtctccagggtgctgtgaacatttgacaggtgaaaaaggctcacgctgcctgctttcctttcctaactctatctagttcaacctcggctatttgaagtgatgatttcagtgtagacactcgctcttctagctcctccaggctgccccttttcagggtgggcgtgtatggtgaaaggaagtgcttggagaagttctgtagggcctgaacaccgcatacctcctctgggagcaagggcaacttggtgatgttgaagtcgtcgtataacatatggaactgatcaacatactttcgttgcatctttacccgtgcttttaatagtttcgactcaacggcttcctcatcaaaaataacttgattgattatgatattgtgtgcgtcaatctcgaacttcgctaactcttgcaccaatctctccgtttcatacaatgaaagaaattcaggaatacaaacacagacaaaggttgtcaagtctggatctttaaattgcctgttgacttgctcgatcacgtccttcatgccttcgattctcccgagcattgcatcatcccgg

SEQ ID NO: 792 - DNA, 811 bp, Avena sativa
gcaactgtgactgatctgcaactcaatgctatgggatctatactgtctttactggcaatcatcacgacctgcattgctcaaattatgacaaatacaattcagaagaagttcaaggtatcttcaacccagctgctgtaccaatcatgcccataccaagcattgaccctgtttgttgttggtccattccttgatggatttctgactaacaaaaatgtctttgcttttgcctacacgcctcaagttctgttcttcatcgtgctgtcgtgcctgatatcagtctccgtaaacttcagcactttccttgtgattgggaagacatctcctgtaacttaccaagtccttggccatcttaagacgtgcttggttcttgcctttggatatgtcttgcttcatgatccctttagctggagaaatatacttggaatcctgattgcagtgattgggatggggctatactcatacttctgtacccgagaaactcagcagaaacccgctgaagcctctccacaagtcacccaggtgaaggaaggtgaatcagaccctttgatctcggacgccttgagcaccgccgagaacggggccgctgcagctaccgatgagcctctgaaggtgcccatgtggagctccaagtacgcaagggcatgaaatggcaccccgacgatagctcatggcactatacataattattcagcttagtaggcagatagtagggctggaaggaagccagtcagccctgagtgtaatgaacgtgttccttgttccatttttgggccttttttgcttttgttttggcttaccatgcctgtggtgt

SEQ ID NO: 793 - DNA, 718 bp, Avena sativa
gccaactccttatctctttcactcccagatagctcaagcagagcaagaatggcagcaccgagctcactaggacttctccaggtgcagtccttcaccgcgaagtgccggccggtgacggtgagccggcgagccgtgtttgccgtccgcgcctcgacggcttctgctgccaccaaggaagccgtcctaaggcccttccgagagaacagggctctcaagatcatttcagggcttcggaatttcgacaggagcaatgttgcctctgtcgtcaccgctgcagataagggaggtgctacccatgttgacatagcatgtgaccaagacttggtaaagcttgctcttaagcttaccaaccttccgatttgcgtatcatctgtagatccctcagcattccaatatgcagtagaagctggtgtgcagatgattgagatcggaaactacgattccttttatgaagagggcattgaattctcttccgagcagatattgaaccttaccagggagacaaggaagatgttccccgacatcacattatctgtaacagttcctcacactctgagcctcccagatcagacgagacttgcagagctccttgaagaggaaggcgccgacatcattcagactgaaggcgggaagtgttctagcccgacaaagcccggggtgcttggactgatcgaaaaggcaacaccaacattggcagctgcatactccatctcccggg

SEQ ID NO: 794 - DNA, 645 bp, Avena sativa
ggagctatcgctggatgctgcgctgaggcagccacatacccttttgaagtagttaggagacagctacagttgcaagttaaagcaacaaggatgaatgcactggcgacatgcctaaaaattgttgataaaggtggagtaccagcactctacgttggcttgatacccagcttgttacaggttctgccatcggcatctatcagctactttgtatacgagttaatgaagatagtcctgaaagtggaatgagtgcaaacggattcttgtgcccacgtagcaagttcaggaaactcagctgacattaccttgataaaagttgcaagcaaccatcgacctatgagtgcatttagtagtactttttttgtgtgtggtaggcttacttcacgaaagcttcaggctcgggactgtgactgctgagtgtagctacgtcttggtcaaaagcattattcattttatgctttgcaccagtgttatattgtgcacacgtgaggtctcccacacctctgttctgttgctcatctatagcagatcgagctgtgcccgagtggaaacatctggggctccttgcccttcaaatttcagttaacaggtttttattttttgaagaagtatgaatgaacgaactgcaatccagaatagaaaaaaaaa

SEQ ID NO: 795 - DNA, 456 bp, Avena sativa
cttcagtttttgcaacctcaatagcttccgaacaaaatccgggatgggattctccttgttcatgggtatatcagttccacagtatttcaatgagtacacttctgtcgcaggctttggccctatacacacgcatgcaagatggttcaatgatatgatcaacgtggtgttctcatctaaagcattcgtcggaggcgccgtcgctcttctcctggacagaaccctgcacagacacgacagcaccgccaggagggaccggggtgaccatttctggggacaggttcaggtctttcaagacagacccacgaagcgaggagttctactccctgccgttcaacctgacaagttcttcccatccttctgatgatgctcgtagcagagaatggaaatgacacaggattagttcttgcctctagggagtaacctcttgctgatgtgaatgatgttgtttgacctcct

SEQ ID NO: 796 - DNA, 1026 bp, Avena sativa
aagcttgggcaatcttgtatcatacaatatacaattgcacagatggaattgcggatcataatagggactatattgttgaattcccagacatgagtccaagttctttcaactcccagttttcgaaacgaagaagtatctcacttgcgaggaaacatccgaggttcttcttaagtgaggtctctgcaagcctaccacaaccacatttatggtattctacaaaggaggctgtcaaagcccttgatctatttattaatgcaggcaatgatctttcaaaaagtctcacatttaggtacgacctcgttgatcagacaaggcagtcactgtcaaagttagcaaataaaatatacctggatgctttgaattcttaccaaaagaaggatttgagtgatttgaacttccacacagagaaatttctcgaactcattgtggatattgatacactactagcttccgatgataatttcctgctgggcccttggttggaaagtgcaaaaagccttgctacgactgaagatgaacggacacagtacgagtggaatgctagaacacaggtgtcaatgtggtacgacgacacaaagaccgagcagagcagactacacgactacgccaataagttctggagtgggctgctgaagaggtactaccttccgagggcatcgaaatacttcgctcgcttgtcgagaagcctgcaggagaaccgcagtttccaactggaggaatggaggcgagactggatctcgtattctaatgaatggcagtctgggaaggagctgtaccctgtgaaagccacgggcgatgctttggcgatctccaggtcactctttgcgaagtacttcgggtagctgaagtggccacacaacactaaggcgcgtgtatctgttgtggagcaaaataatgggtgtactcttgagatgatgagaaatgtaccctgagtttgtaactttgtaattctgctcttgattccacgagtggtctcgtctcgtgtaaggttcaactgtaaatacttttgctagttggtactgtaca

SEQ ID NO: 797 - DNA, 454 bp, Avena sativa
cccatggacacccttcttcctgtcgcacggctcgcccacgctctccatcgacgagaccatgccggcgaggcacttcttcaagtcgtggctgccggcggccatcgcggggtctgagccgccgcgcgccatcctggtggtgtccggccactgggagacggccacgccggcggtcaacgtcatccgcggaaacaacgacaccatctatgacttctatggcttccccaagtccatgtaccagctgaagtatcctgcgcccggtgcccccgatctggccaagaggacgaaagagctcctggagcaaggcgggttcggtcccgtgaaggaggacaccagccgtggcctcgaccacggcgcgtgggtgccgctgatgctcatgtacccggacgccgacatcccggtgtgccagctctccgtgcagaccgaccgcgacggcacctaccactacaacctcggc

SEQ ID NO: 798 - DNA, 689 bp, Avena sativa
gctcatttatcgtcacatcataactcgatgaatatctattatggtacattcatcttgcttgtactatgtgtttctttgtcagatgtggaatgtgcaatggccaaggaatgttgccctgtatagcatgtggatctcgtggcctagtgacatgcaagacatgtgatggctgtggttcccttcttgcccaaagcactgcgtcagtgttcgatggaagacactgtcagcgagaaaagttagtgcaacaacaggagctgcttcggttcccgaagaagtttttcatagagccaaaggggtgcaactatgcaacatacaggcataccaatgcactccctttctttgctgattcatacccactcaaccagttgtcctcagaggttgtcgctagccggctgccagttccaccatctgcaagggtcatttcggagagacatattatctcagttgtgcctgttacccgagtcacaatgtcttaccgcaagcgatctttcagcttctatgtcgttggctacagcagggatgtttttgtaagggactatccttcaaagttctgctggggcctctgctgttgcttcgaatggttgggaactagctgcatttcatgccattcttttggcatcaaatgtctgcactatggaatctggtgtgtaattgtaaaggtgtgctgcgatttctagtgtgtgcagtacaga

SEQ ID NO: 799 - DNA, 804 bp, Avena sativa
tggtcaaaccatcataatatttggagggatgcccaggtaccacaaagaacatttgcctactaccatccagagtcgaaaggattggattttgtaggcctgatggatgatatcaagaaagctccagatggttccttctttttgcttcatgcatgtgctcacaatcccactggggtagatccttctgaggagcaatggagagagatatctcatcaattcaagttgaagaaccatttcccattcttcgacatggcataccaaggatttgccagtggtgaccctgagagagatgccaaggcaattcggatctttcttgaagatgggcatcaaattggatgtgcacagtcctatgcgaaaaacatgggactctatggccaaagagcaggatgccttagtattctatgtgacgatgagatgcaagcagttgcggtgaagagccaactgcaacagattgccagacctatgtacagcaatccaccacttcatggggcactagttgtttccacaatccttggtgatccagcactgaaaacattatggctgaaagaagtcaagggtatggctgatcgcattattggaatgcggaaagcacttaaggaaagtcttgaaaagttgggttcaccattatcatgggaacatattactaatcagattggcatgttttgctacagcgggatgacacctgaacaggttgatcgtctaacaaaagaattccacatatacatgactcgtaatggaagaataagcatggccggtgtaacaacaggaaatgtcgcctacttggcaaacgctattcatgaggtcacc

SEQ ID NO: 800 - DNA, 727 bp, Avena sativa
cgttcgaggtcaagtcggggtcctgcggcaccgtcgtcaggaacgccgagctcaagatcgtcgaccccgacaccggcgcctccctcggccgcaaccgcccgggggagatctgcatccgcggcaaacagatcatgaaaggttacctaaatgatccagaggccacaaagaacacgattgacaaggacggttggctgcatactggagacattggctatgtcgatgatgacgacgagatcttcattgtcgatagactgaaggagataattaaatacaagggattccaagttcctccggcagaacttgaagcccttctcattacgcaccctgaaatcaaggattctgctgtcgtctcgatgcaagacgaacttgctggtgaagttccggtcgcgtttgttgtgcgaactgaaggttctgagatcagcgaaaacgagatcaagcagttcgtcgcaaaagaggttgttttctacaagaggatcagcaaagtgttcttcgcggactccattccgaagagcccttccggcaagatcctcaggaaggacctgagagcaaagcttgccgcaggcatccccagcagtgaaaccacacagtccaaaagctaagtcagatatatatattggtccccactcacacacacctctgtccaaaaccatggagtgttctaaaccaaatggaagttattacacatatagaagggctgattcttttcaatagatggctaagttataat

SEQ ID NO: 801 - DNA, 740 bp, Avena sativa
atgtaaggggtcccgaaaaatcatttctagcgctgtctcttccaagggagatctatttgcctactcagattgtgtgaaaccctgccttttctcactaagacataagggtggaaagtacttgcttgacaaaaaaggagttgccgaagggaataccttgttctcagagtatgatgtttactgttgactcaaccagtctgatactatcctgcaatgatggaaaaaatatatgttgtggatattgaaggaagaaaaaaaacaagatttcaacctaccagaaagatcgatggaacaaatacttcaaaagagccacctgtgacaaaaaatgtttttaagtcacagatgggcagtggttggctgcagttaactgctttggggatatctacatatttaaccttgaggtccagaggcaacactggttcgtaccgagaatgaatgatggttctgttacctctggtggcttttgtcccaagaacaatgcccttgtcataactacctcaaaaaatgaggtatatgtatttgatgtagaagcaaaacaattaagcgaatggtctaagcgctatacacatcatttacccagaagattccaggaatttcctggagaggtcattggcctctcgtttccttcaccatgttcatcttcagttgtggtatatagtgcaagggcaatgtgctttattgattttggattgccagttgttcaggatgcccaattgccaaaacaagggtagcgaaatatcgtg

SEQ ID NO: 802 - DNA, 799 bp, Avena sativa
atcgtatggatctcatgagagctgtgattattggagcaagtggcacaccgtaccaagatggcctattcttctttgacttccaccttccacctgagtttccacaagccctccgtcggcgtactatcactctggcggcttgcgtgtaaatccaaatctgtacgtggatggtaaggtttgtttaagcctcttaggaacctggtctggcagaggaaatgaagtatgggatccatcatcatctagtattctccaagtactagtttcacttcaggggctggttctcaatgaaaagccctattttaacgaagctggatatgagaagcaagtcggtactgttgaaggggagaagaatgcactgccatacaatgagaacacatatctgctgagcttgaaatccatgttgtatattttgaggcggcctcctatgcactttgaggattttgtgaagaaccacttttgcaagcgtggccactacattctcaaagcttgtgaggcctacttgcaaggagatgtggttggcacgctcaatgacgatgcctgctctactgagaggaacaaagagtactcttgctccatgggtttcaagcttgcattagggaaaatattgccacggttgatcacagccttgaaggacattggagcagactgcagccagtacgaacacctggggaaaacagaagctgggaaaacagaaactgttcaagaaagctgaacgctgagccgagttgtattctaatcctcttttggcttacagaaacatgataaatcttcacctccactgttttcatatagtgtacattca

SEQ ID NO: 803 - DNA, 1006 bp, Avena sativa
taattaatttacatgtacagtctgaatccatcgaaccatttgctgccctgcgaaatggtcgctatcttacttcatgctcttgtagagtgcgtcgatggctccctggtagtacttgagcatttgtggccttttcttcttgtatgtcggggtgataaggtctcgctccatgtcaaacggtaacgggtcaagatggacggctcttatgacctcaaagcctttcagcttcttctccttcgcaatctttgagagttccgcaacaaaatgctctttggttcttgagttttcacacagttcagctaaatttccagtaataccattttgttcaccccagatttcaagcgcttgctcgttggggtttataacagcaacaagagaagattcaaaactgttcccataaacccatatcgaatcaatctgtggaagaacaccatagatattctctagattttcaactgcaacgtattctccctgtgaaagcttgaatatattcttctttctgtcaatgattttcaaggatccatttggttgccactcaccaacatcccctgtgtgaaaccatccatcaatcatcacttcctgtgttaggtcctctcttttgtagtatccggagaacaaaacacttcccttcaagcatacctccccacgaggaatgcttgacaaagcatcataacccatctctgaaactgactccaggcgaacttccacatgtggaactggtgggccaacagttccaagcatggagaaatcatttggttgtgcaacaaaagttcccccacaagtttccgtcaatccgtatccttgaacaacgtgtgcacatgtcacaaccctcaaaaattcttccacggctacagaaagaggagccccaccagacagaataatacgtatttttccacccagtctttcttttaccttgctgaaaactaatttgtcaaagagcggagatgccttctcatgtttaattcctttcctcatgctgtctagtttcagcttgtaggcaacattgaat

SEQ ID NO: 804 - DNA, 765 bp, Avena sativa
cagggccataacacggacgtgcagtcagtgtgctgggacaatactggagagtaccttgcgtctgtcagccaggatctagttaaggtttggtcaatatcatcaggagagtgtattcatgaggtcagctcaaacggaaataagttccattcttgtgtgttccacccaagttataccaatctgttggtgattggaggctaccagtctttggagctatggaacatggtaaagaaccaaagcatgacggtacaggctcatgaaggtctgattgcggctttggcacaatcagcagtaactgggatggtggcttctgcgagccacgacaattctgtcaagttgtggaagtaacaataataagcagtgcacctagatagtttcttttttcttctccagataactggtatttcttcagccgagtcatagaatgagttgagctcggcgatgttatcggttatccattgtgttgtactccaaggcgaataaggaagagtagttggttccctgttgcggttgagctgtgtagtgctggttgcggtgagtttgcggaggaactgtactttatctcgataggtgtgtgtagccaaaaacaaaacatagaagaaaagggaggcctagaagttgccttccctgttccatcttgttagtgcttctcaaatgtaaaatgtaacattccgtcgttttactggaactcactgcaattagcctcgtgacggttgtgaagtcgctgagtcttgcgagctgacatatgtagtaatttagttctgaatt

SEQ ID NO: 805 - DNA, 364 bp, Avena sativa
tcgctatctcgccatttcaacaagttttggtcgcggtgctgaaagtagtcattgttactaatgctgcaacagggcagccaacagggtctgcatatgtagaatttttgcacacggagtcagctgagcgagctctgtctttgaatggcacatcatttatgacacggattctcaaggtcgtgaggcgaagctctcatgaagctgctcacttttatggttggcctggcagtggtcggtcatcgctgtatgctaggcacagtaggatggcataccccaaggggtgttcttcctggtagctcttttagaggacgtactcccatgaagcaggtgtcagaagttttcagtggaagcgtgcggcatcaggcac

SEQ ID NO: 806 - DNA, 628 bp, Avena sativa
tcagttggttgatttcataagcaacagcaactggttggccagcccatacaaccagttattgtccttcacctgatgccgctgctctatcttgaagaaatatctgtctgtcctctttcatcttattcacgatctcaagtccttgggttaaagaaacggtccttaacatacttgttttcctctgcctgtatttccttgatagcacttggatatggatttggaggtggtctttttccctcgcttcgtgcaatttgtttcagttccttgtacgcttgcttctttgctttcttctctgctgcatattccatatctgctacagccattgcatcatcttcgttcactccctgctctttcaactctaagacacgccaagcaaaaactcttgctggtggtggagcaaacccgcttatcttgactgcatcatggtagagtgaatctggatgctttctgaagaacttcttcacataaatgtcctctggcaatacaatcggcttcatcttcccatcagtgcgagggaatacgactggaggtgcctgctccatggccttgagccaggtcggggcgggcttggccagccctttcaccagcttccgcgtctttgtcagcaggtcccctcgcatgtacgactccc

SEQ ID NO: 807 - DNA, 776 bp, Avena sativa
tcgtgatgtgaaggacacattgattatgaggaagtttggaaatgttgagccagataactactggtcacgtgtgtgcgagggtgggacggaggccatgattaagcggccatggcatttgctgtggaaatcacgtcgcttgatggagattgtgtctgccattgcctctcgaatgagttgggattttgattcgatgcacattgtcagaggagacaaggcccaaaacacacagatgtggccaaaccttgatgcagacacctcaccggaaaatctccttgtgacactgaatgacaaggttggtgctggccggtatttgtacattgccaccgatgagcctgataaatcattcttcgacccacttaacaagaagtacaaaacacgcttcctggatgatttcaaggatctttgggatgaaaacaatgaatggtatgctgaaacaaaggagctaaacaatggcaacccagtggaattcgatgggtacatgagggttgcagtcgacactgaggtgttcctcagggggaagaggaagttggagacattcaacgaccttacacatgattgcaaggatggtgtcaatacatgcgcagcttcctcctgaatatctcgtcgagtaaggtgagatgagtctcaattcttcttggagtgttttgcaactcacatgtattgctgactttctcagcctatggctttgttgtagctagttactagtttgtatcagtgttttgttgtaacactattgttgattctgtgcacctagattacactagtttgttgaattc

SEQ ID NO: 808 - DNA, 667 bp, Avena sativa
agacgaattaaattaaacttttttagtactcggttataatatccctgatgtgtaaaacatgagcacatgtataagctgttgtctgaatacacactggacaatttcatcccccttcccattgtccacagcacattcaagtaaacacattgcttttgtgaggcacgaatataatcagcctgatcagaacgactctggttgaaaaatgaataactactcaaaattggtacaatgcttgaagactattcaagaacgattagcctgatagaaatcgccggcactaagaaaaacatgctttcctagctgcagatcaattggagggtagccttcaatgcagcgcaccgtaatcttgccatttccagtctggaattcattcttcaatctggaaatggaccttgatgacaaatacactcttagagcatcgacatggtcactgttgcctgaggcatgggaaaggagatcaggtgcaagcacaggcatgcacctcgcaatgtagatgacaaaagacatgtcatgtacctcatgagactcctcacagatagctaccatatctgatggtgccattgcctttggaaccagtgaattaccaagcacttccctaattttctcatcctgtgactgcaaaatctcctcaaatcgactgctgccattgtccactgatttgtagtac

SEQ ID NO: 809 - DNA, 734 bp, Avena sativa
tgatgaaataaaatctggaaagagtgataaggagatatacaaaaaattagaggacgactttggagaaacagttctatatgcacctaaatttgatcttcaaactgctgctatatggttatcaccggtcattgtgggtggtgtagcagctggtatgtgggcttaccaaaagcacaggcaaaggaccaacgttcacattatggctctaaacctcgtccgaggggttcccctgactccaagggagaaggagaccatgattgacatccttacgccacctccgccaccgaggaggtggtggtggcctgtcaaatgatgttcatgtccttggatgcaacataagagttctcatttccagcgatactagtatgcgtatacacaggatggctgatttttgcgcagggtttcgatttacatctcacgcacttgaagctttgtttacggaaatgcttgtgccgtcttagcattgtactatatgaacctaggagtacttgttgcctttggcatgcaggttgtgggatattgaaagtgaaaaacaacctgctgtagaactgtagttgcttcccaggtgtgctgtccaactgacaaacatgtgctgcatcttctgattgctcatgtagcagtcttgatgagaagtacagaactttgtttccaaaataaggtactgcaattttattttcctaatctctttacatgtaaaattgtttatgtactccatgactgaaattgtgcatgcgtct

SEQ ID NO: 810 - DNA, 797 bp, Avena sativa
gcatatgaggagacacaagtttatgggtaatttgcgtctgaggcatttctatgatgtcacactcttttcaccttggagatctgatgcatccagttttgccaaagtttttccttgcattgttaatttgtttttaccaatttttggttttaaagggggacgagatgatatgatgaatgagatttatttccctattggtttgaatggctgatatgatggcccaaatactgaactgaatctgatcatactcttttccattaaacattgattttgttgtctcattgttccttgcattgtttttccttttgttagatcagacgatgaatgagattaaattccctattggcttgactgcccaacatgatagcctaaatactgaaccgaatccgatcattcttcactgttggatattttatcttgctttttgttcaaattagaatatcgctatgcagatcgatcgtccctgtctgctggactttgctgccaccgcaacattggaagtttgcaactacatcggcgttgcacattcaactttagaactacatcagttgaattttgtagaattagacatttgtatgcaacaaagtgttgatcaacataattttgaactaatgttactctgttgatctttagtggaattattacaaaactttgtatgtaacaaattggtgtactttgctgatggacatagtctctctgaagtacacatagtggcattgttcgaccaccatgcctagaagatattatgtattgccaagctggcccaaccgaagttatgttgaacawgccttggcttggcc

SEQ ID NO: 811 - DNA, 821 bp, Avena sativa
acacacacacacacattccaacagatttaattggaagcaatggactcggataaccgtgccaagttatcgagagagtaaaggaataaaatgcacacgaataatacagcaaaccgaccaaccaccatgttggtcggcgtcagtcttttcccggtgtaattgtaaagttgtaatgcctcatctcatcagagaagtgtagtttcatcagagcagcctccatgtacacaaacacgcctcttccatgggaaatttttagcaggcagcagttacggtgttgttgaattggttgttttgtttgtcaggctcctgttgttgccagcaagaagacggcgggatccgacttggcggcgcacccgtacttgaacgtgctgtacttgcggtgcacgcccgtcagcttcccgtgtgccgcgccttggtggagctcaaccatcatcctggagcactccattagctgttcttctgaatacttggtgtggagctcgcagcaccggttccaggacttgaacccattgatggtgcattgggcagtgtacacggctgctgccgccagcatcgacggctggtactttagcatcccgtagtcgacgaggctcagctcgatgatgaagaaagccaggagttccaacttcttgtcagacttggctgccttcaggaacctcctcatgaagcagtatggggttggaaccgacatgtcaaattctagcctgtctgcaattgttctttccatttccaggatatctgctctggtgtaggcacggtcgcagatgaggatcagatcctccacgacagggacactcacttcctcgtacttgcatgccagcagc

SEQ ID NO: 812 - DNA, 552 bp, Avena sativa
aaaatcttgctcacgttattaacatcaaactggcaaagatgggggttcttggaggcctcgaagtaattgatgctgcaagaaaagctggtattgcacttatgattggtggtatggtcgagactaggattgccatgggctttgctggtcatctagcggctggactgggttgtttcagttttattgacctggacacacctcttttactgtctgaagatccagtctacggtggctacgaagcttctggacctctgtacaagtttacaaatgctcgaggccatggtggctttcttcacttggacaacaataatggatggaaatgaagacggttaaggcacgccttcgtcctcctggaacttcatgaagcacaccagcacatgcaatgtggaaatatcacactcgacggctatcacgtggaactgaaatcaaatgatcacttgtaagctaaatatatatagcttaacaagttccatttatgtactgttgtaaggcgagggagacctggagtatttgatcaggctgtagatagacaaattcagaaggccagttcggctg

SEQ ID NO: 813 - DNA, 629 bp, Avena sativa
gacaaagcaactaattctcgctcccttggaagtatgtcaatctggcaggagggtgttttgtgccttgtcatagtggctctgtgtggttttatagcaggaatatcctaccggtttagctacgctgttgccttcatcatagtagcttttctgatagctattgttgccagtttcgctctgcaatttcgacaggtttatgttcctgtggaagcacctcgcttttcttgtcctggagttcctatggtcccggtggtctctgttttcttcaatatgtttttgtttgctcagctacatgaagaagcttggtatagatttgtcatccttagtctcatcgctgtcggggtctatgctggatacggtcagtactacagcgtcccttccacttcagaccgctcctctgtagcttaccatggagttccttctgaagctccatgatcaattgcaagcctccgagttcatcgagaagttttgtgatcgtcggtgaagctctgtgacagtaattctgttactcgcattgcttggacctcggagccctgtgtgtagtgtgtgctccatatgtacatctgtaaacttcagccataggaatgttctgtcgagcgagggggagtaccacccccaccagagatacactt

SEQ ID NO: 814 - DNA, 446 bp, Avena sativa
gttatagccaagatggatatgggcctgagactgagcgcccaaagcgacatgatcattaccctgatgattcacacagtaaaatggcaaccatttatcaggcgcaacctgacgatgcagaacctgaaggccccgaggaaggtgaggcatactagggaggaactaccagcttaactgggctggtgaatacatgagctgaaacttgagagctctggcaagtcctgttaactctggaatatcatcgtcatgaatatcatcttcatttcagcagttgccaatgcttgtcacgctgccaatttgtttcttgtggtctatttatagacttcagcctaattatgtattggcttttttgtttgttgtatgttatttgtaataattagccgaatcatgctgttgtgggttattggactttttgtgatgatcaatatggttttgaagaacaatcctca

SEQ ID NO: 815 - DNA, 838 bp, Avena sativa
agataaaagccggacggtgaatgataaaaaaaagcaccagcgtagtgaaatagaatagcataggacatgttcatactgaagctattgagtcaaatgatatcgctctcatagcttggaccatttgataaatattttgttcatatttcatataatgttcatttgcggcttcaaaacaaatttaagccaatccgtcactatgaattgtgtagttggcagaagcaaaatgctctttcaccaacgcaagggctctccctctgtgagaaatttgattcttctctgttttgggcatctcagcatacgtctgttcaaatccatctggttggaatacagggtcccacccaaaatcagcaggacctctggcaggtacaatttttcctggtgtttttccaagaaatgtgattggttcctcttctggtccaagagcaagggaaaagatgcagatagcaaaagctgatttgtcttcataagcttttaacaaattgttcaaaccttcgtgcccaatcttctcaaggaaccattttatgtagggacctggtaaacctttgagtgcattgaaacataggcacgtatcctcaacaagtacagggccattcacctgagatgcagccattctcgctttctctttagatatgtcctctggctcaccttgtaattcaggcaggtcgagcttgagggactggaaggggatggaacagccgagaatcgtgcggacttcctccagcttcttggcgttgcctgtgacgaaggtcaccgccttcggcagcacccgcgccgccgccgtgcccgacatgatgcagtgttgggccctgctccgcttccggcgagagatgggtcccgg

SEQ ID NO: 816 - DNA, 964 bp, Avena sativa
ccgtgttaaagaagtgactggggtgcttgtgcgtgtggagcttgattcgttgatgaagatcgtcacagttaagagagatgatattgctgacactcctactgttgcaacaccattccgggaaccccgatactcgatgggtagtgagacgccgatgcacccgtctagaacaccacatcatgcttttcagactccaatgcgggaccctggagcaacgcctatacatgatggaatgcgaactcctatgcgtagccgggcctgggctcctatgagtcctcctagggataactgggaagatggaaatcctgatacttggggaagcagtccagcctaccagccaggaactccaccagctcgtccatatgaagcccccacccctggatcagggtgggcgaatactccaggagttaattacaatgatgttccaactcctagagagagcaactatgcaaatgctcctagcccatacgtgccttccacacctgttggtcagccaatgacgccaaattctgccgcataccttcctggtacaccaggtggtcaaccgatgactccaggcaatgctggaatggatataatgtcccccataataggtggtgagggtgaaggtaactggctattgccagatgtgctggttaacgtgttgagggctggtgatgacggtcctggtgtggtcagagaagtgcttggggatggtacttgccgtgtggcacttggatcatccggcaacggagatatcgtgacggttcttccaactgagctcgaggtcatcaggccaaagaagagcgataggatcaagatcatgaatggcaacttccgtggattcatgggaaaactcataggaatagatggctcggatggcattgtgaagcttgatgacacatacgaagtcaagatcttagatatggtgattttggccaagttggcgacttgagatggatgtatattttgtaactgagtccatcat

SEQ ID NO: 817 - DNA, 700 bp, Avena sativa
tgttggtacattcggttacatgcctccagaatacgctcgatacggtgatgtttctcctaaggttgatgtctatgcctttggtgttgtcctgtacgaacttatttccgcgaaagatgccattgtccgatcaactgaatctgctagtgattcaaagggactggtttatctgtttgaagaggctctcaactcaccggatccaaaggaaggcctccggaagctaattgatcctaagctgggagacgattactccatcgacaacattctaaagatgacgcacctcgcgaacgcatgcacgcaggaggaccccaagctgaggcccacgatgagatccgtggtcgtcgcgctgatgacgctgtcttccactagtgagttctgggacatgaacgccctctatgagaacccaggcttggtcaacctcatgtctgggagataacctcctttcctttccttagccacatgcctcccctggcattgtacatcggggcgcatttcatttcggcggtctaaatgccagacgataaggctggattgttttggctctctacatataatttttttcccgctcggtctagattcttttcactttcttgcgagaccttagaactactgtcagtgtaagttatatgtaagtgtaatatatgtatgtgtttaattttcacatggcaatggaagtaggctctactctagtctgtagaataaa

SEQ ID NO: 818 - DNA, 706 bp, Avena sativa
  modified_base (215)..(215): a, c, t, g, unknown or other
ccgggatggagaccacgtctgtattgctcacgtggacgctggttctactgggtatgcaccctgagtggcaggatcgggcgagggaggaggtcctcagcgtattcggcaaggataaacccagcttcgacagcctcagtcgactgaaaacggtgacgatgatactgtatgaggtgctcaggctgtacccaccggcagtcacgctgaaccggaaaacntccaaagaatgcagattggaggcatcacctaccccgcaggcgtactccttgagctgccaataatcttggttcaccacaacccggatgtatggggcaaagacgtgttggagttcaagccggagaggttcgcggagggtatttcaaggccaccaaggaccagcccggtcttcttccccttcggttggggccccaggatttgcatcggccagaacttcgcaatgctggaagccaagatggcgctgagcatgatcctgcagcgtttcgagtttcagctatcaccttcgtacgcccatgcaccctacaccgtcatcacactgcatcctcagcatggagcgcagattatactcaagggtctctgatggccaccttgtcttgcagctttgttcacctgtcatgggttagtgaatagtttccgattcacatttcgggttctgatatgtaaaaatgtatctacttttccaaccgtttttcatgtttaccctttagttcct

SEQ ID NO: 819 - DNA, 766 bp, Avena sativa
actcttccgacgttgatgccctcaacgaggctgacgtcggctacaactgcagcagcagcggtggtgccaccatgcgcggcgcgcttggcccctttggcctcctcgtcctcgccgacggtcgcctcgaacagacggctgtatacttctacgtgtccaagggcttggatggcgcccttcagacccatttctgccacgacgagtcacggtcgacacgggcaaaggacgtcgtcaatcgtgtggttggcagcaccatgccagttcttgacagtgagacattttccgcgagggtgctagtggaccactccatcgtgcagagctttgtgatgggagggaggctgacggcaacatcgcgggcatacccgacggaggccatctacgccgcggcaggggtgtacctgttcaacaatgccacgagcaccgccatcaccgtcgaggggcttgtcgtgtatgacatggcatcagccgagagtcgggccttcttggctgatgacatttagatgaaaatagccaagaactggtaaaggcttatcgccaatgttgggatttcacctagggatcgatcatatcaaattagtcgaacacgctatgatcctttagtatctgcctatcctcttatgttagctttgttggtctcgttcgttgtcatccttgcttatgtagttccagttaatttctatgagttctatccgtagtgagtcgtgacctcaactgaaagcgatttccaatatcagacatgtgatgcattattaccaaatattgttctaaa

SEQ ID NO: 820 - DNA, 746 bp, Avena sativa
actcttgcaggaaaagctccattatgataacagaatatccatctgttgttaaggaatgggcggatgataaacttgaaagtcaaattgaagttgtcttggaaactgtgaacaaaataagatctctgaagccatcaacagatacaaatgaaaggcgtcctgcttttgcactttgccgaggacaagatatcgcttccactgttcaatgctatcaatctctagctgtgtctctttcttctgtatcatcgctcaagatcttgacagagagtgatgaaactccacctgactgttcaactgctgttgtaaacaaggatctgaccgtataccttcagcttcaaggggctctaaatgcagaagtggagctcgaaaaactaaggaaaaagagagatgaaattcaaaagctacaacatgccctgtcccagaagatggatgcatccggttacagagagaaggctccgccgagtgtccaggaggaggacatgagaaaactcactgctttcctcgagcaactgcaggtcatcggtgaagctgagaagaaactagacgtgtaaaactggcaatgctcaagtcggcttttccattgattgtgaacaggcgtttttgtttcaaagctgtttcgtgcaaatttttgcggatggtggagctgtgctcacatttatagaagttttaaatggaacaatgaaacttcagtctccgtgttaccttgacatcttacgtgcatgatatatgaatgttgaatacgtgagtaa

SEQ ID NO: 821 - DNA, 541 bp, Avena sativa
cagaacaaacataactgatacaagaaggcaaaacaatttacgatctcaagttaactgttgcgaaataagattaccgaacacatgataccagtgcaaacacattcagcaacaaggtcccgacacaatgaaacaggctaaacatgtccctagcttaacgaacaacagttaaaacaagcttcgagcctctctacgtacattgcatcggaaaacagtccatctcctcccatcaaaagcaagaatgatatgctgtcgacaatttttctcccttctcaagacaatcttccataggtgggataggtaagaaccacacctgaaaggttctattactgggggttctgtccaggctgctgtggaccaggtggcggtggtggcatcccatgcctgggtggttgcccaaactgcggtggtggcatcggtggcctcatccctggtggcggtggcatgccaggcatccctggcctccctggtggcggccccatcggtggtggtcccctcatgaactgcggcggcgggcccccagggtatggctgcggcggcccag

SEQ ID NO: 822 - DNA, 905 bp, Avena sativa
cagaccagatatccatgttgaagaagcacacacagaagatatcactggggttaagatttctacagatgggcagattcttctgtcaagaagtatggatagtactctaaagatatgggatttgaggaaaatgaagactcctttgaaagtgtttgaagatctgccaaataactatgcggagacaaatgcatcatttagcccagatgaacagcttgtttttacaggaacttctgttgagaaagacggcagaaacggaagcctactttgcttctttgatagaaggaaactagagcttgtatcaagggtgggaatttcaccacattatagtgtcataaggtctctctggcatccaaggattaaccaggtacttgcaacagttggggacaagaaggaaggtgggactcatatcctgtatgatccttctgttagtcagaggggagctcttgtatgtgtcggacgagcaccgaggaagaagtctgttgatgattatgaggtgcaacctttaatacacaatccacatgcactgcctctattcagagatcagccaagtcgtaaacgccaaagagagaagatgatgaaagaccccctcaaatcgcacaaaccagaagcacctgttaatggtccagggtttggtggtaaaattggtacgacaaaaggcagcttactgacacagtatctcatgaaggaaggtggtttgatcaaggagacctggatggatgaagatccaagagaggcaattttgaaatatgctgatgctgcaaaaaatgatccaaaatttattgcgccagcatatgctcaaactcagccagaaactgtgtttgcagaatctgattctgatggtgaagagaaaaaataacatatggatgtaagctatttgttttcagtaaaatgagctaagayacaccaag

SEQ ID NO: 823 - DNA, 984 bp, Avena sativa
atggtgcaaaatgtgacatttctcgtctacaggttctttttggatctaatgtgacggttgcagtccaagacccatcctatcctgcatatgttgattcaagtgttatcatggggcaaactgacttatatcagcaggatgttcagaagtatggaaacattgagtacatgagatgcagtcctgaaaatggatttttccctgatctctcaagtgttgcaccgacagatataatattcttttgttcacccaacaatcctactggcgctgctgcatctagggagcagctaactcaactagtcaaatttgcgaaggacaatgggtccataatagtctatgattctgcttatgccatgtacatatcagatgacagcccaaagtccatctttgaaattcctggagcaaaggaggttgcccttgagactgcatctttctctaaatatgctggattcactggtgtgcgtctgggttggaccgtggtccctaaggagctccttttttctgacggacatccagtggctaaagacttcaaccgcatagtctgcacttccttcaatggcgcatcgaccatctctcaagccggcggtttgggttgcctctctccagagggtctaaaggccatgcaagaggtcgtcggattctacaaggagaacactaaaatcattgtggacacatttacggagctcggattcaacgtctacggtgccaagaatgctccctatgtgtgggtgcacttccctggccgtaattcttgggacgtcttcgccgagatccttgagaaggcaaatgtggttactactcctggaagtggatttgggcctggcggtgagggctttgtgagggtcagcgcatttggccacagggagaacattattgaagctgcgagaagactgaagcagctatacaaataagcattgattcagccgatgtcctccctcactggggagcccattatcaaataagaaacccagcagcgcttggaacataaga

SEQ ID NO: 824 - DNA, 687 bp, Avena sativa
ttatggacaagctttcactatatatatgggcatctttatgaactactttttgtttgttaaaagctcttgtgaacaacatagtggtcatgtactgtattcactattcagaagtcaattctgtgccgtatgctgatctgcctcgattgcttgtgtgtttttgctcaacagtgggaagtacacggacccgcaggccgccggcgtcccgcccacgaacggcaccatggtgtacaacggcggcgagcagttctcgacgaacgttaacggcggcgcctccgttgctgctcatgcgtcacggctcctcctcctcctcgccgtggccgtcgccgtcgtcctgctgtaagccgggcgatacagtatggtggtaaatcaccgtccgacgtacgaccctcgcgaggtgtccttatccggcgagcctcttttggcgtgacggaggcgaagataagactagacgaatgggcgggccggcagagaggaaaaggctgacagtgctagtagtactaacggatgaaacaggaataatgttcgcacatatcgcagccttcttctagatagattatggcgtagggttaggataatctgtaggtggttacttatagtttagctttccatctctgatctctatacgagcttcttcgatttgttgagcggaaatggtgatgtattcgttattttcgtgatctatactat

SEQ ID NO: 825 - DNA, 871 bp, Avena sativa
gttcttatcttatccctatgtgttcaagaattttgagatatggaggctatttacaagcttctttttcctgggcaagttctccataaactttggtatccgccttctgatgatagcaagatatggtgtgcagttggaaaagggttcatttgagaagcggacagcagatttcttgtggatgatgatatttggtgcaatctcactactggtactatcagctattccctttctccagacctatttcttggctgttcctatggttagcatgcttctttatgtctggagcagggagtacccaaactctcagataagcatgtatggtctcgtccaactgaggtccttttatctaccatgggcaatgcttggattggatgtgatatttggctccccaatactgcctggccttttgggcattctggttggacatttgtactacttcttttcagtgttgcatccgctagccagtggaaagaactacctcaagactcccatgtgggtacacaagattgttgctcgattcaggataggtgtgcaggcgaacgctcctgtccggccagccaacaccggccctagtgccttcagaggaagaggatacaggctcaatcagtagtctttacttggaggagaagcacaaagcagcgacaaatgccacgacccctggcgatgcataagagacatgaacaggttaacctagactcagcctagactgtctggcagctatacgaacttgagtaagatcccccacctcaagtcgaggagaatgttgaatctgtaattgcgctcgtcgaatctcaactgatgcacacttacgctgtacctgggaagtactgctgcctgttctttgttcgttcttacttacaaaagctgcataagt

SEQ ID NO: 826 - DNA, 975 bp, Avena sativa
tgtcatgaggaaccctacatgttggccactcttgaagggtttcggcatcaacctcaggctctccatctgactgccgcaccatcgattctttattatgtttgtccaggtagaggtccaaagctccttcgccagaaagaattttagctccaaatccatgctgattcacagatccaaccgactcttcatcaacaacaacagcgtctattttgtcttttccagtccgtatttcaggtatctcatacattgcttcagtcaatatagtctccagaattgaccttagacctcgagcaccagtattctttgatactgctcttttggcaataagtcgtaaagctttctcggtaaaatgcaacttcacatcattcattccaaataactttgtgtactgcctgccaagggagttctttggtttcgtgagaacctcaacaagttgatcttcactgagggaagatagactaacaagaactggaaatctaccaacaaactctggaattaatccatatgaaatgagatcaccactttcaaccgattccagcaatgtggatgtgatctcagaatttataacaccagtccgcatattagaacgaactggcgctcggaaaccaatggaagaatcatgtctcctttcagaaatagtcttctccaagtccacaaaagcaccaccgcaaatgaagagaatattcttcgtatcaatctggatattatcaccccttggatgccttctagcccctttctcaggaacactaacgaccattccctcgagcatttttaacagtgcctgttgaacaccttcacctgaaacatccctactaaggttgatactttcggccttctttgttattttatcaacttcgtcaatgtatacgattccttgctgagcagcagctatgtcaaaatcggcagccgctaagagtttatacagaatagactcaacatcctcaccaacatatcctgcctgagtgagggttgttgcgt

SEQ ID NO: 827 - DNA, 679 bp, Avena sativa
gggaagaacaagtttcttcgcttaaatgctgatctagagaatttccggaagcagaccgaaaaggaccgtgcaaagtttacatcgaatatacaagtggatcttgtgcagagtctgttgcctctggttgatagctttgagaaggcaaacgtagaggtcaccctggagactgataaagagcagaagattagcacaagctatcaaggcatatacaagcaattagtagaaacattgaaaagcttaggtgtaggggttgttgaaactgtcggcaagccatttgatccatcggttcatgaggctatcgcgagagaagaatccacagagttcaaggcagggatcgtctcacacgaagtccacagaggtttccttttgagggagaaggtgttaaggcctgccaccgtgaaggtctctaccggtcctggtgaagaaaacacgagctccacatcttcggaggagtctttggaggataccaaagaggatgctgctgtctgaatccgccgtaaacctggagcgagctgtagcaagtcgttgtagctagagcaccattgtttgggagctcacattgcactgttaatatgatggagcggagtgttttgattccgaaggagtcctttttgaaacaacacatatgagaatgtacatttatggtggtcgcaagtatccttattaagaacaaaaaaaa

SEQ ID NO: 828 - DNA, 715 bp, Avena sativa
cccgggatcaccacccgaacaccgaaacgaagcagatcggcggcgcgtcactccaatcaccggttaggataaatggcgacggtttcggattctctggtctgggagcttgtcaagaagaacaactgcttcctgatcaagcagtttggcaacagcaacgccaaggttcagttcagcaaggagcccaacaacctctacaatgtccactcctacaagtactctggcctggcaaacaagaagacagtgactgtgcagccggctgctgataaggagatgactgtggtcctctccacgaccaagacaaagaagcagaacaaacccgctgccttcacccacaggactgtcatgcgcaaggagttccgcaagatggctaaggccgtcaagaaccaggtcagcgataactattacaggcctgacttgaccaagcctgctctcgcaaggctgagtgcagttcaccgcagcctccaggttgccaagtctggtgtcaagaagaagaacaggcagtaagcaggatgggcgaatgagcttattttgtggatgtgttggttaatgtttagatttgttctaagagtattgagttgaatatgatgaatgatgctatcggcagactggctcaagttttcgcagtaggttctatatttgtacctgtgacttgttctgaagcctcttttaatcattttggcaaccgttggctccaaaaaaaagttaaattaatcgc

SEQ ID NO: 829 - DNA, 680 bp, Avena sativa
aggacaagaacaagccgatcatcttctctatggctcgccttgaccgtgtgaagaacatgacaggcttggttgagatgttcggtaagaatgctcatctgaaggatttggcaaaccttgtgattgttgctggtgaccatggaaaggagtccaaggatagagaggagcaggctgagttcaaaaggatgtacagtctcattgaggagtacaagctgaagggccatatccggtggatctcagctcagatgaaccgtgttcgcaacggagagctgtaccgctacatttgtgacaccaagggagcatttgtgcagcctgcattctatgaagcatttggcctgactgtcattgaggccatgacctgtggtttgccgacaatagcgacatgccatggtggccctgctgaaatcatcgtgaatggtgtgtctggtttgcacatcgatccttaccacagtgacaaggctgcagatatcttggtcaacttctttgagaagtccaaggcggacccaacctactgggacaaaatgtcggaaggaggcctcaagagaattttatgagaagtacacctggaagctgtactcggagaggctgatgaccctgaccggtgtatatggattctggaaatacgtgagcaacctggagaggcgtgagactcgctgcggtacttcagagcgtagaacatctcc

SEQ ID NO: 830 - DNA, 679 bp, Avena sativa
tgcaaggtaccatacctccatggggttctgatcaaggtggagcaagatttcggggaagctgttcgcctcaagataacagctctgatgctgtgaaaacgaactccacctgcaagatggagtcaaattcagatgctgctccaataaagcagggctccaatggcagtagcaacaacattgacatgggttccagtactaagaatgccatcacaaagccttctgtagacagggagaaagtggtgtcaccttcagctgttaagtctaaccatcagacgtcagcattccatccggtccagcaccaaacgtctccagaaaatgtggtagggaatggcaaagctgatgaagaaactgccaatgcagtgaaacagggtcactcaagagaggcagcacagcaaggttctgtgcagcaccaccatcatgtacattattgcctccaagttatggcacgggaacagacatcaataggttgtggatcaaacgatcggtgtggtccgtccagtgtgtccgacgtgcccattgaaggtcatgctgcaaactatagtgtgaacaggagtatctcaggcagtcataatgaaagcaatatgcagaacggaactagctccgctcctaatgttgcgagaccaaacattgagagtggcaccatcatcaaaatggggctgaaggtggcaatggaagtgggagc

SEQ ID NO: 831 - DNA, 625 bp, Avena sativa
agagttattgcaggcaaccttggttggtgggaactacggcctgcttaacacgacaacatttgaaccgaatcctgattattacagtgctttgctatggcatcgcctcatgggaaccaaggttctgtccacgacattcaatggcacaaacaagatccgtgcctacacacattgcgccagagattcggaagggatcaccctactcctgatcaacctcagcggcaacagcacaaaccatatctatgtgaccagcgagggcgcacatgagggcgtgcatccctacagcgcaaagaaggagcacagaaggttcagacgctttccgaagctcagtgaagctgctgagctctcaagagaggaataccacctcacccccaaagatgggaacctgcagagccaacatatgctgctcaatggcaatgtgttggctactgatgccaacggaggcatccccaagctggagcctgtgcaggtggagggaacaaagcccataaccgtgggcccttactccattgtgtttgcccacatccctagcttctatgctcctgcctgtaggtaggctgtttgattggtttggtgagaatgattctgttatcataggttagaggaagtgtcggtgagaagcaaagca

SEQ ID NO: 832 - DNA, 539 bp, Avena sativa
ccgcaacgagcactttgataagtacatagagtccaagatcctgtcagagaaggagctcctgggctacaacgatggcgagagcccgacatttgaggtggtcactttgccctgcggcctcgtcgcgggagacacggtccttggcaatgtcccggagaccatggagagcgttgtggcgccggtgactgggcgcgagccctacttcatgctgccaaggatcctgcagaggctgcttggctcggtgccactggtgcacgtcgacgacgtctgtgccgcacacatcttctgcatggagcagccatccctctctggccggttcctctgcgccgccgcctacccgactgtccacgacgtcctggaccactacggcagcaagtaccctcaccttgacctcctcagagagactgatgaggtgcttgcaagggtgcaatccgagtgggacaagctcggggaggtgggcttcaggtacaagtacaagatggagcagatactagacgaaagcatcggctgcacggtgaggctgggtggcctagacggatccg

SEQ ID NO: 833 - DNA, 597 bp, Avena sativa
ttacaggcagacacaacaacagcagttatatggctcatcagctcccaacccgttcatgacaaatgatcctttcgcgatgtcgagtcatgtcgctgcgcctccgtcagttcaaatggctgccatgtctcaacagcagcatcagcagataccggcgatgatccatcagaaccccttcgggccagcagttcagccgcagcatgcgggcgctggccctgcatttaactctttcctggataatggcttcggggcattcccggcggcaaacaactcacaacaccaagccaacccatttggcggtagccttctataggctgcatataggaggagctaatagtgccctgaggaattgcgatttttgtgtgactgtaatatgcattgcgcctggccaccattcctgtatgccactcgtgtaatgatatgtgtattggctcatcaccacacgggactgcctagtgaccctcttgttgtaaagaaagtagcgacctgtgtaacatcagctatatgtcaataaacattaggacgtggttatatataacaatgcggaaatgcaatgatggttgagcagtcttttctgttcaattgacaaaacttagaaca

SEQ ID NO: 834 - DNA, 660 bp, Avena sativa
tgctgaactgaaaccagtgccctgcataacctatgctgatgctttcgctctaagagaacagtgtgctacccctatcctcaagcaggtcaggagtgatgttacacgttatagatatggtgacgagcagcatcttgatgaagcgttgaagcggatctttcaatatggtttgggtggtggcattccaagacgtagtgcacctatattacaaaaaattcgagaagaagtaactgatgacgggaaatactgtttagtacttgaatttgaagccaaatcgttggagctatcagattttgagaaaagacaggcaaaattcacctccttttttggtcctggaattaaggcagaaattggaaaaggtggtgatgatctgtatgaagtgcgtcttatctcagagactacatagaaaattcagagacttcttaggaaacacatagcgtggggcttgtcccgaggccccgtgcaggcagcccaacacacggcaacacccgaaacttgcatcagatgggcttggttcgggttgacgcagggaaccaatcgtgctgccccgcagtggcagcttatgcagttccattctctgctaatataaaacaaagaaatcttaatttccttgttccactaacttgcatgtatgattcttttgcgggaatgtatatatgatgt

SEQ ID NO: 835 - DNA, 753 bp, Avena sativa
gactgcagcgacaacagattgtgcaacgaggattgtccatctgttccaattggcaggggtcctcgtaccgatgtccttcttagagctgaaaatgttgtgctggaggcaggaggctgtgttctcaggcttgcaggactttacaaaatagatagaggcgctcattttttctggttgaggaagggtacactggactcacgaccagaccatattatcaatcagatccattatgaggatgctgcgtcccttgcaattgccataatgaaaaagagacctcggggtcgtatctttttgggctgtgacaataagcctctttccaggcaagaaataatggactctgttaacaaaagtggaaaatttgacacggaatttcaaggttttactggcaccgatggtccgttagggaagaggatggagaattcgaaaactcgggccgatattggttgggagcccaaatacccaagcttcacggagttccttggtgtcagtaattaatagccgcttgtgcacacgatgaacagttcttcttaccttgagtggatagcagtgtcaaggggatcgtagggacatgctacaccagggttttttgttgccccagcagtctttcttagaagatatgcaaacaccgcacagttgaacagtgtgtatttgtgtagctcggtggtcattaaacattctgagcattgggttctgaaacttaaactgaatatctaatgtctccttcgtctgtctaatttccgttgcttccggtttaca

SEQ ID NO: 836 - DNA, 889 bp, Avena sativa
ggatgctgctgatggcttgaggaagcttgactggcttcttgagaagtctacagctccaaaccagttgcaacttattgagacccttgaatttaagctatctccgaggcaaaaagaagccctgtattctgctcgcgttcttttactcctccatgcaaataaaattgaccaggcacaagagttggtcagtggactgcttggtatgttccgagacagtatattccctgttttacttcaagctgcagttcatgtgagagaaaagaaggttccgaaagctgaagaagttcttagccgctatgctgagaagcatcctgatgattctaaaggagtcctcctcgcccttgcccagattgctgccaatgccaaccattttcagattgctgccgactcactgtctaaaatatctgacatccagcacatgccagccacagttgctacactagtagctctaaaagagcgtataagtgactctaatggtgctggttctgtgcttgattctgctatccagtggtggaagaatgccatgacagaggataacaagttagatgtgttcatgcgggaggctgcttcatttaagctcaatcatggacgtgatgaagaggcctgtcaactgtacgagcaacttgtgaagagctgtgggagcacggaagcgtcggctgggttagtggcaacttcagcacgcacagaccttgagaaagctgagcaatatgagaagaagctgaaaccattgcctggtctcaaggcaattaatgtagagagcctggagaagacatcaggagcaaggcatgtagaccaagccatgaaggtagatgttcctgaggaagtgaagaagcaaaaggctaagaaaaggaagaggaagcctaaatatccaaagaactttgatccagcgaac

SEQ ID NO: 837 - DNA, 960 bp, Avena sativa
  modified_base (54)..(54): a, c, t, g, unknown or other
acatacatgtacagaatatttactgagaaaacattacaagacagcacggctacntaaaaaggatggcatgtgtgtctttcacggtcaatggaaagagaaaacatccgcatatgcaccattttcagctagtgttcatatggtagtaggagagtagtaccagatcagacaacaaataacatttaatcatcttgttttgaatcccaatccttcatcttcttacttccctttggtttagcaataggtccattcatgcccgccatttttgcattatattttgctcgcaacggcccatttgtagcccatggtgcattccaatcagtagtgtcttcattaacaagatgtgtccactttgttctgccactccgaccgaaatgcttaacttgcatgaccttaggcaagatgctcttgtccatcttatcttctccagtaggctcagagaaatcacgggtgtagatagcatctctaccaactgactgactcacgtcatcaacaccttcctggaagaaggcacccttgtggtagtacttctgcataaagttccacttctgtttggcctcacgagaaggttttggattcttcttgtcccattctcggcgctcctcctcagtcatattcctcaccttctcaatctcttccttctccttcaatcttgcatccctttcctccctgtccctcttaatccgtgctatttcacgattcttccatgactcgtactcctctgcttcattcaactcatcatctgtatcgacatcctcaatgttagcctcttcatttaatgttttctgaatgtgttcgtccttcttaatctcctccaccacaatctgcttagtctctatcttcctagcctcaagcctcttcttgactagctcctccagctgtcgctcctcctcctccagccgctcacgctcggcgatagtgtcgcgctgcgactttggtatgaagacaggcttgaccatggcc

SEQ ID NO: 838 - DNA, 740 bp, Avena sativa
tttgcatcaagtacttcaggtaccgttagggtgtgttactccgtttgcgctattcaacgagtctgcgagtgctgtctcattattactggaccaagggtttaagtctaaacagagctgctacttccatccactgacaaatgatgtgactattgctctcagttcaagcaacctggacaagtttctcctctccattgggaagcaaccagcttatgtagacttggaggcctcaccagtggtaggtaaggataatcctcctgacctagcagatcttgtgccttctggtgcgatcagtttcccagaagaatcagttgagaatgtgacaccgccacatactcaaaacaaaactgtacccaaagagaaaacgtgtccaccagaagtgaagactaagcccaaagatcagaacaagggggcatcaagttcagagagtaaaattcctactaatggtgcaaatatcgagaaatttgtaacaaatatgtttgagatcatctccccattgctcctgtctcagctaaaagaaaaactgaatattaaggaggaagagctttctccaatattgaatggctgtaaagaaaaagctgccccagatctcgagagatttacgagtttgttcaaaagtgcagcatactctgcaggatttcatgctggcttcgacactatgctcaaaaacggtttaagtgaaatgccctccggaataaggttattgagacaagagaaagtgagttaatttagtcaatgttgta

SEQ ID NO: 839 - DNA, 961 bp, Avena sativa
ctctcctgtacgcagcgctggtctggatccccaccctcccgagcgtgctgcagctgggcgcctggccgctctactggatcgtgcagggctgcgtcatgaccggcgtctgggtcatcgcgcacgagtgcggccaccacgccttctccgactactccctgctcgatgacatcgttggcctggtgctccactcgtggctgctggtcccgtacttctcgtggaagtacagccaccgtcgccaccactccaacaccggctccatggagcgtgacgaggtgttcgtccccaagcagaaggacgcgctggcctggtacaccccatacatctacaacaaccccatcggccgcctggtgcacatcgtggtgcagctcaccctcgggtggccgctgtacctgtcgatgaacgcctcgggccgcccgtacgcgcgcttcgcctgccacttcgacccctacggccccatctacaacgaccgggagcgcgtccagatcttcatttcggacgtcggtgtggtggccacggcgttcaccctcttcaagctcgcttcggtgttcgggttctggtgggtggtgcgcatctacggtgtgccgctgctgatcgtgaacgcgtggctggtcctgatcacctacctgcagcacacccacccggcgctgccgcactacgactccaccgagtgggactggctgcggggggcgctggccaccatggaccgggactacggcatcctcaaccgcgtgttccacaacatcacggacacgcacgtggcgcaccacctcttctccaccatgccgcactaccatgccatggaggccaccaaggcgatcaagccaatcctgggcgagtactaccagttcgaccccaccccgtggccaaggcaacatggcgcgaggccaaggagtgcatctacgtcgcgcccaccgaggaccgcaagggcgtcttctggtacagcaacaagttctagattcgt

SEQ ID NO: 840 - DNA, 859 bp, Avena sativa
tcaattggcaaggggcattatgatgctgcatttgatacaggatcaattgagggtcgaatgcttcaatggttccagaaagcttacaaccacaatcgtgacaaatatttcaatcgatgccacacaggacagtcgagaatttgaagtggattgtgaatatattcctgacatgtcagcaaaatatccattgtttgtatctggaagattccaaggtgaactcccggagactctgtacgccaagggctatttgtctaacatgagtgaaatattgattgaattgaaggtccaacatataaaggatatacctcttgataaagtgttggcaaagcaacagatggatcttctaacagcaaaagcatggctttctgaaaacaagcaattggagcagaaggtggccaaattaagcacacaaaatggcattccttcggaatacacacggacggtcctacttcaaaccgtcatggagaaaataggcgcagctcaacagggaaagaagaaaccaaagaaacaaagcagcccagatcagccttcagccacaccgcttcatggtttggcacttggtttcggcaatgtggcggccaccatggagaacctgacctcaggattcgcggacacaaaggcaccagagaaattcgagatgttcgggaaggcggtcggcggttgctgcagtcgcgtcgccgactgctgctgttgcatgtgcttcatcaacacgtgcagcaagatgaacgaccagtgcgccatcgtcctggtgcaggtctgtgctgccctctcgttcctcgggtgctttgagtgctgctcgcagctgtgctgtggcggcggcggtgggtcaggattggacggccggagaccggtgtggccgtgc

SEQ ID NO: 841 - DNA, 912 bp, Avena sativa
gctgcccacagctcccataattgcccttggccgctggtggttggacttgagccgccggctccgctatctccctcgcggcgccccggcccgtgctcgacctcgccgccggcgatccatggagcggcgatccagcacccgcttctcgcccaccgagattgcacggatggagaagttggtttcaggaagaaaagaaaaggtcttggatggtaatttctgtgagaagcttgctgaagaatttaatcgttctgcagctcgagtcgggagtagagcactacagcctacacaggttcgaggatggttccttgataagttcccagcatcaactacaactactagacctacttgcttacccactacttctgaagaaaagactaaagcctcagaagcacatgtgttagtttctgaggtgaagggttcaccttctgaagagaagacttcagcctcagaagctcatgtgttaatttctgagacaaaggctgaaccttcagaagaaaaagttttagctcttgatacaagtatttcaaacaatgaggatgcactttccacggatttactcaaagagactatagataaggttcctgaacttgaagacttgcagtttgaggctaagtcatcaaaggattctgcatggtatgacgttgccgtatttttggcccacaggaagacaagttcaggcgaagttgaagtccgggtgaggtttaatggattttggggctgaagaggatgagtggataaatgtcaggaaggctatccgccagcaatccattccgctggagtcctcagaatgccgtaccattgccaacggagatcttgtcctgtgcttcaaggagagcaatgacgacgcattgcattttgatgcacatgttgtggatatccagcggaagcagcatgatataaggggatgcagatgtg

SEQ ID NO: 842 - DNA, 877 bp, Avena sativa
  modified_base (241)..(241): a, c, t, g, unknown or other
atataatagatagataatagactttcttgaggaatatattatggtttctcatggactgtggtttctcaagggtaaaacataagaaaccaattatcccgccgccagggatgttcaatccaaacatctccggtggataacactattcaaaattttcttgaggaatacctatcattactattattttggcccctacatagatacacaatcgccaatccaattgagtgtccatattacaagtacngtaaaaaaggctacgtgacaaaacacaatcattttgtagcctacagttttattcatctgccactctactgttttgattatcacaacttgtataatctgctggaggcggcggaagagtcgtctccaatgtgtgcccattctccaccacaagtgccaatgccatgcccgacgatacgtgcttttccatgtgacagtgcaagaaccacaccccaggattattcgcgacaaatcggatggccatccatccatagatcgggacaagggccgtgctccttgccggaggatccaccaggttgtacgcctgcgcatctctcaccgcgtcatatctcccaagcccctgcccaagaatgaagaagtcgtggccgtgaaggtgcatcgggttggtgttgctgatcagatccgacgagtaggggttctggaacacaatctccaccgtggcgttgtgccgtaccctcctcaccaccgtcgccttcgatgtcgggctatggccgaactccaccaccggtggccttcttggtaactcttggagcttgctgacgctgctgctcatgttgttgtagtagtgtgcttggagcaatgacgtcgtcgtcggaagctcgaacgagatgttgttcagcttggataccatgcagtttgg

SEQ ID NO: 843 - DNA, 885 bp, Avena sativa
agagagacgtggaaactggagaagagccggattgtatttctctgtgggaactcacccacacaaagaatggaacatggtctaacaaagagtcccaggacgtttatgacaaagcacgtgaagcggttgaaaccaaagaaactaaaaactcatggtccactctcaagtgagcagagaaacaatattttccagactgcatacaaagacactctgctatgcaagtcattgcagcctcgtgggtatggatacatggccaaacctaaaactggttctgaaaggtttcggatgcagattgaggagcaagctcgtgctacagcggaaacccagcaacagaactctcagctcagccagcaggtcaacgaattacaagatcaactagaagttgaacgtgcagacatgcaagagcggcttaacttggagcgtgctgagagagaacaacttgagaagaagttacaacaagagcgtgctgaaagggaaagattgttggaagaggagcgaagatcaagactagaatttgaaaaagccatgatgacaaagttcaaccaacagatggctaaactcagccaacagatgggaagccaacaacagaaggtgcttaataagaggaccgacaaagaaaatagtaatccgaacttgcaaaatgctcttctacagagctcaagtcctagtaggaatccaggagcaaggccaactgtgatttcttcaaatcatctcatacagaattctcgaatgtacaaagcaatggatcaaaagaagtagctggattggagtctacatcatggacatttagtcttggcggttaattaggatggctacattttatttgagtttcatttgaattaggatggcaacattttatttgagtttcatttgatggatatttgctat

SEQ ID NO: 844 - DNA, 526 bp, Avena sativa
ttttaggagtaaaaagcaccttatgtagtggtattacatgatttcaataattcaatctacacaatacactggaacgtcaaaacagtagagaatgcctcagttttgtactccggtaccacaattgctatacaacatactccttccatttcataatccttgtcgtggtttcagtttaaatttaaactaaaaccacgacaagatttatggagcagagggagcacatcttatatgcacacttcaatcaaactgaaaacttagcctaacaggtcgcgaccacactcaataagtgatcaaccaagttacggcctcctgaaaggaaatgtgctcctgctcttctggtgttgcacacgtactccatgatacttggcaactgtcgaatacactccagttactttcactgttaaccgtgctgccttttcttcattagctccagacaaattattccctggggttccacgcgggtctccatgttgcaacgtgacctccactgtttgtccagggtaaattataccaactgcatcccggg

SEQ ID NO: 845 - DNA, 823 bp, Avena sativa
gttgggcttgcggaccctaataaattagtacgctgtgatatatgtgaaaattcttctgctttcttctactgtgacatagatggtacatcactttgcctgagttgtgatatggctgttcatgttggtgggaaacggacccatggaagatatttgctcctaagacaacgagtcgaatttccaggagataaaccagggcatatggaagatgtggctatgcaacagatggacactgaaaacccgagggaccaaaataaggcccatttggtagcgaaggagcaaatggtgaacaatcacaatgcctctgatgatccggcttcagatggccattgcaatggccagggtaacattgattccaaaatgtttgatcttaatatgagacctgctcgtaatcacgggcaaggttcgagttcccagactcagggagcggatcttagtctcaacaaccacgactcttcaggagtggtgccaacttgcaatttcgaacgagccgccaacaaatgaacatccgaatataggagtgtgaattcctttcggttgttgttatgaacatttcttccgcaccgggagcttgaattagctttagccttagtggcgggctgaatgtaccattgcagggaccttagaattggtgttagtttctaatagagctgaagctaacgactgtatctcgattcagcatggcatgcactgaacgctatgttgtggatccctgttgtgtgctgtcaggaactgtacaaagaaataatagatctcccattttgtgtacttgaccattatatgcgctcactgttctgattttcagtattagtacatctcttattat

SEQ ID NO: 846 - DNA, 846 bp, Avena sativa
cgctgttgatcatgacatcgaatgttggaagcagtgtgatcgagaagggaggccggaagatcggatttgacctcgactctgacgagaaagacaccagctataacaggatcaagagtctggtgactgaggagctaaagcagtacttcaggcctgagttcttgaacagattggatgagatgattgtgttccggcagctgacaaagttggaggtgaaagatattgctgatattatgctcaaggaggtgtttgacaggctcaaggccaaggagatcaacctacaggtaacagagaagttccgggacagggttgtggatgaaggctacaacccaagctacggtgccaggcctctgcggcgtgctattatgaggctcctggaggacagtctcgcggaaaagatgctggctggcgaggtgaaggaaggtgactctgctattgttgatgtggatgcggacggtaaggtggtagttctcaacagtgggagcggtatcgcggagcctctggcacccgctttgagtgtctagctggggacaccatcgctggtctgtaatttggcttcctttacctctcagcttgggtcccggtgactgtaaaactagatttacgtcaaacccgtttgcagttatgtgctttgttgtttttcttttcgctcttttgaattttgaagtttgaatcgaggcagtagaaattgccatgtaaatctaacagatagagatgcatttcttttctcgaaacgatagagatatgcatttatgaagcaagctgtacgctagattttgagttgctttgtttctgaaaggacgctggaagcctcgcggcaattcaagtataataacttgtattgtatta

SEQ ID NO: 847 - DNA, 287 bp, Avena sativa
gacgaacggagtcctatgtccgaactctatggcgacagtcatgacgtgacctctcaggcaataaacaaatatcagctgatcagagtaaatgccaagggcatgaacgagggctgcaaatgggtagaaatgtttgaggatgtccgtgtggtgatattctccgtgtcactcagcgactatgaccagttgggtcgcccctacaagcggcagcagtaggcgccttcagaataagatgatccagaccgagggactttgtttgaggaccacaatcaggcacccatgtttccgcg

SEQ ID NO: 848 - DNA, 879 bp, Avena sativa
gcttggatgactctgaagtctcggacggctcaaccacgcaggaggactctgataccgacgtggagacggagtccagcagctctagtatagaggaacaggacacgggatatggagtccacgtcccactcccacccatggaagaagtaacatgtgaggtggacagagaaaacaatacttcagaggtgaagagctctgataggatggcttcagtagctgtatcaaaacttgtgttggcttcaggtgcagccatgttacctcatccttcaaaggtgctgacaggtggtgaagatgcttattttatagcttgcgacggttggtttggtgtagcagacggagttggtcagtggtcatttgaaggaatcaacgcgggactgtatgcgagagagctgatggatagttccaaaaagattgttacggagaatcaaggggcaccagggatgagaacagaggaggttcttgctatggctgcagaagaagcacggtcccctggttcttcaactgttctggtcgctcactttgatgggcaggtccttcacgtatctaatatcggcgattctggattactggtgataaggaatggacaagtatatacacaaacgaagccaatgacttatggtttcaattttcctttgcaaattgaaaatggtgttgatccttcaagacttgtacagaattacgctattgatgtacaagaagacgatgtcatcgtgacagcgtcagatggtctgtttgacaacgtctatgaccaagaggtggcaaccatcgtcacgaaatctctagaagccgacctcaagcctacggagattgccgagctccttgcggctagagcaaaggaagtgggcaggtccggatccggaaggagcccgttctcggacgcgg

SEQ ID NO: 849 - DNA, 844 bp, Avena sativa
gcttgcaggagctgcaccgacaccatcccttctcgctgctctgtctatccgcggttttcgtgtcacacacacttatggtctgtcggaaacctatggaccgtcgacgttgtgtgcatggaagcccgagtgggacaatcttccgctggaggagcgttcccgtctgcattgtcggcaaggcatcagggtacacgtgcactagaaggccttgacgtggttgatccgaagacaatggcccctgtcccagccgatggcaagtcctatggggagatcgtcatgaggggcaatgccgtcatgaagggctacctgaagaaccccaaggccaacgccgaggcgttcgctcatggctggtaccactccggtgaccttggcgtgaagcatcccgatgggtacatcgaagtcaaggaccggatgaaggacatcatcatctccggcggggagaacatcagcaccctggaggtggagaaggttgtgcacatgcacccggcggtcctcgaagcctcggttgtcgccagggctgatgagcggtggggggagtcgccctgcgcgtttgttaccctgaaggaaggttctaacagctcggacgatgctgcgttggcgagcgacatcatgaagttctgccgggagaggatgcctggctactgggtgccaaagtcggtggtcttcgggccattgccgaagacagcgactgggaagatcaagaagcacgagctgagggcaaaggcaaaggatcttggtcctgtgaagaagagcaggatgtaagctctgttgctgagaaacacgtgtacagagtacagttggtcggtggcgccatcatcggggcaaatacagtttgtctggcgccatc

SEQ ID NO: 850 - DNA, 913 bp, Avena sativa
ccattcaattacaagttaatttgtaacttgttttagtttgagattttttggacaaactctcctattgtttgctcactgaaccttctaatattctcgaatagtcaaatttagggaaatactttcgtactataagtacaaacacatgcaacatgcaacagaacaaacaagagcagtacatgggccggggcccaaggcggctgcccctctgcaccgcgctatggactgtctctgtttcacatcatcaagaaacgggttcaaatttacagatgcagtcgtatatgtttccgttaaaaagcttctctgccaacctctggttcttcaccatcgcaagcttcagagcatcgcacttgaaacgggcattgaggttggtatggagcgctcgccccatgccctctaggattaacagatctgcatccttggcagcagctgcaagctccgagctaacctgccggaaatcaatacaggggctgccgcatccattctctacgaccattaggggcactgacaccggttcatccttggcatcatcttgaatgccagccatggcatcgactatcaacccacctgcttctgcagctttccgaaggatgccacagtgctttgcagcttcagctacaatttctggaagttcattagccgtaatatcattcaaagcaggcaatgagtttgcaaccagcactacctcaattccatggcgtagaaattctcgtgctaaaggaagcattccgaggacaacatcagcacctgagttatcaacagagataagtgcttttttgtatggctgatccttcttaagcattctctttttgaacatatcaaagtcatcaatccgccaaggacgttgcatcttcttgcggctcatgcgatagatttctattatagttccttggtgataaaggtccacacaagcttt

SEQ ID NO: 851 - DNA, 683 bp, Avena sativa
tggcttctacacccgggaggtgagggagaatggggagagggtcgggttcgaggtcgtaacgctcgatggacgaaatgggaggctcgcctcctccaagatttccagccctgaatctggtagatggcctactgttgggaagtacaaagtagatgtagcatctttggaattgctagcattgcctgagttgcaggtcaaacaagacacagatctcttcatcattgatgaagtgggtaaaatggagttgttcagtccagcattttttcccgctgtgatgagagttatggagtccaacatccctgtgctagccaccataccaatgccaagatacggccgagacattcctggagttgcaaggttgaggaatcatcctggagcagatgttttcatcttaaatactggtaacagggatactatgagagagggtatctacaatcagttgagcagattgatgcagaagaggtgataccttagtggctgaattaggagcagataggagcagttgttctcacctcctcaaatactggtaaaagggataccacaagagagggtatgtactatcatttgagcagattgtgtcgatcttgttttgcatagtgcagagacctacatctttctgtatggagtaataaatgtagaaaaacagagattttacttcagtaattgcttactattagcttaataac

SEQ ID NO: 852 - DNA, 920 bp, Avena sativa
ctcggagatagctcattctcatggtgctcttgttttggtggacaacagcattatgtctccagtgctttcccgtcctatagaacttggagcagatattgtgatgcactcagctaccaaatttatagccggacatagtgatcttatggctggaattcttgcagtgaagggtgaaagcttggctaaggagattgcatttctgcaaaatgctgaaggttcgggtttggcaccttttgattgctggctttgcttaaggggaatcaaaaccatggctttgcgggtggagaagcaacaggataatgcacaaaagattgctgaattcctagcttctcatccgagggtcaagcaagtgaactatgctggacttcctaaccatccaggccgatctttacactactctcaggcaaagggagcaggctctgttctcagtttcctaactggttcattgtctctttctaagcacgttgtcgagacaacaaagtactttaacgtgacagttagctttggaagtgtgaagtcactgataagcatgccctgcttcatgtcgcacgcgagcatcccttctgtggtgcgtgaggagcgcgggttgactgatgatctagtccggatatcggtcggcatcgaggatgtagaagacctcatagctgatcttgattatgcgctccgttccggtctggcttagagcataagcagttgggttgggtgtgtgccgttcagggatccgcttcatgattcatgaagccgtagatgtgatatgtcatgtggtgattcatttgttaactgcaacagtaataaatgcaaataagaaattgccccgtgaggttttggtagagatgttaagcctatgaccttgtgtttccgttgcccagggataaaacgcataatcaaatcatcgtcgagtgccaaattgtatatagatcgac

SEQ ID NO: 853 - DNA, 672 bp, Avena sativa
gaaggaagccggaggcggaggagagctacgggtcagggtacggcagcaggccgcgaggggggacaggagtacggtggtggtggctatggcgggaggaagaccgaggaggagagctatggtggttccgggtatggatatgggaagaaggttgaagatgaggtccaaggtgagtatggctctggtgggtaccagaagccctacggagaggagacacagggttcatatggttatggacagagtgctgggtatggccgcaagaagcaagatgacaacgactctgatgatgaaaagaagaaacgttacggcggaggagaggaatacggccgcaggaagaatgacgacgaggactctgatgatgaaaacaagaatcgttatgagaagcaccaccatcgtcaccacaactatgatgactagatgtccagcatggtcttgacatgaggttgtcatcctcacgcccagtactacacgaataaaaatggcattgtttccccttttgggtaccagatcattgtccccttctatgaatttgtaaactccaaactatagtgtgctatgtggatggtttatatgtttgaactatctcctatttgtatgtttaagatgacatgttaatgtgtgggtacacgcttgttgattgttgtgtctgaaaactggatttggcttcttaaaaaa

SEQ ID NO: 854 - DNA, 758 bp, Avena sativa
ggtggaatgacagcatgtgaagtgctcctgtttcatcacgaagacatgggtatcccatggagtatcgcgaagcttggtgtgcagcaggggatgtggggctgcgtcaaacggatcgagcctggcttgagggcgtaccaaatcgcgagggctgctggcgagcccatgtcgaagtatgctgctatggcacacgccaacacaaagtttgtcgccgacgagctcactgcttcagaaggcaacagcgaggccagttcaagcagcaacaacaccgtagccgagaagcccaagcactggacagggaacctacccaaagtcatcatgataggtggcgcagtcgccctggcttgctcctttgaccagggactgctgaccaaggctttgatattcggcacggcgaggaggtttgcaggaccaggaaggagataggaacaggacatcgaggatccatgttgcgcatgctaatgcacattgttccgatgcacaactgagcaatgctattcagtgtttcagtccagtaagctcatgtttgcagatgaagacgtctagtgcagaaaaggaaagcatctgtgagcaggcctgtacatactgctgtcgctgcagtttgtgcggctcgtagcttagcaggttagaatagaaccatgaatgataatgatttctgagacagctggatgctgagacattgccatcagatggtgtacaatgaatgtgtaaggaaggctcatgttctggggtgctataaaattatagtgctttttaagtta

SEQ ID NO: 855 - DNA, 710 bp, Avena sativa
cgaagatttcccttgcgaagaggtcagtctcaagtgtctgtgcagatgtatcagagtatcatccaaatatcaagaactggcagattgcgaacgcaggggagcctgcccccgagttccacaaggcaaaggttcatttaagatgtgcagctgggcagtctatttctgccatcaaatttgcaagcttcggcacacctcttgggacttgtggaactttccagcaaggggagtgccactcaacaaagtcacacactgttctcgagaaatgcattgggaagcaaagatgtgccgtcaccatctcccccgacaacttcggcggagatccctgccctaacacgatgaaaagggtggcggtcgaggcggtatgctctcctggtacatagggagctccgtcgaccagactaatctaaaatatggcgtgtggtcaagcaagcacgccgggaagtggtgcagtgaagagagttcaattgaaaaagtatcgatttcacctaggtgtggctggagggattaggatatcatcgtctctagcattccaatttcagattaggattcgcgctctactgtgtctccatgaattgttcagagcgaccgactgggtaattgaaggttggtcctgggatggagtgcggggagagcaaaggcaaaagatttgatgcattcttttgctagtggtgttggtgtatgtgctggtctttcttgaagaagaaagatgc

SEQ ID NO: 856 - DNA, 596 bp, Avena sativa
agattcttgattaccttgggaagtcttctgatagtgatcctccttcacctgtggagcatttgtcttgtagatccagccgaaaaacgttgatatatctagttctcactcttggtcacatgtatccagattatgatttcagtgctgttcgtgcacacctgttcttcaaagaagaagatatggaaagtttcaagcagatactagacaactacctatctgaggcttctatgctatgggcttcgaaaaatgaaggcagttctcttgttgacagtatgactaaagctattgatgaggttatcaaactcagagagtgtgacatctacagctacaacccggactccgacggtgatccgtttctagagaaaggggccatatggtcaatcaactttttcttctacaaccggaagctgaagcgggtagtgagcttccgctgctgttgcactagcaaatttgccggagatgactttcttgctggcgtgctctcggatggggaggaggatgcgctgatcgacatggacatatgactgactagcctggtactgctaggacaatgaccaaccaaccagtgacctgttatgtaatatatatattctagcacg

SEQ ID NO: 857 - DNA, 733 bp, Avena sativa
tgggtaccctggcccccagggtccatactactgcgccgtgggatcagacaagtcatttggccgtgacatatcagatgctcactacaaggcatgcctttacgctggaatcgagatcagtggaacaaacggggaggtcatgcctggtcagtgggagtaccaggttggacctagtgttggtattgatgcaggagatcacatctgggcttcaagatatcttctcgagagaatcacggagcaagctggtgtggtgctcactcttgacccaaaaccaatccagggtgactggaacggagctggctgccacacaaattacagcacaaaggccatgcgtgaagatggaggttttgaagtgatcaagaaagcaatcctgaacctttcacttcgtcatgacttgcatataagtgaatatggtgaaggaaatgagaggaggttgacagggttacatgagacagctagcatatcagacttttcatggggtgttgcaaaccgtggctgctctattcgggtggggcgagacactgaggcaaaagggaaaggatatctggaagaccgtcgtccagcctcaaacatggacccatacaccgtgacagcgctgctggctgaaaccacgattctctgggagccgacccttgaagcagaggctcttgctgccaagagctggcgatgaacgtatgaaaggctggaaaaagatgaattgtggggaaaataaatcaacagtgatactgttcgtcgt

SEQ ID NO: 858 - DNA, 966 bp, Avena sativa
gagcgagcgcacgcatttcatcctggtgcacgggctcggccacggcgcctggtgctggtacaaggtgatcgtggcgctcagggcctcgggccaccgcgtcacggccatcgacctcgccgcgtccggcgcgcacccggcgcgcgtcgacgaggtgcactccttcgaggactactcccggccgctgctcgacgcggtggccgcgacgcccgacgacggcgacggcgagaggctggttctcgtcggacacagccacggcgggctcagcctcgcgctcgccatggagaggttcccccgtaaggtcgccgccgccgtgttcgtggccgccgcgatgccgtgtgtaggcaagcacatgggcgtcaccaccgaggagttcatgagaagaacaacatcattggaatacctactcatggactgcgagatgatggccatcaacaacaaccagggtccaggggttgcaatcctgctaggatcagagttcttagcctgcaagtattaccagcaaagtcctcccgaggatttggccctgggaagaatgttggttaggcctggaaatcagtttctagatgatcaagtgatgaaggacgccaacctgctcaccgccgacaactatgggtcggtgaagaaggtgtatgtggtagccaaggccgatgaatccagcaccgaggagatgcagcgttggatggtagctctgagcccgggtgtggaggtcgaggaaatcgccggagctgaccatgcagtcatgagctccaaacctatggagctgcgtgatgttctggtcaagatagccaacaacttaaatacttactaaatttgaacacaaattgcgcatgtatttctgtatcgaataaatatggccataccggtggacccttttacctactatgcactggtagagaaagccttatagatgccgaacgaaaaatataacaccacagttgtaaggaataaatatcagcaacgtgttaa

SEQ ID NO: 859 - DNA, 760 bp, Avena sativa
tttcgcctaaacatctgacagctgaaagcggctcctcattttcgctaccttcactgcatgtaatgtacggagtacatattaatctgaacagaaatctaaggtaggctgaaggatcccaacaaacacaaggcaagaaagctcacatcttacatatacacatagtaacaacttacaggtaatctgtcctcgtgaacatatctaccgaaccgatcaaaagaggagacgattctaccgtgccagattcatatccttcactagctgagaggagcaacaagctctgggttttcggtgctttgctacaatggctacgagcaccagttccagcagctgagcgagggcggcatccggccggttctcctgatgtgctctgcctgctccgcggtcctcgcggcgctgcggtccctcttcgactccgcgtcagctcgctgctcatccgcagcatgcctcgtggaagcaagcttgctcatcagcctgtcctgggcacgggctcgcatcctctccacgtcgacctcgatttttctcatttcggcttcaattttggctttctggtgatcttcccacgcatggatcttgatctcttcacgtttaaaccttgctaagtatttggccttctctgcctcctcccatgcagctgcacggatttcagttgcgttctgtgtagattggtccaatgacactgtcttgagagaaagtgatgcatccttttcctcttctttcttacttgcccatgctgcgatgctggttttacctagctgagtgc

SEQ ID NO: 860 - DNA, 807 bp, Avena sativa
  modified_base (776)..(776): a, c, t, g, unknown or other
tgtttcaaggaccccaactcaggtggccagccatgctcagaagtactttattagacagacaaactcgtcaagacggaagaggaggtcaagcttatttgacatggtcccagaaatgccaatggatgagtcccccgatggcgctgaagagtttatgcattctgatactcaagatgaagcaataagttcaaataaactgtcactgtttcatattggtgaacagaatgaagcagagtttgataaatatctgccaactttgcaactaaggcagcttaaggaatctgaatttgcagggcctccaacagatttggagatgaaccatgctgcatcattcaaggccgcatctgccaacctgacaatgccgacattctatccagcactgctccctgttccacttaccctttgggctccaaatgttactaatgtggaagtagcaggcacatcccatgaaatcctaaagcccactcctttgattgggaaggaaggggttaaggcagatgaggttgtcagtatgtccaagctcagcattggtgagggtacctctggctcactggaaccttctgctctttcccttcagcttaccgggtcaacaaatacaaggcaatcagcttttcacgtgaacccttcaatgactagaactgacctaagtaatggaaacaacagcccaattcatgcagtttgatggatcatggaatgagccagcctggtcaagtcttacagattgtattactggttccaataccctgtattgttgtgtaagctcctgagcatgtacttcngtactgaacagcttctaagccaatgtatcac

SEQ ID NO: 861 - DNA, 690 bp, Avena sativa
gcagcagcagaaggaatgagtatcagagactacatctggcgtggtcatgatccaacttcagttgctgttatgactgaagatggtgctgctgttacaggtcttgctattgcgggagcatctttggtggctgttcaaatgactggaaaccctatctatgatccaattggttccatcattgttggcaacttacttggaatggttgcgatttttctcattcagaggaaccggcatgctttaattggcagggccatcgatgatcatgatatgcagcgagttcttgaatttctgaaatctgatccggttgtagattctctgtatgattgcaaaagtgaggttatcggaccaggtttctttagattcaaagcagaaattgatttcaatggagtagtcttggtgcaaaattatatgaaaaggactggacgtggagtatgggcgaaacagtttcgggaggcttcattgaataaggatgacgcagagctacgaaaggtcatggccaactatggtgagggtgtagtagatgctctgggatatgaagtggatcggctggagtcggagatacagaagatcgtgcctggaatcagacatgttgacattgaggcgcacaacccagaagggctttcagtttagagcagcaactttgtagattatggataatactcgacccggttgattgatcacacttgctgatca

SEQ ID NO: 862 - DNA, 853 bp, Avena sativa
gtcactttctgactacaatgccagccattcattcaatgatcatttttgtctgcatcaagtgggttcctgttcctgttgtacctcagaatgaaaggtttctctttcgtcgggtctgtccaaagaactaccatatgtttcgttgcattgcaaggtatgggtacaaagatgtacgcaaggagaatccccaaacgttcgagcagcttctgatagaaagtcttgagaaatttatacggcgggaagcccaagagcgttccctggagagcgacgggaacgatgacattgactctgaagaagaggttgcgtcaagctcatcaagagttcttgttggtccaaatggtagcatctactctcttggtgttccactccttgccgactatgctggtgtttcaaatccaaccttgggatcaagcacatcgtttgatggatctctggacgagacaatggatggaaggcgaagcctggacaacgagctctccttcattcacaaggccaaggagtctggcgttgtttaccttcttgggcatggcgacatcagagctcggaaggattccttctttgctaagaagctagtgatcaattacttctacgcgttcctgaggaagaactgccggagaggcatagcgacactgagcataccccacacgaggctgatgcaggtggcgatgcaatacatggtgtaaggcttttacaccaaattttctctccgatggcccaggggtgctaactcgtggtagatacagagcgggggcgacatgtactgtttactggagaactcattttcctgtgatactactagattcagtatttagtggtcattaacaaaggcactgtgtttactggaaggctgtcggat

SEQ ID NO: 863 - DNA, 599 bp, Avena sativa
ctagctatgttttaacttcaacgcaaactatgtacaacttaataaactagtaattccagatagattctgtccaaagtcgaccctaaggctacgagatatacacgctaccaactactcaggacaattagacagtcacagtcctgagttaaccgcgaggggcagccatctgctgcttcttgacccgatctcccggcttcaccatgctgatgtcgtggggtgttataaatacccactgtgacccttgtgcaacagcaaaatctatgagggtgtccaagcttattttgcggctcaccgcatccatgaatacatcgaactcatccatggccctaaaaggtgcttctgtcattccatgaagagctaaggtgaagcagagtgtcgaaaaagaccgctctcctcctgacagtcctctagtgtctctgacagtatcacgcgatgcatcttgaggcatcgtgagctcaaccgacagaaccttgttcttgtaatcgacgttgatgaatccacttatacctttctttcccaggtgctcattgaacagccaagtcaattgtcgcttcaaaaggccagcatttctctggaacttcgtccatcgcaaatcccgg

SEQ ID NO: 864 - DNA, 743 bp, Avena sativa
ttttttgtaacggtactaactaatgagatcataattctcatcactaacacatatacacacaaccaagaaagccggacgattcgcaaacattacacaacggcacgctactggtaatctgaagctaacacagatgtggaaagaatgaaccaatcgaagaaaattacatagagacaatatacaagcacaagttgaactgttaacagcatctgtgttcaggctttctgcaggagagacttccattcccaaatactcagagcattctgaaagtgtctatggatagcagtttccggttctgcgctggaggtgcaggaggtgccagtcctgggatgtctgggatgtttttgttatgggggttgacgatcttgacaacaatgattgcaatcacaccacaaactatcaaaaatagaaacgccatgatgcatttgtcagttgcaacctgacgaccaatctctttcaccatttgactagccttcttcaatgagaagtgaacggaatctagctcattgccaattctcttcatttggtcagtttgctgtgttagagttgtagcagtttgagctccgacttcaacagtttgtgcaacaaccatttttgaacgctcaatagcttggtctgtttggtccatttgtttcgttccagaatcaatgagttgttgatttgacattgctgatgccatttgaacgttatcctcagccacatggtcgttaccagcatcgaatagttcaatcctcttattaccaagg

SEQ ID NO: 865 - DNA, 609 bp, Avena sativa
gatgaaggatcagtttggtaactatgtttgtacagaaagtactagagacttgtgatgatcagcagagagagttgattctttcacgaataaaggttcacctaaatgccctgaagaaatatacatatgggaagcacattgttgctcgagttgaaaaacttgttgctgctggtgagaggaggattggactgcagtcacagtatctttcataatgtcagtagaaatgaccatgtacagctaaccatggctccaagatctaccttctgctgcttgctctgggctgctgcaagcctaagttgaaaaaataacatgttgtactcagaactttgtacattttgtagtttgagcttatagtcgagtcacggtttggctcagagggttttatttacctggtgccgctgcagagaagataggtgtcctgtacaagttgtttaggtgtaaaaaaattgaggaggaaagactattttgcgagactgtacaaatctgcgatcctgagaaatctaccagctgtttagattgctgtccagtgtcttatcactgaagaatgctgtaacgactgatataatggttccagcctatcatatgaagttagctccggttctttgtttctcc

SEQ ID NO: 866 - DNA, 969 bp, Avena sativa
gccaactgcattcaagctcttcacaggctcagcgtggatgatgcttactcaccattttattgaatactgcatatggggatgggacaacctaccaaggacagtcctgatgtattatgccaattttctctcttcgccagagggttacttccacacagtcatctgcaatgtcccagagttccgcaacaccacagtcaaccatgatctacatttcatttcatgggataacccaccaaagcaacatcctcattacctgaccctcaatgactttgacggtatgcttaacagcaatgctccgtttgcaaggaagtttggaagagaagaccctgtcctagacaagattgatcaggaaatactgggccgtcaacctgatgggtttgtgcctggtggatggttggatctgttgaatacaacaacagtgaaaggaaaacacttcaaggtcgagcgtgtgcaagacctccgcccagggcctggtgcggacaggttaaagaaactcgtcaaaggcttgctcacccaggaaggctatgatgacaagcattgcgtatgaaacttgatgattctgggtaggctacttgataaaaaagtctggcgcttgagccactagctagtcattgtactagctgaggaagcagcacatagcgtcaaatccgcattgatggaatggtctgataggaggtattcttatagacaaccgcctgagttgagttaccgtacagcaggagaccacggcagtagcagcagagattatacatcactaatagctcattaggttatgttagaagattattatatcagcccaaccattaataattttggaaccttcgttttctcagcgctgcaggtagtccattctttgcttagaaaccacatgacccgatctatttactgagccatctgcagatgtgagatttcgttgtatttactgtggattcctcggggtaaatttggtacattttggctgcgtatatgtat

SEQ ID NO: 867 - DNA, 898 bp, Avena sativa
caattccttatcgaccaaggatatagcttcaaggtgatcactagcttgccgccacctgatgaaggacctaacctgagctttcacacgcttgatgaacagcttgacctgttaggcaaagtgttgagcgcaggggatgacatgattggtgttgagcacttggaagaggattctgatggcaaggctctcctgaaggctcggcgctctgctggattaatgagtcacttttctggagcgggtggaatggtctacatggagtacaacactgggaagggaaaagcaaagaagaaggacccagctaagaggcatcagctgttcaagaaacgctacacttaacggttctgttgtatggcatctgctggagtccaggatcccgtagagcctgatttgctttgttgggacatggtgtggttagggcccttttcagttggcataatgcgcctctcactgttagctcatcagccagattacatgctaatcactacgagagttcttgcccggaagttgcctgcagtttcttgtggcgagaagcaatgttggtcatctttctactgcttcgttctgaatgtcttcagtttcgcatgggaagaggcaattttagccatgctttgtgcttccgtgtcggttcacttgccatataagagctgtgaagcttatgagggaacgaaggcatttatcttcatggaaatataaatattggtgcgacacctgtatacgatatatagtagtattaagaatccacactgggaagccttgtgccgcatgaatacatccttatgtgccattttccagcagccgtcagttaaataatctgtaatcttcacctctttgttggaaaattgtaaggacatgttattggatggcttagcgaacaatctgaatttgccatctgaaactgtcg

SEQ ID NO: 868 - DNA, 223 bp, Avena sativa
gcgggagagtctcgcaggtagaagaaattctgacgataaatgtaaagcccggttggaagaaaggaacgaagatcacctttcctgaaaaggggaatgaagctccaaacatgatacctgctgacattgttttcatcattgaagagaagccccatgacatcttcactagggaaggaaatgatctcgtcgtgacagagaaaatctccttagttgaagcactgactgg

SEQ ID NO: 869 - DNA, 450 bp, Avena sativa
gaaaggagctgccttcatggcactcaaggagcacaaagaagcatgtgacgcattcatggtggcagtgaaactggatcctgagaatgggggagatgcatgacgcattttgggaggcagttgtggcaatgaagaaggaccattcatctgttgaaagcgacgattcatctgactagggctggggctgagttcctgctgggtcgagtggtttccttttccagcttgtcaatgtgaacgtgtgtttgttctcgtctgatgaagcgacgctcttttttttgtctaatcgtggagcgtagtggcggtgaggctcgacgtgctgtaactcatccaagtcgctaggctactgatactttttccctgtgtgagatagactgctggtacatggcctgcttgtgggagccgtttaagttgtggtggtgttctaaacgttcatttgctttgtctagctgatgg

SEQ ID NO: 870 - DNA, 936 bp, Avena sativa
gactgctgcacctagcgggaagaaaaaagatgttgaactcgtgcctgaagcaaaagctgctgcaaaagcttctaacgataccattgttacatgttcactactgccatatgttgaatctctttggcctgttggggttttgcaaatggcctcacttgcagggtcattatatgggatgatgattagactactgccttcgtatgtacgcacatggtttactagcttgagagatcgttcactgtcatactcaatcgagtccttcactagaacatggtgcagtcctcctctgctactagatgagttttctcaggtaaaggactctgtttatgctgatgaaacattcacagttagtgtaaaccgatctgcatatgagattattgctacatacaagaaggaagaaacagggattgatcttgtcatacgccttccgagctcttaccctctgcgccacgttgatgtcgaatgcacgagaagcctgggtatcagcgaagtgaagtgcaggaaatggctgctctctctgacgtcatttgtccgcaaccagaatggtgcgatcgccgaggcgatccggacatggaagaacaacttcgacaaggagtttgagggcgtggaggagtgcccgatctgctatagcatcctccacacgagcaaccacagcctccctcggctggcgtgcaagacatgcaagcacaagttccatggcgcctgcctctacaagtggttctcgacgtccaacaaatcgacatgcccactgtgccagacccccttttagagatagtaatcggctaggaaccacttggaatactttgctgagagagtagttcatggataggtgtatcttcccaggatacttgtttttgtatgtgtttacaggttagctgggggattgactataacctgataatttggacggtcatggctgcctaagcatgtatgtactgt

SEQ ID NO: 871 - DNA, 480 bp, Avena sativa
ggacatgattattcagcaaggatacgacaagagctatggtgcgcggccactgagaagggccgtcacccagtttgttgaagatgtcatcagtgaagcaattctctctgggcagtacaagcccggcgacaccataacgatggacactgatgataagggtaaaccttgcttgagtcggatgaacgatcagactgttcaattgtcggatcccacgccaacactttgaaagctcaagcacccaatgtatagcagaggcttattgcgttgctgtcaataagcttcttgattcttttgtgcatagtccgcatagttcatgtacatagtctccaggtgctggagtttctccctgaatatagtgtaaattgaggtcttacaatacctgtacatagttacatactgttgtatttctaacatatatgtacattgcttatgtcagactggaatataaacactctgttatggcggtgcttcaagataaaaaaa

SEQ ID NO: 872 - DNA, 473 bp, Avena sativa
cccggcgttggtgcgggctttcccgggatgaccgtagtcctgggaagatcgtcggtggcggtctgttgtactatactgtacgtatgaggagagcagggagggcggctggccagcgacctcctcgcatcctcggcggcggcgggagagacaaatcgaccgttatacggcatgccattgccggcaacaagtcgacggacgtgagcggatccggaccgcctgaggcaactactactactactctactgaagttctttgctgcaatcactcatcaacaactgcttaattaaccttttcatgtactaatcaatccatgttatagagcgagcgtgttctccgatccgtttaattactctactgctcgagctcggctgatgcttccctaatgtgtaattcacatcgccataccgagatcgggctaatctttgccttgatcggtcttcttcacaaataaagctatgtttgtttatgtaacc

SEQ ID NO: 873 - DNA, 830 bp, Avena sativa
cacgatttgaccacaaagcaaaaaactctagctctgccttttccaaattctgagacgcccaagggatttctggtttggcagtgaacatgatcaatctttccccggagggtttgaagataaaaacaaaacgtggatatggtctccgacaaaccttattttattaggctctttggagagcttcaagtttatgaaacacggaaagatatgtggcaagccattcctcattgagaatggggctatatctttggatggtgggattataaagggtgacggtgtgctgattcttggtcacagcgacccagacgtgacatttcctgttgtccctcgtgttgctctgggcgttcagggagactctgaagatgtgtgtaccaagataaaaacgatgaacgcagagaaggatcttctaaaagctttggaggagaagttgagactagcagaagagaaacagcagaaattggtgatggagcgcaacaagaagaaacgcaagtttgacgagatgtcggagttgatgagccagcatagtggcgacgaccagcttcatcagtatcacctagggaagacatcacagtagacaaaaggggcaacggcaatctaagaatggggtgtgcgtagatgataatggtacatcataataactgctgaattgtctagttgttaatggtatgaactgtaggattgattaacgtgttattactagctagtcagggcttttcttcatctaatgggtatgttttacgcgttcagttgtgttgtgagcctgtggcgttgaaccgtgtttgtgggctcttctttggtttcaaagtatggatatatgatatctggtcttctta

SEQ ID NO: 874 - DNA, 693 bp, Avena sativa
cagccactagatacagcatcttctagaatgcaaacaagtgccttcggaaagtccaagggactgcgagcaactcttgctgaaggtactttggcttgaggcatttgatgggttgggcatttcccttatgttaacatgcaatccttcaattcagtacactgtatttgatcagcttaagaacaggctaattcagcggcagaaacgtaaaaatgcacaatcatctggtgactcttccccagttgctctttctgccttctcggcatttctccttggtgccatctcaaaaagcgttgctacaatcttgacttacccattaatcaggtgcaaggtcatgattcaggcagccgaccctgatgatgatgatgacgacgacgaatctgagaggccagggcattcaagacctcccaaaacaatgctgggtgccatgcatgctatgtggagcaacgaaggcatcccgggcttcttcaaaggaatagaggctcagatactgaagacggttctcagctccgcattgctgctgatgataaaggagaagatctcaaagtttacctggatctcgctgcttgccctgcggcgatatctgtttgtctcccaaaagagaatcaagagtgcataataactgtatcatatatatcatcacctcagaagaccaatgtgatagtccacgggtaatcgaagrtcttatacgaataacag

SEQ ID NO: 875 - DNA, 788 bp, Avena sativa
ccgcaggctgcaatgaagttcctttgttggtaatgctgagaatggtagctgccaccagatgttcaggacggcaagcaccgagaatgaggctgttatgccaaagacaccatcaaggcctgttaacaagacgagcaacaaagatgttaggcgagtaggaagctacaaatacagaatcgaggaattgagtgatctgcctccacgccttccaggcatccgttgcttgcttcctttgccagggggagatctgttgactggaggaacagatttgaagatacgctactgggaccaggccaggcctgagcaaagtttctgcatcgctggcccttcagcgaaaggagttggaaatgacgagtgttatgatataaaatccagctacggtgtgcaggttgtacaggaaacgtgcaaacagcctacgccagcgtccaggttgacgcacaagacgcagctcgcgatggccgcggccgattccgccggctgccaccgggacgcgatcctcgcgctggcatccgtcaacctgtcgagccagaggctgatatcgggcagcagagacggtgacgtcaaagtgtggaaatagctagtaattcattccattccagatggggataaaccatcggaagctgacaaagcccttttttggtgtacatatttagctccatgacagtcacagtacatatatatcatgactcactgttgtactttgatggagactcactcactgttgtacagttgatgatgccagattgccagtcaatacgagatgaaaaagttgccgtgtatcactgctgccc

SEQ ID NO: 876 - DNA, 635 bp, Avena sativa
atagcatctgctgtactgtttggtcatactctgactataaattttgttcttggtatatcaatagtaattatatctatgcatcagtatctttcaaaccaaattaaggaccaagtgtcaagcagcaaaattgagatgtctgatgctgagggtgacagattaaatgagtctgtacatgtgaaagttgatcccgtggaaagtgaggctaagcaccgccatggatctgatgagaggcagcaacttcttcctgtctgatgttgtgtcagagtgaggtgaggagcatacatcttgccaacatggcacaagcacctgagcatgggatgagaagatttacacagccgtataggtttttgacctaatattcccgaagacgcaccatcacgatgatgtttagatgatcgtcacagggatgcatatccattagtacaattgcgagcttgctgagatactgcagctggaatggataccttcgccgtgtcatagagttgatttgatgtgaggtgatgtgatgtgatgtgatgagtgagaataactatatttagtctactatttttcgtcccatttgtaattttttcaatgacagagcagcgttctctctgcaatatatttgccattaactcatctgttaaacaaaaaaa

SEQ ID NO: 877 - DNA, 616 bp, Avena sativa
tggcgcatatcaaaacttggccagaaataggacttcgtgttctcctagggaagtgtaaagcattggagaacctttggcttgagtatgtccttgccctaaatgacaatgacttgattgcaatatcacggagctgtagcagtcttaaaagcatctcacttgggctcaaccttcagcgctactctagtgacgtccagtattgtgaaaccaggacgtcttttactgataacagtctttatgctctagccctaaactgtcaaatgcttcagatcgtagacctcaaatttacaggatgtgctcctgactggctttcagaaataggattcacacaaaagggttttctggtgctaattcagtcctgcccgatttgtgttcttgtgttaaatactgccaacttctttgatgacgaggggatgaaggccctgtcatcctcaccgcacctggagacactcgagcttaatcttgtgtgaagcggtaaactgatgatgggatgcgcttcattgcacacaccccatgcttgagtaatctcacacttaggttgtgtgaagaggtgactgatgttggagtggctgaactgggacatgcacataagctaaaagtcttggtcatcgagtgttgt

SEQ ID NO: 878 - DNA, 824 bp, Avena sativa
gctatgtatacatagaggacaaaatcattcgcgccatggcccattgaaggtcgacatagcctaggtgtcgtggcaagtgtgtgtggttgatacaatatagtgtcgtcctatgtaccctgtgcacatcataacataattattaatgaccccacggttctttttcatcccaccgttttattctcacacatatcccaagatttattctcacataactaccacaagcaaaggtacaacacaggagaaccagaacttctctttttgtgcttctggttatatcttcatactcataattccatcatgttgcccccatgagtaatgtttggtataatgttctgcagaaaggatgctttggcacaagaatcggtcagaaaatgacccaaaacggcaatggttgctgtactgctcctgattttctcaacaccccttgatatcatgcaaatgtggttggcttctacgacaactatggacccgcggcgagaaatggtataaactgcttcagctatctgtcttgtcatcctttcttgaacctgaagcttgcacccgtagaaattaaccagagcctgaaaactgctccgatcgatgcctttgccatcaccattgccaaagtaaccaatgtgcactactccatagaatggcaggaggtggtgctcgcactgggcacagaatggcagatgcatctcagatttgattgctccatgatcagtagcagcttcacctggtctattaagagtaaaaccattccacttcacatcgatattacatgctctgaacctcataagccattgcacataacgttgaggacttactacaagttctttcctgag

SEQ ID NO: 879 - DNA, 802 bp, Avena sativa
agataccaatacacatatcagggatgcttatcctgctagaagctagtactcaaacaaaatacggtacaatagagatgctattttcatctgatttgagctacaatcgtgtttaagttcatgtgaaacatagcttgtccaatctctaactattacacagaacaagaaaaaatccgtgaataaaaaaggaaagaaaaaatagtagaaactaaacaacatcccaagtaacaaaatgctctgaccttaaagagagcctatgctattgccttaccactaactctcttcagtagcttcaagtggttgacatcttggccttcacatcaaggttctccttgtcgttaataggcttggtggtctgactcctgatcctcttgatcttggggctttccagccccttatgcccaaacccatacagttgcagcacctggttatcggcaaagttaaacgctcgctccatactcttgagacaacgctctactggataatcgccatagcttccgcacggcttgcacccgacaaaatgcgtcacaaacggccaacgctcatctccaagaccagggtggtggttctcaaccatctcctcatacttgtccaccagtccagcccagaaaccgtgcaagtagtatgaattctctatgaacaccttgtccatccacttctccttttgtgagagcaagaggtatatcagtgcagactgatcgtcagcctcaaatgccgggcggcccttcagataggcggtgagtatcttcccggcctcctcacggatgaaccccttgggccccataggcgcccacgcatcgagtag

SEQ ID NO: 880 - DNA, 521 bp, Avena sativa
cgggacgccgcctcgctacatcagagagagggagaggaaaagcgcgcggcgtgagaactccagagagggcggcgagatggtgcagcggctgacctaccggaagcggcatagctacgcaaccaagtccaaccagacccgtgtcgtcaagaccccaggtgggaagcttgtgtaccagtacaccaagaagcgggcgagtgggccgaaatgccctgtcaccgggaagaagatccaaggaatcccacacctcagacctactgagtacaagaggtccagattgtcaaggaaccggaggactgtgaaccgtccttatggtggtgttctgtctggtcctgctgtcagggagagaatcatccgggcatttttggttgaggagcagaagattgtgaagaaggtgctgaagatccagaagaccaaggaaaagaccaccaagagctaaactgttgtgccgagataggcattcccgtgatgttttgagttcctttgaatttgttttaagcaatcaaagtaaaattttctctttg

SEQ ID NO: 881 - DNA, 634 bp, Avena sativa
atccttgctcctgaggacgtttgtttgcgtgggacaattctcttcagttccaggtacggatgaaggggcggttgggatggttgtctcccgctgtcttcacggcagtctgtgcttcataatgcctatcgctctcttcgtcctcaccatgaagcttaatcattacattattgagcgaaggaggttcctaagaacaagtcccattcaccaccgctgagaatatctgacaccaggagaccaaaccacagtgtcctaaccatgggcatagctcctctcgggaacatatggggagcaaataaaacatccaggaactcgcagtatatcatacgagggaacgcatcagccctaagcatgaacgacttttccgtttcacgctcttgttctgtggcggtgtccacggccacgtcgtcggaccacaggtcgagatgacgaagagccggcagagtaccaaggacctgaatgtcctccagtcgcacttgatggacaaatatctctaggaaggaaagaagaggaagggacgaagaactaatccctatcggcatcgcctggtaccaccctctcaaccgaaggagacggagttgtggtgaagagggcacccagtcgcccaagttatcaataacttcgttatcatcagtgg

SEQ ID NO: 882 - DNA, 586 bp, Avena sativa
gaagtctgccgtcacgccggcgcccgcctcgggatcgctcccggcgacgctgagcgagaccgtgcgggtgacggtgacgaggccggaggtgtcgaggagcgccgcggagaaagcggcggcagaggaggtgctgatcgtggagggcatcgagatcgccgaccacttcaagttcgtcaagttcgacgtgatggtgaacgcacccgagagcggagccggggcggcgacggggtactgcgccgggagcgtggcgctgacgccgcacgtggtccggcagaacaagaagaaggggtcggtcaagacgatggcgaggttcggcgtctgcgacctcatggacaacatcggagcggacggggacaagacggtcgtcgtgtcactggtgcccatgtgcggcggcgagctggtcactgtcggcggcgtcagcatcggctacaccaagtgaagattgcgccgcacatatatgctgtgtgctctactgctctcaatatatatagctagatcaagctgctcatgaggcttcagtgcttgtattacaacttgcacgtacgtacggatctagcgattctaaatagaacagttggaagtgaca

SEQ ID NO: 883 - DNA, 384 bp, Avena sativa
ttctagtgaaacaagcttccatgcaagcatcagcgaagcaaacatatactatctctacactccgcagttgttcggcggcccatgcctcgtgggcaaatgttgtttttttctctgtcctccaattggttagggacaaaactgggattatgtggtgtacaaacagattcgagcttccaaaacttcctgcggctgcaaactcaccaggaacccccccccactctcaaattgtacaacgctgctgcactcctccaagcttggacaagggtgcgagtttggtctacagcccctactcttcctcatcttcatcctcatcttcctcttcagcttctttaagccactgaataaagcatcagactgtttaacgaaactttatcagactcatcg

SEQ ID NO: 884 - DNA, 570 bp, Avena sativa
agacaggaagcaacctcatccagtggccggtggtggaggtggagacgctccggacaaactccactaacctcggcggcatcaccatcgaccaaggctccatcttcccactcagcctccgccgcgccacccagctcgacatcgaggcctccttccgccttgacccactagatgtcgccgctgccaaggaggctgacgttggatacaactgcagcaccagcagcggcgcagcgggccgtggcgcgctcggcccttttggcctccttgtgctcgctgacgtcaggcaccatggcggagacacggaacagaccgccgtctacttctacgttgccagaggccttgacggcggcctgcacacgcacttctgccatgacgagtcatggtcgtcgcgtgccaacgacattgtgaagagggtcgttggcaacattgtgccggtgcttgatggcgaggcgctgtctgtcagggtgctggtggaccactcaatcgtagagagcttcgcgcagggcgggaggtcgacggtgacgtcgcgcgtgtacccgaccgaggccatctacgccaatgctggagtgtatc

SEQ ID NO: 885 - DNA, 686 bp, Avena sativa
tcgaatatttgggtgcctgtcaacaaataaacaaacaaaaatgcagggccttttctctttgaaataagcgaagcaaatcttctggagataaaacctaccaataacattgtccttccaactgatatgggatacatcattacagttacgtgtaccactgatttcaccccttcaatactgctgataaacacataatgctatttggtaaaagcaaaaagagaacagctttgtagcttcctctatgccaaatattgctgatgaatggagtccagaaaaattggatcaaacgggtatttagttgtcctctccataaagaatgcgatgtaactacaaaagctatcttagtaccgaccctggtgctacttgtggggatgtgacttcgtcgggtgcaatctttcgcggcattttcttcttctgcgtgtactttgcgtaggaataccagacaccgccaaatgtgttgatcaccaacccagtgacattaagagcatgcactttgacgcctcccaacacaacaaaacccagggtagtagaaccaacgcccttcagaactcctactattgtggttgttagggcagagtttacgagtgtgcaccaaaacatggtgtaattgagaacgatacccatcaccagtgaaataagaagaatgacagtgaatgatacagatgctgtctgcatttcaaaagataaag

SEQ ID NO: 886 - DNA, 607 bp, Avena sativa
tttagtccgggcaactttcatgcagacctaagatatataacagtgatcttgtatataacaatttggtatacatgagaattatctaattcacaataaagatatacaatcgtttgctcttgcttcccataaaacaaaagggaatatataagggaactcgatgctattatcaccactgtacactgtacaagcatctgttcaattcaaaacctaaactactagtggccctgccaaatgacataccatcaaatggccgaatacatgcactgacttctctatacttggaaaggacatggagtatcaatattatccatttccatgtcaacttccgtatgggcagctgctgaacacaagcaagtgaactcgccgtcaaagtaaatcaacgttcttcccgctgattcctgttagggtcagagaccatgtccatcatcatcttctctggagagtcttccccaattgccaaaagctgcaagatcaatctttcttcgctgccctgcaaaaatatcctccctcttcttgtatatatcctgttgccgccttgttgtttgtccaccaagtccccaaacttccacatcaagtatcgaggccacaacaggtaaataaccctgca

SEQ ID NO: 887 - DNA, 836 bp, Avena sativa
tgagaagacaggtccgtgcgtttttatgacaacaaaacagatgcatgatttcaggtcatggttgaaaacatacttaaaacaactgcttcagatcaaattgctccagaacatagcaagtgcaagctaacaacaccagataaaagtgacaaggtcctcgtagaggaataacccatgacaagtcccaggcctctcagctaaagtactcatgacaccaacattctcatgatgattgtattttgataaaatattaggtgataactactagtagttccttatcactcctcatcctcatcaccaccggcgtcaccgccaccacttgccttcttcaggttcttcctcttcaccctgccagggaggcctccaccaaatgggcttgtcagagaaaagtcaatgtgcttctcagattcaaccctcaccatgaaggaagggacattgacaatttgcctgccaaccctgatgtggcgctgcctgatcaagacacgggcatggtggattgactttgccatgccagccttgaagacaagagtctgaaggcgccttgcaaggaagttctcagcagtgagagcaaggacgtaatccagcttgtcctgaccctcggcaaggagcccatagcggttcatgcggcggagaagagccgcaccctcaaagatacggcggggattcttctcatccagtgtgagcaagtgccttgccgcattacggattctgctcagcgcatactgaaccctccacagctcacgcttgcacctcagtccatactcaccaaccagcttcagttctgcatcaagacgctccttctcataaggacgccttggcttcttgaatgtcttaccata

SEQ ID NO: 888 - DNA, 433 bp, Avena sativa
gaagtactccctgctgacgtcgatggcgacgaccctgccgtcgtcggggatggcgagcgccgtggcgagcacggagcagccggtgaagacgccgacctcgatggtgttcttggcgcccatgatcttgagcagcagcgagaggagctgcccctcgtccggcggtgacgacatgaacccgtaggtgtgctcctttgtgatgtggcggagctcgccggagggaactcgttctcccgcggggtacaccatcgtcttgagcatgtactcgtagagggcctcgttcttgaggagcgtcttggtgctctcgctgctgtggatgtccttcacctcccccgttcgaagccatggccgtgctggtgatgctgctgctactgctagcccggcgaagaagatggaaccgcccaggactcgcacctttctgcaacttgccagtgcc

SEQ ID NO: 889 - DNA, 621 bp, Avena sativa
cacgcggtatgggagctggcgcaagctcaagacccacgcaggaaccagagtgggctgacaaggcatacaagaagagccacttgggaaatgagtggaagaaaccctttgctggatcatctcacgccaagggcatcgttttggagaagattggtattgaggccaagcagcctaactctgccatccgtaagtgtgctcgtgttcagctggtgaagaacggcaagaagattgccgcctttgtgcccaacgatggttgcctcaacttcattgaggaaaacgatgaggtgctgattgctggatttggtcgtaaggggcacgctgtgggagatattcctggtgtcaggttcaaggttgtcaaggtatctggtgtgtcgctgcttgcactcttcaaggagaagaaggagaagcccagatcttagattgctttttttataggcagggatggaatggacagttgaatctctacatgtttgaggaggaaagttgcctgctatgtttacaatgtcctatataacctgaagttgtattagttgaattgttccttctcagctgttgctttggttaacagttgctactaagagttttgtttccttaatttggatatattaatgctgtagaactaaa

SEQ ID NO: 890 - DNA, 714 bp, Avena sativa
agtgtgaccctgatgaaccacgtgcgtgtgacgccggatgcaatggtggcttgatgactacagctttcagctatcttgcgaaagtgggtgggttggagaccgagaaggactacccttacactgggggcaacggcgcctgcaagtttgacaagtccaaaattgctgctcaagtcaagaatttcagtacggttgctattgacgaagaccaaattgcggctaaccttgtgaaacatggcccacttgcaattggcatcaacgcagtcttcatgcagacgtacattggtggcgtctcttgcccatacatctgcgggaggcatcaagatcacggcgttctcctggttggttatggatcagctggttacgcgccgatccgcttcaaggaaaagccgtactggatcatcaagaactcgtggggcgagaactggggcgagagcgggtactacaagatctgcaggggtccacatgccaaaaacaagtgtggtgttgatgccatggtctctacggtgactgccatccatacccacaaggaataggttcttactagtacaccggagtcggactctcgattgcctacatagcataagatgcttgtgattgtgccatgtctgttggtagttacggctattctacggtattacgttgcagtttgtggtcagcaatgtgtgaaccctgtcttgattgctgtaatacacgtatggattggtatgtaagaaa

SEQ ID NO: 891 - DNA, 715 bp, Avena sativa
cccgggatcaggagagcgccgcccacctcccccaccaccgctccgccagcacgcccgcgaaatccccgttcccaaggtttgcgagatgaaggcgaaggcgagcgcccgcggcggcgactccaggctctccgtgaagaaggccaaggccgagaaggaccccaacaagcccaagcgccccccgagcgccttcttcgtcttcatggaggggttcaggaaggactacaaggagaagcaccccgacaacaagcaggtctccgtggttggcaaggccggtggtgagaagtggaagtccctgaccgatgctgagaaggctccctacgtggccaaggccgagaagctcaaggccgagtacaccaagaagatcgaggcctacaacaacccgcaggcagaggcgtctggagactccgagaagtccaagtcagaggtcaacgacgaggatgaaggcagcgaggccgacgagtgatgcgtccgtaccagcaagcagcagcaggaaggggaaggaagtcaggtctctcactggcgtgtctccgatggatggttgctcttgtgtcctcttagtagtctagctctcgtagtccctccctttgcctcaggctgctgctgctgctctagctagtctcatgttggtcggagtggggaagttcctagtctagtagctctctggtagtagttttcattcatgtcccagtcgtcttctgtatctatcgatggatgt

SEQ ID NO: 892 - DNA, 694 bp, Avena sativa
gctcaagctcatccagctcggcctcaccttctccgacgagcgcggcgggctcccggccctcggcccggagggccgcccctgcgtctggcagttcaacttccggggcttcgatccgcggaccgacgtcgccgccgcggactccatcgacctgctgcgccgcagcgggatcgacttcgcccgccacgcctccgacggcgccgacgcgcgccgcttcgccgagctgctcatgtcgtcgggcgtcgtcctgaactccgagatccactgggtcaccttccacagcggctacgacttcggctacttgctcaagctgctcacaggctccaacctgccggacaccagctccgggttcttcgacctcatcaagatatacttccccgtcatctacgacatcaagcacctcatgagattctgcaatagcctccacggcgggctcaacaagctcgccgagctgctcgacgtcgagcgggtcggaatctgccatcaggcaggctcggactctctgctcaccgcgctctccttcaacaagctcaaggagtcttacttcggtgggttaactgagaagtacgcaggtgtattgtatggtctaggtacagagggtggggaaaccacatctgttcactgagttatggctagttaaataaatgatgaactatttatgagaaaaaaaagagagaaatctgtttgctgaatgaaa

SEQ ID NO: 893 - DNA, 744 bp, Avena sativa
tcagggagctcacctccgtcgtccagaagaggttcaacttcccggagaacggcgttgagctgtacgccgagaaggttgttaaccgcggcctctgcgccatcgcccaggccgagtctctccgctacaagctgctcggaggtcttgccgtcagaagggcttgctatggtgttctccgttttgttatggagagtggtgccaagggttgtgaggtcattgtgagcggcaagctcagggcccagagggcaaagagcatgaagttcaaggatgggtacatgatctcatctggtcagccagtcaatgagtacatcgatgcagctgtgcggcacgtgcttctcagacaggggtgttcttggtatcaaggtgaagatcatgctcgactgggatcccaagggcaagcttggcccgaccacccctcctgcctgaccttgtcaccatccacccccccgaacggaggaggatgagcttcgccctccgtccttggttgaggtctaaactcctagtcatgaaatgtcacatcttttttgtggtcggagtcttctgcgaggctgtcactgttctcggtcctagctaggtttctatccttatgataagcaagggctatgcaacacttggttaccttaatgtttgatggacaagagattctatgtaatggtgctatgttaatttcgtttgaaactaagttttgctgagacaagttacatacatatatgtatgccagaaatctttgtttgctcaaaaaaacaa

SEQ ID NO: 894 - DNA, 630 bp, Avena sativa
ttcccgggagtcggcgccgaccaccggcggcgtgaagaagccccaccgctacaggcccggcacggtggcgctccgtgagatccgcaagtaccagaagagcacggagctgctgatccgcaagctccccttccagcgcctggtccgcgagatcgcgcaggacttcaagacggacctgcggttccagagccacgccgtgctggccctccaggaggcggccgaggcgtacctcgtcgggctgttcgaggacaccaacctgtgcgccatccacgccaagcgcgtcaccatcatgcccaaggacatccagctcgcccgccgcatccgcggggagcgcgcctaggctgactcgctgccgaggcctgtagtcgatcggagaggggatcgtcgagtcttcacaagcccagattcgttgatgcccctgacgatttcgtagttcctacttgccgtgctaggttaccttctgtgttagatgagatgtggttggtgtaagactctgtcggtgatgttcttttggtttgcgatgagccaaacgtatgttggaaactattattgttacttgttagcaagtaatttcgtcctgtgcttgatcgtatccttattttgttgttgcttgtgatgcactgattcaaaaaa

SEQ ID NO: 895 - DNA, 781 bp, Avena sativa
cgggacatcgccaacgagcatccagtcgccatccttgtcttcatacgtcggaacatactcggatccgttgagcagatccatcaacttgctctcgttcatgccgttcatcccttgagacccacagtttccgatggtgaaggagctgaacatcttctccagcgccttggagaggtcctggtaggtcttgtacatgttgaggtccaccttgcgcaggtagggcgcaccgtccatgctcaccttcacgaacgccgctgccggcgatgacttctccgccaggatgttcttgcggaatgaccggactggcggccacccaaccacctgtgccttgggcgcgcgcggcttctcggcggggtccggcatcgcgacggcggtgacgacgctgctctggctcggagacctcttcatcttcccgacgacgtcagtggccgccttctcctcctcctgctgctccaccttcaccgtcgcggcggcgaccacgtcggcacgacggtcctcctcagacggcgcctgctcgccggccggctccagcttcagcttcaggtcgatggtctcggcgaagcccctcttgccgctcatcctcgcctgatctcctccctcgcctccgccgggcaggccgagccggagctcggtcgcctcgaagcccaggtccgacgccattgctagctaacgagcttagctcctcttcctcggctgctggtgctgcttggttcgcttcctttctttgtttcttggctagcttttggtttcgctgctttcagaggtttgggttgcggtcccggga

SEQ ID NO: 896 - DNA, 528 bp, Avena sativa
cctggatggagtgctacatagtcccgaaaaaaaaaagctgacccagctgacccagccgaacaagctgatcctgctgaaccggctgagccattggattgggatacacgcattaacataatacttggagctgcaaaaggcctggcttacttgcatcatgattgttcacctcgaataatacatcgtgatattaagtcgagcaatatcttgcttgacgccaattttgaagcccgtgtatcagactttggactggcaaaattactggaggatgaacaatctcatattactacaatagttgcaggaacatttggatatcttgcgccagagtatatgcagagtggcagggctacggagacgaccgacgtctacagttttggagttttggttcttgagatattaaatggaaaacggcctactgatgcatccttcattgagaaggggttgaacattgttggatggctaaatttcctggttggcgagaaccgggagcgggaaatcgttgatccaaactgtgaaggcgtgcagaccgag

SEQ ID NO: 897 - DNA, 377 bp, Avena sativa
taaccctttgtaatagttgtaaataggccaaccggccagctgaaataacagaatcacgggatcattcccgatgacaataatctactacagagagtgatattcttcctaacacaaccttacttccgaacatatgtggggttgagtcttaactctgaaatttgacagataatgaacaaatacatgtgcggttcctgttttgctatcctgcctcactgcaaatgagaagaaaagaacaggcaaaaatgaccatcctctattcaaaaaatcttctcaccagttgagaaaatcaagaaaatgactgaactaaaaatacaaaggtatacctggaacgaagaagactagtttccaggtttcggagcttgtcagatccatgttag

SEQ ID NO: 898 - DNA, 783 bp, Avena sativa
aaagtgtggcttttatttgcatccggctgaaggctcacctgcaccaaacataacacaaggaaaactcagtgctccacggatactgcgggttcttaaagttgctaactatgtggttgagaagcttgttcttgagaaaccgttggatggaagtcctgacagcacgtttgccatgggtttgagctctggtcaaccgcaactctcggccctagatagttcttcaaggcttggactaaagcaatggcacaaactaaaaccttctgttgagatactgtgcaacaaccaggttctgtcgcctgagatgagtttggccacggtgcgaacatatatttggaagaagccagaggatttgattcttaattacagagtggtgcaatcgagataattgcaacttaaagtacatctgctcacttggttcaccgtagacggcatcattgaagataacaatggcatagagcgaaaaccaccacgctacaggatacaagtgatccacccttgtgctacccctttggtgccgttcccagagccacaagaaacttgattccttccttctctttgtaaagtttttctgtgaatcttgtacctccaggcttctagcgagatttgtatcatagcaaaggtgtaatgttctgctggctaccaggcttgtatatctagagactcggtttctcaataaagcttataaatgggataaatgaaattcatttccccctccccttacagaaagatttgttgctaaaaaatacagaaatatttgttttgtaagaaagcattttttagcttgga

SEQ ID NO: 899 - DNA, 743 bp, Avena sativa
  modified_base (21)..(21): a, c, t, g, unknown or other
ggcagacgccaacggagaacnctaaaaatgctgctgcgttccccacttcatctgccaagagttccttctgcaaggagcgttaacgtaagagtactctatcatcttctcaatgaagccaatagctttggcagctcggctccccagtggacctgctgatatagtgttcactctaattttgcctttacgacctgcttcataagcaagaactctggtatcactctcaagtgctgccttagctgaactcatgccaccaccatacccaggaattgtcctttctgaagcaatgtatgtcaacgagatacttgcacctcctggattcatgatgggaaggaagtgcttgagtaaggaaatatacgagtaactagatgctgaaactgcagcaagatagccacttcttgatgtctccagcaaaggctttgttacctcagggccattggcaagagaatgcacaaggatatcaatgctgccaaaatcatcctttacagtctcaacaacttccttcacagtccattttgaggatcctgcataccttttatttgttttaacatgttcaggaacatcctccagggtgtcaaaaactgcatccagtggatagactttagtaatctccataagagatccatcaggcagcttccgtgattcatcaaactttccacgtctcaggctcgtctcaaatatatttagtgcaggcacccatgtaccaacaagaatttcagcaccagctgcagcaagagccttggcta

SEQ ID NO: 900 - DNA, 793 bp, Avena sativa
tttcatctacaaggccccacggtgccagtttgacgtggttctgtacacgacgggcatttattttattttattttgagcggaagagctgattaatattaaacaagacagagtacaacattgctcttacaaccatagaccaaaagctctgaaacggatctaaatcctacaagctgactcaaaagattagaagctgaaccaagaagacaaagcagaagaatacaattggagcctatcagataatccatcgagaacatggattgactaaacctgcaattgacatcttcagaggcctcacatagcctaacccatcgtagaaccagcggcttaaccagcaatcgagaaggcatcggcaaacgaggttgaaagttgggctgtagatgttgaatatgcatcaccgagctcaaccgagagggatcttcaccgccaaatccgaggagcgacatcagagacgatctcaactgtcttcggcgcacacacccgagcgatatgaagatcgctaataattcttggacagcaattctccattgatctttagtacagcaggaggactcaagtactgcatccaaagctgggcagttctgaaaaaaatcatatggagcagcataacatgaaaccattgtctccttaaaatcccagaaaattgagcaattggcatggcgaagcgcagcatagcacaaaggatataatctgtgtcttctcttgaactccgctgctggagacaccgaatcagagaaggactgcaacgaagggccactagttcgattcttttctgcaccttcgcacaaccaccgac

SEQ ID NO: 901 - DNA, 612 bp, Avena sativa
ggcgctgatgtcaacataacaggacccgtagggaaggaaatgctcatgcctaaggaccccaatgctactataatcatgcttgcgacagggaccggcatcgcgcctttccggtcattcttgtggaagatgttcttcgagaagtatgaggactacgagttcaagggcctcgcatggctcttcctgggagtccccaccagcagctctttgctctacaaggaggagtttgggaagatgaaggcgaaggcgccggagaacttccgggtggactacgcgatcagcagggaggagaccaacgcgctgggggagaagatgtacatccagacgcggatggcggagtacaaggacgagctgtgggagcttctgaagaaggacaacacctacgtgtacatgtgtgggctgaaaggcatggagaagggcatcgacgagatcatgatcccgttggcagcgaaagaagggatcgactggctggagtacaggaagacactgaagaagtcggagcaatggaacgtcgaagtctactgattcttgctctgaacattttgttgtgcatatgcgcgctgcgtgcgatcaaggtgtacgatatataaagtagtagataaaaggtgcattcct

SEQ ID NO: 902 - DNA, 677 bp, Avena sativa
attaattttgatgagctgaagcttggtctgcataagcttgggcaccaaatgcctgatgcagatgttcaaatactaatggatgctgcggacgctgatggaaatggatgcttagactatggagagtttgttactctctctgttcacctgaagaagatcggcaatgacgagcatctgcataaggcatttggatactttgatcggaaccaaagtggatatattgaaatcgatgagctccgcgagtccttagctgatgacctgggaccaaatcatgaagaggttatcaatgccatcatccgcgatgtagacaccgataaggatggcaagataagctttgaggagtttgtggcgatgatgaaggccggaaccgactggaggaaagcctccagacagtattccagagaacggttcaccagcctaagcttaaagctgcagaaggatggatcgttgcaggtaacaagtacccaatagtagacgattaacgcaatagacaagttgtgaattccagatgataaaccctgtgtagcttcctggttctttgttgacaaccgtttctcttctgttcatctggatattctgttgcgctctaatttccgcttggtatcctgttgaggcattagttgattgttgaagtatttattttgttacgtagattgtgtgatccaggccaccacgaattg

SEQ ID NO: 903 - DNA, 664 bp, Avena sativa
tcttctcttcttcctcatcatcactgtactcgctctcgtaatcgtcatactcctcttcttcctcctcctcttcctcctcaatcccatcctccgccactggaccttcctcttgcacatgggctcgagttcctgcacgactgcgttttagaaccttcagcttaaagctggtcttgctatcacagcctatccatgcgtcacacaagcagaaggacgtcaggttgtgattgccctccgctggggcttggaacttgcccattaccaacctactgcctttcttcactctctcaactgcctctctgactgcaactcctatttcccttggactcgcacctaatgcttcctgggtatcttgtatagcttttgatgctgcagttatggcggtagcctcatccatgaagctgaccttctgggataaccaaacttcattcgaagcagtgtccgctagaagcaaccagaagttctcttccctgtggaatgggaagaaaggagcatggggaagtgcagcagttaggccgctgcgacgctgaagtgagacccaagcatacattgtcacaacatcaccctcttgtatgccctcttctccttcggtttcgcatctaatatccacctcaatagtaggaaccatctccaatacaagctctacatcctgagcttcttcatcccg

SEQ ID NO: 904 - DNA, 624 bp, Avena sativa
gccagcgtttgaaaatgcgggacttcagtttgttggcaaagatgagactggaaagagaatggagatcattgaaataccggagcaccgattctttgtaggcgtccaattccatccggagttcaagtcaacaccctcgaaaccttcacctctatttgttggactaattgccgcggcgtgcgggcaactggaacaggtgctgagagacggctgcaatgagcgcactgtcgtggctaaacagatgcttggcaacggctcgtccacatccctggtatgcgagaatgggcacctgaagaagcaagccaatggtacatcaaatggaacctaccatgccaacggcaacagcaagcactgctgacgcatggtcggcctcgccaagggtccctcagtgattactgcatcggttgagccgatatgatacggatcatctgctccaatgggatggttcagttgttgactaacagctggctcagcaagagttctttttgctaactgaagaagaaagggaccgaggttggtataactgagaaaggcaggatagcggctctccgagttcctcaatttcctatgggtgataggattttattagaaagaaaaaggtagaaaaagaaggatttgtctgatgta

SEQ ID NO: 905 - DNA, 725 bp, Avena sativa
ggacaagctcatccaggttgcagcaacccagctgagtgaccagctccctgagtcaagggaggctgctcgtaagctgtcactggagctacaagcattctatgagaagtctcaagcctcaagttcaggcgaaggtgacagctcacctgctacctcaccagaagctgaatcctgggaggctttctgccaatctaagctttccacactaaacgcccaagcaatccttcgtgtcactgttggtgtccctgttgccccaaaagaagtcggtgttcctgttgcactaaaagaagccggcattgctctaaaaggtggcatctctgttgctgtaaaagaaggcgctgtaaaagaaggcgctgtcccgattgctccagaagaaggtggcgtctctgttgctccgatagaaggctcagcggccttgggttgctagcattgggagatgctggaacctagtgaggttgcgatttttccacattcagttcacgttttgctgtacatggtttatgggttgctccgtcggtacaatcgaacctccttttgttgagcgtcagcgctggagtttgtcaggtgctggcacctggggtgttaatattggtgggagatatagtcccttatagttgactgtataatcctttggttccactagtcagtttggcatcgattggtcagtcaggcaaatgtagaatttcttccgccattcgatatttgctggactactgcatatccaaaaa

SEQ ID NO: 906 - DNA, 830 bp, Avena sativa
ttttacagtacacagcgttttcatcattagagtgcaaagaacagaccctacatactccattgagaaccaaaaggtaattacattctgatgtaggcgtcctgggatccagttcacatacaagattgcaataaataaacaaagataaaattcatatatagctggaattccttttgcaaaatgtaaaattacacctttttatactactacattgcctctctctccctctctcatcagctgccggcagcatatgtacaccaatgtccttccatctgccgtcaatgtcatgtgtgctacaggttagccagatcatctaccttctctccacgcaaatcggcccagagcatcctcagaaagatcagataactacaacgcgttcctctgccccacgaatttccgcgcgacgccgaagatgacagccttcgtcaagaggccctggtcgagggtgcacgccagagccacggccccgccgagcacaaggaacctcgccacacggttcttcacgggtttctcctcggcttccatgatgtctgattggtcgctgttggattccagtcctcggacaaaattgtcaccgaccttggtgttgatccgtgccatcaaggcgctcttcgaaggtggctctcctgcagccctggctttctggtaggcacggagtccgggctcgattcttttgacacatccccacatgccctgccggataccgatctttgcaatctcgtttgggatgcccatatcctcatggtggaacaagagaatctcgcaggcagtcgatccaccattccctcgtcttgactccactgcacggatgcaccagcttgagtaatacaaat

SEQ ID NO: 907 - DNA, 672 bp, Avena sativa
aagagatccattttccatgaactctgcctggaaaatcttagtgatttgatccaacggctgagttttgaagcaaaaaaaaaaaaaaaaagttaattaatcgcgatctagaactagtcgcaatgcagcatataattcctcaggtgttggagaagataaacaacccacattatctgtatcgcatgaccatcctgctagctatctcactgctagcccctgtcatgggtgcggaaataacatgtcagaagctgctcccggtggtcattaattcctcgaaggacagagtgccgaacatcaagttcaatgttgcgaaagttctgcagtcactcgtaccgatccttgatcaagctgttgttgagaagactttgaagccttgccttgtcgagctgagcgaggaccctgacgtggatgtaagatactatgcaaaccaggcccttcaggcatgtgatcaaatcatgatgtcaagctaactggatactatccagtgtttagaatctattcttcattgtccagttttggtgtacatgtagtggagacttccgtctaaccccagcaacctacctatgtttcgatgctgataaaggatggtttcgtacccatttctttgttgttaatgttgtaatggagcatcgcagaacacattgtttacatggtagttttggacttggttccaaa

SEQ ID NO: 908 - DNA, 874 bp, Avena sativa
gaaatcgacatgaacaattaaacgcaaattgaaaaggagagttcacatgacaggcacacgcacataggcatgcaactaatcggacattttgactgacaccacgacgaccttgcttgccgagaaacctcttaaagttctttaaacgtttattttttaacgtacaacgagtgattaattgtttgtcgttacagcaaattacaatggcacctcaaggaattacatgaaccaattcaaatgaaatcgacatgaacaatgaaacgtaaacttggaaaggagagttcacatgacaggcacacgcacacatatatacgcatgcaacttaacccgacgacgactttgcttgctgagaaacctcatgtgcttaattagccgctgccgccgagcacggacttgagcttcttcacggttgcgtcgtccaagaaggtgaccttctccacgactggggacggcaggttgttggcgaagagcgcgaagtcggtgatctgcaggccggggttgggtccgccgaacgcgacgagggcgacggccggggtgcttccgccgttgtactggtagtggagcaggccctgggggaagaccatgatgtcgcccgggtagagcgtcttggtgtacggggtgttggcgccggagctgatgaagcccgccaggatggtgccctcggtgacgaagaggagctcggaggcggccgggtgggtgtgcagcggcacgacgccgcccacggcgatgtcgagcctggccgcggagatgccgaggccgttcacgccggggaactggccgacgaaggcgggagtcacggcagccttgatgaggttggtggtgttgccggcggtggcgaggccgtggtaggcgaagtccccggcggtgacgctggcct

SEQ ID NO: 909 - DNA, 980 bp, Avena sativa
gctggcacggactgccgtgagcctgaggccggctagcaggcgcgcgctggtggtggaggcccgcggcgggggcaggagctggtcggaccggcaggcccagcagcagcggcgcatgccgcagctccccaagatcgaggacgacggcaaccccccgcttcgtcatcttcatccgcaccgccaatgtgtacttctggtacccgctgaacgtcgtcaccggcggcaccaccgccaagatcatgctcgcggccaaggacaacttcctcggcaagtacatctacaaggacacgctggccaggaacctcgccaccgtcatctacaaagatgaggacgacataatcgacacggcgagggagcagttccgggtgctcaagggcgaaaccgagtttcagtacggctacaaagtcgtggagaaggggaacctgaggtctgcactggcgacaagtaacgtgatcgagctcccaaagaaagaagagctcaaatctgtgcttgacaaggtgagagacttcgtcggcgaggtaacctccggcgccaaagaatcatttgcacagataacaggaactgccagcgcagaggcagaagcagaagcacaagaagaggttccgttccgttccaagagacgaagcaagaggaaggggaagcagcagaagcccaagcaagggatcaaaaccgatagctgattgtggcaccctgcactccaggcatcgtggaagtgaggatccagcgaactgccggctgtaattttcccaaagctgctctgtagtttcgagttttgcaacacacgatgtgtaacttccctgtgtgtaacaaagtttgttcattctcagagtataatgttaggcagtcttgcggaatcttagggaagagtcatttaatgtacttacagaacggcaaagaccacagctgtatattgatttcaatcactttgcaaagagttaacagaggttgtagaaaacgtgtgctcatatgtatcgcactatgac

SEQ ID NO: 910 - DNA, 650 bp, Avena sativa
gtaaagaactggtttacagtatgatgcacaaacccatattggttagtcaggcatccccatactcactcaattgatgactagttccagcatgactaaaacctagcatcagtagaatacttgacgcacaggatacatgtgtaacacagcacacgggggcacaagtatcactaccagtagtccagtacccatcgcaagcatattaacgcatctagtgctcagagcctggtgaaattcgcccgaaattcacatcgacaccaacgattcgagcaaccagattgtatggcgaaaacttctctaattcctacatcagctggcacttaactttccgggagggagaaaggaggggcgatgagcgaactactagtaagtacctggagaggatttgggcgtcgagatccttgcggatgttgaaggcggatccgtagatggcctccgtcccgaacttcttcttgtcgtcccagaacttggtctccgattggatggtggcctggagcgggtgcgccggcgcgagctcggccctgacgctgtcgttgacgccgaagcggagcacgtcgtggctctcgccgaactccttcttcgtcgtcatgccgccgttcgccatcgtcgctgctgagctctctctctctctctctctctctcttcggaatttc

SEQ ID NO: 911 - DNA, 857 bp, Avena sativa
ccgcacgctccaatggcagccacggcggtgaccctgcccacctcctccccctcccccttccctgtcggcaccacctccgcccggcgctccctccaactccgctccccacctctccggcgcgccatccgcgtcgccgcctccgcagcgaccgaggccccacccaagccggcagggccgtctcccatcatcctcgtcgaccccgccgaggcccagaaggtccaccgcctcaagaccgtctacgacactaaggttgtccccatcatcaccgaggagttcggctacaccaatgtccaccaggtgcccaagcttgagaagattgtggtgaattgcgggctgggggtggatgcagggaacaacaaggggctggaggctgccctgaaggacctcgcctcgatcaccggccagtaccccgtcaagaccaaggccaagaactccgtggccagcttcaagatccgtgagggcaacacaattggtatcgccgtcacgctccgcggcagggtaatgttcaacttcttggacaggctcatcaaccttgggctccctaggaccagtgacttcttgggtgtcaaccccaacagcttcgatggtagtggcaactacaccatcggtatgcgtgatcagggcgtcttcccggagatcccctatgaggtgggcggcaagaagaacggtatggatgtcaccatcgtcaccaccgccagtaccgacaacgaggccttcaggcttctgaccctcctcggaatgccattcgctgcacacatgaaggtgatgagttcaagaagaagaggttgaagaagcaccacttcatgagcaagggcaggggaagaaagtgaagatcaggcagtgttttcacacgatga

SEQ ID NO: 912 - DNA, 955 bp, Avena sativa
cagtcctcatcaaccatggcggcagcggctggacaagccccggcggagctgtcccagcggcagcaggacatgcagatgttgctcgccgccgatgcccacctgggcaccaagaactgcgacttccagatggagcgctacgtctacaagcgccgctccgatggcatctacataatcaatcttggcaagacatgggagaagctccagctcgcggccagggtcattgtcgccatcgagaacccccaggacatcatcgtccagtccgcccgcccctacggccagcgcgctgtcctcaagtttgcgcagtacaccggcgccaacgccatcgctggaaggcatacccctggtaccttcaccaaccagatgcagacctccttcagcgagccccgcctgctcatcctgaccgacccaaggaccgaccaccagccaatcaaggagtctgctctgggaaacatccctacaattgccttctgtgacactgactctcccatgcgatatgttgatatcggcatccctgcaaacaacaaggggaggaacagcattggctgcctgttctggctcttggccaggatggttctgcagatgaggggcactatcctgcctgggcgcaagtgggatgtcatggttgatctgttcttctacagagaccctgaggaagccaaggaccaggaggaggaagctgctggagccccagagtatgctgccatcactgattaccctgcagctggtcaatggggcggtgaccaatggacctctgatgtggctgcacccccgcctgttactggtgctgagtggcctgctgctgaagctccagttgctggtggtgatggatgggatcaagcacctgttgctgtggaaggtgttgctcctcctgtcgctgcttctggctgggacgccgcagcgcaaccagctgctcagggctgggagtaggttacgacgtcactttgagtcgtctttg

SEQ ID NO: 913 - DNA, 665 bp, Avena sativa
gttgagatcatcgacaggaaaaaggacatagtaaaacttcagcatggagaatatgtatctctcggcaaggtcgaatcagctctgcagacaagcaactatgtggataacatcatggtacatgctgatccatttcatagttactgtgttgcactggtagtgccgccacaccaggccttggagaagtgggctcaaaattcagggataaagtaccaaaacattgaggagctgtgccacaatgatcaagcaattaaagaggtccagcaatctctgttgaaggccgccaaagcagcaaggcttgagaagtttgaagtaccagctaagattatcttgctggctgaaccttggactccagagtctgggcttgtgacggccgctcttaagctgaagagggagcagctgaagaccaaatttaaggatgatctgaacaagctatatcactgacctacgacccgtggcgctcatttgtgattggtgtggatactcatttgtgatactacgttttacaaataatatgtacgtgtttggttgctaatctggagtctgtaaagctgtgaaggaacaactacatacagttttatggctcgtaggtggttatatcccgtccttcatactactcagccagcatgtaaattggatgtggtaaattagttgatgattgcccttgg

SEQ ID NO: 914 - DNA, 963 bp, Avena sativa
tgattcaaagaacttctcgtcacctataaatcagctccaccgtaggatttggctgatgcattggagtctctttatcttctttaaccatagaaaatggaaagaatgggatcattgacctgttcttccaggacaggtacttgaatgctattcagacaaatgcaccccatcttctgagataccttgctgctgcagttgttgtgaacaaaaggagaagaaacatgcttaaagaattgattaaagtcattcagcaggagcagcagacctacaaagatcccataaccgagttcctagaatgcttgtatgtgaactatgattttgatggtgcacaacagaagctcattgagtgtgagcaggttatattgaatgatcctttcctcggaaagcgcattgaagaaggaaacttcgtcactgttcctttaagggatgagttcctcgaaaattctcgcctgttcattttcgagacttactgccatatacatcggtgcattgatattggcatgcttgcagagaagatgaacatgacctacgatgaagcggaattatggataatgaacttggtcaagagttcgaaactagatgccaagattgattctgtgacgggaactctcatcatggcgaccaatcaagtaaatgtccatgagcagatcattgagagcatgaagaatcttaacgccaggacatacatgctagcaaagagcctcgtggatccagggcatgcagcagcacagcaggctggtcggtgatactaacagagaatcagcagttttgaggcggggagaattacttttggagctttgttgtttggcagtgacttcgttgctagtacttgaatcacacagatggtgatttgcagtttgctacagcttatcttggccgcctttaatgttttgtacttggaattctgttatagtactcccttcctccccaaataagtgacttgagtttgtctagattcgcatctac

SEQ ID NO: 915 - DNA, 735 bp, Avena sativa
cgagggcaacctcgtcaagctccgccgcaccgcgcgccgcgacgccaaggtgtccgccaaggcccgatctgccggggagaagcccgagtccctcgacccgctcggctccgacgacgacgacgactcggacagggaggaggtcgaggcccaggagcgggccctgaccaaggaggtcgtcgacgaggcggacgactctgactctgactccagcgagtcggaggaggacgaggaggaggtggcgctcgtgaccatcgccgccgcggccaataggaagcgcgtcaggaagctcgtcgacgagttcgaccgcatcgcgccgatccagcaggagggcgggaagaagaagcagcagaagcccgccgctgtcactccggcgaagaagaaggcggctgctgcggctcctgctccagctgtcgcggctcccgtcaagtcttcactgaagaagaaggcgccggctgggccaacagccaaggcatcaccaaagaggaaggctgcagaggcgccggcagcaaggaggacctcgccgaggtccaagtactgatcggctggtgcgcgttcccatgttcagttcctcttcttgctgtgtcagtctgtcccgtgtcagtctgtcagatcggtcgctccagcgattgcggagtgatcttggagatgaaagttgctatatgttcatcgaattgttggaatgaaatgtaatgtcatgcttctatacctgaatcaaatcaaagtctctggacaawa

SEQ ID NO: 916 - DNA, 953 bp, Avena sativa
ctgcgcgagctgcgggccatggcgccagcagctcagacgacgtcgacgacctgctcgacgcgatgctcaggctacaggaggaggactcgttggcaataccgctaacaacagagactatcggcgtcgtcatctttgacatatttttggctgcaacggataccacaggaagagttttggagtgggctatgtctgaactcttgaataaccccgaggttatggctaaggtgcaactagaggttaggggcgtcctaggtcaaggccaagctgtcatcacaaataccgacctgagtgaacttcactacctgcggatgtttatcaaggaggttcttcggatgcatcctcctgctcctctacttgtccctagagaggctagagaggattgtgaaatcatgggctatgacatacccagagggacaaatatctatgtcaatgtctttgcaatatctcgcgatcctcgatattgggataaccctgaagatttcaagcccgaaaggttcgagaacaacaacattgactattttgggacacactttgagttcaccccttttggggccgggcgacggcagtgcccagggatattgttcggcacgtcgaccgtggagattgcgttagcaaatcttctctaccactttaactgggtgcatcgtaatgaggcaggaggggagtcgctggacatgacggagaaatttggtatcaccgtacggagaaggtctggcctgcagcttattgctaccccatatgtagcgtccagcgctacatagacatatgcatgtggcgcatatacatgtatgtatccgtgtcaacatgtttcagcatcattgcacgtgcgttcttattaattgtatttaatttatgtactccgttcttaacaataaagagagtgtctattttgatctaataagaaaaagaataatttcatgtaaccatctttctgtgtagcatcatgtgtgttt

SEQ ID NO: 917 - DNA, 826 bp, Avena sativa
ttgaatataaattactaggcaaaataatactgagtaaactattatacaattataacttattactttccaaaacttccataacatcacaagagtaacccctctccaacagtatccagtgttccaaagtaaagacagtacaaacagctcaaaagcaatattcctgagtgctcaaagatacaaaaaaatcgaacacagcgataaacttccgattggaaacgaactaatgactgaccggcacatatagcacttccaagaaactcttaacaaaagttaaggctctcaggatcctcaataatctttgcaaaagtttgcaggaaggctgccaaatcagcaccataaacaatcctgtgatcagccgtgacattgaccagcattttgttcttgacactaaagaaaccatccttatcagccaccactgtgggttttgaggctccaacagccattatagctccctggccaggtggaagaattgcatcaaatctatctacaccgaacatacccaagttggacagtgtaaatgtcccagagttgtactcatttggctggagctgttttcgcgcgtgccttcttgactagttccttccacttttgtgagagtagatatatatccagcttatcagcttgctccagaacgggtgtaatgagcccaccgtcaatggcgacagccacagcaatgttgatggaactgttgtaagtgaagcttgatccgtccttacagctggcgtacaccacagggtactgtgcaagcgccatagccgcagccttcgcaagcaatacagtcatcgtcactccctttggcttgaccttctcatacagctcgtcgagc

SEQ ID NO: 918 - DNA, 732 bp, Avena sativa
gtcaagtctaccccagtacccaccaagcaaagagatggatgcaaaacgaagagatgaagaagctagacgtttaagagctgctggtaatagacctactggcgatggagctaggaagacaaggacacgagatcggcctcgagctgttccagcacctgaggcaaatgctgaacttcaagtaaatattgacaaaagaaggctaataacgcatgcaaatgcgaagagcaagagcgaaaagttccctccaccacatcaggatggagcaattggatatccattgggttgttcaaatcacatggaacctacatttgagcccccagacccatcttcgttcagcaccgtatttccttatgagaagggctctgtgcctacatggtctggaccattggctgacccttctgcaggtaagcagaagcggaaacacaaggctggacgttcttcgaaacaaccatcgactgcccgtgctcgataaatacgttctttgacgattggtgcataagagttcttcgatactgaaaatttactggggagaagttgctggaagctggagatgtgatttacagtcaaggcaagcagcgattagtttatcaaagatccatgaactcattccatgtacggattctttttcgaacagcagtgtatagatgggagagggagagctcagttagttcaaaccatgtacattaggttgtcttcttacgttcttataagcagtcatatgtcatgttagattca

SEQ ID NO: 919 - DNA, 1049 bp, Avena sativa
ccgggattcccaatccccatcgatcggataacccaccatggcgtgcaggccggccgtgtccgccccctccgccctcgcgccggcgccgcaccaccgcctaaaaatctccgccggcagcagcaccaagggaggcgctacgtgcccgctccgctccatctccgcgggctcgctcaggctcggcgcgcgccgcgcccccgccgccgccttcgtcgtccgcgcgggggttgcagagggtgacgtggagctccaggccaaggtaaccagcaaatgcttcttcgaggttgagatcggcggggagcgcgtgggccaggtggtcatcgggctcttcggtgaggtcgtccccaagaccgtcgacaacttccgcgccttgtgcactggagacaaagggtttggatacaagggttgctccttccaccgaatcatcaaggatttcatgattcagggtggggatttccaggaaaacaatggtactggtgggaggagtatttatggtgaatgctttgatgatgaaaattttacattaaagcatgttggccctggtgtactaagcatggccaatgctggccctgacacaaacggaagccagtttttcatttgcactatgaagacaccatggttggacaaccgtcacgttgtgtttggacatgtcttggagggcatggatgttgtgagggagcttgaggcgcaagaaactagcagatccgatactcccaagcagccctgtcgaattgtgaattgtggtgagcttcccttggacggctgaacagcttaatgtctcagggctcagggttaattatggggttttacccagcacatcctctgtcctccttttgcatcctctttttgcgcggctataatctcttgagaaagggtcagttgaatctccagccagctagtcaactagtacaagtatactaggaatcttatgagtctcgtttctcgagtgtaatgttattcaaggaaactggaataatgatgatgtgtttaaccacgatttactctttatctggtaatggaaatgggaagtctttcttatgtcagacttggag

SEQ ID NO: 920 - DNA, 941 bp, Avena sativa
tccctgtagggtttgctgccacctagtagtgcacacacaagagtatgcaaggaaaaatccataactgaaggtacataacatacatgactttagaacctaattttttaccaatgtggcatattgtattagtgccaaacttgctatccacaccataatattacttgtataaatgcataagtatgactgtaaatagtgtgttaccttgtggatggagcaacccgaccccgagtccactgccaacaaaaccaagcccactgaaaaccagccaaacctgaccccgtgtccctataaccaacaaggcaagcaccgcctttttcgactcgaaacaaaataatttctctcatcataattcactcaactcatttgtgacatgctttgagcagccctgcgtgtggactatataaccatagtatacaacacaaaccaagaaccaacccatgaagaatcaagcgcatcatataaaatcacacaatgtgctacacgctggacacctgactgactttgcccaatcacatgccccacaagtaacatttcctcctttctgcggtttgcctctggtggtataatgagaacagtaacacagatctcttggcttcatcagaccccgtattttgctaatctctgcaccactgctggttcgagggtggacatacactgctgccaaccagcacctccaagcatctgcttgtagcctttcaaaatctgggacacttcgttgtgtagaccttcactttttatctcattccaactcgcacaggcctggcatacgtaagatagtgagctcacagcccctgtagggtttgctgccaccattgcgcatagaccatggaacgcatcttctttctcaaaatcatctcttatcatgcacagggcattgcaccaggcttgcatgaaatgttccatatgaggggccacaatgtctggacagacccaggaaagcc

SEQ ID NO: 921 - DNA, 813 bp, Avena sativa
gtcgcaactagttgcccttttggagacaggcaacattgacctttgcttcgccaatgaggatgaagcaagggagatcatagggtgattctctctataattatgtatcattatatttaagtaggaaaaacaaacaaagggttaaatttcaactggaaagtaattctttttcttcattccttgctttctttcgtgagcaaactatccacggtcttcctttcattcccatattgttaagccttcatatccgaggtggaaattttaactgctgtgcatgtatctgcaggggagggctaacgtttgatccagaggaggcgcttgcattcttgtccaagtactgcaagtgggctgtggtgaccctcgcatcaaaaggatgccttgctaagcatggcaagcaggtagttcaagtgccggcaattggggagagcaacgcggtggacgccacgggtgcaggcgacctgttcgccagcgggttcctgtacgggctggtgaaagggctccccctggaggagtgctgcaaggttggggcttgcagtggcgggtcggtgatcagggcactcggcggtgaggtgaggccggagaactggcagtggatgtacaagcagatgcacgccggtgggctggtgccgcctgagctcaagaactgatggtccagctgagacttctgccttggttacttactcctaagaagcttctgttaagccattgattgattgtatcattgcaagtgcttgctcattgacctcccatgcatcggaataagtaggcacattaatttctcaaggactgaactggccatggttaattggatgggtt

SEQ ID NO: 922 - DNA, 648 bp, Avena sativa
gtacagcccaagtgatgtgttcatcaagagagttgtggccaagggtggggacgtcgttgaagtgactgatggtaaattattggttaacggaatagtccaggatgaggaatttgtgctcgagccacccaactatgaaatggatgcagtgagtgtacctgaaggctatgtgtttgtgctgggggacaacagaaacaacagctatgattcccataactggggaccgctcccggtgaagaacattcttgggagatctgtgcttaggtactggccgccatcgaaaatttcagacactatctatgaccatgatgtggttcatggcacagcaggcatctcctgaggtttagtttgtgcggcagatgccaaaccaacccattttttggcagagggtcaccgatgatctcagccacagttttcttctagctgtttatttgattgatgtcgccttgcacataatgcttggctgactctcagtttttccctgccctaccagcagatgctcgtttagaggcaacaattcttgtactgtaaccaaagatttgacccacctgtgtcataaaaagaaggatgaatgagcatccatggcatcgcatggaaaaaaarwtatgttctcgaaacagagagctggtcaatccatttcagaccttaata

SEQ ID NO: 923 - DNA, 690 bp, Avena sativa
atttgtatactgtgaatggcagtacagtatactagcagtattcagttagcactacagtttcatggaccagctaccaacaaggaaacagaaaattctcctgggttggtagcattaaataattgaaaaccagagaaatccaggtgctactgatgcaaatacctctaaagcaagccagtgagatcaaacagtgtagcctctgcaacagtcatacgacttcacataaactgtgtccaatgctactgggatactcacatcgaacatcacctccgtctaaagttttggacaagcagaagttcatactacattggttacataaaaaggtaagattattttcacagccgtcgtatgcttatcgtgcatccaacacagtatgaccactgttacgggacgtaaccaattttaccaacagcagaaaaaatcacgaccaacaaaaaatggtttaaaggatttacagtagagacagtgtcagcattgttgtttccaggcatgatggggcggccatcctggatcacgacgctcgatcagttttgatgtggccggtttggaccaccctgggcagcagggtcctgcctgtgccttgtcctcttcatctttgctttgaacctcagttttaggaccaaagtctccaccgtgttgacaaagttaccaaccgccatcaccaccaacaagatcccacagactgcaacctgc

SEQ ID NO: 924 - DNA, 792 bp, Avena sativa
tacaacgttgtctctcaaatatacaccaaagaaggatgatgatgttagcatcaaaatggcaaagagggtgaaagaattgacaaaatcggtgagaaacaacataagaataaaacacagctctatatgcagctggagcaaacaaaaatgaaacagctacagaccgccttcacctagggtcctgcctcaatcttctcaatggtttctatcctcgtttttcttttccatcctttcatggcagcaaccaggttcaccaacccgacaacctgagtcttgctgtactctggatgagaccgtgcccagtgaacatactctgtctccggcagataataagccttcacgaaagtatccacagtttgcagcttcggcctaacatttgacgatacaatgtgttgtagcccattaattagtacctgaaggtcaagtgacatcaatgctcgcccttcatcggtgcaccttttcactctagagagtccttcaactaaaacttctgcaaggctctctatgccatactccagcaagagctgttggagctccttagagattcccccatggtccaatcttgttttgtaatgtttgaactcacccaataataaatcaacgtatccattgtgctctatgccaagctccttgacctcccatttagcatttgctatcttatctggatacccgttaatatgcaaaagcatccgtgcacttgtcctatggatgtgctcagccaaatctggaacagtatccaccagtgtcccaaaaaactcttcaacaacggaggtgctattttgagataacacggaa

SEQ ID NO: 925 - DNA, 664 bp, Avena sativa
cttggaattttacgtcctgtgagcaagttgacacaccagcttcctctggtaagtgcatattcttcatttgcaagaatggtaggtgtcggctatgatttggagcaccagaggaggaggatggacccaggaacaaatgagccacttttcacaaattgcacaagggatttcactggaaccgtcgattacatattttacacagcggattcgttatcagtggagtctttattggaacttttggatgaagagagcttaagaaaagacactgctcttccttcacctgaatggtcgtcagaccacatagcgctcttagcagaattccggtgcaagcctagaatcagaaggtgatgccttaggtcgcatttcagatggttagtatcagcatcaatgctggaggtttaacttccatggtggaaggtggaagttgaggaggggcagacgcttcggatctccgggaagcagccagtaagtcttaggaagcggcctcaggaaaagggaggctcgtgtagtgttgattattaccctctttacatttcaactccatgatatttaagccgccctttgtaatattttactttatatatagaagcgaaatccttgagagagaaatatcggtaatagattctgacgacatggctagattattttaagaccttttttaaaaaaa

SEQ ID NO: 926 - DNA, 762 bp, Avena sativa
ccaagcaattcgttaagtgacaggacaatccataaatctcccagtcaaagtgcatcatcgtgcaaaacatctggggtacagtggagagctgtgaacgacacgacaggtaaggacacggatatttcagttccccagtctatatacacatctcacgtttcatgccagttcgaccaacacactacttttgacattccaaggacaagttccgcagccgcaaagctcaaaatcatgaagctggagatccatcccgtgcgcagaacgaacagagaagctcggggtctctggctcattgcttcagcaggcaatccttgaagcccgtctccagctcttcacgcttgaggttcctgccaatgaacacgatcttgttgattcgtggctcgtctgcctcccaagttctgtcaggtgatccctggaaaatgtcgtgcactccctgaaagacaaagcgctgaggcattccactgacagagagtatccccttcatccggtatatgtcatcactgcgttccagcagtaggttacccaaccacatgtcagccttttcaagatccatctccccttcgcaaacgatgcttacggaagaaacaccgggatcatgggtgtgatcatgcccatgatggtcatgtttgtgttcatgatcatgatgatggtgatcgtggccgtggtcatggtgatgttcatgttcatgtccatggtcatggccatgttcatgttcatgctcgtgctcatcatgaggctcttcagtgacagcactctcaatcctct

SEQ ID NO: 927 - DNA, 544 bp, Avena sativa
accgatacatgcaggggagctcccggaaggactacagaaaatttcaaatatcatagctgtttcaagctgcaaggggggagtcggaaagtccacagtcgctgtaaatcttgcttataccttagctggtgtgggagccagggttggaattttcgatgctgatgtatttggtccaagcttgccaactatggtttctccccagaaccggctgctagtggtgaacccagaaaacaaaagtattcttccgactgagtatttgggcgtcaaattggtgtcttttggctttgctggacaaggaagagcgatcatgcgaggtccaatggtttcaggagtcattaatcagttgctgaccacgactgactggggtgaacttgactaccttgtcattgacatgcctcctggaacaggggatatacacttaacactctgtcaggtagctccattgactgcggctgtgatcgttaccacccctcagaagctggcttttatgatgttgcaaagggtgttaggatgtttctaagctgaaggttccatgtgttgcggttgt

SEQ ID NO: 928 - DNA, 803 bp, Avena sativa
ggagttaatcgggaacggatcaccgagaaacagggagaatgctgcagcggtgatgttgcatctgtgcatcggcgagcaacagcttgtgcatttaactcgtgcccacgagtgtgagatcatggtaccgttgcgagagctggcactgaacggcacagaaagggggaagaggaaggcagtccagctactcgagcggatgagcagattcctggttcagcaacaagaggaacaggaatcccattctcggctgcaggccgcctcggcacaggctatacccctgatccctgatcaggtccaagaaaacgaaattccggatcagttggacagtccagcatctcaataccctgcgttgttatgaatacagtttcgacatttcagtacccgcaattcaccaccgcgatacgagcggtagtgggagtcattttgtgcattcggcgacagatttgcgccaacttggagatatgtatgacatgcctctggtgtcaggtgaggtccttgaaaatcagaccaagcccgcctgctccatggctgtagctgaaactcccatcaggttgtggtgagcatctgaagcagcccagtcttggcaatgttcagtttttcagtatgcagtttcagatagtgtcatgaagtctcggaatgcaaggtttcccctcgtgtatatatcttcagtgtaataataataacttatgtaaaagagaatatttgttggcggatttaacaagtacagtaaatcttagcatgtcttgctaccgtttgttcgcactcgttcttttatattctaaaaatgcaccggattggtgtcacgt

SEQ ID NO: 929 - DNA, 730 bp, Avena sativa
agcttcttgaagaggagtacaagaagaagtttgatgaagcaaagagaaaagagctttctttagaaaatgatctggcaggcatgtgggttcttgttgcgaagttaaagagaggggctttcagcatatctgatttgaatgttgatgaacggtctatcaatctagctgacataactaatgatacaaaagaaaacaaaggtgacacgaatgtagctctagttgaaaaacaagcttcagatgatacagtgaagtcattggctggagaagaatatagaagtccagaatttgaacctcttcttgttcgtctcaaggctaaaattcaagagatgaaggagaaggaaactgatcccttgggtgacaaagatggcaattcccatgtctgcaaatgtgcaagccttgcgcccttgcatgttcggaatgccctctgtgccgcacacgaattgtagaccggataattacctttacataggttacttgttagccaaggaaacttttgacgtacccaatctccctgtaaaatcaccatccgtatatgtttctttttctctgtagcaaagaaggtgacttcgatgttccttcgatgttgtattgccattcttttggttccccctatagcttcactttttgtttccttgttgcatcgagaggttcgaccacttcttgacaattgtgtatagatatgtgactcaacattgttctcagaagtaaagcaaattgacgtggacaaaaaaaa

SEQ ID NO: 930 - DNA, 983 bp, Avena sativa
acgaatagtatctgaagattatcccatgatgatcataatttggggaggagattatacatcaaccaaacctgttgttgcctagcaataaaaataaatatctgggtggccttggtgaaggtagctatatgcaaggtgagcagccaccagtaatgggatggactgttggaccccagatgcttcatcctaattatggaatatcaatggaagggatccaatttgaaccagaggtcacagaccatcgcttaatcaggaagccaatttcaatgagaaacatcccaagaaatccattggttgatgctgttgctgctcatgacagaagcacgatgcgtaaggtttcagaacttgctcccacaactgataagccgaaccccgatgagagaaacttatggctagagcagataaagaacaagacctttgacctgaaaccagtgggttctgctaaaccgacatccatgagaaccccctgctagagccccctactgggaacttgagagtcgctgcaataatagagaaagcaaacgccatacgccaggcggtgggaagtgatgacgacgacgaagacgacgataattggagcgacacatagcgcacacatcacttttcgccatattggtgttttttcatcgccaagtggcagatgtgccaaaccagcaagaatatcttggacagggtgcacaaccatgtcatgttttggtcctaacattgttagccttgccttttgtatatatagtacatgcccatatatgtagtacgtccttttgccattctttcttctccgcattcttttttggcctgattgtacgtagagatctgattgtatgtatgcttgcctaccccagcagcaaagggtgctgatggtagtcatgttcttaggaaagcacattctcaggtctattgtaaattgtgttaacctttgcttgtagtattacagaagattttgtttgtcttgaaatgcaaaatgggttagcatactgtgattaacc

SEQ ID NO: 931 - DNA, 754 bp, Avena sativa
accttctcctatggccggtggaggaggtcgagacactccgctacaacgccaccgagctcaccgacatcaccatcgacgccggctccatcctccacatcccgctgcgccaaacgacccagctcgacatcgaggccaccttccgcctcgacgcgtccgccgtcgccgcggtgaacgaggccgaggtcggctacaactgcagcagcggcggcggcgctgccacccgtggcgcgctcggccccttcggcctcctggtccacgcctcgggcgaccgccgcggcgagcagacagcggtgtacttctacgtgtccaggagcctcgacggcggcctccgcaccagcttctgcaacgacgagtcgcggtcgtctcacgcgagggacgtgacgaagcgggtggtgggaagcacggtgccggtgctcgacggcgaggccatgtcggtgagggtgctcgtggaccactccatcatccagagcttcgcgatgggcgggaggatcacggcgacgtcccgggtgtacccgacgcaggccatctatggagctgcgggggtgtacctgttcaataacgcgacgggggccggcgtgacggtggagagggttgtggtgcacgagatggagacgtcggcgtatgacaaggtcctcatggccgacgacgacttgtagctcgcacgagctgatctgttataccggcggtaaggcgatgcaggttcacttttgcctgctttcgtagcgttgttgaacttgttctacttttagttggc

SEQ ID NO: 932 - DNA, 559 bp, Avena sativa
ttttttacctataaaacagatcttgctggtctcagaatatgtataaatatcatcaagtaataaactctcattggaatttctgtatacaactatttatgaaccgaaggggggaaaagtaatatcggctgttcttcatcaatctaatgctccctttgggcatccatggctgttgttgatgaacaacattattatttttctgtgaacagcctatatatgtactaaagaaccatctcatatgaatcaaataaagcaaataaaaggtaaaacaattgaaggaaagaactttggtcagctaggtgctatgagccggtgatgatcatcaccggcaaattaggccaccatctgctcctgctccagccactgcggaaaatggtcgccgccggcgtggccatccttgacaagagagttaacccatgacacgtccggttcggcctgggtggccggagaggtcgccggcatggcggattgcccgcggaatccaaaagacgcggacttgcggaacttgtgcagctcgtcgccctggactcccagtcgagcttgccgctcggcgagccagtcg

SEQ ID NO: 933 - DNA, 859 bp, Avena sativa
aggttttcgaacagccattcctccatccatgaagcctgaatctgctctcccaacttctcaatcatcaaacagtctgttaggcgggattgatctgattaatcaagcttcaaccagtcagcctttcatgactaggcacggaggaaatcttcctggtctcatgaaccgtaactcaaatgtaataccatcacaaggaatgagtagctttcaaactgggaataatatgtatctggttaacccgaattccatgggaatgggctctaaaccaccaggtgttctgaagactgagagcactgactctcttatccaaagctatggttatggtagcaaccatatggattctggcttgctgtcttctcagtcaaagaattcacagttcggttttctgcacagtccaaatgatgtcactggtggctggtcttctttgcaaaatatggataattataggaatactgttgggccaagtcacccagtgtccagttcgtctagcttccagagttccaatgcagcccttggaaaattgcctgatcaagggcgaggaaaaaaccttgggtttgttgggaaaggtacttgcatcccgaaccgctttgcagtggatgagattgaatctccaacgaacagcttgactcacagcattggaagcagtggagacatccctgacatgttcggatttagtgggcagatgtgaaagcttcttgaatttgtaagtagggtgatcactggaaacaatttagtggtttgatgaatggttgctcgttatttttcgtttctatttttcttctctgtaattggtttataaagggaataatttatgtgacagcctgtcgaatcttggtttatagaaagttttcggtttaaaaga

SEQ ID NO: 934 - DNA, 795 bp, Avena sativa
cgacaaggacaagggcgggaaggacgcgcgcgtggtgcaggtgcacagcgcggaggagctggacagcgcgctgcaggcggcgaagaaccgtctggtggtggtggagttcgcggcgagtcacagcgtgaacagcagccgcatctacccgtgcatggtggagcttagccgcacgtgcggcgacgtggacttcctcctggtgatgggcgacgagtcggaggcgacccgggagctgtgccggcgggagggcatcacccaggtgccgcacttctccttctacaagggcaccgagaaggtgcacgaggaggaagggatcgggcccgaccagctggccggcgacgtgctgtactacggcgacaaccacgccgccgtggtgcagctgcacaaccgggcggacgtggaggcgctgatggcggagaacagcggcgaggacgggaagctgctggtgcttgacgtcgggctcaagcactgcgggccgtgcgtgaaggtgtaccccaccgtggtgaagctgtcgcggaccatggcggacaccgccgtgttcgcgcgcatgaacggcgacgagaacgacgcctgcatggagttcctgagggacatggaggtggtggaggtgcccacctttctcttcatcagggacaacaagatcgtcggccggtacgtcggctccggcaagggggagctcatcggagagatcctcagataccagggcgtcagggtcacatactgatcctcagtataggtggagcccccacagttgaatggaaacaagtgatgcttctttacgatcgatacttgtgactt

SEQ ID NO: 935 - DNA, 625 bp, Avena sativa
atcatgggaatctcacttggagagcagtagcagtggtgctcagccagatgattcccaagaggcttacactagtgcacagcaaaggatcagcacatacctttcggagatgaaggaaaccacacaaagagaagggcgaccacaaatggagcatgggaagcaagttgttgtgaacgaacaaaaggtcgataaattcctctatacaatgttgaagttgaactccacgatactcaggtactccagaatggcagctgtggtgctagtgagcctccccccgccaccgctgaatcaccctgcatatttctacatggagtacatggatcttcttgtagagaacgtcccacgcatgttgatagttaggggatacagaagagatgttgtcacatttttcacatgattagatgtatacttttggaagtctgagctccattcggttgttgtaccaccaccattatagcagaatgaatacgcagaattgtgcagattcagtggctgaagtttgaagccctcaccttgaaggctaccttgagatgagatgcgctgggctgctattgccatatttaggtccgtgagttgtagtatcttcattttttttttcttggtacacaacagatgaatagtcgatcat

SEQ ID NO: 936 - DNA, 758 bp, Avena sativa
tttttcggttactagagggaatacaatataatatatcaccaattcatcatacagtacatggtttagaacgaagaaattatcagttccatttacagaatttccaattctctgaatatatgtggtaagaatgcagtatggaatgctttataacagatgcattccctatttccgtatacaaagatagcacatgtacagacaacaaaaaacaattacacattgaattgcatcatataaatcacaaagcttaccaagcgacctatgtacagcatccaatcatatatctgagtcaggttttacgggttggaacgtgactttctgcttgtatcagtgtttggaaaaattactctccttcagcaaaaaagttgggttctgcaggcttctgtaacagccttgcaggcactctttcctgcaaacgggcctttcgagtggcgttacgccgtaggatccgcatcatgttcccagcaaaacgtgaggcatacagtgccgcgccgagactgagcttggtagagtcatcgcttacaatcgctgcttgcaacctcttctccttctcaaccaaagcatcttccagcttctttctgcaatatctgtgccaagctgcctgtatgaaacaagctgcccaggttctccattgttgtgagtagaatctaaaggtatgctggagttgtttgctatggagtttcctgaactgagtggccacaaacttcaaatcatcagccctcagaacaaaggcttcgacttcagacaatgtcttcactgtc

SEQ ID NO: 937 - DNA, 875 bp, Avena sativa
gaaaaggctgaattgttgaccgcccaagatctcatgggaacttccaaggttgagcagctttgtctgcaagttctttcaatgcgtatctgtccaggtggtggagttgttgatgtaccagtcattgacagttctgtaactgctgaagaaaccaatcagtcaaatacgaaaagtagtcctgctgctgcatcctctatgctggatacagatctgctggaaattgttggggtgatacggtcaagccaagatggtatcaacaagctggtcgagttactgcatcagaaatttccaactgttgcaaagactcaactaaaccggaaagtgagggagatatctgactttgttgataaccgctggcaggttaagaaagaagttcttgacaagcttggcttgacaaactcacctgtgaatcctccccagaagatgaaatcaacagccagtctttcccagaagacgaaaggagcagccaagactaaaggaatcggcatgtacttctcaaagcggtgtttacctccagaggaggccatcaacgccctggcatcttcacctgagctgcgcttgaaatcaaaaactgttcaaagcagcaatggtgtcagcggtgctcctcaagttgatctgtttccctccccgaagtgatggcctgaacaagctcatcctgaaagcttcttccttgactttggtctgtccatgagctggatcaaaacaagcacaagcatctctcgcaataatggtggagtaaaaattgcactcatgtgcaatatggcattgcatcttttgtcaagtggtggtgtcctgtggaatgatttttggaactctgcttaaggtttcttggttttagacagtgaaatattgatgtgttcagaaaattacaaaaaaaa

SEQ ID NO: 938 - DNA, 527 bp, Avena sativa
gagaagaccatcaagcatctcgacgaccatctggtccaaatcggctccaagggtgtcactaaacccaaggaggtaaagaagttcaaaggagagggcatgccattgttccaaagcaacaagaaaggtgatctgtacgtgacgttcgaggtgttgttcccgaaaaccctgacggacgatcagaaggccaagctgaaggatgttcttgcgtaaaactggtggcttttcactctttggctgcagctacttgtttgaggtggttcctcaaggaaattttccaagtagcttgcataggaagaagcaccaatgatgttgcctatctggtgcgtgtatgtgatttttcattggtaatattagcagcttattttttttctctagatcctttctcgatttgatgctcttaacagctttgtagtattaggaagtataaaaatgaactgtacttcaatacttgtactgctggaatacaatgtccatagaattgtagcttatattcgcaaagtttttactgaattaaaaaaagaaaaaaa

SEQ ID NO: 939 - DNA, 711 bp, Avena sativa
gagcagtgagcagaggttgggcactgaggtccttatctgaatctaccgtagcatgtgttactagtgactatgccatgacaaaatgttatcctgcagattggtctccgtctcttggcaccaggtggcatgcagatacgtcagttgcatagatgggttctgaggtgtcatgcttgttacaaggtgacccaagagattggaaaaatattttgtccaaaatgtggcaatggtggcaccttgcggaaggtttcagtaacagtcggtgaaaatgggatcactatggcttcacgacgaccacgtgttacactccgtggaacaaaattttccctcccaatgccccaaggtggaagagctgctgtaattaataatcccattttacgtgaagatcaacttccctcgaaggttctgcatcctaaatcgaagaagtcaagcaagctgggggatgatttcctgggcgccgaggacatatttacgcacagtggcgagaagaaagtggagctgaaacccccagtaaggaaggcactcgcaatgttcagtgggaaacggaatcctaacgacaaccacttctctcgcaagaagaattaagtttattcacatctgcctttatgttcttttgtcacgtgtggcgttgtagtctaagagtatgtagcgagaaaacaagtgttacccagacctcttctgtggttgtgggatgtctaaagactctgagcatgt

SEQ ID NO: 940 - DNA, 851 bp, Avena sativa
gtggcggcctagggacccgggggatcgggggaaattatccacagggaacgactagcgctgtcccaaagaaataacagccccgataccaccaccacacacatgccgcgctgtttataatttttgatcatagatcatgcatgttgttcaactcatgcgcattcgtggacatttttttattggacatacatgaccagtggtagtgacgtgtaggcacttctactacttcataaactcgagagcccaaaagctcccaaagatgtatgttgactggaagccaccggtgaatcctgcatccctagccagcttcaggaattccttctcagttctctccttccctccacggaagttattgaacatgaaaacgtccataacgaacatattttgtgatgccgtagtcacctctggagtttccggcaagacgaactccacaacaatcactcttcccttctccgggagagctccgtggcaattctggagtaccttgatgcagtcatcgtcaccttgaagatggagcaccatcttaaagaaatatgcatctccaatgggtatgtcttcgtacatatttccagctatatgttgtactccaggaactggtggcgcctcggagatgacgtgaggcaggtcgaagttgatgccgctgatatgctggtgtcgggaggtgatcatctgcaaggtggaaccggtcctgccaccaatgtcgacgagcaccgagatgccgtcgaatccatggtagcggtccagcagcttgcttgtcaccatggatgacatctgcaccatggcttggtcgaacaggccacggagccgagggctctgagacatgtagtcaaacatgggtaccccgtgcgccctct

SEQ ID NO: 941 - DNA, 840 bp, Avena sativa
atcgagagaaaaggtccctgcaaatttgaagggttgcaaacgctcaggaatattaggcagactacaaaacctagcagatttcaagacgagtacaaaaattgatgccttgagagaggagataagaaatatgactgagcgtgatggttcagccaaagggattgtgtttagccagttcacctcgttcttggatttgattgaattctccctgcagaggtctggcatcaagtgcgtgcaacttaatgggaaaatgaacttggctgaaaagggcagagctatagacaccttcataaatgacccagattgcaggattttcctgatgagcctgaaagctggaggagtagctctaaatctcactgtagcatctcatgttttcctgatggacccttggtggaacccggcagtcgagagccaagcgcaggatcggatccaccgaatcgggcaattcaagcctattagaagcacgaggtttgtgatcaaggatacggttgaagagcgcatcctgcaactgcaagagaagaaacaacttgtgttcgatggcactgtgggtgactcgccggatgccatgacaaagcttacagaggctgacctgaagttcctgttccagaactaaccttatcgtctctggtttcaacacaaattggccatgcttatgtgataatatgcccatattaggtatttaacagcgccgcgtcggaaatacatcctttcaggagccttggcagcgtccaaggcgcttgcattgcctattcgcattccgtttttgatttagccagccctcggaatgcatttgctttgaatggcgtactgatacattgatactctgtagcactcaacgctcca

SEQ ID NO: 942 - DNA, 495 bp, Avena sativa
cgggagttcatccgctactaccgccagaagccacgtccttctgttgcagcagatcgtgctctcgctctttccctggcttccagctacaagagcatgggtctggtgacggttcagtccaaggagcagatggtgaggctgaaggtgctccgggcaatgaacaagagcggggtggagacgatgcgaaccaagatcggtatgaagagcaacgtgatccgcaacctccccaagaacgtcccgtattagtccatggaagcaaaagcctgtccatgggcgtgttttgccgatctacctgccgtgccagggccttacagtatttataacaatgaatggagtctttatgttgagttattattatgtggctgctgaaatcggcactgttcttcaacagtgttcgggtcagtccagttgaacctatctatggtgcgtcttacgggaggactagattgtatccagcatacggagttttcagaaaccatggtaccgtatgcgttgtta

SEQ ID NO: 943 - DNA, 760 bp, Avena sativa
tcatatcttgtctggtttgggcgctggattctttgctgtttgtgttggttctccggtcgatgtggttaagtcaagaatgatgggtgactcagcctacaagagcactatcgattgctttgtgcagaccttaaagaatgatggacctctggcattttacaaaggcttccttccaaactttgctagactgggatcatggaatgtgatcatgttcttaacactggagcaggtccaaaaggcctttgtgaggaagcctgggaattgaagatgatatgagatgatttttgcagtgggtgtgggatacaacaacaacgatgcgcacatttaattttttgctacagaagaagttaacccttgagaatcggggagaaatttgacacctcaaacagtcggatactgtaataagttttggtgggtcttgacagggccctggaactaattctgaagtagtgcggggggatctcaaatgtggttgttaatctgtgttggacggaggaacattagctgtggtagatctggtttgtgatgatgagccaggaaggcacagtacatttgctagatcgcttgcttaattgtcgttgatgtcctctgctgtcttcatcttttttgcaatgttacaactgaaatgcttgatggggcatgatcgaactgctaggtacatgaatgactagcgagcagtagagctttacgtttgaattaaaagtttgtgcgagctagttctttgtcgttttaggggtaggcttcttttggttggtcgatgctg

SEQ ID NO: 944 - DNA, 1017 bp, Avena sativa
ctgctatggcttggaagtgaaggcacaggatctccgtagatcgaaaggtttctggaatagttgttaccagttcaatgcctactttgttccttatctatcggctgttcaattgtttggtcaacctaagagaaccattggtaaggatgcagccgatacaggtgcaagatctaaaacatctccatgtctgagctctctcccaatattagcgaagcttctacctaaggagtcgtctaatcaaagaaatagcccgttggctctgcataataaagatgatcagcagtcggaaactatagagcccatatttgaattttttgaatctgaacaaccattttggcgacgacagttgtttgacaaggtaaaggagttgattgatggcgcaaagcaatcaaattgccaaatatcgggagacccaaagagtctggagctcagcctgcatgatcttcatcctacctcttggtactgtgttgcatggtatcccatatatcgcatacctgatgggaaattccaggccgctttcctgacgtaccattctcttggacactgggtccatcgaataagctcatcggaccaggctggtcatagccatgctgttttgccggtcatgggtctgcaatcttacaatgacaaggggagtggtggttccagacaagcagatccggcggccccaaagacgccgagtcggcagaatcctccttggccgatgcaacgtctcaggttctgagagaaagggtgtcgacgctgaagcaagctgcagcggccatggccagggccgacgtgtcgagcaagggccagatgcgcagaaaccgccacccagactacgagttcttcctctccccggtaccgatagactagagccacacgcgtaggtgttctctaaaaaccggaccgcgtcgacaacgttctcagcaactccctggaattcgaggcttccatgcagttgtaggctctgttaccctgtgtgtatatgtgttacatgtgtaaggaaggtactgctgaactgacatcagaccagagcta

SEQ ID NO: 945 - DNA, 591 bp, Avena sativa
aacttgctgcctgcaaagatttgggggccgatgtgtgtataaactacaaaactgaagactttgtagcacgcataaaagaagaaactgatggaaagggtgttgatgtcattctggacaatatcggcggatcctatctccagcgcaatctgaacagcttagctgttgatggtagactgttcattatcgggttcatgggaggcgttgtaactgaagtgaacctggcggttatgcttgcccgaagattgaccgtacaagctgctgggctgcggaacagaagcattgctaataaagctcagattgtcagcgaggtggagaaaaatgtatggcctgccgttgtgtcgggcaaggtgaagccagtggtttacaagacattccctctgtctgaggcagctgaatctcacaagctgatggagacgagctcccacattggcaagatactactgatcccatgattgggcatgtaccgcggccaccgtgagcagttcatctgtttgtgaactatgcatcggtattttctgttttactgtggtgtaagctggatcttgaagtgctgatggttacaataaatgttggaacttggaagtataaaaa

SEQ ID NO: 946 - DNA, 637 bp, Avena sativa
cagtctcgattgggccaccaagttcacgctttctaccttcaaaggacaagaccacttgggccgcaaaagatgttgccgattgcgttttgtctgacaaatcttcattgaaggtaaccgcaagccagcgaatggcggagagttctgtccttgatgcacacaccacagatgttgatggacagccatactggttttatgaatatatagttcggaaatcaccaacaaaaactgcaccagaacctaatctgtttcggcacaacgtagcgtgcactgctgagcgagacggttatctgtacacattgaatgcttccactctcagcaagcagtgggaatctatgggacctttgctacaaaaggctgtggcatcctttcaccttctccccccaacagaaaaatatgttcctccttaccaggacccttggagattttggtgactcgacggttccgacagattcgagttttagaccatatttgttgtaatagatgtctcagtggcactttcagctctataaacaaagtctggagacttagtttgcttttgccaatcaactcggaactggctgttgtgaataaatgaaatgtaaaatgtgtcaactatcaagtgtacccaacagcaataaacaatgcaattaccaactat

SEQ ID NO: 947 - DNA, 733 bp, Avena sativa
ttgaaaattgtctacagtttaactgatgctcgctgtcaggcattttctctgaaggatcaaccaaaatctggtgatgtaatctccaaacagaatatcccacttaacattaacaccaacaccagtttgccgagctccctccaggatgtagcacgtgtataccaggatttcaagacattgctgcgagaggattccatggactatgtaatgtacacggcggagatggtccagaagaagcgtccaactccaagaagtgcgtcaaaaattaggaggccggtggcgcctgtggctgctagaagaggccgtggtggtcgtggtcgtggtggtgacgatgatgacgacactgacgatgatgactggactggtgggccgagggtgctagagtttggcgctcaggcagtgacaggtggccgagtaacgaggcaaagggtccaagtatgactggtactgattggcgctctgtacattgtaggaaagtttataggtgactgccaggagacttaggtcgttgcttagggctcatatcattaccagtggtagtactagtagtacatagaagcagaaagggaaggaaaatagatttacctatttaggtaccattaatttggagcacactcctttcttgctgtgcccatttcattttctttgtaattttgctgggctttcgcaaaactctaaacaggttgtgctccgctctctgattcaatggaaaaagatagaaagaaagacaaaaaaa

SEQ ID NO: 948 - DNA, 832 bp, Avena sativa
cgcaccccccctggtccgcgtagagaccacctccggggagcctcgcgctctggccgccgccgccgacgaacacgacatctcatcaggcgaggaagcgaagtgaggaatggcggaccggcaggtggctcagttggggcccggagcctcgtgctgtggctggaattactgcggccggcgccttgccgccggcgctgtcgatgggtccgtttccgtctacgattctcagccgtccccctcctccaagtggcaggcccatgagcacgccatcatgaatgtagtctggcttcctccagactatggggatgctatagcttgtgtctgtgctgatgggacactgtctttgtgggaggaggttgctgaagatgatcaacttccaacctggaggaaatgtaaagtctttgagggtggcaattcccacatcctaaatgtacagtttggtttactgccatcaagtctgaaaatggttactgcatactcagatggtcaagtgaaagtctatgaactgttggatacgttggtactggacaagtggcagctgcaggcggagttacagaacattaccgatcctgtttccagaattgggaagccagcatgcatatctgcatcaattgcatggagtccaagaagaggtgaaggccagcaggctagttttgctgttggtttcgattcagattctccaaatttcaactcctgcaagatttggcagtttgaagaagctcaccagcgctggcttccacttattgaacttggttcagcggaggataagggagatagagtacatgctgtagcatgggctcctaacattggcagatcatatgagatcatagcagtt

SEQ ID NO: 949 - DNA, 660 bp, Avena sativa
tctcaaagaccgttgctgggatggtacaatctgatgcggtgaaagcacaggagggagcctcagcgaaggtgacagcattcagcccatcggaagctgctatcggcaaatacagaatcagtccgctgacagagataagcaagaaagtgaggcagtctgagatccaaacgaaagtttcgtacttattgatccccatgctgcttctcatgtcaaagaacagctcgggcacttctctcctagccgcctcggtataccatcagatctacatgttcaacaaggagatcatcctggactacgtccaccacgacatcaccaggaagtgggctctgatatacttcaagctgctcttgctagtcatcggcaaggacacgatgttgtacttcggcctgttctaagtcggtgcggtagtttctcgagaattgcatcaggaccccatctatctgtacgctgaaataataatcaaggtcgacaaattgcccaactgctagttcttgtgttctccaatgtcaacttgctgcgtttttatctctgtttatgccttggttgcttaatggcaaaccgaagtgccaagcaatgtgtttcttcaagaaatgttcaggtgtcgctcactaaataccagtttgcactagagttgtaataatggtaaatgttaacctttggaac

SEQ ID NO: 950 - DNA, 464 bp, Avena sativa
aggcctttgccctgggcttaacactgtcattagagagctggtgtgtggcctgtcgcacatgtacaatgtcaacaaaatctatggaatacagaatggatacaagggcttctattctagcaactacgttgctattacaccaaagagtgtcaatgacatccacaaaaagggtggtacagttcttggaacatcacgaggtgggcatgatacaaaaaagattgttgataacatccaggatcgtggaattaatcaggtgtatatcattggaggagatggaactcagaagggagcatatgagatcttcaaggaaatccggaaacgtggcctaaaagtcgctgtggctggtattcccaagacaatagataatgacatagcgataatcgacaagtcctttggttttgatttcrgccgttagaagaggctcaacgtgctatttgattcagctcatgtggaagctttgcagtgct

SEQ ID NO: 951 - DNA, 909 bp, Avena sativa
ggatgggaaatgctccttacagtgaagaaggcggcacctgagtcatccgcttcaaaatttcagttgctaggctttgcagctgtccatcatttttatcattaccctgagagcacccgcttgcgtatcagccagatactggtcttgccaccttatcagggtgaaggccacgggcgtcgtcttcttgagtcgatcaattcgatcgcagaatccgagaacatatatgatgtaaccatagaagacccttctgattacctgcagtatgtacgttcgtccatcgactgtctccgtcttctgacctttgagccaatcaagcctgcgcttggtgacatggtcttgtctctggaggagaccaacctgtcgaaaaggacccggagtttggtaatggttccaccggctgaccttgctgagatggtgcggctgaagctgaagatcaacaagaagcagttcctgcggtgctgggaaatcctgatctatcaacaccttgattctgaggaccgcaagtgcatcgacaacttcagggcctgcatctacgaccgcaccaaaggtgagttgcttggtggcgcctctgggaccaacgggaagcggctcctccagatggcaactagttacgatgaggattcgtcgttcgccgtgtactggacaaaggagggcgcagacgcggacgatcagactgttgagcagcagccggaagatatcaaggttcaggagcagcagctgaatgagctggtggacaaccaaatggaagagatcgttgaggtcgccaagaacgttagatcgcgcggcaaggataaattggctgcttgatggtgtgagctatatgctcttggctcggtgaaccgtaggatcctttgtagcttgggaatagaaagtagtaggaaaagatgttgatgggatgttatcctcggcttg

SEQ ID NO: 952 - DNA, 653 bp, Avena sativa
ccttgaatgacatagaccaccaacaagtttacaaaaacaatggttggcccatattagctattatccttctatatatgtacttcaagagaaacagatatcatgcactctgtattggatgtgttgctatcatttgatcatttaaggaccttcttgacttcctcaataaactctgctctcctagagggatccatcttctctagtagcatggaaagaccctgcggcaaggcttctaaatccgaactggagcctgcaacatctgagagcaactgagataccctttgagccctaagctctttgatatgctcctcatagttttcagggttctccctccaggcgacaaaagcatcgtcatcatcccagtcagtgcttcctgcttcagctgcctcagaagccatgtaccatttcttgatcaactcgactgctgatttgtgagaaaacttctcaccaattacacctctaatctcctttgcaagaacgtcctcggatatcctcctccgtaatctcttatagaagaaagaccgagattcttcccagtctacaactttcctaatcacgcctttagcaagcattctgagggagtgtcatgcaattccgcaaccttaccgcaatttgagtgtacaaggagcaactgtttctttcgagcttctatgctc

SEQ ID NO: 953 - DNA, 761 bp, Avena sativa
aattagacattcagaacaggtctttcactattttacaagctgcgttagtttgggcttactactggggtgacaggtatcatattcctgtgacatacaaacttgctgcaaagacaatgtcacgcttgatggcgttggacgcgatctccattttcttgtaaagcgccgagttccccatgatcgaagccgcattcctgaactccctgcatgtttcatccagccgcacgattgttcttacaatcagcccttcggatacatctgtcagctcacagatatccgcgaaaggtgttccctttgcccattcgtagacaacctcaacaagaccaaacttcagattatcacgtgcatactcctcaggatccacaggcacctcgtgccttttttggagttgtcctaacctgattgccgtgtcatagagcctctttttggcatcagccagttttggagtaagagatggttctgatgcattgcgttgttggaaaacgaatgcagacataatggccacagcttcttcaggttctaactcctccaactgattctcaaataaacattctgttgttattaactcctcgccagaattcatttcacatgctactcggcccttaagttgcacaacaagatcacaatcaatgtaatggatctcctttagtacatcgattctgccttgaaactgtggcatctgctgaagtgcttcatctgacatttggtatttcagttgatccagctcatccttgtgcaccttttgctccttcatcatacttgtg

SEQ ID NO: 954 - DNA, 859 bp, Avena sativa
cacgctatgcaagtgtcaatacccaccttggtgttgagcaaagcaggagagatgatttagaatctcttggttatgttcttatgtacttcctcaggggcagcctaccatggcaggggctaaaagcaggcactaagaagcagaaatatgacaaaattagtgagaaaaagatgcttactccagtggaggtactctgcaagtcctacccatcagaattcatttcttacttccactattgtcgatcattgcggtttgaagacaagccagattattcttacctaaaaagactattccgtgatctcttcatccgagaaggataccaatttgattatgtatttgactggaccattttgaaatatccccagattggatccaatccacggatgaggccaactgaaaggactagtggagctgctggaccttctattgagaaggtagagaaggccccagccgaaggatctgctcgaaggaatcctagtgcttctctgaatcagagtggcgacaactatgcaacacgaccacgcgaaactgtatcgatgtcactaaaggagattatgcacagcacggatcgttctggtgaaaggaccgaaaggactgcggagagaccccgctcgtcctctcggacaggcagcgcatcaaggagagcagttgcgtcaagcagcaggccagcctcatctatggaaccaagcgagcagcaatataaccggacaagccggttgttctctagtagcaataacggcggaagccgcccgtccagcacccagagggttactccaggtataggcgagtcgagggccacgtccctttcccgtgcagcggtcgcaagagggtccgcgacgagcctctccaccgcagcctcgag

SEQ ID NO: 955 - DNA, 652 bp, Avena sativa
  modified_base (6)..(6): a, c, t, g, unknown or other
tttttntttttttttcgcgctgattatgtcgttttccttttattacttgcaggtcatgtgaacgtggatgatttaacaaatctatgacaaacttaatttgcactacgaatagtcagactgctactgtcattaccacgagcagtttgatgtacaagagagccaaaggatacatatatacttcgtaaaacacagctaatgaacaaaccagatcaaaattgcgagcatatttcaggtgcgatgaactcagctagtcttccagcctacctagaggaggaggagggcttcagttcctggaggaacggcgcaggcctcacataggtgaaccctgcaaagttgccttgcccgccgccggctgtgacgggggtggctgcaggggagtccagcacggacgtgtttgtccagcacacgtcaaagttagcgatgcatgtcaggccggcgacgtctggcctgaagctcggcaggatctcccgggcgtccagctttcgccagttgattggcttgaaccacttgtgcttctttatctcgtcgctgccgccaggtccagttcccagccgcttgccagcctctttgtggagcaatcctttgaggagtgagtgagcttcactagtcaaaaaggaaggaagcttcaacttctccttcactatcttctgct

SEQ ID NO: 956 - DNA, 789 bp, Avena sativa
  modified_base (116)..(116): a, c, t, g, unknown or other
cttcaggccactctccagcagctgcatcgccttctcacccctgatcgtcacatagcaacgccaatcttctcattacgtcggataccgaaagacctcacagtgtacctagccttggngaacaccggcgactgtccactcagctgctccagcaccttggaggcgcgggtgaggcgatctccgctctcgccgacggagatgttgaggacgagcttttgcactttgatctcccgcatggggttcaactgcttcttctccgtcgacatggcgccgggatctggggagcggcggggggacacgcgagggggagggagaagaaggagagcggcacccctattctctcatcgactgtgcagcacagcgtgaagcaattttgccttatgtcctctttattcagaaaacattacgcaggaggcctttcttgataaagagtcttgaaaatgttatgcgcaaattcctccagtccttggagttctttgaagaaaatgagaggcagaaacttgccatttttacagcacttgcattttctcagaagttatcaggtcttccacctgaaactgtctttcagccattgctcaaggacaaccttgttgccaaagggatagtgctttcattcattactgaatttttcaaggaatatctgaaggaaatagtttggatgatctgattgctcttttgaagaaggaaaatggaggacaatttacttgagtttttcccatcaggaagagaacctctgaggctttatctgagcatttcaccaagaaggtttgactagccttgttgagtacaatg

SEQ ID NO: 957 - DNA, 433 bp, Avena sativa
tttgaccgggagtttatgccaatcaaaagcttctggacaagggtaaggagctactgaagcagatggaggaaaatggtgtcagaataggggtgtcaacattggattcgctggtgaagctctatgtggaagctggagaggtggataaagctgaatctatactgtacaagctgtctcagagaaacaggatgaagcctcagtacagctcatatctgatgttgcttgacagttattcgaagaaaggagacatccacaattcggagaaggtgttcaacaagttgcggcagatgggttacagtgggagggttagacagtaccagttgctgcttcatgcatatttgcatgcaaaggcccctgcctatggatttagagagaggatgaagctgataacattttcccaacagtgtcatcgcaacgttacttgctgctactgatc

SEQ ID NO: 958 - DNA, 997 bp, Avena sativa
aggggtgttctgtatctttaccgacaacagactggggatgagaatgctcagcttagtccagtcttgcgccttggagccggagcctgtgctggcatcatagccatgtctgccacttatcccatggatatggttaggggtaggattactgttcagacagataagtctccttaccagtaccgtggtatgttccatgcattgggcacagtgtaccgtgaagaaggcttccgtgctttatacagagggtggcttccatcagtgattggagttgtcccttatgtgggccttaactttgctgtatacgagtctctgaaggactggatcctccgtacaaatgcatttggacttgcagataataatgagttgcatgtagtcacaaggcttggatgtggagctgtggctggaaccatagggcagaccgtggcataccctcttgatgttgtcaggagaaggatgcagatggtcggttggaaccatgctgcttctattgttactggagaaggaaaagcggctctccagtacaatggtatggttgatgcatttaggaaaactgttcgccacgaaggatttggtgctttgtacaagggtcttgtgcccaactcagtgaaggttgtgccttccatcgccattgcttttgtcacgtacgaggctgtgaaggatgttctaggagtagagatgaggatagactaaagaagtggacttagtcgtcctggccgttatcaacttctatttttgtaggtgttgagagttgtttttttgttaggcaggggagtagaaggacaataggaccgaggctccattcagcataaggccctctcagcccttgtcgatatatcctactactggttccagatcctaattgtttgccgcactctcggggaaataataagttggctgtaaagcattaagcatttgcctaactcataaagtcttattcagtgaggaaccatgtattgagattgaaacataagcttgcatgctgtgtgctgctaatagttga

SEQ ID NO: 959 - DNA, 644 bp, Avena sativa
caagatttttcccagctcttcagggcgagaacacgaaaatgtcagctagtgatcctaactctgcgatatatgtgacagatacaaacaaagaaataaagacaaaggtgaataagtatgccttctcaggtggccgggactcggtagaagaacatagaaaatttggagctaaccttgaggtggatgtctcaatcaagtggttgaacttcttccttgaagatgatgatgaactcgagaacataaagaaggagtacaaggaaggaaagttgctgaccggtgaagtgaagcagattctgattaacgttctatccgagatggttgaaaggcacaaaagtgctagagctctagttactgaggagatggttgacgcgtacatggctagaaggcctcttccaaacatgtttggataagcatgggggcaggaaaatcattctctctttttggattttgtagaattctggggcagcatatattgcatgttttagttgtcttcgtcaatgcgaacctggctgctcaatggtggccacttgattttgtaaaaccggcatgttatatctttcttttcaagcttgcccatgaatgttctgtctattggaattagaagacatacatatactcacttgcgtttaaatgcacagcatcatcga

SEQ ID NO: 960 - DNA, 924 bp, Avena sativa
cattggtcaaccattgggcctgttgattaagatgtcgcctctggtctcagaactgcgcctgtatgatattgcaaatgtcaagggagttgctgctgatctcagccactgcaacacaccttctcaggttatggacttcactggccccacagaattagccaactgcttgaaaggtgtggatgttgttgtcatccctgctggggtcccaaggaagcccggcatgactcgtgatgacctctttaacatcaatgcgggcatcgtcaagtcacttattgaggctgttgcggacaattgcccagaggccttgatccatattatcagcaacccagtcaactccactgtgccgattgctgctgagattctgaaacagaagggtgtctacaatcccaagaagctttttggagtttccaccctggatgttgtcagagctaacacatttgtagctcagaagaagaacctcagtctcatcgatgttgatgtcccagttgttggtggtcatgctgggataacaattctacctttgttgtcgaaggctaggccatctgtcaccttcacggacgaggaaactgaacagctgacaaagaggatacagaatgccgggacagaggttgttgaggcgaaagccggtgctggatctgctaccctctccatggcttatgctgctgccagatttgtcgagtcatcgctccgcgcactggctggtgatccagatgtgtacgagtgcacgtacgttcagtctgagctaaccgagctaccattctttgcgtccagagtaaagcttgggaaggacggtgttgagtccatcatctcctctgacctgcagggagtgaccgagtatgaggccaaggcgcttcgagggcgttggaaggcagagctgaaggccagcattgagaagggcattgagtttgcacacggagctgctgcatc

SEQ ID NO: 961 - DNA, 874 bp, Avena sativa
cataccgtcactaatatggttgggactcttccgcctcagttttgctgtaactgtaacaacggttgctgaaaatctggctcagctcatgtacagtgtttgatgactggatacatgttcaggaatgcacaataccgtctggagttgcagcagagttggagcagatcgctcttcctgaacccaaagaagaaaagggttcagaagattacgctcctggaacccagaaaaaggtaagtggggaagtgatcagatggaacaaggccaccggaccagaaaaaatcgatgccgtaaaatacattgagttgcttgaagcagaaatcgaggagctgagccgtcaagtggctaggaaatcgtctcaaggaagcaatgagctcttggaatacctgaagactctagaaccacaaaatttaaaggaactggcgagcagtgcgggtgaggatgttgtgtttgccatgaacgcgttcataaagcgtcttttggctgtctcggaccctgaacagatgaagacggcggtgtcggagacgagcggcagccagctggcgaacctgctgttctggctgatgattgttgggtacagcatgcgcaacatcgaggtgcgctttgacatggagagagtgctgggcgccgccccgaagatgggcggcgagctgccgcctggtggagacagcacaccgacacaaacacagtagttaccgacaagaagctttagagagagttcgcacggcttgagatgtgtttttgggtgtgttgacacattcattattgttgtgttttagagaggttacaacacaatctagtagtaggatcgaagttcagaaaccgacatactatttggggatgtatgagctttagaaaacaacaaatgttcttcagttgt

SEQ ID NO: 962 - DNA, 854 bp, Avena sativa
tgaactggatacatgttacaggttccaacagatgaaggttgcccatgtgctgtagcaaccagaagactgatctacctggaatacatttgccatgctgccaagaacagagcagcagaatttggcattccaggccacataccgtagcaaaacacgataagttacatcagaggaattcgaatgaaacaaaaaacagtttcaccgaggaccagaaatcagcttgtacgatatacattgccgacacatgtacattttacatgaacctctccatgagttcgtaatccaacaacagttctttcaaaccaatcattttgctgtactgcaaagttatccagccaacaaaagatacatatgctacaagaagacaggctcgcttaaagcgatacgcgaacaccctgatgctatgattgctcactgcccacctggcagcagcaaggaacactcctcggaagcttcgtaagactatagtgatgactagagaactcatcatgccagccaaaacccctgctgctgcatatccaaacatccatcctgaactgaaatcttttgacatgtacgactttgaaaacagtacaaatatccttttcagcatttcacttattgaaggttcctcagcagtacaattaaatagcttgtccggataaacgtcagctttggtactccctaatgtgtatctgcaactgtatgattcattgaccttgaacttcgctgttgttgaccatgcagcaccaaaatcaggtcggcagccgtgaggaagagcctcttttggagcctctgccagggcatacgatgtttggccagaaaaatattctgtgtattcaacctcaaaaactgaagcccagtagtagtcatcatgg

SEQ ID NO: 963 - DNA, 392 bp, Avena sativa
gagcaacttcgaattggttacaagcttgtggcaaagagggagttgaatgatccagagaatgcacttattggcgcttttgccggtgcaattactggcgctataacgactcccctcgatgtcctgaagacaaggttgatggttcaggggcaaaaccaagcaatactctggaattgtaagctgtgctcagacaatctggagagaggaaggtcccaaggcattcttgaggggcatcgagccgcgggttctgtggatcggcattggtgggtccatcttttttggcgtgctggagaagaccaagtcgatactcgccgagaggagcagccgcaaggccttggtggacaaagacgagtgaaccagccaaccaattgtgcaatcctaatgctagaactcaa

SEQ ID NO: 964 - DNA, 960 bp, Avena sativa
ggtgatgcagcaaaggaagccacagtaccaagaatgaaagcgtcagaaccgagagtagtaaggggcaggccactaaagagaaggtagatggagatgccaagggcaagttatcaaagaaggctgccacaaatgatactcctggtaagattaagaaacagggaagtcataaggacgaattggaagaagatgcaaaaactggaactagaaaggagaccaccaatattgccactcaaaatggtggcacttcggtgaggagcaagaatggaaagtctgacgaagagaaaagagatggagatgcagagagcctcgtaccagtggaggtcacagcggtcactcaaaatgatgatactagaaatggggaaacttgtgaagagaaaatggacacagatcctaacgtgaaaaacatgcgcaaagggttcgatgaattacagaacttgtaccccaaccttacctcttatgtggagagcatccaggcccagcatccatgtggggagacactgaaaagagcatttgagttcattgctgatgagaaggcttgtgctttggaatccaagatcaagaagcaaagagtagctgagatgaagacggagattcgccgagctgatactaggaaggaggtggccaacataataataggattgctggactaaaccctttggtgttgtcaacccatttgtgtgatgaggaaaacaagagaggctggtaaggaagttgccttggaagaccctggaccaagattattaaagtttgcttttgttcttgatgcctatgaagtaaccatttcaagtatccagtcccattttgaggtgcaattagtttctgaacttctagtgatggcctatgcactttggacctgttaaatgcttttaaattcttagtatcccattatattgtcaaaaagttattggtttgtagtgatatcttttgaactgggtgcataaatgttcagagatgaagttc

SEQ ID NO: 965 - DNA, 692 bp, Avena sativa
tactacaagatcaaaatgtctcgaaacaacttctaaagaattatcagctttcatgttcacagtttaatgcgacactgttgtgccccaaatcacatcctctcaaggaaaaatcacacagatattcttccaaaaaaaaacagtaaactgatagtacattacaggggagctactagcagtctagcaccacgtatgcggtatggttttcttggcatataacagcaggatagaatacctgcagggaaaacggtgcaagagccagagcaagggatggcaaagcccactcaccagagtagtctcaaatcgtattggtaggccaagtacagggctctgctgcatcatccagaaatagcatgccaccttctgtggtgtcaactgagctactcgacatccttaacatctgaaatctccatgtctgatgctttgctttcaggcacaccttctggatctactgcctcatcgccgccatcgggctgctcgtctgatccgtcactcttcaggttgggtttcccatcatcaacttttgggattttgagcccaaaacgatatgatatcctctcaagcagctccttcccatccaagggagtaagcatgacagccagattggtctttcctttccaacaaacaacggcgattgcagagggatccgcggctatggactctatatcctgatgcccttcacgtaatattaccac

SEQ ID NO: 966 - DNA, 650 bp, Avena sativa
cagctaggttgaacgaagaatggtgtacgttggcactgaaaagattgaaagaggcctctccactcgctctgaaagtatcactacgatcgatacgcgaaggtagatatcagacacttgatgaatgccttgtacgcgaataccgcatgtctgtcaatgggatctcaaagccactttcccatgaattctgcgagggtgtcagagcgcgattagtggacaaggatttggctccgaagtgggatcctcctgccctcgagtttgtatcggaggacatggttgattcttactttgcgccactgggtgaattggacgctgagctgaagctgcctacagaactcagagaggcattcgtatagtcgaagattggttccagggatcaggtgttgtttgagaccagtagattttgagcccactgttgttggcagcacataagaaaactaggatgggatgtgggatgggcaacctattcatgtaccatgtgcaaaccccttggcgtgttaattagagaactagtagatgcctaagaggaactcatgcttttcttatttcttttcaccaaatgttataattagcatctatcaaatttacaatatggcttcgggaggaagcccctgcagcttattgcaaaatgaatggccwtacctttgttagta

SEQ ID NO: 967 - DNA, 582 bp, Avena sativa
gacaatggatcatcttgtcctacaatcaaatttagagacattgtacaaccttttccaccatggaagcaaaattgactgcacgtaaataagtaaataatccaaccttcccaaaaaagaagtaaataacccaagaaaacatggcgaaaaaatccgtcgtttagataaataagaatgcagcgtccagctcgcttgatatatgtcatgtcacatagccctagtgcaatgccccagccatgattgagcgatgggagagctgttgctcatacagggacctgaatatctgatatttcgcatcgtggtatttcttcagtttaggatccgaagacgggtgcacaaccttccctggcgcattcagtgctttcattgcgtcatgaacgcctgagaacttcttcgcagcaacagcacccagaatagcagcgcctaacagcacagactcgttctctctaggaagtattattggatatcccatgatatttgcgtgttcttggatatacaaggagttctttgcaagtcctccagaggcaagaagagtgtcgatcttgtgcccgtgagcattacagtgctccacaatatgactcccgg

SEQ ID NO: 968 - DNA, 868 bp, Avena sativa
ccgtcgacaatcggtgcctattcctgttgtttctctggtgggatatacaaatgctgggaaaagtacactcttgaaccgcttaactggagctgatgtgcttgctgaggataaattatttgccacattagatccaacaacacggagggttttgatgaagaatggtcactgagttcctcctaacagatactgtcgggttcattcagaagctacccactatgctggtagcagcatttagagcaacactggaggagatatcagaatcatcaattatagttcatcttgtagatatcagccatccattagctcagcaacagatagaagctgttgacaaagtgctgaaagagttggatatagagtcgattacgaagttggttgtgtggaataagattgacaatactgatgacccgttgagagtgaaagaggaagctgagaaacaaggggtaatatgcatatcagccatgaatggtgatggtttggaggagttctgcaatgcaatccaagcaaagttgaaagactcgctggtgcccatagaagcttttgttccttatgacaaaggagagctacttaatgacatacataaggttggaatggttgagaaaacggagtacatggagaatggcaccttcataaaagcacacgtgcctctaccacttgcaaggcttctcacgccgctgcggcagcaggtggcggcagctgctctgtgatccgttcttttgctcgatctgtgattccatagttggcgagcgatgtacagagtttagtgacagagtatcgtctttctcgtttgatatttgtagggcacgtgtgcagagttgtacatgaatcacacgactatacaacatcaattacggagtaatatacttagtaa

SEQ ID NO: 969 - DNA, 705 bp, Avena sativa
gaaagattcagatcgataactagagcatactacgacgaagctgctggtgctcttctggtttatgacatcaccaggagggaaacctttgaccatctcgcggcctggctggaagatgtaaggcgatgtgcaaaccaggacatgacaataatgcttgttgggaacaaatgtgatctacctcataaacgcgccgtgagctttgtggaaggcgagaagttcgcaaaggagcatggtctgatctttgtggaggcatccgcaaaaactgcgcaaaatgttgaggaggcttttggcaagactgctggagcaatatgcaagaaaattcaggatggtgtcttccttgtacctgagaatcgcgggatcaaagttggctacgctggtgcctcgtcttcccaaggtggtggctactaccgctaatggaatgaattatgatgcacaataaatgctagtcatgtagccgtcgagttgtttctcgttgccgactggagaacagctgctatatgttggaaataaggctgatagtgttcagtcgaagcagggttgttgccgtgtctaagtcgtttagttcttctaagcatgttgattagttgtatcatgtttgtggaacattgtatttaagccttgtgacatctttatatgccgatgatacggccatcttccttctgacccaccagagaggatattggcactgtttacccgaacaaaaaaaaa

SEQ ID NO: 970 - DNA, 772 bp, Avena sativa
ttagcgagggccaaagcatgacacagttctgaaaacagaaagcatcatctttccgcatgtttatttactgtccaagtaacattttattgacacagtaatcactcgtacaaccttgacagtctccgaagcacaaacaaccccacaaatactgaggcccctgggcatccaaacacacaagccagcagagaccagacccagagatatgccattgctcaatcgaaaaatgacgtgaagcataacaggctggagctaatccaacctctgttttacagtctaacaaccatgtacaagggctaagaaggtcacggctttcctaggagagacgggcggtagaacgcgtggctctgcgccatctcgatcctttcacggggatcgttcatggtctcgtctcgcagggcttggaggatgtctctcaccgggagctccctttttatcaaaattctataaagcctcttcagaattgggcacagttcagcaggagcaacttgcttgttttcctctgggtgttgcacacttaagctgggttgactgagcagctcaaaaaatgcaccaacagcagaaataccctgaatcattcccttccccttgatactgtcacccatatcgagcctgagttctcccttcgctagcatttgcccgtaccatgcattgcgaccttttagaagagtcacataagtatcagccagcagcggaccagcaagtttctctggctgctctgtcagcagatgagtaaataaatatcatctctgatgtacagtgagcaaaatacacg

SEQ ID NO: 971 - DNA, 617 bp, Avena sativa
ccgagcagagtggatctcccgtggggacatttgatttgggcacgtggcatctcccttccctcgaggaagttgaggttgcgctttacagaagcagagccacccatgaggaggtgaaggaagcgatagctgttctgagggcggcggcggccgagcatcccaaccgtcccagccttagaatactttgacagatacgtacgtatgaaaaagtttcaggtggtcggggtgctacgtgggttcatcaaatctttgcaaccaggtagtccagcaggagctaccaagtttcgtcgacatggactccatcctgcctgcctgcaactcctccccgtgctctgctgttcggtctgtcttccttctgcatcgagatgaagctctgatcctgttcgcttaaaatgtctgaattcttcgagtgtttccgcttgcttctgccaattcaagaaccattaataagtttgagggtgcccactacatttcgcccacgataaacaattatttatgtactactgattggttggtttgctttcattatgtatcactactttgtagaagcttccactctatgttcattccagacttgtaaaactattatgtcgtgttcaatttgtgcgatattctgaaaa

SEQ ID NO: 972 - DNA, 663 bp, Avena sativa
ggtctccaaacctggatctgtgaaggtggaaaagttgatgaacatcgagcggtactcccatgtcatgcacatcagctcaacggttagtggagagttagatgatgatctccaaagctgggatgcgttgcgagcagctttgcctgtaggaacagtcagtggagcaccaaaggtgaaagccatggagctgatagatcagttggaggtgacaaggcgaggaccatacagtggcgggttaggagggatatcatttaacggcgacatgatgatcgctcttgctctccgcaccattgtgttctcaacagctccaagccacaacacgatgttctcatacaaaaactcagataggcgccgggagtgggtcgctcacctgcaggctggtgcgggcatcgtcgctgatagtatcccagacgatgagcaaaaagaatgcgagaacaaggcggctgctctagctcgggctattgatcttgccgagtcagcttttgtagacaaggaatagagtgtattttcgtgaatttattgttaattcttgtccatggtatcttcacccagttcatgtggggaagaaaaatgtcgtcagtcggtggagggaagcaaataagcttatgttgtcctgtgaattgaaaaaagtctagaactgtaataagatgttttgttatacgggaa

SEQ ID NO: 973 - DNA, 806 bp, Avena sativa
gagcaatggccgtatcagatatgtgcaatggtatatttggtactgtgaagatggcaaatacaaggttgagcttgaaacaattaagaatttcactcacactaacttagatccaacaatcgactagagaaaacttataaatatataaccactattacgtttcagtgttggtacgcaagaacatatggatgacacatttacacaactcatacatacaaaaacaagccagggtcatctgtatttgaacagtttctatcgtcgtatagctctgctttatgctcacgccgcaattcggcataagattgcacgagatgacacatcatgcagatatcaggccatcgggaagagagaggccctcctctgcacctgcggacagaaatttccggcatgcatagaagatggccgagtggaaaccttccgggttatcgataaacacaaagtgtcctccctgtgggactctgatgatttcgcaaggaactttcatatcctcgcgtgcttgctgtgcccctttgtaattcatccaatcatcctggccatatatgaaagtggtcggcactttccagtcggatgcgctctgcagaagaggtttcctcgcaaatgcccccaaggaaaaaatatactttaagcacagctctccactagcttttgcagctagtgtgtggtaaatgtaatctgtcagcaagctggactcattgtctgttagtaattcacctgttgaacgtgtgccaaacctagctgtagtatatctccgaactaaatcagggccccaaggatccaatcctctcactattctctgaggagtaaaattg

SEQ ID NO: 974 - DNA, 637 bp, Avena sativa
atcatcgaaccctaggagccttgccattgccggaaggaggcgtttgttcactaggctgctttgttgcacgaaaactcatgcagaatatcacggaaggattcgggccagagttggagttgtcggtgctcctgcggttccacctggagaaacatgcgatccacccaatcgcgggttgatttgtgctccaactttagctctttgcttccgtacccttggtggtagtcctcgtacttctctccgtctgcggcttggctgtatttcatcttctcttccaagggtcgttgaaagaattccctggatgcgctgcacatggcgtctatcacacatggctcaacgccatggttagttaccattaaaattccccatgactccagtgccaagcgaagtttggccgtctcctcggcgccactgccatcagctttgctcatctccccggacaggaggccgatgtcgatgagcgggattggtgcgacaggtgcctcggcggtagggcggtcctccggcttcatcacgtacccttctggcacatcgatatcgacgccggcggcattctcctgcacgagcaacatggccgcttcctttcttgcctagctagctagctagctagctatttgcttcttccttggtagatcccggg

SEQ ID NO: 975 - DNA, 882 bp, Avena sativa
tcaaagtaacattgtcagagcaaacataaaggaaatacagtgcagcagtcttaaactggaagtacatccatcacaaccatgatcacatcattatctagcaagcagaaactggaaaatggttccagtattcagggagacatgcttcctcttggtgagcctgagccgccatggccatcaccattgcctcggggactagggctgccaccatcgccattgcccctgggactagggctgacaccaacgccattgcccctgggactagggctaccattgtcgcccctcgggcttgggctgcccctagtaggactgggactgcccctacccttattagcaggactgagactgccctttttaggactcctactgccgtctttgtctttgcccctgggactaggacgaccgttggtcacagggctacggtagccatcagaagggctcctgctcctgctcatctccctgccacgagggctgtcaccattatcctttgcttctggggagagagaccgcctggggctcctattgccatcaggtgtggggctgcgatccatttcctttgcaggggagagtgatctcctggggctcctgctatagctaaggctccttgatctcgcatcacgctcccggcggcgccctctgggagattcagataaggatctggacctagatcggctgtaactccggctcctgcttctgctgtagctccgactgcgggcacgtccacggcgtggagatggggaccgtgaataactcctctcacgcctgagactcctaggactattctggcagtttctttctatatggcccctttctccacagcggtagcatttgttcttccagtcaccagccttgcagtctctggcccagtgaccatcaataccacaa

SEQ ID NO: 976 - DNA, 857 bp, Avena sativa
aagctgctgaagtagttatctccaatattcgttttgctgatgatcctgacaggtagtctccttttttacgaactccaattggtttgcatttgatgaggacaaagcactgaacgatgacccagaagcttccctttctgcaaaactggagttgccttcaccaaatgtggatgacgatatggatgaggtcattcttggtgaacctgtagatggcacaaaaggttcggattcacttttagcaacctctgacatagacttgagtgaagagcctggtcacacagtattgacaaatggccccattgataagttggaagatgacatcagaccgccaactccagatgtaaaagagagtctgcctgagtgtgttgagtggacagaagatgctgaacctgctgaggtatcagtgaatactgctgttctgaattctgaggttggaaatgagaatgcaatggatgccactggtgaacttgtttccagtacaacacaatcaggagaagaacaagggggtgtggatttggttgaatctccggttcttgagaccacagtagaaaagacatcaccagattcaccggatgctaattcaacggtccattctgaaccaggtgatggaagctctaatttggaatctccaatgggtgaacagaagcacggaaacaatgaaagttaggggatataaagtggatctgagggtagcagtatagcacagttttgttcacatggtgctggatgcctggatggcatatgatcatggatgtgcagtgcaggtgctgggggaacatgttagaccattgtctgaattgctaagggcggatgtacctcagaatttgggtctcatgaatccaacaagtcttgttgatctg

SEQ ID NO: 977 - DNA, 844 bp, Avena sativa
ccagcagctgacctactgcgtgacacagtttctagacaaggatcctaagctcgcgggctcaataattatcggattgctaagatattggcccataacaaatagtcagaaggaagtgatgtttctgagcgagatcgaagagatcctcgaagctaccagcgcggtggagttccagaaatgcatggttcctctgttccgacggatcgctcattgcataaacagttctcacttccaggttgctgaaagagcactcttcatgtggaacaatgatcacatcatcagcctgatagcgcagaaccaccaagtgatcatgcccataatcgtcccagcattagagcagaacagtcagacccactggaaccaagcggtcctgaacctgaccgccagcgtgatgaagatgttctccgaggtggacgaggagctattctcggcgtgcctgaccaagtgcaaggaggacgaagagaaccaggcgtcgttagaagagaagcggaggttgacgtgggcgagactagagtcggctgcggccctccagccagtgaccggccacacagccgtcctggtcggtcgccaaccgtcggcgaatctgatcgccacacttatttagcatgtacgttcagacggtcggtggaggtgccaaacggtgttcttccccttttcggtgaagcttgtccggagtgagctgcttccagggttcgttgttttgctttttattttgtaagttgtaactatttccactctacgtctgtgctctagaggcaagcgtacctgtaagagcgagtgctgactccttccgtgtaaacttgcctgtttatttatgaacaattttccagagctaaatccaatgttt

SEQ ID NO: 978 - DNA, 884 bp, Avena sativa
tcactatccagctagctagtttataatagctgtggttatttggtgaacaaaacatggggtttttgctggttggaagctgttcggcgttgctttggccttgtgttgatatacctggtcttcagcagagtataagtcaaccataaatgcatggagtggttccatacatttctggacttgtgactgcattctgtattgagagccatcctgctaaatgaataatatttgcaggtattgtgttgtgtttccaacgtgatagctttagcggcacaaaacagcctacatgggcgccgtgcaactcgagactgttgctgctcaacatgcacaagctaagctaaatctggaggtatttccccaaggccctttactagatggaaaggactcagctgggatcaatggctctatccctgatgattatgagaggctggagaagggattgatgcagtatgggtgtgcacattaccgaaggaggtgccgcatacgagcaccatgctgcaacgagatttttgattgtcggcactgccacaatgaatcaaagaattcgattaaaactgatgtgattaggcggcatgaactttcacgtcatgaagtgcagcaggtcatatgctcattatgtggtactgaacaagaggtagggaaaatatgcatcagctgtggtgtatgtatgggaaagtatttctgtgaagtgtgcaaactctttgatgatgatatctcaaaacagcagtatcactgccatggttgtggaatatgtagaattggtggcggcgagaatttctttcactgctcaaaatgtggatgttgttattctacagtgttgaagaacagccatgcatgtgttgaaggagcaatgcatcatgactgtccaatctgcttcgagtacttgttcg

SEQ ID NO: 979 - DNA, 749 bp, Avena sativa
ggcacttgaagttgttattcagtccacagtgaaggatccttcatatcttgatgcaagagttgatgaattctttaagacgttcgaaagcaaaatccatgaactgtctgacaaggatttcaagagaaatgtcaaatcacttgttgattcgaaactggagaaattcaaaaacttgtgggaggaagctgacttctactggggagagattgaagctggaactctcaagtttgataggatcgagtctgaggttgctctcctaagagagttgaagaaagatgaattcatcgaattctttgatcagtacataaaagttgatgcacctcaaaggcggacagtaagcgtgcaagtcttcagcggcaaccatttggcagagttcaagaaggcgatcgtcgaagccgagccgcccaaaacttaccggattactgatatattcggcttcaagcgatcaaggcctctgcaccgttcactaaagggaggtccaggccggatcacaatggactgacacatattctctgctacatatattctctgtatcatgatgcatagtatatagcctgtgcgcatgcctgaactaaatttttgattgattttagaatgctcacacacgatcacacgattgcacattgctattcttcatgtatggagtaaccatgtgatgctattttcttaacaaatctaccagctgtaaaaattcaaactgtagtaaccatgtgatgctattcttcatgtatggagtaacaaatttactgaaa

SEQ ID NO: 980 - DNA, 821 bp, Avena sativa
tgatatggcaaagattggtcaacctgccaaaacatctagttcgcaaggagagaatggatcttcacagggtgagcacttgtcatcaacatctgaggggaaaagaccttatacattattccaaggtcattctggaccagtttattccgctgcctttagtccatttggggattttctcctgtcatcatcttcagattcaacaattcgtctgtggagtaccaagctgaacgccaatcttgtttgttacaaaggacacaattacccagtttgggatgttcaatttagtccagttggtcattactttgctagtgcctcgcatgacaggactgctcgaatctggtcaatggataaaatccaaaccttttgcgaattatggctgggcatcttgctgatgttgattgtgtgcaatggcatgtcaactgcaattacattgccactggctctagcgacaaaactgtaaggttatgggatgttcaaacaggtgaatgtatacggatgtttattggtcataggagtatggtcttgtcattggcaatgtctcccgacgggcgatacatggcctccggagacgaagatgggaccatcatgatgtgggatctctctactggtcgctgcgtttcaccactagctggccataactcttgtgtgtggtcacttgctttcagctgtgaaggagcattgcttgcatctggatcagcggattgcactgttaaactctgggatgttgcttccagcacaaaggccctgaagctggatgacagcaaagctggttccacgaatcggctgaggttgctaaaagctctcccgacaaaatcaactcctgt

SEQ ID NO: 981 - DNA, 659 bp, Avena sativa
cgacaccaaactcgaactctcaaccgagaccagagcagagaatccaagacgagggacgataactcggcgactccaccgcgcgcagggggagaagtacccgagagagagggaggcaaatccgctcggtgagaaggcgagagggcgggccaccatgaggcgctcctccaagaagtcgtcatcgtccgccgcggccggtcccactaaagccgtttccaaggaagtagaacggattgaccaacttttctatacttatgccgacagctcatccggcatgattgacccagaaggcatcgaaacactttgctctcatcttgaagttccccatactgatgttcgaattctgatgttagcatggaaaatgggctgtgagaagcaaggttattttactctggatgagtggagaactggcatgaaagctctgcgagctgatagtattattaagctgaagaaggcgttccccgaactgacacaagaagttacaaggccctctaatttccaggaattctatcagtttgcattccgttattgcctaacagaggacaagaagaagtgtatcgaaataccagttgcttgtgagttgctgaatctagtattgggggcttgcagttccgcccccaagttgagaaacttattaattacctcaagtaccaaaacgagta

SEQ ID NO: 982 - DNA, 821 bp, Avena sativa
agaagatccatttcggttgtacagtctccggaggacggttttgatgggcatgctcttgtgggaactcttgctgaatttcaggaggcacaagcccgttggggaagagatgtaacttccaaggaacaagaaaaaatgaaagaagcatctttaagatcagaaaaggaaaagcttttcagaagactcgaacacaagttttccattgcccaggcaaaaatacatagagcagggaagttattacaaaagattgaagcttctatgatcctcgcgaacccatccgatgaccgagaaatgattacagatgaggaaaggtctgttttccgtagaattggtttgaaaaatgaaagcatatttgcctgttggaatccgtggtgtcttcgatggtgtcattgaaaaatatgcacttgcactggaagcacaggggaagttgtcaaaattgataacaaagcagaagaccttggcctttgtcgaggagacagcgcggcttctagagtatgagagtggtggtatactagttgcaatcgaacgagtgcccaagggtcacgcacttattttttaccgtggaaagaactatcggaggcctattaacataaggcctagaaatctcttaacaaaggccaaggcattgaaacgtgcagtggcaatgcaacgccatgaggccctcagccagcatatagatcaactggaaagaaatatgaagcagatgaagcgtgatttgggtatggaagactacgatgaggaaggatcagattcagaaaatgaggacaatgcagcaatgtctggaagctatgatgaggaccgagacgatttcgatgaatctagcg

SEQ ID NO: 983 - DNA, 629 bp, Avena sativa
atccccaacagagaatcgccacatcaaatgggcggaggacgtgtatgatccccctgtcacatctgtttctcattctgtgaacaacagttacaagagacagcccaatccccgtaagaaggacaagagcaaacagaaacagaagcagaagggcagatccaagaaaaagaccaagaatgctaaccagaatcctgctgtaacccagactcccggactggaagaacttggcacctccatcattagagaagctccagccgatcctggcaagcatgagaccgaggcattggactacggcatcagcagccaagatgccaaatgcggaagcagcttcctgcttgagacggttgctaaaatgcatttctccaccgcggaggcttcctgaaaagccagaggtggactccggactctaccagacacatcttcgctatgtaaatacgacggctgtacataaataaatcacgtgtgtggttatcaccatgtatctccagttgtgttgttgtgctagagaacttttaccctagtcggattttgtagcaatcgccaagattttggtactggtttttgtatgtaactagtccagctggacaaggacaaaagtattatcaatcttattacgctgcagttactataaa

SEQ ID NO: 984 - DNA, 487 bp, Avena sativa
gaaagagcctgtgaaaaccagtggtagctttctgctggacgggtttggtgcctttgattttgccaaggcagggtcagggaagggcttgaaaattgaagagttatatttcacagacgaggagatgcaaatgtatgtggatctccattcgatagcgaacacctcaccatatacggtggttgagacaatgtcgctagcaaaagctgctatcctattccgagaactaggattgagacatctattggttgtgccaaagaccccagacaggactccaattgtcggaattctcacaaggcatgattttgtggaggaacatatccacgggttgttccctagtctcaatcctcacaatttccactccgcatcaatgggaggttgactgcgaaaagttttttgttgcttctttaaaaaacaattcatacgagtgctggtggtatgtgatttacacgagtgtgcgtggttattttgggtgagagctatgtcttctgta

SEQ ID NO: 985 - DNA, 588 bp, Avena sativa
gattgaggcactattcctcaggaacaaattctgtgttccatgcaaacgacctttcctgttgttttcctgtcttctgcaatcctctgttttccacctgcattcttgtccatgtttcctagttctctgcttttcatttctatgatccaaagcggctttaataaattttgcctgcagccttttttcaacactatcataatttgtgttcatattccgaattttctatatgtgagctactaacattcattgaatcactgtagatgtgtggatcatcagcacttccttccccacttatgaagcggtgggaggaagtgacaggccaccgtcttttggaacgctatggcatgactgagtttgtcatggcactgtctaatcccttgcatggtgcacggaaagaaggtacagtcggtaaacctcttctgcgtgtcgaggccaagatcattatggacgatggtactgaaactaagctggagtcggtgagctctgtattagaagtccatcccttttcaagatactggaaagaccagaggttacagaagaatcatttattgatggcggtttcttcaaactggtgatacagtaactgtagat

SEQ ID NO: 986 - DNA, 617 bp, Avena sativa
cccgaatgaacagctatactatacttacagacatggaccgataatactacctcttcagcaggtctttatgacctcgggcttccagccccgccacacgatcaggcgggagccgaatttgaactcgtggaaccttctcttcagcgatcctttcttcgtccgcttcgctcccggttcagagaccgagccgtggtagtgcagaggaggctgcggcgggccgctctcgacgctgtccacgatcttctgaaccatctcgtacacctcgctcatcttcgggcgtgatttcggtagccggaggaggcagcggtttgccacgcctgccagctttgtcatagacttgaggttgtagtgcccctcgagcctcgggtctacgatgatggggaaccgtttgacatcggagatgtatggttttacccagtccaggagcttctgctcgccctttgggcggttcctgtcaatggggcgacgacccgtgatgagctcgtagaggagcacaccatagccccatatgtcactttttgcagtgaggcgcccagtttgcaagtactccggcgctgcatatcctagagtcccaacgaccgctgtggaaacatgggatagaccttcctgtggccatcccg

SEQ ID NO: 987 - DNA, 502 bp, Avena sativa
gaaatgcataagaccaacaactctactaatcgagtcacttgaaaagttctgttgtgcatcaggaaagaagcggcgccatacagcggcatcaacccctctgtatcaaataaattcagttacatcagaccaaataacttcaacaattctaacaggtacaaaaggccaccatggtgcagcagccatataatctttcttgcctgaatttacaaggaaaactgggccagtgttaacaacatcaactgtcctacagatctggctactagggattgcgagccctgtccactcagcttcactcacggaatctggaatactggcgtgccacaacataaatcaccacagcagctgtaccggatggaaaggagatccagattttacagcaatgaggactcaacagttgcattccactgtcaggttcattcgtgctacccaccagcactagatgattttgttcctgatgtcttccagcttcttcaggattcacctggagttcggtcaagctctc

SEQ ID NO: 988 - DNA, 724 bp, Avena sativa
ggtttgcttctattcccctgacacagtttttctcgaaggagacagatgcgtcccctaataacctcaatgatcgaagcaatccagcagcaatcattggcttataaacgttcagttcaaaatgcccatttgaaccaccaattgtaacaccaacgtgattacccataacctgagcacaaaccatggtcaaagcctcacactgagtaggattaaccttcccaggcataatgctgctccctggctcattttctggtagaataagttcaccaagtccacaacgagggccacttcccagcaagcgtatgtcatttgcaaccttcataagagatgccgaaattgtgttcacggcaccactgctctcaacaaaagcatcatgcgctgccaaagcttcaaacttgttctctgctgtcacaaaaggaagatctgtttcctcggccactgcagcagcaattttgacatcaaatcctttcttggtgttcaagccagtgccaactgcagtcccaccttgagcaagctgatacattcttggtaaggtacatgcaactcgatcaattccatacttcacctgtgtagcataaccactgaattcttgaccaagagtcaatggggtggcatcttgggtatgcgtacgcccaattttaatgatgtctttgaactcatcaractttgaatgaagtgacttatgcaactgctccaaacttggtataaactttgaattgaatcccgg

SEQ ID NO: 989 - DNA, 621 bp, Avena sativa
cgttcactagctccacatcaaacacaagagttgagttgggtggtatctgccctgtcctctcctttccatagcccagagttggtggaatggtaatccttcttttgtcaccaatgcgcatgccgttgacaccaatgtcccagcctttaataacctgaccaatacccagtctaaactcaaaaggctttcgaccaacagtagagtcaaaaatcgttccattcttcaacttgccaatgtacttgacagcaacctttttcccagggacagcctttttaccgtctggtttgcccagcgccaccgtctgaatgatcagaccactgccaaaagtgcgtgtttgggatgtctcctccttgctgctatctgacttcaaaacatcagtctgtgcctggttttcacttgtattgttctccttcgtttttttcttgttcttctttttcttggccccctgtttgctaggctcttcaacatcattgtcagttactgttttctcatcagcatgctgatccgtaccagcttcagaagcacttgctttcttgcttttctttttcttctgttttggctttcagaaatgtcagctgaggactcttgtgtgatgccttttcttcatcatttaccttctcattg

SEQ ID NO: 990 - DNA, 886 bp, Avena sativa
tatcagaaggtatgccatcagttcatctcccttcagtccaaagagcggcaaagtaaaatttgagtaacctcaacaaattacacccctgaatctggaaaagctaaaggtggggaggggagatctaaagtcctcttttcttatgtatatggtacacaggaaaaacattacgatctttcatgatgaacatccacacgaggtcaggtccaacagaagaaatggcaattatcaacttcaactataggaaattcatcaaaaggaggccgtcttatctgctggttgctacactattggtcctaaacctcacgtttctacaccgtttcaacttgccgatagcttcttgtgccttcccttggagaaggtccacgtaaacggaagctagcaatgccctcgggttgttgggcaacaatgcaaaaccacggctcaccatgtagctggcctgctcaagctctccctgcaccgcggcagtcatgcctaggtcaacatacacaacaccgcaggcttcctcgggcttgagagacactgaatgctgagtttcttctgaggtgagttttgtgacagcaggagtgaccgtgtcttcaccatcactgtctttctcaacaggggccttttcatgattctcaacactgtagggtaactcaatatcattgccatctcccaaataaacagtcaactgctcagcagcctcctttggcctattcagcgcgcataatgcttcagctgcatatacatggccgaggaataagtacattctcgagcattctggaagctgcatgagggacttggcggtagacaaagctttcaagggattctcaaggcacaattcaatgaacgccaggtccccgaggatggcttgtcgaattttgaggttctctttcctacagatgtc

SEQ ID NO: 991 - DNA, 555 bp, Avena sativa
tgctctgccttgacatctggtacatgagcatgatcccgcttgtcaccggcggccttgagaatgcgcggctctccgtagacgcgctgggcatctgcatgagcatcgaaggatgggcgctcatgatcttcgttggcctcaactccgctatcagtgtcagagtctccaatgagctgggtgctgggcgtccaatggcagccaagcacgctgtcgtcgtcgtcctcgccgagtcgctcctcatcggccttgtgtgcatgaccctcgtcttgatacttagagatcaattctccttcatcttctccagcgatcccgacgtccgccacgccgtatccaagattgctggactgcttgccctcaccatggtcacaaacagcctgcagccggtcatctcaggggttgctattggaggaggatggcaaggccttgttgcatacatcaacctattctgctactacgcgtttggcctccccttgggctaccttctcggctaccacttcaacttggagttgggggtctgggtggcatgcttggcggggttgcactgcagacacttatgtt

SEQ ID NO: 992 - DNA, 768 bp, Avena sativa
gacctgtatcattttgtttatgggcttttacgttatgagacagcagaatccacaagaagcacgggttcgccttgcaagtggtttgaaaatagcacaccaacagttgggtaacatccaattggtttctcagtatttaacaatacttggtacattagcacttcagctacatgacattggtcaggccagagagatcttgaagtcatcattgacattagcgaggacactatatgacattccaacacaaatctggatcttatcagtatttacagagttatatcgagaattggaagagaggggaaatgaaatggaaaactctgagtatggaagtaagaaagaaatcgatctgcagaaaagactgactgaagctcgttctcatgcttttcatcaggaactggtggagaaagtcagaatcgaaatccatccgatgcacgacctgttgcagaagcatcacgaggtgcctggctcggtggcgaacgctgacttagacatcccagaatctgtggggctgtccactccacaaccttcgtccgtcaaaaggttgattgatacaagctcagtcaggcgcagtaccaggaggagggagttgtaggttatattcttcctgactctggtcgttcagcaaaacattacagggcatgttggatagctgtagtagtgtgacaacctgactcccccatacagggcatgttggatagcaataggtccctgagttgttgtcttagattaatttttcggcgtaaagtgtcttgattattaatcattgtagct

SEQ ID NO: 993 - DNA, 776 bp, Avena sativa
ggagaagattcacgcaagagaaatggaaataagcaacatgcaagcaaaatcgaaggagactgaagaagctgaactcaaaatgctgagaaaaagcttaaagttcaaggcagcaccaatgccaagcttctccccaccgccaaaggttgagttgaaaaagattcctcccactagagctaagtcaccaaagcttggccgttcaaagaacaaatccggggtggagactgaagaaagcaccactcctccaatccggcccatccgtatgagccttgatgagaagcttccgcaaaatggtgcaaagaaagctgccccatcaaatgcggtggtgaagaaaccgcagaggaagtcgctccccaaattaccatcagaggaaactgttccacccgaggccaaacagctaaaaagcaccgacctaaacacagataatcatcaggagccagagtcgccaacaaagcagcttcaagaaaccgggttgatcaccgacaatgcccaggagccaatctgagctagagttactccggatgaccaagacctcgacgaacagtgtgtgtagcaaaggccacggtgaccaaatccttcgattttgcgatggcaggtgtgcctctggtgttatcgggtattgtgcttgataatttcgataatatgtctagtggcctgtgttttgtaaccaacacacacttgtctctggtcttcttggtgtttagcatctgtactgcttctgttcataatggtaagggatgctccaaaccgcaaatggttttctcctattttcggtgctt

SEQ ID NO: 994 - DNA, 898 bp, Avena sativa
  modified_base (109)..(109): a, c, t, g, unknown or other
  modified_base (341)..(341): a, c, t, g, unknown or other
  modified_base (351)..(351): a, c, t, g, unknown or other
aagtttcagtttgagtgcggcatgtactcggaggctgctgatttcctgtcccagtaccgtgctctgtgcacggacagcgagagaagcttgagcgctctgtggggaaagntggcagcagagatactgatgcagaattgggatgtcgcgcaggaggagcttaatcggttgaaggagattatcgactcaaacaagttctcctcgccgatcagtcagctccacagcaggatatggctgatgcactggagcctcttcatcttcttcaaccatgagaatgggaagaatgggatcatcgatctcttcttccaggaaaggtacctgaatgctatccagacaaacgcccncatcctctgnggtaccttgctgcagcagttgttgtgaacaagaggagaaggaacatgcttaaagagttgatcaaagtcatccagcaggagcagcagagctacaaggatcccataattgaattgttggaatgcctgtatgtgaagtatgattttgatggtgcgcaacagaaactcatcgagtgtgagcaggttattctgaatgatcctttcctgggaaagcgcattgaggaggggaatttcatccgcgttcctctgagagatgagttcctcgaaaatgctcgcctgttcatcttcgagaactactgccgtatacatcggtgcatcgatattggcatgcttgcggagaagatgaacacgacctatgatgaagctgaaccttggataatgaacttgatcaagagttcgcaactggatgccaagatcgattcggtgaccgggactctcgtcatggcgaccaaccatgttaatgtccatgagaagatcatcgagagcatgaagaaccttaacgcgaggacttacatgctagcaaaagagcctcgtggatccagtcacgcagc

SEQ ID NO: 995 - DNA, 979 bp, Avena sativa
attaggtacttcaatgtgattggatcagacccggagggactcctcggggaagctccaaggccagagttgcgcgagcacggaaggatttctggtgcttgtttcgatgcagcgtcaggaaccattccagggctgaaggtactctacatacatgctcattataatagcatgctttagttttgatgttacaaagtatgaaaataatcacggtatatcttccccatttaggttcgaggaacggactaccctactgctgatggaacttgtattagggactacatagatgtcacagatctcgtcgatgctcatgtcaaagctcttggtaaagctgagcctagcaaagttggaatctacaatgttggcacggggcaaggtaggtcagtaaaggagtttgtagaagcgtgcaaggcggcgacaggagctaccatcaaggtcgaataccttacccggagaccaggagactatgctgaagtttacagcaacccgtccaagatccgcgacgagctgaactggacagcccaacgcacggatcttcgcgaaagcctcgcgacggcatggaaatggcagaagacacacccggggggatacggatcggcctgattactgctcagtaggttcagatttcagcgaagttgtccaacacaggatccatgtgcagtcatattatatagccttgagagaactgatcctaccttcacccataggcatataggaggcaagccacggcccacacaagagtagtgatttattttgcagcacctgaaagaacaagaagatatactgacagtacggcctccttatcccttgcttacgaatcatatataggttttcttttcgtcgttgtcatcgacatttcattggttttgctcgtgtcactggttgaagcataatgtgtaaacacaaacacagagttgtgttgtactactagacaactactagatcaatcttatgtactgtatgagctatgattgatatgaacttt

SEQ ID NO: 996 - DNA, 395 bp, Avena sativa
cccggggatgctattcagcgatgagtttgtctcacggctggagtctttgactagcaagttctcttccaaagctgcaggttctacacggcatgaagctgccctgagattgttagcaacaacccagttaattaatcaagcagtaggtgatgctctaagtggaatgcttctggtggaggctattttacaacataagggctggtcattacagaattggtctgacctatatactgatctgccgagtaaacaacttaaggttaaagttaaagatcgtacttgtattgttacaactgatgcggaacgaaaagtttttcaaccatctggcctgcaagaattgatagatagggaagtcggtaattactctcaagggcgatgttttgtacggccatcaggaaccg

SEQ ID NO: 997 - DNA, 837 bp, Avena sativa
gttacagacatggctgcaaagaaccacaggttgctagtgttcacttctgatgcttcaaaggaggctagtgaaggcatagcttaccaatggagctacttgctggagaatgagtctggagatccgggtattgagtctggctcttgtccaaacagaaaagaatcgcaaccactaaacgcaagatctgcgtctctgtttctgcaaaattacttcccaacaattcctgtccagagtgaagcatgcaaagagaattctgttggactaccacagatggtgcaaacatgttatgctgcagctggaaatagaatcccaaactacatagctttgaatttttacatgagaagcgatggtggtggtgcttttgatgttcaagacagaatcaatggcctcacgctatgtggttgcaactccattgcggcttgccaggctggggcaccggctggcgcgtgcaagagcaccggagcaccgagttcaaatcgaaccaccacatcctcttctacaactggaaacgtgatttcaggaaccatagagttcaaatcgcctgcttcgaggaccagcagcacttccacctggagggaccttgttgtttcgctaggtctggtgttgattcttaagatgttttgatttttcaggttttatttactgttcatgtcttggtttgtcggcttcacgtttcttcttccgtattggcatatatatgttggcacgtccttgtgtgatgggaggactagttagtagcttgctagctttattattatagggtatattcagagaaatagataatgagattgggctcggtgtggacagaacaaacagtgtgcagtactacgtatcaatctt

SEQ ID NO: 998 - DNA, 539 bp, Avena sativa
gctgcgcaatctgccaagtagaccaagaaccattcgaaggtttgatggaggagaacggaggcagccactgctcatctccatatgcgccttggggaggtccttatctgtgcctggagtgtcgaaaaaagaaggacgcgatggaaggcaaaagagctagctgctcgacagcctgtaggtgaaaagaggcatggctcaagttgagtatgcttctcggtgtaaaaactaaggcgaggaagataagttgttgatgatttaattattattgtttgctgaacctaactaaggagtactacattctcagcctggtacgaattgtatccagctgctaaccagcttgttgcctacgcggagtcctaatagcggaagttatttatgttgttgagggaactatgatgtggagattgtgccattctgtatggacaaatgatctgcctatttcttgtgtgtgttctttgagaaagctgagtgaatgaggatcaattcatttgtactatagtagagtattaaccttgcaatgcattttttgctggaaaaaaaaa

SEQ ID NO: 999 - DNA, 889 bp, Avena sativa
agcctgctgtcagcatccaacgatgcggacgaagccgccaagctgcggtctgctcttcagacctggggatctccagcttccaaccatggaattgaggctctgatggattctgtgatgactacatcaagggatttttcgcctaccgatcgaagagaagagaaagtacagcaacctaatagatgggaaacatttccagatagaagggtatggaaatgaccaggtgaaaactcaagatcagagactggactggtccgatcggctgcatcttaaagttgagccagaggacgagagaaaccttgcgcattggcctatacatccagaatctttcagggatgttctacacgagtacacattgaagagcaagagaatcaaagacgacatccttcgggcaatggccaatctactggagattgatgaaaattgcctcgttaaccagttcagcgacaaggctctcacttacgcgagattcaataactatcctccatgtccaagacctgatcttgtactgggtatcaagcctcactctgatgtctttgctcttactgtccttctcatggataaagatgtcgctggactgcaagtccttcgagatggaacgtggtacagcgtcccagctgtgtctaactacactttgatgatcaacgttggtgttacaatggagataatgaccaacggggtcttcagagggccagtgcacagggttgtgacaaatgctgagaaagagaggctatcagtggccgtgttctatggtatggatcctgagaaagagattggaccaatagctgatatgttgaatgaggagcagccggcgcgatacaggaaaatgaagaacaaggacttcctagtcgcgcactatgaatatttcactcgaggcgagagagttgtcgat

SEQ ID NO: 1000 - DNA, 908 bp, Avena sativa
atgactttctgcggaaaactggctaccgcccattcccaatcgacctagtccgcgaccttggggagcaacttttgaaatcaattgcatttatgcatggcctgcagttaattcatacagatctaaaaccaagagaacatcctccttgtttcttcagatcatgctcagttacctgaaagcaaggatggatcgttttcaaggaacctgccaaaatcaagtgccatcaagttaatcgactttggtagcacagcatatgatcaccaagactgtagctacattgtctccactaggcactaccgtgctccagaggttattttggggcatcgttggagctacccatgtgatatatggagcattggttgtatactcgttgagctttgctcgggcgagacattattccagactcacgagaacttggaacacttggcgatgatggagagggttctaggtcctctcccacggcacatgctggaaagagccgaccagcatgcggagaagtacatcagaagaggaaggttgaactggccagaaggggcaacaacaagggagagcatcagagctgtcctcaagctgcctcgcctccagaacctagtgatgcagcatgtggatcactctgccggggacttgatcgggctgctgcagggcctcctagcatacgagccttcggctaggttaaccgcacaggaagccttgaaccaccgcttcttcacgaggtgccgtgaaaggcgttcgctatgaccaatgatgttctatatcgcgtctgacccaaatactaacggaagttgcggagcgttctgttgaaaccttaaagagttgcagtaaggaaatacaagatcgagagttatgaaatctccctagatctaaaacagggacaagtagcaatagttaaggttagaaggcttggtgtgttg

SEQ ID NO: 1001 - DNA, 438 bp, Avena sativa
taaccacaaccaatacatttgcaatctgacgggtagaaataattggagtgatgtggctacaccatgtttcagcttgcaaacattaaatgctttttagttggggatgaactttatagatattatactcctagattgcatgctctcttttatttcctgcagtacacacatatatttattaatgcggtacataagattttatttactgcagtatacagaggagtactatatgttgttaagcgaccgggatcctctctggtagcttctcctcgatcgtctcgaagttgaagttgtaactgttgatgccggtgtacatgccatcatccttggggttctcctccaccttcccgtcaatgtggacgtcccgctgccagtaggtgaaggggacatccacggtgctcctggttgcgatcggccacctgacggtgaccttggtcctgg

SEQ ID NO: 1002 - DNA, 491 bp, Avena sativa
ttttttacaatttagttatctacttccaggaaaaaaaagatctatgtacaattacatggttaagaatcatacaaaattacagatctcgtaggatgtgtgtagtgtgtacaaagttgcaaccttgcttatgacgaagtaggaagtactgcaaaccattgcttaatttctagacatcgcattcacaacagtgttgggccttaagccctgaatcatcctcttgggggtgatgaggtggcttcaaaggtgaagaaacttgtctggaattttcacttggaaatgactctcataaaccggctaacagaactaaatgcggccatgacattagtcatcatcgaaggttcctcttcagattgctcactggcgccaccaccgccaaatataatctcaatatctgttgcatcagggcgacttgaagattctctcgcgagcaaataccgattgggtctatttggatcatcataaaatacttaccacttttcaggatagcatct

SEQ ID NO: 1003 - DNA, 640 bp, Avena sativa
ccgatcttgccgagccttggtttgttcccttgagctgaagcattgacaattcttgcaatttttacagctgtaggggatttgaacgactcccaaaaatgatccagtgctttaggcttatgcaaatctgaagagaagaatgattcaccattggagctcgtggttgcatcatcaggtgttgttctcgtgacctcaggaatgctctcttcagcctcacgctctgggctctctggttgtgttttatcaccgtcttcaagagtgctacctggactactgttcatatgcctattagctgagtaaggcccagacttcccggatgattgatttgttacctcttctgtgaaacctactgcagtgttctccgaagccactacaatgacgtcaggcctctttccactgtacttccttaccattttcctcaagatttcagataccatccgctccatgtgactaagtgggcaattcaaaggacagcttgataatgcagcatgcgcagccttgtaaagtccatcgagtagtctcccattatcaagccatagacatcgtgttgttattttaaatttccctttcaagcctgactgtggtgaagcgagttctttctgaggtcggaagatctccatgctgacaaaatatgccatcagac

SEQ ID NO: 1004 - DNA, 589 bp, Avena sativa
catgtccctccaaagtggcgaggaaggctacagatctcgaggaacgatatcactctccagtgaccaagttcaggccgaatggatcgaacagtatgaaccaggtgtatacataacactgacaacacttggtgatgggacccgggatcttaagagggtacgcttcagccgccgacggttcggcgagcatcaggcggagaaatggtggaacgagaatcacgacaaggtctacgagcggtacgacgtgaggagctccgagcgagtgtcgtcggccgcgttgacccggtcagcccgatgacccgaggaccgacctgctgctgccgcctcggcgttcatccgggactgcgaaacgaggccccagaaggagccatagcacgagaggtcaggagatccagttttgctcctgtaatgtcgataatcggattcgtccattcgggcgggaatacatgagatctgtagccctgtcctgatgtaatgtaaatataggaactgtgagacctagtctgggagagagggggctgttcgtgggttcagagcctgagctcctcttccccctgaattctgtagcaaattcaaaggtgtgaaattcaca

SEQ ID NO: 1005 - DNA, 736 bp, Avena sativa
cagacgtcgtcttggtcgtgccaggccttgcactgacaggcaattgtcccggcaagagatgcttaggaaagaatctgcaggtgagataaagaaacttaggacaacagttggatgtatgttctttcttatgttgtaagctgtttggcacaagtcaaatgctagcactggatcatcttaacatggttcttgattttattttacacgcagttaggttggtatatatgggccatggaaacagaagaacgtgttgagataaagaaataaagatctactacttgagcgatgacaaaagacccataataatttctgatgatgaactgaggaaacaaataggaaaatatacattgaattgtgtcatgactgacccaagatttcctgataattccaactgtaaaattcattagggacctcatgtacgtcatactccaacacttatttctgttcatatatatatacatctatgttcgataaatccctctttattcttatgtcgatgtttcaggtatttgtgtccgacagtttcccgtaaatgacataatgtagccgtggagggataccaggaacaaattgcagatgtatgtatattaaagagtaactaggtgttatccggagtgtcgtgcagttctgaaggatgctaacaggataaaaaagctacatcagcagtcaccatgaaaaaaatgtaacagtgcacaattactactttactgaacttccacgttttgttgtaattgaccta

SEQ ID NO: 1006 - DNA, 326 bp, Avena sativa
tttacgcttttgccctcctttagtttttggcccattactacagcctatggtgaatacgagcagcaaattcttaatctatgttatgaaaggaggtcgtgatgcgatgaataacaagctgtggcacatggtcgacgtgcgcgacgtggccgacgccttgctgctcgtgtacgagaaggcgggatcgtccggtaggtacatctgcgcgccgaataacatctgcacgaaaagatttggtggacctgctgagaagatgtttccaaaagtacagctacgtgagcaacatcatcgacgtggagcgcaaaagcgccgataaacgtcgcagaagc

SEQ ID NO: 1007 - DNA, 911 bp, Avena sativa
gaatgcagctgctggttcgccgcttgagaacttattggtgaccaagagcacagagatgactgtccctgagttgtgcatcgtggaggagatcaatgcagaattcaaggagtctgttctttcacgagttggtttgaaaggtacaatctttctgcggacattaccaccaaagaaggcagctgggagggagacagagttctcattccgtcttgagggtacttctggaatgaagagggctgccttgcagagtactgtgttgagtaacctcgagaatggcctgttccatgtgaagacaccatcgaaggaggagcccatccccatcatgaaatacagcttccttcccaagcattcaccactccctttgaggattcgccttgtaaagcgccatagtggaacattgctctcactgatgatacactatgtgtcgaacccaatgttgccgcagccactgagcaatgttacatttactgttaagcttcctgtggatccgactctgcttactgtttctcccaaggctgtgttgaaccgggcagagagggagctcaggtggcacatctcagacattcctctgaaaggtcctgctggacggttgagagcgaggatgcctgtggatcaagactccaaggatggtgaactagaggttgttggaatggtgaagtttgcttaccaagggccattcacattgtccggcatcaaactctgcccagccatcaacagcacttcccaatttaacgaggttggccacaccttctccagtgggagttaccgttgcatctaagttgctacatctttgtattgtagctgtgacttcactccctttgcattttgcttctacaacagggtgtgaaattcatattgtacgtagtgaagcttattcgttttgtgaggctggaatttaaactttgttttcgagt

SEQ ID NO: 1008 - DNA, 718 bp, Avena sativa
cgagtctctggatttctcttcagcctccacgacgccaagaaagactgttgctccacaggggaagcaaagcagaggaagagcacatcaaaacctagcgagcgaggaggagggagagatggcgtgcttgcacgaccacgagtgcgaggatcacaactgcgccgccgattggtcgctctacaaccacgtcgacatccccaaggtggtggctctgaacgaatctgtggctggaagcgtcgaatcggtcttcaagccgtgggatcagcgcctcgagacttctgggggttttctggagagtaatgagggtgaccctgagttgcttgtttttattccatttacatcagatgttaagattaagagcattgctgttgtcggtggtgctgacgggacaagcccttcaagaatgagagcgtttatcaatagagaaggtattgacttttctgatgctcagaacatgcagcctgtgcaggaatgggacctggcagagaatttgcggggagttctcgagtaccaaacaagatattcaaggttccaaggtgtggctaacctaacactgcatttccctgacaactttggtggtgatacaactaagatatattacatcgggttgcgtggtgaagccactcagaacaaaagggatgttgtggccacagttgtgtatgaagtgatgcccaatccttctgatcacaaacaagtctgagagtggaggtggtttctcaca

SEQ ID NO: 1009 - DNA, 770 bp, Avena sativa
agttattatcttcaatgtcacatgaacaaatatgccttttctttctgccttgagtcaagatacccatgtccttccagattttcatggaaatcggtcccctgttgctgatccaaaatccaaaggagtgatttgtggcttgacacttgatacaagtgaaaagcatttagcgcttctgtacctagcaacgattcagggtattgcgtatggaactcgtcatattgtggaacattgcaatgctcatggacacaagatcgacactcttcttgcctgtggtggacttgcaaagaattccttgtatatccaggaacatgcagatatcatcggatgtccaataatacttcctagagagaacgagtcggtgcttttaggggcttctattctgggtgctgttgctgcgaagaagttttctggcgttcgcgatgcaatgaagtcactgaatgcagcaggaaaggttgtgcatccgtcttcagatcctagggtgaagaaataccacgatgccaaatatcagatattcagatccctgtacgaacaacagctctctcatcgctcagccatggcacaagcattgcagtagggacaagtaagaaataaccattgggctgggtacttcactcctggttctgaatacccctggatttgtcgacatgtttccttggggttaattatgtgtaataagcatccattcagtgatggaagcagtgatacaatgcctagtcatgaaagtagagcaaaacgatcatttgtcgtggaatggccaatatataccacaa

SEQ ID NO: 1010 - DNA, 336 bp, Avena sativa
aacaggtgaagccgaaaggatcgatgtcagccatgctgggccaccgaagccatatgcaggaaacaaattacccgctactgttgatggccgcaacgggcactggtagactgctacagcagtaccaggaaatccttgtcatggcatcaggaagagttactcatctaaagtacacgttcaaacatgacattctgtacagagttgtattatttgtcaggttagcatccccttcctaaagactggaactgcacacaaagtccttgagataggaacctgcttctgcgtttcttgatagctcaacttctgaatgagctggtacagagattacctgcatctggg

SEQ ID NO: 1011 - DNA, 711 bp, Avena sativa
gtaatctgaaatacaagctagaaatcactcataggtattgtctcattcaacaatcctatagttttgtccaaaactttgattgttgcggtttctgaagttctcttcaacttattagggcaagaagtatacagatctaaaaatgccaaagtgctaaaaaggagacaaccgtttcatgttgtacttcccttgttatctctggtcgggataaatggagaacaaaaagtaatcccaggcatgtaactaaaactggtgcctgagaaatgggtgtttcatctttcagaatcgtcgcactcgatgatcttgacaacagaagaatcaccaatcttttcgaaaattatcaccctgtcatacggcttaattatgccgactgaccgtccatagtttagtgcaagttttatcccatattcttccttggtgagaccaccagtttcggcctcatcagtactccccatcaaagggtagacacctctcacagaaaaacattgccttgcctgcgtcgttccatacgaacgccactttgatggatcagagccctcacgtggaaacacaactgccaaaactggcattgggggcctgtacttagcaattaatctagcagctctccccgagaaagtgaacacaacaattgccgcagctttactttcatggcagaacgaaccgctgatgatgctacagattcttcattgggccatgggttcacctacatgcctc

SEQ ID NO: 1012 - DNA, 811 bp, Avena sativa
gaataacacttatcaaagaactgataaatcagtatggcctgatcactgtgcaatcttatatgaatcacgtccagaagaatgctgaggtagctgtgagagagatgctcaaggtagtcgcatctagagttgaaaaggagacgggttcttgtattattgaagatgaagattatatggatgatggctctgtgctccatttgaagctgacccttgattctcttcgaggtgaagccacctttgattttgagggcaccagtcctgaggtgtatggtaactggaatgctcctgaagcggtaacagcagctgctgtcatatactgcctgcggtgcttggtggatgtagatatacccttaaatcaaggttgcctagctcctgtgaagatcatcattcctgaaggctcatttctttcaccaagtgataaggctgcagtggtcggcggaaatgtgttaacctctcagagagttacagatgttgtcctaatggcgttccaagcctgtgcctgctctcagggctgcatgaataatttgacatttggagatgacacatttggctactacgagaccatcggaggtggctgtggagccgggcccagctggggtggtacaagtggtgttcagtgccacatgacgaacacaaggatgactgacccggagatctttgagcagcggtaccctgttcttttgcacaggtttagcatcagagagaacagcggaggttctggcgtccacagaggtggtgacggccttgtaagggagattgagttccgccggcctgtcgttgtgagcattctttccgagagacgggtgcacgctcc

SEQ ID NO: 1013 - DNA, 791 bp, Avena sativa
ggacggcggcgtgggcacgctccgggaggtgcgcgtggtgtcgggcctcccggccgcgtcgagccgggagcggctggagatcctggacgaggagcggcacgtgctgagcttccgcgtggtgggcggcgagcaccggctccgcaactaccggtccgtgacgaccgtgcacccgggggaggcggagacggggacggtggtggtggagtcgtacgtggtggacgtgccccccgggaacacccccgacgacacccgcgtcttcgtggacaccatcgtccggtgcaacctccagtccctcgcccgcaccgccgagaagctcgccggccggcaggcggcgtgctcgcagtgatcggtcatcgtcaacagccatctcctcggtcaaacaaacacaactctcctctttcaactaggggcgttttggtaaaatgtcgttggccggttaattaatccgtggcggtgggtgtgcgtgcgcgtggtttctccttgttttgttttgttttctgtggcgtgagggcgaggggtcggtgcggtttcacacctggcccctcgccgttgctccttatcgcgagacacgcccccttttacttctactagtagtactcctagctagctctagccttggtccgttgttcccctttgttatttgtccatgctaagattgacaggaggaaatgagtacgcaacaactagtgctagcttcctgataccaatctccctgaaaacagatctctgtactgtataatattctgtctcgcatgtgtgaattgacatgtcattttctaccgtaacgaaaa

SEQ ID NO: 1014 - DNA, 622 bp, Avena sativa
gaagtgtggattatctgctgctgttgtgttttaaatttcagtagcatacatctgaagagtcaggccatgggctgttataaatttcagtagctaagaacttgacgtcgcccttttcttggcccagtttattgaattattaccaggccttttattcgtgcttacagcccattgtgatgttccagggtcataatatattataccaaagatctgggtcgttttcacttgccattcttctctctggtcgatggcgattcgacacatccaatcaacctagatccatctacggcctacccctcggcaaggagctgatcctccttcgttctgaatgctaccgagatccatcaacttcagttgggttcagattggaactcctattcaacttgacctttcgtcaggatccttttggtgctgttacatggagattctttaaacaatgccatgtgcaaatcacgttaaagttgttagtcagctggctgttcttatgcaacatgtaatccgcgttttcagatgtgctgctctctcatactatcttctactaacgtattataaagtattaaagtacgattagattgaacgcttctttatctgaaatctacttgaatactttataatacgttagtag

SEQ ID NO: 1015 - DNA, 714 bp, Avena sativa
ggccttggcttgatgtccgccgtcgctcttatggtcgcacagtcttatcattaacacggtcgctggttgcatctgctgcaagaggcatccggtcccctcggacactaactggagcgtggctctcatctcattcatcgtgtcatgggtcactttcataatcgcgttccttctgctgctgaccggagccgcactgaacggccaaagaggtcaggagaacatgtacttcggcagcttctgctacgtcgtgaagccaggggtcttctcaggaggagcggtgctctcccttgccagcgtggccctggcgatagtgtactacgtcgcactgacatcgtcgaaagggccaccagcctgggggccgcagcagaaccaaggcatcgccatgggccaacccgtgatcccgcagcagagcagcgaaccagtgttcgtccacgaggacacctacaaccggcagcagttcccatgatcaaaaccacatctaagccgtttcgagagccgctatgttagcaagtttggtttgtataggcttgcaggttagattaatagcagcagtttgccgctgctctttagctaggttcagtcttttttaactcttttcttcttgccatggatcttatcgttgctgagagattgcttgcgaggcatgcctgttccatcaccatggatgtttgattttaaatgaatgaactgggtaatgttgaagttgaaaaaacaaaa

SEQ ID NO: 1016 - DNA, 466 bp, Avena sativa
tagatgaactgctacaagcaagcgtggcaaaacaagcagtaaaacttctgaaaacaatcattggacggtagagagccattcatacaactgttgtacttgctcatgctaacaactactatttctgttcgggtattgtcacgacgggacaaaaaaatacagtctataatttaactgaacctaatcgcatggagctgagataacaagcaaaactagtccagctctaagtatttctagcagcttccaaatcttcaggagcaaattcacgtatatcacgctttgaagggaacaaacgcagctcccagctgtgcctcgcacagggtgtaggcctcggaactcagcttcttctgaaacttctccttcagattgagcttcgtcaccgtctgcagagcctgcgtgcaaaatctccgcacttcttggcgacgcgacttgttcccaggcatctttgtaaggatctcctgcatcccgg

SEQ ID NO: 1017 - DNA, 773 bp, Avena sativa
cacaaaaggcattaggggctacattagctgctggtctagctgatactcaccaggatgttcatgaccgagcacttttctactacaggcttttacaatatgatcctgctgtagccgaacgtgttgtaaatcctcccaagcaagctgtctccgtatttgcagatacacagagcagtgaaatcaaagatcggatatttgatgaatttaacagcctatcagttgtatatcagaagccctcttacatgtttaccgacaaggaacatcgtggaacatttgagtactcagaagatcttacaaatttaactgttggggcagaggctccagaaactgtcatttctgcccaaagatatcaagaaaatgataatgatcttctgctaagtacttcagataaagaggataatggtacaaggagcagcaatggttctttcacctctacatacaatgctccttctgacttgctaagtttgcaaacaccagctgaaactgcaccaataaaccctggtggttcgacatatccatcacaaacaaatttcagtcttgatgaccttcttggactcggggttcctgattcctcagcacctccaccaccccctgcactaaccctcaactcaaagcctgtgctagatcctgggacgtttcagaagaagtggagccaactggcattatccttttctcaggaatgctctttgagtccacaaggagcagcatctttaatgaatccccaatcgctcattcgtcatatgcaaaacactacattcagtgcattgcttcaggcg

SEQ ID NO: 1018 - DNA, 679 bp, Avena sativa
cgatgcagtcctgtacccaaccagagcaagggttccattttcttggaagtgatactttagttgattctcgcaattcatgtgtcgtggcaccaaatgcttatacccttgacttgcaatgctggctctagtgatacttctatggttcaagatctttctacttgtcatgcccgcaccataagctttgtcgataaccttttaccttcagaggaggaggattcttctctgcgtatttttcttcctagtcaaccatctagtgttccccttcaggaagaacggaatgagcacgataacatgtcagatggggtccagcctgatgattggatatctcttagacttgcagcaggtggaggtggtaatgaacagtttgagccagcatgtacgtcgaacccacagccacaaagtccaatgaaagagagaaggatggaaccattgaatgatgctgcagattcacttctcagcttgaatgatggcaatacagtggctgcgagtatattttctcatccacggcagccacggtctgttaggcctcgactacggttatcaattcacggtgattctgagtagttatgttttttaatgatgacaatacaagggctgcacatatacgttggatagctgtcatgtacttgtggccgatgtaaagagaaaccaaatgaatgtttctagtttgacctgctgt

SEQ ID NO: 1019 - DNA, 966 bp, Avena sativa
  modified_base (957)..(957): a, c, t, g, unknown or other
ggattgcctcaaccgagacgatgatgaagatgagctactgggcttgcttggaaatcaaactcctctacgagactgccgtgccttctttgatattggggatatcacctgcaaggagacgctggacctcgaggaatctcgtgaatcaaagcggcggcgcgtgttggagtacccttctgagtccagtcaaccagaagttggtgatcacgaaatgggttctaactttgccacatctgagataacagagaattcattgctctgcactgatgaaccacagagcttaaattgggatatgcagcacaatgcaaataattatgataagataagccccttgtcaaatggaacaccctacgagcaatcagatagtccgttggaaacttactctgacggaaatactatgtacttcacgcctgaacaaatgccctctacccaggagagtgttacatatattgattgtgagagtgatgtgccaggaacaagtgagattgtaccagtgacagaaaacctcataatgcgggaggctaggaaactttctacgctcaaagtatctaaaggggggagttcgctgatcaaggtgaagcaaaatataactacaactgtagcatatccttttaccattatcaaaccatcttgggaggaaggagatgtcactctgaaggacataaatcagcgaatccatgctccgccaaagccgcctccagaaatcctgggaacttcagctttctctggtaagccagtcattggcaagacaaggatcagaacagaggggggcaaaggcagcatcacaatactaagaacaaagggctgaggacggcacaaaatatttaacagccattccctcgattgctttcagaatttggtcatcttgtgcaggcctctttagcttttcgattttctttgtcacacttctgtgccaggtgtttcgaattactgtagatggctaactcttttctccaaagntttagcact

SEQ ID NO: 1020 - DNA, 870 bp, Avena sativa
acatcagccttgatacgttccttatgctgggactaccactacatgtgaatccctttacgatggggggttccgtgtgttacaatggctggttcagtccatgctcataatgttggtgttagcctgcttaccaaagttgggttgggtaggctggttgccaaaacggaggatgaatatgttagcttagcattgggtttggcatcagatgtcagtgccttgcaagaactgagaatgagcctccgagagctgatgataaaatcgccagtctgcgatggagagagcttcacacgtggcctggaatctgcatacagaaccatgtggcgcaggtactgtgatggagattcgccagctctcaggcgcctagaactgttggcggcggatcagccaggctccaacaaggaaggcttggacaagacggctgggaagcttggagataaccaggccctgataaacgttaatgccattcctgaggaaggtgagctgccccgaatagcggtgaatgctgtgagttcgcctggagataaccaggcccttgtagtcacggcgcagcaagataagcagccccaaataacggtgaacggtgtgagttcacctcattccacctcggggggatgcaaagcgaacgggcatagcagccgatgaccaatgggaggcaggcaatgctccattgatgcaggcacacactgatatagctcgagatgtgccattggtgtgcgtgatgtcagcatgaacttgctgttggggattgatactagtttccctccctgtcttcgacatcaggaacagataacagcacgtaaaactctggtgacccatgacttgtagcaggtgtaatgtaactcagcaggggatgcttatagagtctgagttgtt

SEQ ID NO: 1021 - DNA, 771 bp, Avena sativa
gaaatggatggatttgaagccactaggaggataagagtgatggaaagagatctaaatgagcgaatagagaaaggggaaatgccaccagaatgtgctaatattcgtacgtggcgaactccgatcttggccatgacagcagatgttattcaggcaacatatgagcagtgcctgaaatgtgaaatggatggctatgtttccaagccatttgaaggggagcagttgtacagagaagtaactcggtttttccaaaatcatgaccaagtacaatagttaggtctatatggattgtaaattagtggaggatgtcgccacacagctcgcgccatggcacagagaagttggtcgaagctgcagtgctcccaagagtgtgagcttagaaacctggagaaggaaccacccaggttctgtttcttggtacaccatctcaccaagaggcagaaagagtaaaactcttgaaaatcgatacgcatgtgcagtattttattcagcaacttcttggaggcagttctcgtgaagaggaggccaaccgcacctcacggactgcggatttcagttcgacagacgtcctctgcctttgtaatgtaaatgtgtagggagagaaaattttccttcctttttcttctccgcgaattttcatcggtgtacatactaggtgttggtggtttgtgcaggaatttcttttgtgcgcttgaatgtgtatttttgcgcagtgtgtcccaagctgtaaatcacacattcaaagctgaagcctttctttgtctcttccgtcaa

SEQ ID NO: 1022 - DNA, 679 bp, Avena sativa
caggacaaacctcaatgagaaggtagcagcagttcagggagagaatgaagtgaaggaagggaaccaacctgaagcatcttttggcacaattatgcatagtccacttagcataatgaagctaaggacggcagtggcacaagagatcgaggccgacagtgtgccatggtgccttaccataaggaagattaggaccaaccccaatgagaaggtggctgtggcacaagagaacgaagtgaaggaaggcgagaaatcgtcggtgccactggacaagctcagcctaaggaagcttagaatgaagctcagggagacgctgaatgcccataagaacgtggaaccaaaaagggtgcccctcggcaggctggacgagaacgcgtgttgattcgacaccaacgagcaaacagcagatcatatatctctgcaccagacttaaccaggaggaacttgctagcttcctagctctgaactccagcgtgacagactcgcaggttgtgaaaccatggtttctccaaccccttatctaacttgtatgtgtgtgtgtgtgttcttgtgttactttgcattgcctgcagaccatgagatttgagtgtattttttagtcacttctcatcgtagtgagttgtgagtggtttgttggtgttctgaacttgtgacagttgaatgttatagcagatttgacctt

SEQ ID NO: 1023 - DNA, 524 bp, Avena sativa
ttttttttgtctataacctgattcttttattatttccttgggcactgatggacaaatatgtgcatcactgtttattgccagaattttacatattacagtaggaacatattgtgtaggaaaaaacatcacaatttctttagcttcttagccacttaactggtaaagaattcctgagctttttcccatacaagatgcggagcaagggccaagatgttactacagcaatataagcaagccaccagagggacctcccctgggatcgaatgagccggttcatagatttcttcaccggagcaatggcatcttgaattttatccgtggagagctcttctcgctgctcttgtgaccctattcggctttgggcatgtgttacattgtcttctgagctgcttgtattctcaccgtgacactcgccctgtaacactttggtgatcctgttctgttgtacagcgatggtgtcatcactgtgttccatttcactctcaatctggttagccaaggagtcatcctcatttgttacagca

SEQ ID NO: 1024 - DNA, 905 bp, Avena sativa
ggcaagtggcaaaccctaagcagggggaacttatttgtgtttttggacgaactacagtgtacacagttgtttattcatgatctataactgatacagtacatgtgaagggagtggagaagaaattaggtctagcaactgaaacaccacagaacatgcccagccggccaggtaatctttgctgaactgtctggaactacttccctaacagtgcctctataaactccaaagaactttgcttcactggaagttttggatcaggtactggaacgttggaaggatcaagcgactgcactctgctgttctaggacttgtgtccactcagccggccaccagtctggtttaatcgccttgaccctcacatccctgttttcgctgatggcaagggatgagttttgcttcagtgcttcttcgagtcgcaacaggcccattccatggctgccgagagcggtgcttactgtaccgactttcttaccggaaaccacatccacgacatcagagcctggagcaacagcttgctcaagttctttgtcgttttcatctacaaacttcaacggtagaaggcgctttctaatggtaccgcggtggtgcgtccgtgcgataagctcctggccaatatagcagcccttttcaaatgaaatagcattcaggcctgcaaagttgtactcgagtggaattgcttcaccttttggtatctcagttgagccctctgcaacaccgttctctatccgccaaagttgataatggcgttcatctgcttctttgtccgactcaacaagtggtggtattgtatcagctggaaagattcctctgtagccaagaatatcaagccggggatctttgagccactgccaaccatgaccgttcccctgtgcagatgactcggcagcatggtcagtacatcccgg

SEQ ID NO: 1025 - DNA, 860 bp, Avena sativa
ccggacatcggccctgtcctcgaagactgcgaggccgcgttcgcctccttccgcgccgactacccgccgccgctgccatgcttcctgtacggggagtccctcggcggcgccatcgcgctactcctgcacctgagggacaaggggcggtggcgcgacggcgcggtgctgaacggcgccatgtgcggcgtgagcccccggttcatgccgccgtggccgctggagcacctcctgtgggcggcggcggctgtggccccgacgtggcacgtggccttcaccaggggaaacatccccgggcggtcgttcaaggtggagtggaagcgcgcgctggcgctggcgagcccgcgccgcaccactgccccgccccgcgccgccacggcgttggagctgctccggatgtgccgggagctgcaggcgcggttcgaggaggtggagctgccgctgctggtggtgcacggcggcgaggacacggtgtgtgacccggcgtgcgcggaggagctgcaccgccgagcggggagcaaggacaagacgctgcacatgtaccccgggatgtggcaccagataatcggcgagccggaggagaacgtggagaaggtgttcggcgacgtcgtcgactggctcaaggctcgcgcctccgcggcggccggcggtatcgacgagtcgcagtagttcggtcacgcgtcccgcgcgggcgtgtcaggtagtacaagtcgggtgcgtgtgcgcgtcatgttcggagggatcatgccatcatggggatggcgtgatggtgttctgtcggggtgtgtgtgtggtccgtgtcagatttcatgtagtacgggcataataataagaaagaacttgttgacttgtttcatgataag

SEQ ID NO: 1026 - DNA, 787 bp, Avena sativa
gcaactgcaagaaatcataacaagccgtcttaagggtatcgatgcttttgaagatcaagctattgagtttgcttctagaaaggtagctgctatgtctggcgatgctaggcgggccttagaaatttgtagacgcgcagcagagtttgcagactaccgtgttaaacaactacaacaagttgggcagactccatcttctgcgaatagaggaaatggtgtttgcatgggtgatatagaagacgcgattcaagaagtctttcaggcaccacatattcaagtaatgaagaactgcccaaaatttggtaaaattatattggctgctatggttcacgaattatacagaagtggcctaggtgaagtattatttgacaagctagcaacgactgttttctcttggtgccatgtcaatggagaactattgcctggatatgacactctcctgaaaatctgttgcaagcttggtgagagcaagatcgttctctgtgaggaaggaactaagcataagttgcagaagctgcagctcaactacccaagcgacgatgtgacctttgccctcaaggagtccccagatcttccttggctgtccaagtacctgtaaatctcatacctatagtggccagatttcccatccttgcatggaatttcttgttctcttgggagcaacatccctgtctatgtctacaaaacacaaaatcccgtggttgacctgtggagccaattgctgcaccgacaatatgcatccctgtcgccatctaagttaagatgctctgccgcatgctgcaacaaatgt

SEQ ID NO: 1027 - DNA, 850 bp, Avena sativa
gcagatcttgctgagatacatgggcgctgagctcttcttaactgatccagcactcgggtttccgggaatatgggacaaggtcgaacagctgaagaaagaattaccctaacgtacatgttcttgatcagttctcgaatccggcaaatcctgacgcgcacgtcagatggactggtcctgagatttggaaggatactgctggcaaggtggacatttttgttgccggttcaggctcaggaggtacggtgtctggtgtcgggaagtatctgaagatgcagaacccaaatgtgaagatcatctgtgtggaacctgcagagagtcccgtaatcgcaggtggggatccaggtaagcataaaatccaggggatagggccaggattcttaccagagatcttggacacatcggtcatcgatgaagcggttagtgtgactactgaggacgcaatggtgaatgcgaggaggttggcaatggaagaaggcctgcttgtgggcatatcttctggagcaaacctggctgcttgcttgaaggtcgccgcgagagaagagaacaaggggaagttgattgtcaccatgttccctagcgggggcgagcgatacatgaattcggacctgtttgccgctgtaagggaggagtgtgtggccatgacattttgatctcacatcttattcagaagagttgtgtacaaggtagattgtagcccgttaccgtgatgtgttgcatgatcttgctacggagttggttccatgagttgttattgatcaagaaataaatgtccatgaattattactaggaagttagacgtggcgatacgttgtgcccgtgtttctattttcgctttggagtagtaaaaaaa

SEQ ID NO: 1028 - DNA, 793 bp, Avena sativa
agaacagctccaccgtatgtgaatcagaaatccaagaggctagcccaatgacagatatgttcctggaaaagccagccaaggtgtactccaacaaaaaccctcacaatgagagtgacagtggggatgccagcagctgggaaacgataacccatgaggaaatgcaaggctccagtggttcacctgagggaagcgagtcatcggtcaacaagatctttgacggtagcatttcttggacaagcagaactgatttcgagtatggggagattgagaagctaaaggatgacttggccgacgcatacctgacaaccatgacacagcccaagaagaaagagtcagccatctcaaagctctggaagtcgtcgcgtccaaagaacagtgatgtctccaagaaagacgccatggaggcactcaacggtagagcatcaaatgtacggctatcggtcgggacgcattccaccatcgaaagcggcactcacgagataggcctcagtccgccgagcgctgatcagtggagctcaccggactcgatgaacatccaattcaaccgggggttcagaggctgcatggagtacccgcggacgtcccagaagcacagcctgaaggagaaactcatcgaggcgcggatggtgagccagaaggtacagctccgccaagtgctcaagcagaagatctagaactgccagaaccccacgaggtgaaacattccccacgaggtgaaacattccaagcctagaacttaatmcaagaaataatctgtagaagtactcggtgcttcatttttccttgtcgtagg

SEQ ID NO: 1029 - DNA, 803 bp, Avena sativa
caaccgtgtcagcgtatatgacactcgcaccaccacctgcaaccagtgtccaaaaggtcgcatttggacaatggttgcaggtggtggtgcgagtgtccaaatgcgaccttttgggttcagaacggtgaatttcagtgatgcacttgtcttctcatccaattcatggatataactttccgaggggctcatgactcttccaaaaggtagaggaaaatcaaggttaccccacttcttaaagttcttgaaagcagctgtgtcatccagttcacctctcatgtccagagggtatggttccccgtttaccagggtgaatggattcatctccataaaagagaaatccaagtcttggaaaacagaaaatgaccctctaatgaaatcgcctattttcgttcggacttccaatggaagggtggcaatcagtggagcacacacatcaagtgtcattgtcttctctgtgggaagaaagatcgtcttaaccttatcccagttctcctcgatctcaatacctccacactctgaaaagctaatggtgcaaccaagcctgtctgatacaattgagagataatactcttgatcatgtggcacaaatggctcgactatgaacgttgtaattggagccttacagccacccatctcaacctcaactcctaaccgctccttgacaaattggcggacttgagcaagatctaggttcagggccacaaggccgctcttcccacgtttaccgaacagcatgtctggtttaacaaccaacttcatagatgagagccatggctcctggttgcaagctccgtgaatccgtt

SEQ ID NO: 1030 - DNA, 839 bp, Avena sativa
ggcagatccttcgtcctctaggtgtcattctcttcatgtggactccttttcaatgaggaagcacgtcgatcacctggacatcagctatctaggcagatctcagacagcaagatcccatctctcaagtctttcaatgagagtagctatgcagaagaaaggccatcgagttccatgctctctggctgcagcaatgacacatgtgcaggaggttcacaacatggtgggtcatctgatgggtggtcaactcacacattttctgacttggtggcctcatctcaaagggagaggtggtcagttgacagtgagctctttggttccatcaccagtaaaatggctagatcaaatgattcacatgctactgctctctctcctgaccaaggtgtttgcaagctgtgtttgaagctattaaaggagcggtctacatggagtgctcatgagctgggagtcgttgctgttttattctgtggtcattcgtaccatgcaaactgtttggatagtataactgcagaaagtgagaaatatgatcctccatgtcctgtatgcacccatggtgagaagggcacagcaaaactatttgggaagttggactcaaagattaagagcaggaaatctaaaaatgtgatatcagatgctgatatagataggagttctaagcaccagaagaaaagtatgagagaacccaggttaggcgcaagttctagcatgaaggattcatttcgtcggccatttttgaggaggcatttttcaattggttctcgaccagcaaatcaatgctggggagtgagccaacaggaaagaaaggcttctgggcaagacactggagagactagccagctgca

SEQ ID NO: 1031 - DNA, 724 bp, Avena sativa
gttgggagtgctaacccatacgacggctacacctgggatcaaaatcaaaactactatgctgattacgctggaaattatgggttggatccaagcaacaacgtgagctatgggactgaaccacaatatacagcatacagcgcagagcaaggcgctgtgtacggtggtaatgagtatgtcggagagcaaagtggtgggtacgggtattcgacagcaccaccctgtggaactgaatatactggtgcgtacagatctgaggtggcagaaatggcagcgccaccaatgcaggagcctctaatgccaccggaaatgggcaggattggaggaaagagaggtaggagggatgtgccaatggagattctagaggtgaaccaggcagaactgatgaagaaccggccaagggaggataagtccaagctcacaggattggcctttggtcctagttaccaggccgccccttcagggaaggcaaaaccctccaagctggcgaaaaggaagcatcagatcggttctctgtacttcgacatgagggcaaaagagatggagcttaacgagagacgttccaagggcgtcctcacgaaggcagagacccaagcgaaatatgggtggtgactggtgtggtcagaatcgaactgttcattcagcctgctgtmtaaacttctgttgttaattaacttgttgtatgattattacttcaatccaaatcttggctttgtttccctacaaa

SEQ ID NO: 1032 - DNA, 653 bp, Avena sativa
gaatgtataaaatttccagtcttcctgtcgattagtaggaagaaaagaatgtatccgtggagagctggccaactcatagcaaaagcgagagctcacttctccttccccaaaaatctgttcaagatatcactgccttcagtgttgtgaggattcttttgtagagttcaatggcatatcgacgtgttgatggcttccttggttgactttgctgacgtcaccatgctgctggtttgtttggggcttaactccgagcttatggttgttatatgccacaacacctactatggctatggcatagccaactatatttatgaaggtaagctttgtatcagcaaagatagcagctgaaagcagtaccacactccaatccctcacaactccagtaacacgagctgtcagtgcactcgtccgagaaatcacaaggaaaactgacagattaagtacgaaagtgcacatgcagtttaagaacaatgtaaccggcgggaagttccatgaaacacttgcatccatctttggcttctctaagaataaccagggaatgaacaggcaaaaggcactgcaagggctcacatagtacatcatggatatcaagttcagtctaacaccctttttcttcagaatatctcaataagataagtctaagggcttctgct

SEQ ID NO: 1033 - DNA, 724 bp, Avena sativa
gcaccatcttctgcttgcacatgcctctgcggcaaccctgtataaagagaagtaccaggccacgcaaggaggcaaaattggactcacattgctcggttggtggtacgagcctgctacgcaaacacctgaggatgtagcagcagcggctaggatgaatgatttccacattggatggtatatgcatccattggtgcatggagactaccccccggtgatgaggaagaatgttggatccaggctaccatctttcacctccgaagagctgaagggagtacgcggatctttcgattatgtcggatttaaccactacattgcagtatacgtgaaggctgatcttagcaagctagatcagaacctgagagattacatgggtgatgcagcagtgaaatatgacatgccatttttgaactcaaagaacaagcagttgctgttcggtttgaaaaccgatttcatgacgtccaccccgtgggctctgaagaaaatgctggagcatctccaggtcaaatacaagaatcctgtggtcatgatccacgagaatggagctgccagcatacgtgacccctctggcgaattacaacgacgacgacttcaggtcgcagtacattcaggattacatcgaggcggccctcgatccagcaggacgggtcgacgtgcagggctacttcgtgtggtcgttcctggacgtgttcgagtacctgttcggctaccaatgggcttcggcctc

SEQ ID NO: 1034 - DNA, 599 bp, Avena sativa
cttgttccttggcatctcgatccctcaatatttctccgagtataccgcttctgctggccgtggacctgcccatacaaatgcaggatggttcaatgacatcataaacacagtgtttggttctggcccaacggtggcgctgattgtcgcgtctggtctggacaacacattggaggtgaggggccacgaggccgaccgagggctctcatggttcacaccattcctgcgccgacggaaagggttctcggatcctcgaaacgaggagttctacagctacccgatcagggtccatgacttcatcccgagccgatttctgtgattctagaagggggtactgttaattaccttgtgctgatgtgcatgtaaatcccttcgttcttgttagcctttactcctgtgacctgtagtgattggcgtggtcagagttgacttagcgggatatggtacaagcatgtttagggcgtctgcgtttacttctttttcgccgtttggtctagtgagttggttacatggtgatctagagttttattatccgggtgtayggttactggggaaaagaaatgcaaaaggtagtagtacctcaattgttaattaccgagtca

SEQ ID NO: 1035 - DNA, 673 bp, Avena sativa
tacatgaaggagctgctggagcggatccggcggctgcaggatgagatggaggaggagcaagagcaggaggcagccggacggggtcccggcgggcccggcgctgctgagcgtgttccgggagctgaacccgaacgagatgctggcgaggaacacgcccaagttcgaggtggagcggaaggaaggcggcgccggcggggacacccgggtggagatctactgcgccgccaagccggggctgctgctgtcgacggtgaacaccctggacgtgctggggctggacatccagcagtgcgtcgtcagctgcttcaacgacttcgccatgcacgcctcctgctccgagatgcagagggagatgctgagcgcggacgccgtcaagcagcagctgctcaagaacgccggctacggcggcggctgcttgtaggggaggaggaagaaccaccaccaccaccaccggcagcagctgcaaaattaccaccagcagctgctgcagtagcagcagcgatgagaaaataaagtagcagtagcagtaggggttagcagcactagtactgtagtagcaagcagcagtagcgaccttttagcaaatcataacaatgtcgccgtgattcgaacctgttagtaacaaagatcggcgcctttccggtgaatgattgacgacgacgatgatgatcga

SEQ ID NO: 1036 - DNA, 711 bp, Avena sativa
aaagttagcaaccagaaaatataattataacgaaatacaaaagcagggaagaaaagataatatatgtaaaagatttgcaggtcgctcaagaaataacattgatattgattttacttactaggtcttagaagatgctgcagtgcatggagcagctgttcttggtgtccctgtgaaagctactataaaggaggccaacaacgattcttttgtcgtaaaaacccttgatagaaaaaccctatgggaaatgcagactccacaggtgatgaagcccaatttgctcagagatggtttcgagctagttaaaagggatgaccttgaggtcactgacgatgtttccatcgtagaatacttgaaacatccggtctatattaccgagggctcctatacgaacattaaggtgacaactccagatgacttgctcctggctgagcggttgatgaatgataaatagggccgatattagtagtaatatttacttgatttgagaggcatctgtatggatttgtcagtacgacattccttacccttccacagttttggaacctagaaaaataaatatgtagctcatacacgagatagataacctgtatgtaacattctttctgcgccaatgaaaatatggcaatttctgattgagtcatacttgacacagcaaatggggctttgtatcgttcgttacaattgccacacaaaggtgaaaagcagtttagc

SEQ ID NO: 1037 - DNA, 694 bp, Avena sativa
cccgggacaaagatgggaatggggaggcatacctgcccgccatatacaacaacccagagcttctgagcattgcacagaagaagtacatgacaagtctgttacatgatagtcttggatttggttcagccaaaatgatcaggagaatagttgggatcgctcatgtcgaggattttgactcgattgaggatgccagcaagagagcatcatgtgagcgctgtgcgcttgattgcgcaaaggcgatcctgaagggtcgccgccagttcgagagcatcgagcaggtgattgctcacattcgatcagtaactcgcgactgagaagaccaggagttatgcttggtgtgtcctattgaggagaccctttggggcgtttatcacggtagactacacacacactatcaaaggactgccttgtcaaaaacatcattgagcggctatctatggtttctgtattgggatggagaggaaaacccccccttcagcgctatgtatttctggagaggtgagaccgacctgtgtgtatttcttgtgtaagacaggccttctggcatactagctgttagctgaataagtgcagtcccaatgcttgcacctgtatctaaaagcttaccaactactcgctccgtttggggctttagtcacagctcacaagagagcttgcacctgtaatggaaggacaaatgcatccttttttggag

SEQ ID NO: 1038 - DNA, 697 bp, Avena sativa
aggtcgcctgcagtcttataaagctatcagatttgccctcgacattgcaaggggactaaattatcgttcatgagtgcaagccagagccaatcatccatggtgatttgtcaccaaaaaatatcgttcgggatgatgaaggcaaacttaaggtggcaggctttggctcacttaatctgataaaagtctcagaagatttactacaaatggctcagcctgtatcaaaatttgacagtgtgtacatagctcctgagatatacagaaacgaaacatttgacagaagtgtggatacttttgcattcggtctcattctttatgagatgattgaaggagttcctgcttttcacccaaagactcgagaggaagcagccaagatgatttcttcggagggtttgagaccattattcaagaataagcccaaatcatatccggaggatgtgaaagagctaatacaagaatgctgggatccaataccttcagtcaggccaacgttctcagatataatcgtacgcctgaacaagatatctgcaaggtgttctaagcaaactcgctggagagacaacttcaagctaccatggaaacaaggtgcacatagatagccctggacttcgacgagaccgtcgccaagattcgccctttttgcgtatatatataggtaaaagcacggcgaaaattacatcggtatacgggacagaagctg

SEQ ID NO: 1039 - DNA, 698 bp, Avena sativa
tgagctcaacgagcttgctttgttgaagcgggcgaggatcgagcggatgaaggctttgaagaagatgaagaatgccaaacattcctcaactagcaatttttgtcccatgatcgtcaccgttatcttctgcctcgtcatactctggcaaggatttttctctaggcaagcgtcgggagtaagcttccatggatcacctgaatcttcagttagagcacataacagtctgatctcgattcggttctacaagaaccgttctagcatcagacctcacagttcgacctctgccgctcctaacaacctagaaatgcgccaccgaggatggagatccgtagcaaaggaagagatgctgcggcatgaacgcgccggccgagcatgaccacaggctggcctggcgccgagatagctgtcgccattttgaagctcaccgcgaccgaccgacagacgggccgatgtaaatctactgtctgacagacgacgccccgcgaggtggctcgctgtaaatgaaccttctagtgtgtgtgttgtgcgtgcgtgcgtgttcccccgggttccatgctgctaaccagaccagtggactttcctgtgggtcgtggcacctggtaagttcgctccagagcaagctgtatgatgatgatgattacaataataaggcttgctgagtaataatatagtctaatctgatctrgtcctgatctgaa

SEQ ID NO: 1040 - DNA, 358 bp, Avena sativa
tttgttatgatcagatctgaatttagtcttcagaaatccaatacttattttgtgatgtaacgggtaaaatgattttttaccagttatcggtacaaactagacacatctcagtacttttgatccagcaggagttggcctggaactagcttgcattaccaaccagtttaacatgcaattatcacagtagacagtacacaggtagggacatgcttagtagagaatacttggcggtgttcataaatagtagattccgtgaaaaaaagagtacatcaagaggtacacacggttcacatccgcagtggatagaatgaataaaaattcgcaatgataagatagcatgggttccatgggttcagct

SEQ ID NO: 1041 - DNA, 717 bp, Avena sativa
gaacaatgttcattacttggacattgctccactgaaaatagatgttgggaagtattcactagtttttgagatttctcttcaagatccagaacatgaaaccgtttacaccactggagggagaaacaccgaaactgttgttgtcaccggactgattaaagttgacaaagcagaaatcggaattgctgagaacgatgctgggaccgtggagtctgttgaaaagttagatctactgaaagatacagaaatttctctctctgcaaaccatctgcagaagttacgtctatcttttcaactagctacaccacttgggcgcacatttaaacctcaccaggtgttcttgaagttgaagcatgaaagcaaggttgaacacatatttgtggtgccaggttctgcgaggcaattcaaaatagttctagattttcttggtttgctggagaaattttactacctttctggtagatacgacctcgagctttcagttggtgatgcttcaatggaaaattcgttcctacgagcccttggccatctggagttggacttgccggaggccccagagaaggccccgcgtcctcctgcacaagctgttgacccgttggcaaagtttaggccacagaaggagatatcacacatattccgttcaccagagaagaggccgcctaaggaagtctcattagcatttactggtgtcacacttttagccttttattgggtttttga

SEQ ID NO: 1042 - DNA, 725 bp, Avena sativa
tccaaggaggatggtcggctgccggagaacccttgtacattcgctatatttcctcttccaacaggagcttccctagactaggtagtcgtagtagaccagcaagaggttgtccgggacaatcagtggcaggctgtcgatgaagctgtggaagtgcctcacattctccttctctagggccaccgtgtcgatcacatcttcgtcacgggtgagcacccagaggtccgtagatcgaacccttttcagacttccgcggcagaaggggcatgactgagatcttgtataccagtctcggtaacagttgatgcacatggcgtggttgcagttggggaggaccatcttggtgcaagtctccaggcaaatgccacactcgtcttctctctcggcgtccttgtcatcggcgtaaagcttccggccaccgctgtcgccgtcccccttgcaccactctttctccatgacgttttcctcaatttgttgcaagaacgggtatattatagcatagaattctttaaggcttgctcgcctttcaattgtggatatggatgcatccccgtcaacataaaccttgtagacgagcacctcaagaaggcctaggtagctggggagggtgtatgagagggagcagctgcagtccatccactggataaggttgaggatgattggagccatggagctgtaggagagcctcatctgcacgcaggtacctccataggctctgtgtatggcat

SEQ ID NO: 1043 - DNA, 944 bp, Avena sativa
ctcgctgttgtcaaggcctctgtgcaagagcaaactggcggagctgtggaaaatgatcccattgtcgcgcttcacctatcaaaaaacatgcgcctgacttgtccacgttaggtactttcttcttgtacggagaagggcaaagcaagtttgagatctgttgcaaaagaaaacacagcgtctgcatcggatgttgggccatcaagcacatgggatgtgtgcaacacgggtaaattgctgttttcttccgtggatgctggtgaaaactatgcaatgttcggaggaaatggtattgaagtgaatttgtgggatattacatcttgtagcaaaatatggtctgctaaatctcctcgagctaacagtcttggtatattcaccaaaccttggttcactgctggaactttcttgtgcaaggatgatcaccgtaaaattgtaggctgcacaaataatcatcaggttcggttatacgatactgcttcacaaagaagacctgttatttcagttgattttagggaggcaccaatcaaggcagttgttgaggatccagatggacatactgtctatattgggacaggaacaggagacctcgcttcctttgacatgagaacaggaaaactagtcggatgctatgttggtaaatgcagcggaagtattagatcgatagttaggcatccggagctgcctttgatagcatcttgcggattggacagctacttgcgaatctgggatacaaatacaagacagccactttctgcggtctatctcaagcagcacctcacggcggtggttattgattcacatttctcagctgaagaatctgaggcgactaaatccaagcagcttgaaccttcattggttgttgaagctacagtcagaaaggaaaagaagaaaaagaagaatatattggttgacggggatgacgaaggtaccygagtggttgacggtga

SEQ ID NO: 1044 - DNA, 694 bp, Avena sativa
tcggttactaaaactagtctttagggttacattagcatacataaatatatttgtaacaggttctaacacgatatcttgaggagcagagccatcggatcttgtccaaacaaaaacactactgccagattctttcatctccatcactaggaccaggacacacaaagacaaagctgacaaaaaccacggcatatttaagcgtaaacacagcaaggaaggaaactatggtaagctactgctgatgatagatggacggcagcagcacgggcttagaacacccgggccggcttccccatggtgctcttgatgtataggcacctcacgttctgccagttcttcttgagcagggaaaccaggaagttgacgctcatctggatgttctgctggatctgcttctcctccatcgacaggttgcccaccgccacacccatgcacagcaccttcttcagctggaacttgatggtggccttcgtctcgttcaccttggcttccagagactctgagtgagaaaccagggtcgggaaccttgcctgccttgttgagaccaggaccaaggagacggggaatctgcttgataatagcctctgaggccaagaaagcatgatacttcttggcaagcctcttgacaagcttcttgtttttgttctatcttcttaagagcttcaacgtccatggaatcaagaccaatcttctcagc

SEQ ID NO: 1045 - DNA, 844 bp, Avena sativa
tgcaagatctccgtgtaaaattacatttcaccacaacttgcaacaaatatatatacaaggattcttcaaatgaatgatcttactactcaacacaaaagacaccagtttaattgcactattctctcctcatcatcatcatgttatgttattcacaacttacttggctaccacaaaacaccaggcatacatactcctgagtagattgattacaaacgaggaaagaaagaaaacaagcaagcgcacaccaaacctatacagcaacgggctccggttccgcgattaacaaacaataaaaatctcatcaagaacactatcttcacgcggccatgagacagtggtaggcgggctcagtatcaccgcttctggctggtaacaagatgcaatgccatcttttctccgggcagcaaccagcaagaggaggatcacatggttcaactagacaagagatgctccgaggccttctgaaatatcagcttacagtttccttttccgcatcacatattgcgtgctgaaccgctccgaggcagagtccttccaggtggcagctgtgaactgtttccagaaacactcgagttaccgaaccttctcgccttcgcatcctgctctttctctattcgcatagccgccacctccttctccatggcagctacctcccgcctcatcttcttggcatctgattccatcgccttcgtcaacgtatcgactttcttagccaacatctcgactgcgtcgtccttgtctttcaggctctgatccttttcatggcacgccttcctcagagcaacgacctccttctgcagcatatcatataacatgcctgacactgtatcctccggttcaacaa

SEQ ID NO: 1046 - DNA, 610 bp, Avena sativa
ctgatacatcgtgttggagataatggacagcagctcatataccacaaactgccgatggatatagctgaacggcatgttctgcttttggatccggtgcttggcacaggggaactcggcaagtcaagctatagatcttctcataaggaaaggtgttcctgaggagaggatcatattcctcaaccttatctcggctcctgaagggatccattgtgtgtgcaagagatttccaaggttgaagattgtaacatcagagatagattctgggttgagcgaggaattcagggtcatcccaggtttgggagagtatggtgatcggtactttggcacagacaactgatggctcatactgttctttttgtctgtgcacttaatcgctggataatggagagggacgatggtacaccagaggcatggattggaccaagaagacatgctgggaaatggatgtaaactaagaagatacattgtatttttctagactccagagctagatatccgcccttagccatggctggagctagtaatctggctttaggccgagacgggaggtagtagaaatgatgcaagactcgtcacgtttaaatatctctgtcgtcgtactgattcagct

SEQ ID NO: 1047 - DNA, 629 bp, Avena sativa
caaggacattgattgaagcaaatgaactgggatgtctgtctcaggcattaactgttgctgcagttttgtcagccgaaattacactgcggcaaactagaagcaaggacatggagggaaagagaaaacggcaagagcttcctgatggttctggctggggtgaccatgtgcaattgcttcaaatatttgaaagctgggatcaagcaggctatgatccaagatggtgttcagatcatgatttgcaggtgcggggcatgaaattcagcaaagatgtgaggaatcaattaagtcagattattcaaaaagttgcaaagggtccaacagatttgcaagcaaggagaggacggaagagtgaccctgactacagaaaattgaggaaggctctttgtataggttatggcaaccagttagctgagaggatgattcatcataatggttaccatacggttggatacaggacacaacttgtgcaggtgcatccatcttccgtactggaaggcgatgaatacgggaaactacctgtgtatgttgtctaccatgaactaataaacactaccaggcctttcatgagaaatgtttgtggggtcgagcagaattggtgaaaccaatcttgaagaagcttgataaactga

SEQ ID NO: 1048 - DNA, 727 bp, Avena sativa
cattggatcaacaattggagactgctcatatggtggattctacacaggctgatcaccatgcgactgcagtgggtgattatagtgcagtaggagaaggacatgtaggctcaaaaaacttggagatctgtacttctattacacctggacatgtggtgcagagatctgaaactgagaacagacaacaaagtgcgaatgatacaagtgaaagtggtgaggaaaatttacctgtggctgaatccagaggagatgctctggtttcagacaccaacgtgctggaagctggctctatattggtagagttcatgcgcaaggaggctgcatgcatggccgcatattctttacatggacggagttttggcaacaggactgtgtttgctgggtatgcacctcatgatctctacctgcagaagtacccgaggtgatatcctgatgttcagataacacctgatgcattcctatgtaacagaaacaccagcacatcttgtaatttcgagatttcggaaggatagttatttgtcagttaagtagctttcagtcaggatgatgtagttgggaggaaatttagtagatccaccgtgcaagtcctttgggcgaacttgcaacggctattttttgtgatcccttgtaaacgtagttgacttggattatatggatgtgcagccttttcatataggcagtataatgttaaaggaaaacattttctaggtaaaaaagttaaattaatcgc

SEQ ID NO: 1049 - DNA, 490 bp, Avena sativa
ataacctgatatgtcttgtaacagtgaaactggaccaagcattgctgatgcagcgatgggcaggatatcccagatcaccaaagtcatagcagaaggtggatacgagaaaatctttcaccagacctttgatgttctacctgaagaaaaactgaagaagccattcgcgtgttatctgtcaacctctgctggtcctgttatgggtgtgctctacctgtccaatgtgaagttggcattctgtagcgataacccacttgcttacaaggttggggatcacaatgagtggagctattacaaggtcgtcatccccctagcccaactgcggtcagtcaatccttcgacaagcagaacaaatacagctgagaagtacatccaggtggtctctattgataaccatgagttctggttcatgggctttgtgtactacgacagtgctgtaaagaacctgcaggaagcactccaggaggcccatgtttgcagcctagtgatgtct

SEQ ID NO: 1050 - DNA, 638 bp, Avena sativa
aggctccggcgccgacgccagactgctgcgcggggctgaagacggcgctgcaggacagccccaggtgcctgtgcgtgctggtcaaggaccgcgacgacccaggcctgggcttgaagatcaacgtcacaagggcgctcggcctccccgccgcctgcagcgcgcccgccaacatctccgactgcccaaggctactgaacctaccgcccaactccaaggacgcgcaggtcttcgagcagtttgccaagcaactggcagcccagaacagcagctccagtggtggtggtggtgagccgagtgcgccgaacacgggcgcacagaagaccgcggcggctgcgacgaggatgacatggttgggagtgggcggagtcggtggcgcagtgtcgttcttcttcttcgccgccgtcccactcgccgtgcctttcctgcttcttctgggctaatgggatcgagataatcattagtgtgtacatgattgatgcatgcatgttagttgccaacctccggttgatgagtgcaagcacgaagcacgcacgcgtccataccatgtgtgtgctgtcagctgtctcttaattcccgtgtgaagcaatgtgcaatgaaaaagagtttctagtaaaaaaaaaaaaagttaaattaatcgc

SEQ ID NO: 1051 - DNA, 1070 bp, Avena sativa
actgttggtgataactgtatggcttctttggagtagatgacggagaggcccacccattggatttgtacttcttattaaatggcacatcatcatggtcctcaggaatcccaaaccaccccctaactctggatttaccacgaggcttgtccccttctatcctccaatagggggccttttcttttatgggtgtcatgaggagctgatctatggccagaatcatttttccatccgtcctttttacgactatgcgttggcaactctcctttaaaccgaccagacttagcactgtttgtgcagccccgtgcgaagtgaccttcttcaccacacttgtagcatagggtcggggttgttgccacacttgtttgcctgcgttgtttggcacatcccaaaccactatgaccagattgggcacaattataacaagtaacttcttttgcaggactatcagagaagtcagtacagcacaggtgaccattctgcttacacacgtaacattttatttccttaacatcatccagtggataatcattggaacatccgaacatatcatggcctgtttctccacatcgcaaacacaatgtggtggattgctgagtatttctcatgtgcttgtcagggcaatctttcgccatatgacctccttttttgcagataaaacaatcttggccctgtgtgcactgcttcgcattgtgtccaaacagtccacaaacgaagcaaggcttcttccgcttttccattgggcagtttacagctacatgaccttcctcaccacagttaaagcaagtctccaatatagtttccccaggatcaaagtatcttggtatacgaagaagcttcctcagaactttggatacagggacatcaacgccatcttcagtgagcaccgattctgctgtccctatttttctctcctgggtgcctgcaacctcctcctgggcttcggctacagcctccccgtcctccttcccatgtttttcctcctctccttgcgccgcttcttcttcttcttctccttcctccgggatccgcctcgccgagctccaccaccgcgtccctcgtcgacctcctcg

SEQ ID NO: 1052 - DNA, 739 bp, Avena sativa
agaaaataagagtgcagttggtgcttctgaacgcctggttgctggtggtttggctggtgcagtagcgcaaacagcaatttatcccatagatttagtaaagacacggctacaaaccttttcttgtgagagtggtaaggttcctagtcttggcaccttatcaagggatatatggaagcacgaaggtcctcgagcattctatagaggccttgttccatctttgcttggtattgtcccttatgctggaattgatcttgctgtatatgagactttgaaagatgcgtccaggacctatataataaaagacagtgaacctggtcctctagtacaactgggctgtggcactgtctctggagctttgggagccacatgtgtttaccctttacaggtcatcagaacaagactgcaagctcaacgaggaaattcggaggctgcatataaaggaatgtctgatgtgttctggagaaccctaaagcatgaaggcatttctgggttctacaaaggaatcctaccgaacctccttaaggtggtgcctgctgcaagtattacctatatggtttatgaggcgatgaaaaaaaatctgtctcttgattaagttctgcaattgttttgcaaaccggccattattattgacatggctgactgtagagataatgacgacacatgaatttactggttaaagagctcctttttttgacgtcgaaagatggtgccttcaggatagaactgaaagctattgcta

SEQ ID NO: 1053 - DNA, 785 bp, Avena sativa
tcgcagtgggtgtggtaacggtcaccaaggtcgtcaaaggtcacggtccgcgacccaccgatgcactcggttacgttctgtccagtcatttcaaggtggatacctcctgggtggcttccctcttgatcatgcacgtcgaagaatgcacgcacctcattcataatggagtcgaatggacgagtcttcagaccacatggggccttgattgtgttcccgtgcatgggatcggtaatccatgtaacaatctgtccagaattgcggacagcgcggatgagatgaggcaacttcaccctcatgttctcagctcccatccttgtaattatggtgatccttcccggcttgtttgatgggttcaagatgtcaatcagctttaccaattcagcggggtccattttatcgctcacctttatgccaagggggttggcaataccacggaggaattcaacatgagccccatcgagttgacgagtacgctcaccaacccagaccatgtgagctgagcagtcatagaaaaggccacttgtggagtcctcgcgagtaagagcctgctcatagggcaagaggagacactcatgggatgtccagaagtcagtagttgtcattatcggatggtctatccccagcccagctgcagtcatgaagccaagagcctcatccaccctatgtgccaactcgcggtacctgtctccctgctcgttgtggtccatgaaatcgaggttccattggatgacccgctgcatagcggcatagcctccggtcgcgaaggcgcggagcaagttgagcgt

SEQ ID NO: 1054 - DNA, 535 bp, Avena sativa
cagaaggctttagaagtggttgaggtggaacaacaaacacagatggctttggagcttgacggaactatcatgaaatgtgtccgtgatcagaatggcaaccatgtaatccagaagtgcatagaatgcatccctcaagaaaggatacagtttattatctcggcattttacgggcatgtggttgacctttccacccatccatatggttgtcgtgttattcagcgagtcttggagcactgtgatgatgaaagcacccaaagtgccatgatggaagagatcatgcagtctgtggttcctttgacacaagatcagtatggaaattatgttatccagcatgtcttgcaacatggaaaaccagaagaacgtacttctataattaggcaactcgccggacagattgtgaagatgagccaacagaaattcgcttccaacgttgttgagaagtgtctttcttttggttctcgtgaggaacgccagattctaattgatgagatgcttggcactaccgatgagaatgagccattacaggcaaactggt

SEQ ID NO: 1055 - DNA, 837 bp, Avena sativa
ttagcaaaacacaaacacatgcttcaatacttgatgaagtgccagcatccacgttgtccacaaacccaaaagttttacagcgacagtaggataaattttatgtacaaaaacaacgccttgattgccactttgcagatgacatttggttggcagaatgtggcgatcaattcgactgtaactgggcatccttgctagtgagaggcacgtagcgcacagacgtctcatctcttaccgtgaccgtgccgtctagcttcttgtccaccaccttcagctcctggaagacggtcccaactgggatcaccattctgccaccaggcttcagctgctcgatcaatgcctctggaatctgtggtgctgcagctccgacatggatgcagtcatagggtgcgagctctggccagccctccctaccatcagcgatgtgaatactgagggatccatcagacagctgtggacctgctgcacttttcttgatgttttcggtagaagatgcaaccaactctggtatgtgttcaacaccaacaactcgtccttccggtccaaccatgagtgcaaagcaagctgttaggtatccagtgcctgatccgacatccagggcccgcattccaggctgcagatgatcctccaggagctccaagcaagcagcatgcatgtgaggcgctgatatggttgcgttgtagccaattgccattgggctatcgaaatagggagaaccacctggaggcacaaacagccccctgtcgatggtctccatgacctctgcaactttggtcgacttgatcactccatatctctgcagttgctcaaccatagccttgttcttgtcgctagctccgc

SEQ ID NO: 1056 - DNA, 832 bp, Avena sativa
ttgctgagagtcgaggagggacgggtgaccatccttgcctcgacggtggaaggctgcccgatcaggtttgccgaggccgtcaacgaggcatccgacggcacggtctacttcagtgacggcagcaccaggttcggcatcgaccggtggttcctagactacatggaggacagctccaccggccgcctcctcaagtacgagccgagcatcggcaaggtgtccgtcgtgcttgacaacctcgccttcgccaatggagtcgccttgtcgcaggacgataccttcgtcgtcgtctgcgagtcgtggaggtatagatgctccaagctatggctgaaaggggacaaggctggcaaggcggaaaccttcatcgacaacctcccagggtcaccggataacatccatctagcgccagacggttccttctggatcgcccttctccagttgagatcgccatggatagacctggtcacgcgctggacctttacaaagagagtcgtctcgtctttcccggcgctcctcgacatgctcaaggagacggggaaaggagcaatggtggcgcaggtttcggagaatggcaagatcgtccgtgtgctcggtgactcggaagggaaggtgtccaacttcatcacttcggtgacggagtatgacggaaacctcttctttggaagcatatcgtcgaactttataggcaagatgtctctcgcgaaggtgccacgagtgcaggacgtagtttcatagtagatatctacaattatcgtgtaataatccattgtggttgcaaaaataataataaaggcaatgtcaattttgtatcaattaagacatttttactagttca

SEQ ID NO: 1057 - DNA, 1047 bp, Avena sativa
ataatccaaacccgataggaggttacggcatgagggttgatggaaggtatgggctcctgtcaggtgcccgaaatggcttctcttcctttggacctggcggttatggaatgggcatgaatgttgaagctgggatgaatgctaactttggtgcaaactctagtttcctcagtaactcaaatgggcggcaaatgggttcatactacaatggtggtttaaacagactaggtagtcccatcgggtacgttggtctgaacgatgacccaggatcaatactgagttcaatgggaaggaacgtttggggtaatggaaatgtcaactaccagaacagccctacaaacatgagttctttcgtaccgtctggaagtgggagtcaggttggtcttactggcgacagtatcaattggggaggtcctacttctgcccatggcatgggaggtatttcaagcatcgggtctggtaacattggccgcgggactggagataactttggtttgccatctggcggctatggcaggagcaacccaactggcaccattggtgaacctttttctgcatcagccaatgcatatgaaatgaacaacatagattcgtatggcaacaactctatttatggtgactcaacctggaggttcacgtcatccgagatcgatattcccccttttgatcatgatcttggaaatattgatccagatatcaaatcgaacatgccagcaagttacatgggcaactatactgttaataataatcagacaagcagaggtatcacttcctaggcgagaatattattatagtcatatatgacttgggataggcgagacaccctttatatcaggtattcaggtgcagtactgtgaattggtgatatcagattaatatacaggttagttaattgtttctagctaaccagaggtgtggtttatggacaccaacatgctagaggagtggatacaaacattttgtgaaggtttcagattttagtttactttctacgtgtattaggtcttttggttttcctaatgagatgtgcagtggtgattgcggcacaca

SEQ ID NO: 1058 - DNA, 668 bp, Avena sativa
cgaaccaatccagcatcagtaaatctgaggatttttccatcaagaaagaaaatatgttctgtaacaagtgtacatgaacagtgagtcagtcgctggaatcacttggtgaaaagtctaattggttcgacaacacttcagatatggtgaaaaataaataggaagcagcaacatttttagccatcctagtgtatcaaagctcgctgttgctctccgcggtgtcgccgccggacgtcttcccattgacagcgatgagctccgtgtcaaaaaaccagagttgcgccacctggaatctttggtggggagcctcgctcccataacccatctttgaaggtattcttagcttccgcttttcgccgacacacataccaagcaacccttggtcccaaccttttatcacctggccacccccgagagtaaattcgaaggggtcacctctgtcatagctagaatcaaataccgatccatcagtgagtgacccacgataatgcactttgattttgtcgcctttgtgagcctgtatggtacacgactctggcttgtacttgacgccgatctggagccgcgtaacgtcggcggacttcttggccgaagcggtcagcaggacggccgcgacggcgacggctgcgacggcgagccagaggatccgcggcttcgtcaccatcgcatcc

SEQ ID NO: 1059 - DNA, 871 bp, Avena sativa
tgttagtacaacttgaatcgttcaacttgcgtgtgaagctgcccaaggtttgcttggaacaacaagaacgaaagaggagtgccctggaaacacacttgactttttcactccagtaactaacactccattctatttgatacagaaggtagatagacatagctctgcgattttagttctatctagataaataggagagtattgaacatgtcaacattgcaggtcattggatctaaactttgtgcaacgagcacagttttgctttaaggcaaccaagtccctctttttccattggagtatgccagactatcgcatcagaccatgggaaaggaaaggaccaagcctaaccattccactttacatcactgattcactgttttgaaagagccatgacgttgaagttcatcgagtcagggttctccgcaattctagctttgatgacttttgcagcatcctgcagcaatgtatcaggtgatgaagggccatgacatattggtttcgattttcgtccatcaagctcataaagttcaccatcaacacaagagaaacatacaaaatgttcattcacatcaacatttgcatcagtttcaccagcagaagcagcaattgaatgagcaccctccatctcatcatcctcctcgagaaaggcagcacgctggactggatccatatcagctgtttgtttataaaacctatcaaaataagatccctcaaccagcttgatacttgatgcagcgttccctattgcatgaataacgccaactgttccacaagcattgccaacagtctgttttgtaaagtacaccttcttgcttaaatccttgccccctgcggtcgaggtggcagaagcgtcgtactcctccaccttgtcatc

SEQ ID NO: 1060 - DNA, 751 bp, Avena sativa
gaaaagagaggctgcttttattgtaacatttgcaaaacgagaacaagagatcgcagaattaaagtctgcggttagggatttgaaaacacagttgaggccaccgtcaatgcagacgaggcgattattgcttgatccagcaattcacgaggaatttacacgcttaaagaatttggcagaagagaaagagaaaaagataaaagagctacaggacaatgttgctgctgtcaattttactccatccagcaagcatgggaaaatgctaatggccaagtgtagaacattgcaagaggaaaatgaagagattggggcaatggcttctgaaggaaaaatccatgaacttggaatgaaaattgcagttctgaagacccagaacaatgagctcaggaatcaattcgatgggctttacaagcacatggatggcctgacaaatgatgttgagaggtcaaacgaaatggtgtccattctgcaagaagagttggaagctaaagacgtggagctgacaagattgaaggagatgcttttgcagaaagaggcagctgaagacacggcagttgaagaagtaaaccaagctgcagatgatatgaacgctactacttctagtccgcagccgataaaaatagaggcctaagatggtttccagtgcgagttgtgtttcctgagaaattcatctgttatatgtatgctttgttgtaacactcgtttatctgaggtgcaatagtggaatttatctgaggcccttaaattttgacaa

SEQ ID NO: 1061 - DNA, 731 bp, Avena sativa
ggcggtggaagggatcaacgccatcgtgacgggcaacctgacggcgctgtcggagcaggagctcatcgactgcagcgtggacggcaacaacggctgcaacggcggcatgatggactacgccttctcctacatcgcctccagcggcgggctccacaccgaggaggcctacccgtaccttatggaggaaggcagctgtggcgacggcaagaagagcgagtccgaggcggtggcgatcagcggctacgaggatgtcccggccaacgacgagcagtcgctgatcaaggcgctggcacaccagcccatctccgtcgccattgaggcctccggcaggcacttccagttctacagcgggggagtcttcgacggtccatgcggcgcgcagctggaccacggcgtggcggctgttgggtacggttcagacaagggtaagggccacgactacatcgtggtgaagaactcgtggggcgacaagtggggtgagaaggggtacatcaggatgaagaggggcaccggaaagggcgagggcctctgcggcatcaacaagatggcctcatacccgaccaaggacaactgatcgatcatccaagctcaattgctgcatccagagaggattgaaagttccagccgtgtttccaagttgttttctctgcatttcccttcattttacttttgtgtttcccttctttcggttaaaatggcaacgcaactcggttgattgaataataagaatt

SEQ ID NO: 1062 - DNA, 971 bp, Avena sativa
atctactatgtacatacatatacagcaccaactatacgtacgtagtaacaatgcatgtccacgtcaccagccatatacaggatgctgtacctggggaggcagcaggcccatatcagcacagtgttgttcgtcatagtcgcgtgtgccaggaatcgccccccatcaccaacctgaggacctcgctagcggtcaggcaacgatgcgcaaatgccaacccgctgtccacggcgctcgacaagctaggctgggaggttcttctcgccctgctttctccgggccgggggttgctactgtcattcagaatcctgtcgaggtccgagtactccatgaatctctccgtcgctgcctcccacgaaaggttgaacctttgctcgggggtgagaggctggggatctctagccatggcctctttcactctggcgacaaactcgtctgaggttttgtatgtcaggcagttggggaacgacatgaagaattcatttgatggatgctctgcgcagacgacaaatttccccattgcaagagcctctgctgttgctgtgcacaagacatcactaatgcttgggttaatgaaaaccttgtacctatgaagtgaatcatccgcatgatcccttcccttgaagaagttgagattcaaatcgagtttcctggcagtagagtggacttcttgcgagtcctcgccacttccatatacatccaacttgaatccttccaaatcgcttctatgtttggccaacaaatctaccagttccctgtatcctttggcccagaccatcttccccaagaagtacgcccccttggaaaatgactgctgcccgctctccatatcagctgtcaatttgtctccaatctgaaggaactttggatttacaccatgaacattacagacaatagacttaggcagatcctgagttgctgcagagagacgtaaaaccttatcgcagtacgctctggtcacccaattgttgata

SEQ ID NO: 1063 - DNA, 874 bp, Avena sativa
  modified_base (331)..(331): a, c, t, g, unknown or other
catcattgggcagatttaggattccagttgaggctgagaggttgagagacaatgatcttgttcttgagcaatatctcttacctaattctcctggaatagctggatttcgccttgattccttcagtgctataaggcctcgagtaacccattcccctttctcatcagagttggatacgagagatttttcattgacacatatagaagatagacatgtaaatcctgcaattcttcatatacaagtcacagttgtcaaggagtctggcaagctggttgtagaggaataccgtctaccagaagttaaagcaaacacaccactaatattttgatttcngatttacagcaagattgccgttgtgttatctttagattacatggggatgtcactgcctttgttgatgatattgctgatattgatggcttaaacttgcgaaatcttcctttggcttctggattgtctttgtcaaataaggtcaagctgtactactacgctgatacctatgagatgggaaagatcggcagtctctcagcagtatgatatatacgaggctgtacacgccaccatggaaccgttcacgggtggtacactggtgttgtaaactattacttgtgtgtcgatgtggtaggcgatagccacagtacacagtacgataccgcaatcgaccccacagtaacttcataacgttctgtaattcctgcttgatcatccagtgatacaagttgaggacccttggggatattaactgtagaatatttcgattttttctttgccattttccatagaatatctgtaaatcgaagtccagttccttttagaatgtttgaaaaatcaacgtgattgcactttttgaagctgccagatacaatttgtcaatag

SEQ ID NO: 1064 - DNA, 570 bp, Avena sativa
ttgacttgttaaggttcgtgaagatccagtatttcgaagagagaaaggtgatatccatgttgatactgtcttgaatgtgactcaggcaattttgggaggtactgttcaagtgccaacactcgccggggatgttgttctaaaggttaagcctggtactcaacctggtcaaaaggttgttctcagaggaaaaggaatcaagacacggaactcatattcatatggagatcagtatgtccatttcaatgtcaagatccctataaatttgacgcagagacagcgcacgcttctcgaggagtttgcaaaggaagagcaaggcgaggacgagaaggatgcggaaaaggcagctggcgcatcaggataagccggtctcaggagccaggccacccgcatttcatgggcggtttaacttgctccatacgcggagatagagtaggatgcagcctggaatttgcaggtgcaagttactactatatagttaggttgcatggaattgtcatggcaacaacaaatagatctttgttccgagtttctgtagctggaataatgctactagacccctgccaactggta

SEQ ID NO: 1065 - DNA, 1066 bp, Avena sativa
tatctatctcgatccactcagtgctaaatcagattcttgttgaactttacgcagagttacattcatatacagtccgttagtggtatggatagtagccccagtggtcatgttgattttttgatctggcacaagctggatgtccatcttctgtacaacgattgcaagtgccacaattgcttctagcagagcaaactgatctccaacacattttcgaggacctccactgaaagggataaacctgaaatcggtgtttgactcgtttggaatgggtccctccaaatcaaatctctctggaacgaattcatctgctctgtcccatacctcaggtgatctgtgtatattgtacacggaaatcataacatcttgaccagccttaaccttatagtttccaggaagcacatcatcaactagtgcacgccgtatcagcacaggaggatgtgggtatagccgcatagactcattgatacagcgcatcaagtactttagctcttttacatcttcatatctggggagtctaccttgtagaacacgatctacctcatcttgagctctccttagtgctgctggatccttactgagaagataaatagtccatgtgagtacagagcctgttgtttcatgaccagcaactaacattgacaatagatcatcccgtaactgcaaactgttgacctcttcacggctagcaagtaagaatcgcaggatgctaggatctgcctcatttacatattcatcgccgtcaatctgttcattttcagcatctacaatcgccttgcactttgtaattagctcttcaacggtattccttattgtgttaactgccttttctgcttttatctgtctaggaacaatcttgcacagcaaatcaatctgccaatatggtaaaagatctgttgagcgagcctctgcttctttgagtgcggtgtaaacagcatcaataacaggactatctgatgtgagggagtcaaagttgtagttgaacaaggacaaaccaatcacatctagagtcatttgagaaaacctcgcttccatattaacaggttcaccactcaaagcatatgtctca

SEQ ID NO: 1066 - DNA, 728 bp, Avena sativa
cccgggatgaccacttcctcgtattcctcgccgagcatgcaccaactctaaagagccttcgcctcatatcttctaaccacatcagtaacgaaggattgatggtggcaatcaacaagttccctatgcttgaggagcttgagctttcactctgtaaaaatgttttcggaaaggtctacgaggttattggcaaagcttgcccacgcctcagatctttcagactcagctatccttgcttctatagcattgaatatgccgaatacaacaagaacgaggaagcaatggggattgcggcaatgtctgcgctatgctcccttcacctctttggcagcgaactcaccaacaaaggattgacagcaatcctcgataactgcactcacctggagcatctggacatccggcattgtttcaatatctacatggataccgccttgcgtgcaaagtgttctagaataaagacgatgaagcttcctcatgactccaccaaagactacgagttccagatcggacacccgattcgaacactctcaaggaaaactcgacgagattgcgcgttttatggatcgatacttcagatttttggttgatgaggaagcaagagcagagtttcttttctctggagtctaacggcctgcttgcaacaataatcatcctgaaatctgaatactaggatgatcaatgtggtgcttatcattactgcctgcaccgtgtgtactactaaaatgaatgtg

SEQ ID NO: 1067 - DNA, 859 bp, Avena sativa
catatcatatatacattcattggttcatacctcatacctcataccatcttttaatcttttaatgaggataagttaactggtttcgaggtatggtgcagtgactgcgctcactgtacacattgatctatctttcttctaagtgaatttgtagttccagtacatagaccttcagatattttctcatgtattggtttgcttattagatgattataatgcccaaactcactgaaaagctgcttatcgtgtgtccattgatgttgtatcaggcagtccaaggagcttcataataacttggaagtggcacagaaaaacattgtagatcacacaactgctcagagaaaaagaaagtcaagggtagtttcagagtatgctgttatggctcgttcaatcattcataagaagtttcagctgttcagagaatctgcaatagctcagagagtgctagaagaagagaaggctgcggagaaggccaaacttgagcgtgtgaaggccccagagccgtcaagaacttctgcccttaaaaaggcacagaatacaaatagcagcatggccgctgaagctaatgataatataatagatgaagatggtgggattccagaagttggagatttagtttacgttcctaaactcaagaatcaagctactatagtcaaaatagatgcgtccagaaatgaagtgcaagtccaagctggcatgatgaagctcaaactaaagttgaaagacgtcaagatccagaagcagaggacatccagataaaatggttgtgctaccctgcaatagcagagataaaatggtgttctattcaatatataggttgtacattttgactatataatcatgcaattgtagctctccagtc

SEQ ID NO: 1068 - DNA, 934 bp, Avena sativa
ttcccgggatgcttggggccatacagtcattgtttgagggttcgatgtacacatttgttttcttgtggactcctgctttgagcccaaatgatgaagacattcctcatggcttcatatttgcaacattcatgctctcctcgatgttgggtagctcaattgcatctcgtctattagctcggaagatgaaggttgaaggttatatgcagatcgtgttctcgttatcagctttcactcttttcctccctgttgttaccaatttcatagtacctccctcagagaaaggtagcagcatctcatttggcggctgcctacagcttcttggtttctgtatatttgaatcatgtgttggcatattctggccatcaatcatgaagatgagatctcaatatattcctgaggaggcaagaagcactatcatgaatttcttccgcataccactcaacctgtttgtatgtgtggtgctttacaatgtgaatgcctttccaatcactgtcatgtttggcatgtgttctattttccttttcatcgcagcaattttgcagaggcggctgatggttgtgtctgaccttcacagatcgactaaagccacagagatgacagcagaagatgaaccactgaacccttagaatacaccagagatcatagacatgtgccggacattgaacagtctccaactacgtctgctctccgctggtctgctgaataagatggaaccagaaggctggaacaaacgctgtttagtttgctttgttaggtgctcacagtattcagttttgtcaggagcgagcacacgttcagcatgtactgagcttcagacggcacggtagagcatagcaccaaatctgtactttccatccttttcttatgcttgctaataggatctgtacagactgtacttaaatcccacgagtatatcttgacgaaagctawagcc

SEQ ID NO: 1069 - DNA, 350 bp, Avena sativa
tccacaagtttgatcctgctgaatgacagcatgctcaagccaccaatctctcgaaggttgatgtgtgcaaaggtcgagatgactgcatgcgttgttcatgaagtatttgcataaccactgaaataagaccttgcgtgttcccaacaagtgagccggcctgtgagagagaatattaagttgtagctgatccagaatttactgcagattcgcatttttgtagtagctgaacgttatgagcatgtaggctgcccatgtataagaaacgagaactggacaagaaatttcattgatgaggaaaccggcaattgacgattgacgaacctaaaamaaaaagttaattaatcgttttg

SEQ ID NO: 1070 - DNA, 888 bp, Avena sativa
  modified_base (25)..(25): a, c, t, g, unknown or other
tgatgagatgagcagaaggcttacntggaacatccgtgtgaggatagcactaggcactgctcgggcactagaatacctgcatgaggtgtgcttgccttctgttgttcataaaacttcaagtcctcaaacatcctacttgatgaagactataatgcacatttatctgactgtgggctcgctgccttgacacctaataccgagagacaggtttctaccgaagtggtcggctcatttggatacagtgccccagaattttccatgtcaggaatttatactgtaaagagtgatgtgtacagttttggggtagtgatgctagagctattgactggaaggaagccactagacagttctagagagaggtcagaacagtctcttgttagatgggctacgcctcagcttcatgatatcgatgcacttgctaagatggttgacccagcattaaatggaatgtaccctgctaaatctctctcccgctttgcagacataattgcactatgtgttcagccggagccagagttccgtcctcctatgtctgaggttgtccagcaactcgtgcgcctgatgcagagggctagcatagtaaggcggcaatcaggcgaagaactagggttttcgtatagagctccagaacgcgaaggagatacgagagacatttccttctaagcactctttcttcaatggcacaagtgcaaagaaggtcggaggttatttgcaaatactacaagaattgggtgattgcgtacgatctggcgacacgagttgttcagacaattcaggatcaaacgaatgtgagaagataattttggtatcaacatggttaaattatgttcattttcctctccttgtgtggggtagttcacttcagagttgggtcactggtagttgaaa

SEQ ID NO: 1071 - DNA, 484 bp, Avena sativa
caaatgctcataaccctccagtttggcctgcgacttctgaagcatcagcacagcaatggggggctgcttatccaccgcaggccacttatcctgcatatggagcttatgactacagccatcaaatgcctcaatctgctcctcaagcagcagcttatggtgcctatccttctacatacccatcccaggcgtacccacagcagagctatgcacaacccgccgcaatgccagtggcagcagcaccagtagccgcaccagcaccggcaccggcaccagtagctgcttaccctcagcaacctgccgcagctcctcaaccttactacggcgccgcggccacgtactactgatttgtagactgatgcagtggggggtgcttcatcgagtatatgactatcagtctgcagtcaaattagcgcaggttttgccwgccagaggaatctcaaagacccttccgtttcgggggaaaagatgcattccagggttgtgg

SEQ ID NO: 1072 - DNA, 584 bp, Avena sativa
ggtcgaccatgttgacttcttaaagcccgtggatgtaggagacttccttcgattcaaatcatgtgtcttgttcacccagcttgagaataaatggcaacccctggtaaatgtcgaagtggtcgctcatgtaacaaggcccgagctccgaaaaagcgagatctccaacacctttcacttcaccttctcggtcagcagcgatgcgttgaagaatggattgacgatccgcagtgttgttccctcaaccgaggaagaggcacgccgtataatagagcgcatggatgcagagggtttgcttgattgatccttcggcagagtcactggtttcagccatttgttagcactttttttcactggccatagtactaactagtcggaaatgtaccccatgatctgtacatcaccagataagtatcaacctatcatgctggcagtagagcggcaaaaaatgtagccgtctggtaccaccattcgggcttttctttgggggaaattgtctgtagtatagtactccagtatataataacctcaacctcgagacgcaaaaaatcgtacctttgtggtgagcactatctattgtctattga

SEQ ID NO: 1073 - DNA, 739 bp, Avena sativa
ttaatagcgaggccaaggcgtccgaaagccgccgcgaggcggagacggtggtccgcgcgtgcggccctgtattcgaggggataacgtcgctggtcgacgtcggcggcgggaacggcacggccgcgatggcaatcgccagggccttcccgcacgtcaagtgcacggttttggagctcccgcatgtggtggacgccgtgagagccttgccacgcgaagaagaaggcgcggtggagtttgtcgccggcgatatgatgcagagcattccaccggcagatgcaattctattcaagtatgttctacacaattggagcgacgaggattgcgtgggaatcctcacacggtgcagagaggccattcccagcggaggaaaagttataatcatcgacacagtggttgggttcgggtctccctctcatgaaatacttgagagccagcttctgatggacatgtgcatgatggtgctcctcgacggtaaagagcgagatgagcagtgttggggcaagatattcatggaagcaggattcagtcactacaaaattaagcatctccaagcattgggatccaccattgaagtctatgtgtagcctctgactcccaatagctcacatctctggatccagaactgccagaaaagacctcaccatgcttttcatctgaaattgctttttatccgtgtattaataaaccgtgtatggtgtgacgttgtttcacttgctgatttgctattttgtactacttg

SEQ ID NO: 1074 - DNA, 829 bp, Avena sativa
attgaccatgagctccgcaagcttcgcttgattgactggggacttgctgagttttactttcctgagaaggagtacaatgttcgtgttgcttcaaggtattttaaagggcctgagttacttgtggacttccaagcgtatgattactctttggacatgtggagccttggctgtatgtttgctggaatgatattccgcaaggaaccattcttctatggccatgacaaccatgaccagcttctcaaaataaccaaggtgctaggtactgagcagcttaatgcttatttgaacaaatacagaattgtgcttgatcctcagatagaggctctgattgggagccacagcacgaaaccctggtctaagtttgtcactgctgagaataggcatctcgtctccgaagaggcaattgattttctcgataaacttcttcgatttgaccatcaagataggctcacagccgaagaagctatggcgcatgcctactttgagcaggtgagggcagcagaaaacagcagagggagaacatagccaagagaaccaagagaatagacccgaactgcctctgtcaaaccacactatgggtaggggcattgcggaattggatccttctagcatggagttgatgcaaatgttgattgccggattatatagttgtcacatgcatctcggatatgctgaggcttgaaattttcttttgaattttgtaactttttgaaaggttaaactgcgagcctacaaaaacatgtaggctatgcattgtcatacctgataagttttgacgcaattaaactgttcatcaagtggaagttctcaatgtgtgtgaactaaaaaa

SEQ ID NO: 1075 - DNA, 980 bp, Avena sativa
agatacaggatcgatccacgcacaaacaaatgaatggtgcccgacagcgacacgagcatcatcgtcttgccctgtagtacatgctgcacgctcctccttagctaaagcttccagtagaccccggcgcggtggaagacgccggcgacgagcgcccagagcaggatctgcgcgatgatgacgtagaggaggatgcccaccctggtcgagtgccacacacccacgaacacgtgcttcctcacccagtaaaccagtgtgttgttggtcccgtcgtagtaccagccgttgaggaagccctcgaagatgcccgcggcggccatcacgtacaccagcatcgcgttcatgccgatccaccgcagcggcgcaaagaggcgaccaagattcaggatatcaacaaggaagtagagcatggaaaatgcgatgccagcggcaccggcagtcacgcagatgtagctcaacgtatacagttgtttgttcagaggaatcgcatgtgaaaagtgcagaatgattccaagaacaaggagaccgatgcccatggtaacccactgctttagccggtccatgtgactcttcatatgaacaagcacatgcccatagtgtaccccgatgatcgtacttaacactgcagaaaatgagcttagtatcccttcaggttcaaatggtgaggcacaccatgccggggcatcctttttgaaaggtccttcatgtggggaaacatcagtgcaggccctgtgcctcctccatgcaggtttctggtacaagtgattgatgccgagaactttacgatcaatgtaacctacagcattgcaaggagggctcagatttgcccttgtaccacatgtcactgttaaaactttccaaagtctgggctgtcaacatttcgcactctgaactcccagtccggaacgtaaatcccgtaaaccagggacaagtagatcaagagaatgcaagctgcaacaatccactgggaaggtacagcctga

SEQ ID NO: 1076 - DNA, 838 bp, Avena sativa
gtacggacggggactccgggagggtggaagaggaggccgaagtggtgactcccgagacggaggtcgaggtggaggtggcgacaccggagacagaggtggatggggatgatcctatcagcaagaagaagaggaggcaaatgagaaatagggattctgccatgaagtcgagggagaggaagaagacatatgtgaaggatttggagacaaagaacaagtatcttgatgcggagtgccgccgcctcagctatgcactccagtgctgcgtagctgagaacatggcactgcgccagagcatgttaaaggataggcccgttggtgcacccacagccatgcaggagtctgccgtactcacggaaaccctgccgttggtttccctgctttggctggtgagcatcgtgtgcctattcctcatgcccggactacccaacagaagcctggtggctccaaggagcgccggaagagatctcgtgatggtagccagaaagctaagcagtgataaaccagagactttggagcttctacttcatggaaggcgctgcaggggcatgcgggcgaggatcaagttagatacctcgccatttcatgcagctgctgcttgctaggctagtgtggccttccttgcaagttcccagtatgtagtgtagatagcagtgcgtactagtatgtgtgatcctcttgctgccaccgtggctttatccatggactatcttttttgctttccccccctcttgttcgatgatcttctaatcaaatgctagttttgaaatctggctttgtgtgttcctttatgtctcggcctaagtttgggcagtcttagtgtggttctcctggattatgc

SEQ ID NO: 1077 - DNA, 907 bp, Avena sativa
tgtttctaaaggctggagattgttattcttttggttctttctgcacagcagaggtatttggaagcagaagtggtgactgatgctgcattagatgaaactgcaaaatgggaacaaggtccattacttagaataagggctaaactgaaagcagcccaatcgttaccaatggaagcagttgaagcataccgtgcccttcttgctcttgttcaggcacagcggaaggcttacggatctgtaaaaaatggcacagaggacggggatgataaagtgagtgagtttgaagtttggcaaggtcttgctaatttgtatgctagtctttcgtactggagagatgccgaaatatgtttgcagaaggctaaatctctaaaaacatattctgccacaacacttcatgcagaaggtgacatgcatgagatccgtgcggaaactcagcatgcgctggctgcatacttgaacgcactctcgacagaggtagatcatgtaccatccaaggtatcaatcggtgctctcctgtctaaacaagggcccaagtacctccctgtggcaaggagcttcctttcggatgccctaaggcttgagcctacaaaccgggctgcttggttctacctagggcaggtacacaagcacgatgggagactagctgacgccgctgattgcttccaagcggcctcaatgcttgaggagtcggacccagtagaaagtctccggccgctctaatgggtcatctggaacaacttgaggtttcttttttaaacggcaaaaattcatgttccatcttctcctttttcggtacatagcttggcagaagttgggggccagctacctgtattttgaattcctaggagccactgtgtttgtcacactgctgtcgacaaatgttgtaataggttgctgcgtggtgtataag

SEQ ID NO: 1078 - DNA, 672 bp, Avena sativa
gtcgccaagctcatgaaggacgtcgagggcacctgcagcgggcggcacgggttcgtggtggcgatcacgggggtggaggacgtcggcaaggggctcatccgggagggcacgggcttcgtcaccttccccgtcaagtaccagtgcgtcgtcttccgccccttcaagggcgagatcctcgaggccgtcgtcaccatggtcaacaagatgggattcttcgcagaggctgggcctgtgcagatcttcgtgtcaaatcatttgattcctgacgatatggagttccaatctggtgatgtgccaaactacacaacttctgatggatcggtgaaaattcaaaaagagagtgaggttcgtttgaagatcataggcacccgtgttgatgcaacagaaattttttgcatcggcacgataaaagatgactatctgggcattatcagtgatcctggtgcagcatcataaatgatccagtcaagactgcagccttataatactcttcaacttcgacatactgatgcattgtaacgttgagttccagaagcccccaaggaggttgcaagagaactgggtcatgtattatcataactaggatcttattaactgtagttgatgagccacggtagtggacagttggttaatttattggaatttcaagcactcgtctgaactttcatcaga

SEQ ID NO: 1079 - DNA, 803 bp, Avena sativa
ggcaagctttgttcgcctagttggaaaccatgctgcaggttcactttttgtatccccattcatgtttgctgtgcctgatgaagtggcgttatgtttgctgtgcctgatgaactggtgttatgtttgttctattgtaatttaggaaatattaaacctgttccttttctccttcttaggactggtaaatgcctaaatcatgcgtcccagtgtggtgctggtgttggtatatttcttttggtgaggaaaacaactatcctgctgcaacgatcagctcgtcttgcattttggccatctctgtaccttgacgccttcggagaggaggatcatgaaatgcacagaggaaagcctttatatcttagccaagaaagatatgcggccctcacatatctggtggcatctcatagccttgaccggacttctgaagttctgcggcagacgactatcaacttttatacgtctgactaagtctgcattgctggagaagacgctgagttgttgcaccacacatacagtgtgagggcggtggatgctgacggcatttcagatgaccgatgcggcggtgagtgtggtgggtaagcggaggcggagacggattcacaggctggtctttcgtttggattgcacgacaccgatggttgctgccttagctttgtaaaattgtaagtgcagaagtagtggtcgagtgtttcagaagtgtccgaacagatgggtattgttgattaatgccatataagagaagtggtaattaatgagatcttattctcatctggcctttcctttgacttacgtttgtttccatcaat

SEQ ID NO: 1080 - DNA, 975 bp, Avena sativa
gcaagcaatgcaaatcccagtgcatcaaccatggcagatattgtgcaccggacccagagcaggatttcagcaaaggatatgatggaaaagatgtcgtggttcaaaatctacatcaagtttgtgtattcaaggttgctaatgacactggcaagccatggttatggtgggactatgtacatgacttcgccattagatgccctatgaaggagaagaagtacacacatgaatgtgcaactgatgttattaagtcacttgggttggaccttgataaggtagacaagtgtgttggagatcctgaagctgatgaggaaaatccaattctaaaggcagaacaagatgcccaaattggtcatggtaaacgaggagatgtcacgatactgccaacgcttgttgtcaacaacaggcaataccgaggtaagttggacaaaggtgctgtgctcaaagctatctgttcaggatttgaggagacaactgaacctgctatttgtttgagtgaagacgttcaaacaaatgagtgcttggacaacaatggaggttgctggattgacaaggctaataacgtcaccgcatgcaaggataccttccgtgggcgtgtttgtgagtgccctattgtcaaaggtgtcaagtttgctggtgatggatatacgaattgtgaagcttctggtattgggaggtgtcagatcaacaatggaggatgctgggaggatactagagatgggaagacaatatctgcctgcttacatgaagaatctaaaggttgcaaatgcccagtaggtttcacgggcgatggtgtcaaaagttgtgaagatattgatgaatgcaaaacaaaatccgcctgtcagtgtgatggctgcagctgcaaaaatacatggggaagctatgaatgcagctgcggtgataacaatatgttatacatgagagagcaagacacttgtatcagcaaacaaggactagcctcctcggttgggtggagct

SEQ ID NO: 1081 - DNA, 945 bp, Avena sativa
tacaactatcagctatccttggagtctcttgtgaccaactggagcaaccattcagaatcatgtaagataagaaacatagcacctattgatgcaacaataagaacattattactttcatctctaaggaaagaaacaacaacatttcatataccaacaagtaccttcatgagacttgctaatctgcattacgatgtggactcagcaaagtttctacttgtgggttgatgaaattcccagtgcaaagacaaacaggtggcagtatgcagtatacaaggagtgggattgatgtgagtggataaatagtggtgttcatgtcagcaaatctctccaagaacttgagccttccacaatatccataccatatgagacaatgcgtacccaagagaatttccacaaacccaagagcccaccaaagcacttggttcagacgatataaaaggtaaatgggtgattttcaagtcttcatccttcctccgcaaagcaaagaaaataatcccggctttttaaacttaattgggggttcgtaaccatataaagatgttctgttgaacaaacataagctgttccttgaatgccatcgatacctctcacgttaatggtaaggagtcttccatgttctggtcagtacaacattgatatcagcatttccacgtccttcaaaagcagcagtgcttgttccattagtcatgggttccaatccaactctctttaaacacaacattgccaagcctgccagagtactcctttgatggatatggtaggaaaatggatgtccacgctagccagtatttccaacagggggaacatatgatctggacatggtccaagaaattctcctgagatctgaaaacaaataccagatgaagaaacattttaattccatgttcctaaatagtgtaagcacacttcatacacattccaattctagcatggatacgagaacaa

SEQ ID NO: 1082 - DNA, 731 bp, Avena sativa
catgaagacatgggtatcccatggagtatcgcgaagcttggtgtgcagcaggggatgtggggctgtgtcaaacgtatagagcctggtttgagggcataccaaatagctagggctgccggcgagcccatgtcgaaatatgctgctatcgcgcacgtcaacacaaagtttgtcgctgaagagctcaccgcttcagaaggcaacagcgaggccagttcaagcagcaacaacaccgtagccgagaagccaaagcactgggcagggaacctacctaaagtcttcctgatcggtggcgcggtcgccctggcttgctccttcgaccagggactgctgaccaaggctgtcatattcggcacggcgaggaggtttgcgggaccaggaaggagataggaacaggacatcgacgatccatgttgcgcatgctaatgcacattgttcggatgcacacctgagcaatgctatccagtgtttcagtccagtaagctcgtgtttgcagatgaagacggctagtgcagaaaagaaaagcatctgtaagcaggcctgtacatactgctgtagctgcagtttgtgcggctcatagtttagcatgttagaatagaaccatgaatgataatgatttctgagacagctggatgctgagacaatgccatcagatggtgtacaatgaaagtgtaaggaagactcatgttctggggtgctataaaattatatactccctccatttacaaaaaaaa

SEQ ID NO: 1083 - DNA, 713 bp, Avena sativa
cattaaagatgtacaacaattctgctggccaacagagtacaattgctggaattgaagctcagattggtgttttgcactatatctcggggaattatggtgaggcgtatgactccttcaaaagtgcgattactaagctccgcacatgtggtgagaaaaagtccgccttcttcggtattgccctgaaccagatgggactggcatgtgttcaaagatactccatcaatgaagctgcagaactcttcgaggaagctagaaccgttctggagcaagaatatgggccatatcatccagatactctaggagtatacagcaatcttgctggaacttatgatgcaatgggaagactggatgaggccattgagatcttggaatacgttgttgggatgcgtgaagagaagctaggtactgcgaacccagatgtcgacgacgagaagcggaggcttgcggagctactcaaggaggctggtcgggggagaagcaggaaggcgatgtccctagaaaatctgctcgagaccaacaacccatacactgtcacgaagaggactacagttgcagcatgaatgaactactttgaaagacaaagaacaatataatgctacgaatttgtgtatcaattggtttattcaaatgtggtgagaggggtacatgggaatagtaggattggttttaagaatctagagacacaaagtgttctgattgattgtttagtaaaa

SEQ ID NO: 1084 - DNA, 694 bp, Avena sativa
atcagtagtccctggttatggaggaggctttggaagctcaggtaatgttccgagtttcgggcaaaaccagagtgccccctcccctgccacaacaatggggattgatgaagctttaagcgcacagttcaaagaggccaatcactacatggccctacagcagggcgacaactctacgatgtggcttcatggagctgctggttcaagaactgtttcagctgttccgcctggtaacttctacggtttccagggccagagcgcgcagggtggcttccgccaggcgcagcagccctctcagtacggtggtcttgggtaccctagtttctaccagtcgcaggctggtatgccgcaggagcaccagcagaaccctgctgagggacgcttgaacagctcccagactgccccgactcagccttcacaccagatgtggcagcacagctactaaggtctaggcctgtgtttctgtggaagaagcctcttttacactgccaggctatctgtgcgccttggcatgtgccctgaagcgagcagatcagctgagctgccgtcttgagcgccaagaaggggaggacgatgtgttccatagtttctgagtatgcttgttttctttctttctgttcttatttttcactttattgcgtgtgttttggaactagtttcagcgtgtcgtgagttcctactcgatagtgagctgttg

SEQ ID NO: 1085 - DNA, 754 bp, Avena sativa
ttgggctattgggttgttagcatctggacagagtagcacaatcactggcacatatgcaggccaattcgtcatgggaggtttccttaatcttcgattgaagaagtggttacgagcaatcattactcgaagctttgccattattccaactatgatcgtggccctattttttgatactgaagatcctaccatggacattctgaacgagtcactcaatgttcttcagtccatacagataccatttgcactaattcccctcatcacccttgtctcgagtgagcagctcatggggtcattcgtgattggtcctatcaccaaagtgattagttggatcgtcacgattttcttgatgctcatcaacggataccttgtattctccttctataccgatgaagtccggggcgcatttgttcgctcaagcttgtcggttgtgctggttgtttacctcacattcgtcgtctatcttatagtgagaaacactacgctgtattctcgcctttgctcatcattctcgaagagctcatgagaacttttgagactgttcattcatgaagatgaactgaactggataatattggaagaaagctgctccccagtatacaacttgtacggcttcctatttgttagctccagggagaagtctatattgtatattattgatgttgtataattgtatttgtggattagcagcctcccctttaggattgggctaaactaaacagcaccaacattcatgtatttgggtgataatacagta

SEQ ID NO: 1086 - DNA, 679 bp, Avena sativa
agaacaccttcgacgggaatggcgtcaggaggctgctggcaaacaagttcgagctggacaagctgttggattctgtgtggagagacgtgccgacaggacacgagaagaaagtgtccaaggaacacctgcgggtcgcactcgataagatggctgatgcagcaagcttaccactccatggcgctgtcagccaggtggatgcggtggtgaacgaggcgctcaagaaggcgaacgccgacgacgggaaggaggtagacgaagcggagttcaagaaactgctgacggagatccttggggccgtgatgctgcagctgaaaggcgaaccgatcttcttctccaccagcaccgtcgtccacgagccactgtccagttcgtccgccctgttgtcgtcgccggtggtggcagcaccgccgagtcagtgaaggccggattgcccagaaggaaaggtaaatatgagagtgggctatgtataaaagcctctccataagcagtgcctgtcgtgatggtattttttatccaatcacggcattcgtgctttgcttggccgcaacctgacgggatgcagccatgcatttcctcaggtttgttcgcctggttgatgtataactttgtaataaggctttcaaagccagacacattgtcaatgggaaatgcaagtaagtttaagcgatttagaaactta

SEQ ID NO: 1087 - DNA, 556 bp, Avena sativa
aagcaggttcttgctttgctttccaagcttgacgcacagaacgtacattttactgaatcgctaccgagtgatgcaaaccagtctgtccacattgttgctgatgatggtttggaggcatatctacctttggctgacatggttgatgtgtctgaggaagttaagcggctctccaagcgcctctctaagatgcagacagaatatgatgctctgttggcacgtctcagttcacccagttttgtagagaaggcccctgcagatattgttcgtggagttcgtgaaaaagcatccgaggcagaggagaagatcgccctgactaagacccggctttctttcctacagtcaacagtttccgcatagacgtattattcaccttcgatgttgggatctgccatcggaaggccaattttgatttatactggctcgtggctacaggtgttaaaacgcttcactgtgaagcaaaatttccactcaaatggtcatcccagggtaggagggcatagctgtagatgggttacttcataatggcatgctaaaagccttacatattcatactgat

SEQ ID NO: 1088 - DNA, 771 bp, Avena sativa
gctgagtgatacaggtggcaccagccatactggaagtgtagatgacctgaaggttgatggcatcgagacaggcagtagacacttctcctcatgctgcagttcaccaaagatgtcagattgcgcttctaaagagcacatggaggattattcagtctatggtagcgaagaagatgctgatgacccacctgatgctgaaactgatgaagatctaactgacgaagaaagagacgttcacgagatcgaagcaggctccgtcgacgaacactccaccaagtccgacgaggagtacgacgacctcgccatgcaggacgtgatggagaacggggactgctccgacgacgacgacgagcaggctgcagggcctggcgccaggagctcactagccctggatgagaacatccttggagcagctgatggtgacgatgccatggtggatggcaggtaccgccacagcctggatctcttcttcaagatgtccaaggaagcagccgccacagagttgccgtgcgcgtagcgcttccgatcccgaccaacccatatatgggaagaaaatttggagcctgcaccagttgttgtacccatatatgagcttattatatggtggttatgaatgttagttaggacctgatgcttgtgtaagcttaagaatatttaggagtcttgggctttgcccttctgatgaaactggaataatgagatgttgaaaactgcatttggaattgcacaagaatctcttggcatccaaagagggccgctgaaggtgcccacagt

SEQ ID NO: 1089 - DNA, 747 bp, Avena sativa
gaagaaggttaacttttttgtcggactatatccatttttgtcattaaacaagagttctatgaagcaatcatcaattggatatattgcaaggtcatctctccttagtaaaggggttagtttgcttgtgtcttttattggatcactccaaccttcagttacaagaaacatcgtgagtaggttccttggttcttcctggtctgctgcagctgttgatgctggctgtagccatctcttgcagtaccacacgatgcaaaatgtgcttttcatggcaaagacggaattcctaaagcttcatgaagaaccggactggaatttcatcagagcaaaacaggacgaaattgcttttttgtttggtttggatgatcactggggtccactgactcacatggaagagatctcaaagtatgctccaggggttgccttgtcgatcgagaaagaaggtcacacacatagctattgctgcacagaggctggatccttctgggttgcggactacgtggccaacttgattaaaaacaaaatgctcatcggagatagctgatataaatcaagaactggattttaacgtccatgggctttggacctgaaataagctagacctggctggactgggcgtcattggacttggacctgaagaggatactaggtccaatagcactggatgagtttggacctgaagaggatatgattcgtagataaggattcaaactcaaagtaagagtactaagcctattaagtacttgcgac

SEQ ID NO: 1090 - DNA, 836 bp, Avena sativa
  modified_base (819)..(819): a, c, t, g, unknown or other
ttatgaagttcttgagtatctgatagagattctgcttcagctgtgctgtttgatcgtactcggcacatccagtgaagattacaaagaagtgggagcttgcatcacacacagaagggttaccttggaaagttgcaagtgacaaaaaggcctttcatgctaattattcgtatcagtctatgctactcctctgttaagaccatcactaggtgtggagccaaagacaccaggggacaaaaccaaaaagaatcattatgtgcaataacatgaggaaaactgcaattgcgaaaaccctcactactttcaatcgctaatagtattatatatgtactttcagaagagagatcacacttgaacgttgtacttgaaggcacccggcgcagtatggctcccattacttctccagatttcaggtaggaaaagaagggtgtttctttcacctcttgcttttccacgcgggcaccgatgcaaacggctccccagatatttcatctattgctgaaattatttcttcttaccatcctcttggcacctccttcaggtagctaccaaaaacttgggccgaattaacaccagggagcaggtaactagcaagcttttcatcaactgaaacaggcaacctaggcatcttgctcattattccaggtatctggctcatgctttgtagaagatcattgatgtttattcttgtgcgatggaaaagatcaatgttgttctgagcctgtgatgttaaaatatttgcttctatttgattgagaagttgagcattttcttccaatatatttagcattgcacggtcaatgtcagaggctgccgtaaggnggacctctggtgtctgt

SEQ ID NO: 1091 - DNA, 742 bp, Avena sativa
gatcatttagttccacataaagtagatgccttgaaagatagctctacgtcccagatttcaggtggatggaggcatacaatggcacttacatccgacggaaagctttatggatggggatggaacaagtttggacaagttggtgctggggatactgaagatcactgttccccagtggagatcaattttccagaggaacagaaggttgcccaagttgcttgtggatggaggcatactcttgcttttacagaaaggaaaaatgttttcgcatggggaaggggtactagtggacaacttggtcatggtgaaatagttgacaggaacacacccaagctgattgatgccctaagcccggatggttctggctgcaagaagttagagtcttcaacatctgttccatttgcagccaaagtttgggtctcgccctcggaaagatatgcccttgttcctgatgagaaggttgcaaaagcgggcgaagtcacagcaagcggcaatggtgctgatgcaagcgtaccagagaacgatgtaaagagaatgcgtgtgtcatcctagttcatcctagtttcgacgacctaccatctatatgcgtacctcattaaccctagtaccactatcgaaaagccttgtgcattggttcaccagttcccatctagtggtgtccaatctttttgtgcattccaattccaatctgttgaatgctcttccaggagagggacctcctggtgtcgagatgatgatgtgtctc

SEQ ID NO: 1092 - DNA, 900 bp, Avena sativa
cgttgatttttcgggtatggtgtggtgtgttccggatccacatccagattgatatctggcgcaagtgttcctgttccagattaatatctcccaatcgtgttgtattgcagactactatacttgattttcatgagtacacaacgagaaacatcgggggcttctactgctgttttcattgatggatttgtatttgcatgtcaaagcgcgtgagattatttatctcccgttgctcttgccttagtgatacattctcttctttttttcctgatctgccatttgcattttctttctgttcttactttgttagattgtggggtttgctctgtggtttcgcacatggatttgaggttgggtttccttgctgctccatccgatggattagtcattttttaagtatgctagttaattttggagctagcctgatggatttgtgtctacagtgctacgatttgcagcttcatgtgaggatttcatgattactagtcccgtctcgtggtgctaagaaggaggaaggggctggagatctgcatccacgtgggtccgtgcagctccaccttctccaccaggacgagctggtcacaggctcaccgctcggcgcccctccgtccttctccccaaggtcatcgttcactgggaggtggcctgctccggcagttgcctgctgtgagcagggaggaggccccactccggccacggcgtattgcgacgaggacggacgagtccaggaggggcacaccgtccgtggcgtgcggcgagcatggaggaggccttctcctttttctgattttttttcatatttgtagtactccctccgtctaaaaaggatgtctcaagtttgtttgaatttagatgtatctatatactaaatagtgtctagatacatctaagtttagacaaact

SEQ ID NO: 1093 - DNA, 722 bp, Avena sativa
  modified_base (249)..(249): a, c, t, g, unknown or other
caactgaacaggctcacttcactgatataaacaaggtcagacaccaatgctaatgctccaaatcgtactgtagatatattcacaacttgacgaacactttttctcacagtgacatggttcagtaaaaggattgcgccggagattactagatcagaaggcgaagctgtactcatcctcgccgttcatctggatgaaccacaggatggccagcccaaagaccccgaaggaggacagctccatcgtcaacgnaccccacccaatgacaccggcgtgcttcaggatcgatgggatggcgatgctaccgacgatcgacgccccagtcaggaacttcgtgaagttcacccatgcatctccctcgttagacatcatcgatggagaatcagagcccaggaaaaatatgagtggcatgggtagtacgaggtacatcagaactgttaacattggccaccagttgttgtatagagcacaggccagaatctgcaatacaattccaccagataccaatattgcgagtgctgcaagtcttccactgtgcaaacaagtcctcatactacgtgagagcgccatcgttttccttccgtgttcttcagatacaggtgcgacccgctgtgaatcgcgtgcggcagaaccggccgccgccgtcgccgcgttggtgargaggagccgccgtcgtcagctgcgaggacgaggcggggaggggatctcggtggattatcccggga

SEQ ID NO: 1094 - DNA, 708 bp, Avena sativa
tcggcctcctcgatgaggaggagaagagcgtactacctggaaactttgagcggcactggggtatcttctcatttgatgggcaggccaagtacccattgaacctcgggttaggcaatccagtgctgaagaatgctaaggaggttccgtatcttccatcgcgatggtgtgtcgcaaaccctgctcggagccttgacgaggcgtcgaatcacctgaagcttgcttgtgacacggcggattgcaccactctctactacggaggttcgtgctatggcattgggcagaagggcaacgtttcctttgctttcaacagctattaccagcggcagaagcaggatccaaagagctgtgacttcgacgggaatgggatgataacctacctcgatccatctatcggcgaatgccgctttctcgtggccattgacgatagtaagagctctgcagttgcatcttgtggaggaggttgctgtgcggtcttctgtggggtgtcggttttaactttgtgggtgttcatgtaccttagaatgatgggttccgtctgaagttgaaactgtagtgctggtggggcatgataagcgtgcctttgtgaatagcatgtattcttatctttttagatgactagatttagggaaggaaggcatagttgccatttatgaatcctagattattgtgaggttagcctaggagaacttctagtactgtacttactat

SEQ ID NO: 1095 - DNA, 797 bp, Avena sativa
gttcagcgatgctattggacgtcattgtacctttatgagatgttcaaggtccgaaaaacgctcctgcacatttggcagcaagaatggccgcctatgcagggatactcgaagcaaacttagttttgtgaatgaaggacagctgctactagtatctgaagacagtgtctctgatctcaacaggcggcttagttcaagtaataatggaaatggcaagcaacgggttgttgttgatgcaatgagatttcgccccaacattgttatctctgggtccacgccatacgacgaggacaactggagaagacttcacattggagatgccaattttacttccatgggaggatgcaaccgttgccagatgatcaacctacagcagaactcaggacaggtggtcaggtcgaaggaaccgttggcaactttagcatcttacagacgagaaaagggcaagattttgtttggtgtcctgttaaactacgaagacggcttggatggggaagaggagatcatcgcagagagatggctccaagtagggcaagaagtgcacccttcgacagagtgattttgtgtacagatatgggctcaacaactacatcagaaagactgtacgcggccgtcgagtcgctacatactgtaacatatgcagatatgcaattacatcagttggagagtttcagttaggatcaacgttgtgtgtaacaatttttttaaatgtatgtaatactttttacacatataaggcctgttttttagagaggaaaaaagggaatgaaaaatgtagtcagagagtgttcagatttcag

SEQ ID NO: 1096 - DNA, 492 bp, Avena sativa
gagatttcgccccaacattgttatctctggtccacgccatacgacgaggacaactggagaagacttcacattggagatgccaattttactttccatgggaggatgcaaccgttgccagatgatcaacctacagcagaactcaggacaggtggtcaagtcgaaggaaccgttggcaactttagcatcttacagacgagaaaagggcaagattttgtttggtgtcctgttaaactacgaagacggcttggatggggaagaggagatcatcgcagagacatggctccaagtagggcaagaagtgcacccttcgacagagtgattttgtgtacagatatgggctcaccaactacatcagaaagattctacgcggccgttgagtcgctacatactgtaacatatgctgatatgcaattacatcagttggagagtttcagttaggatcaacgttgtgtgtaacaatttttaaattgtatgtaatactttttactacat

SEQ ID NO: 1097 - DNA, 785 bp, Avena sativa
cagaataggacgaactgggagggcaaataagaccggtgcatctatatcgcttgtttcaccagaggaggaggatgtttttgaagagattgaaaacatgctgcaggatgttgagaaaaaagacaccaagtgcatcttacctttcccgttacttacaaaaaatgccgtggagtctctacggtataggtctcaggatgttgctaggagtgtgacgagccgtgatatacaggaagcacgtcgtcaagacattaagaatgaaatcctcaattctgataagttgaaggctcattttgaagagaacccgacagaccttgatttgctcaaacatgataagatactaagcaacaaagcaattcctgttcacctgcgtgatgtccctgaatacctaattgaccccacaacaaaagaatccagcaatgcgatcaaacttttaagggctgctatgggtgttgataacccgggaaggaagaaaagaatgggattcaggaggggatcaggcaaaagtagtgacccccttagaacgttctctgctgagggcaaaccacgaagacgaggggggaaggaaagagacggagaacaagatagaagaaagaggaggaagaaggcagaagtctaagatcgcaagcagttcactatcaattttgctcgcttttgtatttttagacttcttgctttgtggctgtaactttgtaccatctcgatggataggggttgtcaaacgaagacaaagcttaatgtacaagtgctatgtatacctttacaatgagaatgagctgacaatttcgatt

SEQ ID NO: 1098 - DNA, 637 bp, Avena sativa
gagcgatttgatctctcatttccggaattctagtctgatgaatgaagacaaatggtgccgccctatacttttccacaaagatggtccgaatgcaggggaccaggaaccttttcctgtgggaaacaacatctggcctaggaccggccgaaacaggcctctccatagcgcagactccagaggcggcgacgcgagtctgtcaacctcgcctaaccaggagaactctagccgcagagccaacgcgatcgaggtcgaggactcgatgttcgctcactaaccggggaccaaggaaagcccgcaataaacccgtccccagttttgttatctattttctcctcggcaatgtcagggcgtttttgcccctgtcaaactagggtttggagaaagagcgagaagaccaaaggcgcaagaggtggtgatgtgtgttttgatctgtgtcgaaacgaacttgtacagtggagtcgtgaggggtgtttgaatgctaattgatgtgaatgtttggaatcttgttctgtgttattgtcaacatttttctgcaatgagtgcgtctgagaactattgttggtgacaatggtacgtcggcaaactttaactacctgcacctagttgtaagttcagttcttagtgataaaaactctcg

SEQ ID NO: 1099 - DNA, 563 bp, Avena sativa
ttgctgctggcggtgctgcatcgctattttctggcgcgctgtccatcgctttgtgctatatacagaggatttttcggtctggtactcggcatccgcaacctcggattttgtgcctgcagggttctccggatggacctgaacaatacgtggcagtgatgaattcaatattttcagcacaacgttccatggttccaattgattcatgtatcgtggggacacaagattctgctttcttgcagcaggcttcgcatataacaggaggagtttatatgaagccccaagaactaaatggtctatttcaataccttgctgctgtatttgcatctgatttacactcgagaacgttcctgcgtctccctaagaccatgggagtggatttccgtgcctcatgtttctgccataagaagactattgacatgggatatgtttgttcagtttgcttgtcaatattctgcaagtaccataagaaatgttcaacctgtcagaattcagccgtgtcatgcctgatctgaattccatgccagatcagaggcagtagtctgtaaacagcgaaatgcaaggct

SEQ ID NO: 1100 - DNA, 750 bp, Avena sativa
aatgtttactttatgtttgcaaatgcaacggtatctttcgagcaaatcgtgtcatcgtaccctggtccattatcacttgtttcaatactgtgccctgatcctcactttaagaagaagcatcacaagagaagagttctacagacaccactagtggattcaatcacacggaacctttgtctgggtggacgggttcttgtacaatcagatgtgcttgatgtagctgcagacatgagagaaaggtttgatggatactcagatgtgtttgaacatgttgattccattgataaagatcttcagtgtgacaccgaaggttggcttctggacaaccctatgggaatacgtacggagagggaaatccatgctgagttagaaggagcaaccatatataggaggatgtaccaaaagacgagatgtttctcttcagattactccattagttcagtggatgcaagtgttattcagttagttgaggggccgatgtctgatggctgatggctctctgattgattcgtgtacctcgctcagtgatcaccaaccttcaccctccctggcatgatccagagcaagctggcactactactgagtgaactgggccttgttttgcttgtgtagggcgagtggctgtttagagtgtttgatattctgagatcattgttgtggttaagaaagataatttttcgttttgataccaatgttagcgatacattaggttttttttatatctgcgattagcattccatactagaaaaa

SEQ ID NO: 1101 - DNA, 506 bp, Avena sativa
agattaaggcgcaatctggaggggttgtcgcacctcgtactgtaaagataccatggcgaaggatcatcttcagtctacctgtttgggcaattgttgtgaacaacttcaccttccactatgccttgtatgttatcatgaactggctgcctacttatttcgaactagcccttaagcttagcctccaggatatgggatcctcaaagatgcttccctatttcaacatgtttattttctccaatattggtggagtggttgctgatcacttgattacaaaaaggattttatcagttaccaagacaaggaagctcctgaacaccattgggtttgttgctgcggctgttgcacttatggcccttccttcatttgggacgccctcggggactgtgatctgttcatcggtatctcttggttttctggctctgggaagagcagggtttgcggtgaatcatatggatgttgctacctaaaatttgccggcatagtgatggggtttcaaatacagctgg

SEQ ID NO: 1102 - DNA, 665 bp, Avena sativa
gcgtacagcccggcgctatctccaacgccacagacgacggcccgagggcgcacggcagcctggcgcgcagcctggcgccatctcttctcccatcgagcccggcgccttcttcactccgacgaggcgtgacgaagacgagtgatggcggggctgctagtatgcaagtcggcgccattcccatctccacgagcccgtgagacgacgctcttgtctaggacgacagccgtgaactcggcgtcggaccgagatgaggtgtcgaccacgttggctgcaccgagttgtaggcgcgtgtcggttttgcaccgacgccgatctccaccaacacttactcctgcgaggcataccccttgcgcaccccgacgaggctgctggtcgtcgagaagtcccagctgagcggacccatgctactccaactccaactacaccgacgccgtcaagaccgacgaggcacgacggcgagggcgggcgtggccggagcaaaggccacgctactcgtggcgcgtgtaccgaaaaggacacgggctctgccgccgcccacacacacaccaccaccacatcatgcatggagaacgcgaagcgaagacgacgaagacgaccacacggcttaatcggaggtgtctcgcggcgtaacccgcgggagtaataaccgggtgccttccgaggcc

SEQ ID NO: 1103 - DNA, 655 bp, Avena sativa
atttgttcggttcccttcttctggtctaaaacaagattgcgtgggatcgctactattttcatgaggatattgtaaactgtttcttgatttccgacctcgttttttcttaaaccatgcactctttttttgttgttcagctaatttgtttacgagcaaggtgcagctatttttgtgctacttcttttttgttagggaatttttgtgctactactagttcatagcttatgtcaagtatgccttgtttcttggtgtttaactctcttagcaagtaatttgaagcggatgtgtaatgttttgccaaaatttgaaaaagaaaagacagcaagtgtttgttatgctgcaggttgatcttttgattgcactgtgggaagcagaagatgatggtgttccagtctgcgtgggtgaagtgtcggtttgatgcatggcctagaggcttgagttagaaattatagaatcagttgacaattgccttcggacattgaaacacggatatattggattctgaattggtgtatgtaggctgaatattccagtgctgtcttgtattgtaataaccttggtaatagtggatcaagttgctgaagggaaagcagctattgtaatatcaagtgtatatgataagttgtccttattaatattggatcaagtgctaaca

SEQ ID NO: 1104 - DNA, 958 bp, Avena sativa
aaaacaagaagcagtcagccaagagaggaaaaagagttccagataagccaatcaatacaccagaaatacctccagaagatattgatccacagaatcaatcacatattcatgaagggaactttgagaaaccagcagtccatataagcaaccaactatccccgagcaaggatagtaagcaaaaacaagttcaggatgggaagaggaagcagccattgaggagagggaaacgacgggcagaagaggcaagcgatccgtcgggaatacccccagaaaattgtgatacggagactcaacctcatatgcaagatacagatatcgagcaacagacagtcggtacaagggttctacggtccccaaacaatggcaaggggcagaaggaaactcaaaaaagaaaaaaagaatgcaagaattggttagaaggaaaagcctgacagcatttggtttttcgtggcaatctggcgttagacggagtacaagaatccgttcaaggcctttggaggattggcgtggagaaagattcctatatggccgtatacatgacacaatgtcaacagtcatcggcattaaatcatattctcccactcaagaaggcaaggttgaaatgagagtgaaatcctttgtgccggaacaatatgcagatatcttagctcaagccgcaaagtgttgaggttcctggcctcgacaagtcactgtttgttctgggacaagtcgttttctgcgtaagagagccgtagtagtgggctgctagctcaatgttatgcaaccatgctgtaggccatgtgccaaagatggatgtagtatagagacaacccattatcttttacctttgttggctatttctaatgtcatttctggatgacacagagggtagaaagatgtgtattatctctactttagtgtatggtagaattcccttggtatgataatttactactccatctgatgtgtattatctcta

SEQ ID NO: 1105 - DNA, 457 bp, Avena sativa
gggatggcaggcaaaccatgagcacaaagaggatgacactgaaggaggcactccttgtacacaataaatgccaggagcttgatgatatctgcaatctgtgccagtgggtactcccaagatacacaatactaccttcagtagaagatggaatgttccaggccagtgtatatcttacatgccctgattttaaaatgaaaaccgtcggcgatcctagtccgactccacgtgaggcgaggttctctgcagctgccaatatgatggtggagcttcagaagaaggcaaaggagaatagcagcagcatacctgatgccgaattgcctagttgaactcccaatgtcgagagaacaggcggctagttgaaccctcagtagccatttgaattaaccccgtgagaacattatcgtgttggtaccttgtctagctactttaccttccagaggttgaatcctcgtgttgt

SEQ ID NO: 1106 - DNA, 712 bp, Avena sativa
tcatgttcaatgaatctattttatccatacagctatctggatcaagccactacatggttgtaacttgtaacttctacagaggccgatgttagtaaataataacactaaaccagctgctatacgacagaactcactgctattactattgagaatttactcaagataacatacaaatatgagatcacatgacatagcatgtccatctgaattgcgtgagagggtaactccgggagatgtatatccaactgggaacactttcgtgtagacgtccttgagctcccttcattccagatcaatgtctattattgatattccattactagatccaatgacaagccttccagagtctgtaaatccaacatgtctaggggactttcgaacatgcatgtaggtcttcttaagcctgtaggtattgcagtcccagacacgaatactaccgtcacttgaagtggtaattaacaacggtcgtgttggatggcaaatggtggcagttatttcgtgctctgtggtttctgtagtctggagtgtgtggacatgttttgctttcagcaaatcccatattagtgcggcctggccgtcaatagcagcaataaaatgccgatcaccagcatatgtgaaaaattggttagtctcgtagtcttctactcttcttgttttggcaatgggagcgggatggccaattctccatgccttgactgccccatccttgtcc

SEQ ID NO: 1107 - DNA, 479 bp, Avena sativa
accatttgtcacatcattccttgaccgctacagggggaagagggtgccggtgtaatctcctctcgcgcaatgtttcttgtgatgtagcaactgaagtttctttttctttctggcgggcaacagcgaatagttatgctagcgtggtcttttcttttacctgtttacttactggtgggactgttctttgtaaattacaccaaatccctaccgactggtttgtcgaagaccaagatgcaaattgtctgatgatattgggttgaaaaatacatagatgtagaggaatgctcttgaagtagaagctatatgctctttgtctgctttgtacttgtgtcagtcccagatatagatattccgcatcgtcagcttgtgttctgtttatttctgtctgcacttcatagcttgaagattgggaacgagctgaaattaattcatgattcatatacaaccttggggagttgtggtttgtaacttaaaaaaga

SEQ ID NO: 1108 - DNA, 975 bp, Avena sativa
catgtgcgcgaccaactcgggaacacacacacacctaaagccttctaaggttctaccactatgtacagacaaggatagataggagaggggcaggcaccttctgttttcttcccctccaccgaaaccgtgaaacgagtgccataagttaagcagtgagcctcccacctctaagctatgttttttccctacgtgattatacttacaaaacacgcacgaacttgtactgcgtgtggcgcgtgcagctactggtgtccagtcaagataggtggaaggacccctggccttctgtgattgcgtacagcagtttctccctcatcctttccttagaacagtaggcaggtaacttgagatagttggcgcacgtcatcacgctgggcaggtcatcgtcagcatcgttgttgctatgcttccggacaactgtcaaatttggattcagtgcagccaaaccgcctggagggagtcgaggtgagcctgttataaattgcaagaaagctctgcgttcttggcgtccaaactcttgtatgatctccaacaaattaatgactgcagggctgctggaggtgtagccatgatcaaattttatgtgatcaacaagtttcacgaaatcccagttgtcttgttctccacagagtaatctttccagctcatcctctgagaatacctgaagtgcgctcagtggaaatacctgattgaatccggacttaaaagcatccagttgtcttaagattccacttttaaccgttgcctcaacaacaaaagaaacatattcttccaaattctcaccagttacattatctgagctactctccgaaaaaggcagatactctggataccctgggacagcgaagtcaatagcaagatcctcaattgtacaaccccgataagacaaatcagatgggctctggcattcctttgtcgaacatgattctaaatatttcctttgacaagtaagtgctttaaactccataagggtcg

SEQ ID NO: 1109 - DNA, 957 bp, Avena sativa
agttcgagataaatttcaagaagttttctaagctgcttatgcttcatcagggtgtcgcagactcgcagccacccctgtttctgctaaatcttccaattgatgtacaatacgtgtaggggatgtactctgtggacacacacaaacacactgtactttaggtactacagtacaaacgaactacggcgaacagcctgaagcctactcctcctcagtaggaggatccacccaacggccatggtccttgatgagctgaatcaaggcttcagtggcaccctccattgcaatcccccgttgcacaacagtcttgccgacataaagatcgatcttcccgggagcacctccgacgtatccaaagtcggcgtcggccatctctcctggcccattaacaatgcaacccatgatagcgatagagactcctggcagatgagaggtcttctctctgatctcagcgctgatttcttggaggtcgaacagtgttcgcccacaagaagggcaagacacatattccgtttttgtgttgcgcatccggcaaccctgtagcaagttgaaggatgtatccctcaagaattcaaactcttggttattagcttcaagaagtaaaccatcaccaagaccatcaactagaagagcaccaacattggtcccagcaccaataacaagaccatctctatcgatgcttttagggaaatcaatgtgatggatcacagggaagttcaaaccgttggtctctaagtactcgaacaacctcctagcagtttgtactctgccagtcttctcttcaccatatggaacgttatgtaacaacattgttatattgtcagcacacttaagaacatctagctgctcgtatgattcatctccacggagcgtaacagcaaatctagtgccttctggcaatagcttgattgaatcacttgatagttcgtccagggtgacgagcacaattgcatgtgggag

SEQ ID NO: 1110 - DNA, 513 bp, Avena sativa
aggattctttcccctcaagaagtgcaacagatgagcttggatggcgatctgggcggaagcgttcttcccaaccaggcctgcagcagctcagatggtggagggaatgtttggaaggctcgctgtgatcagaactctggcaacccttccaccggctcgtacgaccaatttgagtgacctagtttaccggtctagacacacccacaccgccactggagatgaacggcaacagctgtgcggcgccaggatgttgtagatgtgccagattacatccggagcgcaagcggctcatcggatttagttgttttctgtttatatgtgtagttcttacaagaaaggaagtaggcacgggtaaaggaagcttacctagagtccgagagggttaggtgaaagatgtactgtgttgaaaaggcaagtctgtagtaaccagatactcccgtctcttctgaggccattcttaagatctcgatgaatcccttgctggttgctgcggaagcaatatttttgttacaaaaa

SEQ ID NO: 1111 - DNA, 923 bp, Avena sativa
gtagagaatatgccttttattatgtactgaacacagtacatcaaattacaaagaactgctaaacctcccataattatataatatcaagaatccaatgaatgaccatacacgctatattataatttatgtgtaactgccatctgtgagtgagccaaagaatatatatcgacctaaagtcttaaccaacaggtcatgctgtagggtaaatttcttcacaaaatcatggcctgaggttgtccatagccgctccggtgcttcatctgccacgtccacgcgaccctgaggctctcctggagttcggtatgctgggctgtccagttcagctcacggttgatctttgcggggtcgctgtacacttctgcatagtcaccagggcggcgagagaagtagtcgaccttgatgtcaactccggttgccttcttgcaagcttccacaaactccttcactgacctacctcttccagtgccaacgttgtatatgccaactttgcctctttccgccttgttgagcgcttttacatgggcgtcaaccaggtcagtgacatcaatgtaatctcttacgcaggtcccatcaggcgtttcgtagtcggtgcccttgaccttcaaacctgggattattcccagtgccgcgtcaaagcatgcaccagatatgcggccgtgctcacgcagttcaggtggtggagcctcacccagccttccttctgggtcagaaccgatgacgttgaagtatcttagaatcatcactgacatgtctgatttcctggacttggagaagtccaaaattatatcctctgccattttcttggccttaccgtatgggttgataggaaactggggtgtttcttcagtgataggcatcttctcaggttccccataggtggcacatgtgctagagtagatcagagttttaacactgtgtgtcgc

SEQ ID NO: 1112 - DNA, 691 bp, Avena sativa
acggcctggacttcatccgcaactccaagatctccgacatcgacttcgcctccgtccatctctaccccgacaactggctgcacagcgccaatctggaagagaagctcaagttcgtgacgcagtgggtgagctcccacttcgaggacggggacaaggagctgcacaagccggtcctgctggcggagttcgggctgtcgcacctggtcaagggcttcgaccagtcccaccgcgacgccttctacaaggcggtgtacgacatcgcgcacgagtcggcgaagaagggccgcgccggcgccggcgccatggtgtggcagctcgccgccgagggcatggaggagtacatggacgccttcgccatcgtgcccagcgagcggccgtcgatgcagaggctgctcagggagcagtcgtgccggctggccgcgctgaggtacggggaggcggaggccaggaggacgctcagggcggtgtgcgcctgaagatctctgacgcagaggttgtgtgtaagattttgtgtgtgtgtgtgtccaaatcgacacggaagggatcgaagagagattcgtcgtctcgtgcatgtgccggcccgtgacacgaatcggcgccgacgtcggcagatctgaccaaaccaaccacccgctgtttccgtagtactactgtactgtatttctttgtgtgttgtacgtcgtcccttgta

SEQ ID NO: 1113 - DNA, 675 bp, Avena sativa
ttttttactataaaaggatctccattctcgttcacttgagcagttcagatagatatatacttggggcaatacaaatgtaatattttggggcaaggtaacacttccaaaataaaatgcactagagaattactataacctactactagcatatagttcaggtattatatagacgcagaaaatacgtaacatcatggttcacgacgcgccctaagggagcttcccggatctcagagcctcgaagcgcgcggtcagggtctcgaaatccagaggcatgcttggatgaacacgggaagcaaggtttgcctttggtggctcagggaagtcgtcatcaggttccttctcatcgggatggctatttcctcggtagtgttcttttcgaggaggtggcctttccagggactgtatctcagcatcgctttcatcctctgcctctgaattccatccccctgatttgtcgaactttatctccgagtgcaccttgcgagaagcacggctgtcccttttgcgcgcatcgctttcatcctctgcctccgaatcatcaaactttatctctgagtgcaccttgcgggaagcacggctatctcttttgcgtgcatcgctttcgtcctctgcctctgaatcatcaaactttatctccgagtgcaccttgcgagcagcacagccggtgctgttcct

SEQ ID NO: 1114 - DNA, 744 bp, Avena sativa
gacgcaaagttcatccatgccaatctcaggtacggctcaaaatatatctacaggcaaaatacattactacacggaagcaggcagtcaatcacagactttgcaactccatttgctcacttacgaaacagaaatggccaactctgcatctcctttggtcctaccccttcagttatcactctcatgagtctggaagtgtgatcagccgagttttcgggtcatatatcatcacggttttgcaatttgcacacttgacagtgtttgttgcacctccgctggtgattgacagtatcgtcccaaagaaggaaaggttttcagtaccgcagtttggacacggccccttcacgattaaaacgtcatttatgatggcctttgttaccaactgcgccgtgaccaatatcagtggcaaagcagcaaaccatgtgaaaatgaagccaaaaggctctgggaactggaatacattgacctcaaagccagtcagctcatcaatgaaaaagaacactcctagagcaacaacagttgctggagcatttagcaggaacatcttcaagtagtcgacggttagatcgctgtaaacttttcgactccgtagactacaccttggaccctctgttacgatgtcgcttccgtcttgctttagcctgagcttgagctcgtcgaactcggcatcggacatgatggggttgccggcgatgtatgccatggaggcctccaacagcctctgctcatcggcacttagcatgacga

SEQ ID NO: 1115 - DNA, 1029 bp, Avena sativa
agagatgaagctcgcgggtctcaagtcggtggacggggctcacgaggagtcgatctgggcggcgacttgggtccccgctgccgaccaccgccccacggcactgctcctcaccggcgcgctcgacgagaccgtccgcgcctggcggcccgacgacctcgccgccgcgtcgccgccggcgcggggccacgcgctcggggtggtatccctcgcggctcacccggccggggtcatagccgccgccgtctccctcgacagctacatccgcgtcttcgacgtcgactccggcgcctccgtcgccacgctcgatgcgccgccttccgaggtctggggcgtccagttccaccctaagggcgttgctctggctgcagctggcggtggcagtggatcagtgaaactctgggacacggagaagtggcagcctattgccagccttcctgttccgcgtccagagggagctcgccctgacaagacaggcagcggcaagtttgtcctttcagttgcctggagcccagatggcaagctcttggcatgtggatccatggatggcaccatcgccgtgtacgacgcggtgcgcatgaagttcctccaccatctggagggccaccacatgcctgtgaggtccatggtgttctcccctgtggaccctcacgtgctcttcacgggctgcgatgactcccacatccacatatacgacgccaaggagaagggcctgatcggggccatgtcagggcacgcgagctgggtgctgagcatcgacgtgagcccagacggcatggcggtggcgacgggctccagcgaccgcaccgtacggctctgggacatcaacgcgagggcgtcggtgcagacgatgagcaaccactcggaccaggtctgggccgtggcgttccggccgccgggaggggaaggagtccgtgctggccggctcgctagtgcctctgatgacaagagcgtctccctgtatgattactcgtagaccgtcagttgtcgtctcttgtgccatgaaggctgggtggcttgttgtacaatgct

SEQ ID NO: 1116 - DNA, 638 bp, Avena sativa
ccctagcccacctagcgagagtcgtgctggcccaatctcccctcacctcacaggtcctgggtgactagtgtgaggaactgaggatcaacgccagcagcgagcaaccgcgcagcaccaggtcgagtgcaccggccacggtagaggggagatgttcacaacgcacaacgccaggtcgagcgcaccggccgcggcggcaccccgagagaccagtaccttcaggatcttgtgacccagttccaggactccacgaatgaagagtgcaaggagaagatagttgcaaacttgtcaaatttcgcattttcaatgagcactcttctggattacctttcctattcaataagatggtatctctgttctgtttgctcagctgaatattctcgagttattcttggattgcattacagagtcaaatgaaaggcttgttgagtttggggttggtggaatatgtaattcatgtcttgatccagcaaatgcttcagtaattactcactgtggtggaatcccattggttgtacaatgcttgtctagcccagttaggaatactgtgatttatgcacttggtgccttgtactacttatgcaactcttcgacaaagaaagagatcttagaaaccggatgtcctgcggatgaataagaga

SEQ ID NO: 1117 - DNA, 517 bp, Avena sativa
accgatgctgatgcatggtgaaattggcaccatgtgggaattgcttactgaatctctccagtcactcatcctaaagggccgcgtggaaaaggagaaattggactcattcaacctgccactctacgctccatctgcggacgaggtgaaggcagtgatcaaccgcacgaagctgttcgacattgagcacattgggatggtcgagtataactgggatcctcaagatgacaacttggatgatcacatggttcctgaccctgccagcagcggcataaacgtcgccaaatccatcagggcagtgctggaaccgctcatagcaggtcacttcggcgacgacatcattgatgagctgttcgacgtgtatgcctccatcgttgcgaagcatcttcaggaaggcaatgccaagtgccccagtgtcgtggtctccttgaagaaggccatgcactgaatccaccacatggtttggagttcattggtgatatatacgtagggacatagggtcatggggcacctatgtatg

SEQ ID NO: 1118 - DNA, 871 bp, Avena sativa
actactactcacggaaaggtcaacataatttggattcccagggaaatttgatactccgagcacaaggcggggccattgaggatttctttcaaattagagttgaaattcctgaggacgataacaaaattgaagatgccaacttcgtcttcagagtggacccatacgcatgcaaccaagttataacccgtactatcccgacagcacgtggccgtgaaatagatgtggcttttgtggcgctctactgtgctatacaggcaaatgttttcatcaaccttgatctcataggctgtggttactctagcaccggtggcaccatctattatgtatatggcgaagtcacagcacaccatcaactctatgatgacaagaatgtcatgctcttctttcgtgaggaagaggacaaagcaaaggttattgatggcaaacttccccagttacggacttgggcagctgttccagtatacttagacccactattgataatcaaggttaggcttcacgtctccactaatcctgagcatgatcgtgacggtcataccatcttatttgaaggtgatcttacctttgaccgtgaccagtatgaaaaatcaatctgcaacgtccaccatggtgaagttaaagtgcagatttcgtacgagtaattgccatctgagggaaatgttgcgttgcaggtgacctttggatattggatctgttgacttatgctatatcactatttatgcaatgactagctcgtagttgtatgttgttttcgtattaaataatcggatcctttatgtactgggacaagcccattttccttctcaacagtgttaagaacatctattctcaaaaggaaaatagttccactatagtgaacatttcgtaaaaa

SEQ ID NO: 1119 - DNA, 698 bp, Avena sativa
gatgctctcaagagtgttgggtcatctatcgcaatgcatattgttgcagcaaagccattattcttgtcaaaagaactggtttctgctgcagctgtggaaagtgaacgtgacgtgctccgtactcaggctgaaaaatcaggtaaacctgcaattgccatggagaaaatggtggaaggtcgattgaggaagtattttgaagaagttgtgcttttggagcaaaaatatgttgttaacgatggcacaaacattaagaccctgctgaatgatttgtcaaaggaggttggttctaaagtaacaattggcaatttcgtcagaatggaagttggagaaggaattgagagacctgaagaagctgatgtgccagaagctactgctcgtgctgcataaattacaagctgagatgaaatcatacgcggtcactgagatatatgtgacagttgctttcgtctgagaatttatataggctctcatttttgctgtgacgggatgtattctttacaaatatgcagaactgcccatgggctagttagaagtttacaagcgagttagaagaaccatggttgcaagttgagtcgaattgaataaatgttcaatggaaacaaagtcacacgtgctgatacctgcaaggttgccagatgcaatcgtaactttctttgtgtactagttttgctctacctctgtctgattgaactgcagtg

SEQ ID NO: 1120 - DNA, 781 bp, Avena sativa
tccggcgtattcgcccggctcaccgagctcgagctgaatcgcatcacggtacatggcgcgtgcacgctcggtgatgccgtctcctcgccgtgctgcccggtcttgcagaatctcgttatcagtgactcgtgtcatctgggcaacttcaccatccactcggaatctctcctggaaatgaagctcatgtatctgcgtggcttgcagcagctaactgttatggcgccagcactcaaacttttagacgtgaggaactgctttgctccagattttttgagttataatcaaccggttgtaagcatctccgcccctcagctgctgaccctcttgtggagggatttttacgatccaagattcatgcagcttggcaagatggaaaatctagagtggctgggcacctaccctcttatggtctatggacaagatgaatacaaaatactcaatagcttttgtacgaggcttttgcagcgctttgagctcatccagaatttgatactcatgcttgtctatcggccggaggacctcactaaccaacattacctgatggaacaacacattacgaggctcccatacattacattcatggtcattgatatagtagcgagtggacattcctttggagcttgttcatttcatgttctcaggatgtgtactagtttgagaaagctgtctcttacggttggtgtcacaactatccccgtggaggaagaaaccgcgtgcctgtcatcttgtgcttgtcatcagccgccaaactggaaaaccgatgaactcgtgctcagttgcc

SEQ ID NO: 1121 - DNA, 800 bp, Avena sativa
gctgttgtaggtgggacaggagagttcgtaggtgcaaacggtgttgtcaacgtcaaataatcgagttcttggatactactaccggtgtgatcagagaacttaatatccgtttttcatgcccatgtcccaatcagtccccagtgaccaagatgggaccatggggtgggaatggaggaacaagtttcgacatcccagaccttcctcgttctattcaaagtgtcaccgtcaggtgcggtgatgtcatcaattcgctcgcatactcttatgttgacaaagacggccagaaaaaaaacgttggaccatggggtggtgcaggtgcactttctgtgacgatcacgcttgcttcttcggagatcgtgaagcaagttacggggacaaccaatatcattggaggtgatactgttgtaacgtcacttgcctttgtcactaatgttaccatgtatgggccttttggaaaagaaaatggcacaccattcagcagccaggtgccggacaagagcagcatcgtgggattctatgcgcgcgctggaggttccgtgaatgcatttggagtatatgtttgcccaaattagcacaaggaagtgttgctttataatctccaagccagggtccagaccgatgccttatgttttccagcatttcagcaactaaactgcgtttaatttcatagctagtgtattcggcactactcaattttccctttatcaactttgccatttcatgtgacttacttggtgatttcatgagaataaaactgttatggacctttggtgttttatagatatgtgtctattcttgag

SEQ ID NO: 1122 - DNA, 765 bp, Avena sativa
ggagactccggatttttatgttttcttgtgtcctcggcatgtaggattgttggcttatccctggaaatggaagaagctggagagctctcaattataggtgtttggccttggcggactgatgatcctgagtcgtccagcagatcttcgtatttcttgttgaactctgcttcagtattagatgaatcccaatcaagattgtactcatgagcaatggctttcaaaaccttcaactttgattcagctgaaggagccttgactgaaagcttctcaattattgtacgattaacgccacagtcagggcgcaattccgtagcagcagcaacgaactccttcccatacttggtggtaaacaaattacggagatgcattagctctggcaagtctgagcatcttcctgatgcaaagattatactggctattgcttctcgcaattctatggggcactccttttggacctcaacaatagggactcgtgcaagaacaaattcacagaaaagctccacaatctcataggcagccaatatattttgctctcgaataatgtgctccacccgaatccttgcaatggactcctggcctgtctgaagatactgaaccatctccttgcgcatatttatgagttgcatctccctcctattgcgcagaagcttgatccttgaaatgatcaaattcaagcatgttttgcatttggtgccaaacggagagttgcggttgaagagcgagttgagggacgacatcgtcagtagcgtccgcgctgaatcccgg

SEQ ID NO: 1123 - DNA, 884 bp, Avena sativa
cgctcgtccctaccccgctttcctttcgctagactcgaagcaaaaccccagactcccacacgctccattcacacgacgcctcgctcgctcgctcacctctccggctgccaccaccgcggccgtgccgcacgagcgaaggcgatggcgggcggggagaaggtagactatgtgttcaaggtggtgctgatcggggactctgccgtcggaaagtcgcagatcctggcgcggttcgcgcgcaacgagttcagcctcgactctaaggccaccatcggggtcgagttccagacgcgcacactcgtcatcgaccacaagtctgtcaaggcccagatctgggacaccgccggccaggagaggtatagagctgtcacaagcgcatactacagaggtgcgctgggagctttgctagtctatgatatcaccaagcgccaaagctttgaccacatacctcgctggctggaggaactccgggggcatgcagacaagaacattgtcatcatgctggttggcaacaagagtgacctcgaagacgagcgtgctgtgagcaccgaggatgccaaggagtttgcggagaaggagaacatattcttccttgagacgtctgcgatgcaggccaccaatgttgagaattccttccagactgtcctgtcagagatcttcaagatccacagtaacaaaaacatcatggctgacccgaaggccaacggggctgccccatcgctggcaggcaagaaagtccttgtcccaggccctgcacaggagatcccaaagagcaaatgctgcagttccatgtaaccgatttgatttgcttctgttttgagaatattcatgcggtctggatatacatagtcttaggttttgagtattggtttatttggcgagatgtc

SEQ ID NO: 1124 - DNA, 785 bp, Avena sativa
aacagactgagaccgctgagttatcgtggagctgatgtcttccttctggccttctcacttatcagcaaggctagctatgagaatgtttcaaagaagtggatacctgaactgaagcattatgcaccaggcgtgcctattatcctcgtgggaacaaagcttgatcttcgagatgacaagcagttctttgtggaccatcctggtgctgttcctatcactactgctcagggggaggaactaaaaaagctaatagccgccccatactacattgaatgcagctcgaagacccaactaaatgtgaagggcgtatttgatgcggcaataaaggtggtactagcgccaccaaaggctaagaagaagaaaaaggcgcagaggggggcttgctccatcttgtgatctaatcaatcggtagacaaagaagaagggcgaagttgccatgctatattattgttacgtcttgcttcagcggatcagcactcatggtcgtctctaccccaccccctaggttactaccggcagctgcagcaaggtcttcctttgtcgaggcatcgagcgatccatttgtttcaattttcttcttcctgccttgtgattatcgcgtgttgactgacaagtcgtggcaattaggtaacttgcttagatggtattttcccgtgtttgagaccccgtaaaaaaatatctcgttgttatctcggttccataagtagagacattatgatgtaatcgcactcagtttatttttcgttgtttattttcacttttcaatggaaaattatgtttcccttcaa

SEQ ID NO: 1125 - DNA, 718 bp, Avena sativa
tttttttttctttacaatttgaacccaactttagcatcagcctacttctgcacaacattctccaaccacagcttctgtctcggatacatgtatcacaatcccgaggccccattcggatcgcggaagctccataatagtttgcccagggggaaaagaacctgacatctacagacaggtcgaaaaacgagaaaaatctcatcctactgccgagttcttcccggggttaattcccctctggcgagatcgagtcgagtataggctttcaggtcggtctcaaaatgacctcgtgaaaatatggtcgcatgcaatcccagcacaaggaccctgatgatcagctcaccctattcgtacacattaaaatcgcctctttcaacccttctttgtccaatgatgtctccaccatcacctcttgcacattgtttccataccgcgcaaggaccttatacttgcgaccaaccaaagatgccatatatacctgaaaggtgggagctaatcctgggctccggaagaatcttcctttgtagacgtctttaacttgctcaatgtttttcagctcctcaatcagggaatccacctcaggccactcaaaatctgcctgtgcgagttcaagagatccatcaagtgactcttcatcgccaatgactggttccaaggcccctaccggcggacttggctttacatctttaagtgacaaaagatacggctattgttgaatcca

SEQ ID NO: 1126 - DNA, 703 bp, Avena sativa
gccaaatgtgtcgttgacggtaatctcgtcacggcagcggcttatgatggtcatcctgagttcatcagcctgtttgtgaaagcacttggaggcactgtatcaggctcagacaaaagaatactcttcctttgtggggattacatggaggattacgaggtcatggtcccgttccagtctctccaagcccttggctgccacgtcgacgcagtctgccctgacaagagtgtcggggacaagtgcgcgacagccattcacgacttcgaaggcgaccagacttacagcgagaagcctgggcacgacttccctttgaacgcgtcgtttgacggcatggacttctcgaggtacgacgcgctcgtgatccccggtggacgtgcccccgagtacctggcgctggatgatagggtgcttaggttggccaaggggttcatggatggaggaaagccggtcgcgtcgatctgccatggccagcagatactctctgctgctggtgttcttcagggcaggaagtgcaccgcgtacccagccgtgaagctgaacgtggtgctcgccggcgcgacgtggctggagccggacccgatccaccgctgcttcacggacggcaacctggtgacgggcgcggcctggccgcgcaccggagttcgtctcgcagctcatggccctgctcggcatcaaggtctccttcgcgtgagacacagccgcgttc

SEQ ID NO: 1127 - DNA, 777 bp, Avena sativa
tataagcggcaggtgacaaagaagggcttgcagcaagggtggtggatagacagcaagtgtctagaacaatctccaaagaagagatgttgcatctttttgaatttggtgatgaggaattactagaccagagtggaaacaattataccataattgaccacactaatgttggaacggagaagctatccctgcccatcagcagtgaaaccactgaactaccagtggacgggatcatgctgaacctgcttagtgatcaccctcggtggatcgcaggctatcacgaacatgaagttcttctgcaagaaaatgaagaggagagactcaccaaggaagagcaggatatggcctggtcaagtttcaaacaatcacagcagttggaggccgtgccaaggaagggtgcacatgatcccgagaggaagccaacagagaccatcgtcccgctgcctaaagttacttcaagaagccggcaaccacagcaatcaaagtcaaattcgaacaaccagaagaaatgcaccaacttaaaccacttgctgactctaagaagccacggcaccaaagctggatgcatgacaagctgtagcgaatgtggccaggacattagctgggagactctaaacagatcagatggtagattgaggtgacgcacctagcgtaagccctgtagaaaatgcattttgtagagaggcccccccgcaaaaaaaagtagagcttaatcgtggtgtctattttttggatacaaatgacaagtacgttaattggaattgctatgtctttcacgcg

SEQ ID NO: 1128 - DNA, 832 bp, Avena sativa
tgagaacatcgatggcttgaatgagctgaagagagggccaagagcaatcccattaaaaccgaacaaggcactggagcagctgatgttgcaactgcaaaaggacaggagcttcctaccagtgatgcctcagatgcagttgtgaaagatcagtacaataaggctgacttcgttgaaacttactcagatgccaagttctttgttataaaatcatacagcgaggatgatgttcacaagagcatcaagtacaatgtttgggcaagcacccccaatggaaataaaaggcttgatgctgcttatcaagcagctaaagacgaatcaagcaattcccctgtattcctgttcttctctgtcaacaccagcggtcagtttgttggacttgctgagatggttggtcgggttgattttaacaagacagttgaatactggcagcaagacaagtggactggttgtttccctgtcaagtggcacattgtaaaggacattcccaacaatttattgaagcacattattcttgagtataacgaaaacaaaccagtgacaaacagcagagatacacaggaggttaagcttgagcatggccttcaggtgctaaagattttcaaggatcatgtctgcaaaacatccgtgttggatgactttggcttctatgataaccgtgagaagataatgcgagagaagaaggccaagagacagcagccgctggagaagataacgaacggaaagctgcttgccgccaacaacactgaaactagagatgttgatggaaagcagggactgcaggaacctgcagttctaggggagcaaatgctctggcggaaaacggcgtggcgac

SEQ ID NO: 1129 - DNA, 876 bp, Avena sativa
gttgaatattttggttactgcctctgctgtggcagccactttgctggaccagtatatgagatgaaagattatcttgactggactgaaagaaaaggaatatgggccagttcaactccttcaccattgttacctactctgcgtgctctagttcaggctggaatatgcatggggttatatttgtatctgtcatctatctttccactttcacggtttagtgaacccctatactatgaatggggcttctggcaccgtcttttctatcagtacatgtcaggatttactgctcgttggaaatactactttatatggtcagtttcagaggctgcagttattatatctggtctgggtttcacgggttggtcggattcttctcccccaaaaggcaaatgggaccgtgctaaaaatgttgatattctaggcgtcgaactagctggaagtgcagctcaattgccacttaactggaatattcaagttagcacatggctacgatactatgtgtacgagaggttaattcagaaaggaacgaagcctggtttccttcagttactgggtacacagacagtcagtgctatctggcatggactgtatccaggatacatgatattctttgttcagtcagcattgatgataaatggttcaaaagttatatacagatggcaacaagctgtgagcaactcgggcctccacactatcctaactttactaaactgtgcatacaccatgatggtgcttaactactcatgcattggcttccaggtactgagcttagaggagacgttggcatccttcaaaagtgtatattacgtgggcacgattgttcctattctatttgtgttgctgggctatgttatcaagccagcgagatctgccaagccg

SEQ ID NO: 1130 - DNA, 752 bp, Avena sativa
acgagtgccgaggcgattggagtcgtcaggttatcgtccaagcgcgtgctaactgggagtgactcgacaatcgctgcggcgagcgacgtgatgccaaaggcagcgaccatgatccagctctgctcgacgaacccgaaaaggtggaagtagcacatgtaaaggatagatgcaacaaaaccagcgaagaacattgcgatgcttcctgcataggatttgtcaggattgtaagggagtttcgcatgcccgaatcgcctcccagctatgtcagcaacaccgtcgccagcacacaaattgcaaatgacggcaatcgaaatgggagacgtcctccaaaagattatagtagtgagagttatagcacatgcataatacagtggacctttgagaagttctctatagtctccatttcttgtcattgagttaaccacgccatcatctttaactacaccaagtccaatcaaggtcacctttacgatgttgagcgcgatcacaagtgaagcaagaaacggagcatagacatcatccgcactgaacaaaggccacataaggaaatatactagcccaacgcttatgtgcaccagtttcctgcaaagtttctgcaaattcatagcaaaagacaagcatataccattgataatatgcatgtgaatttccaatctcgtggtaattaaaccacgaggtcagtattccaaacttttctaccaagctgaatcattttggtactagcttaatttcgctttctagttacataattg

SEQ ID NO: 1131 - DNA, 645 bp, Avena sativa
atctcgtgcttgggcgccaccttttaccagctctactgggacttcgtcaaggactggggcttcttcgccgcaaaatctaagaacctatggctccgagatgagctaatcctgaagaagaagtctgtctactacgcttcaatggtgttaaatctagtgcttcgtctagcctggacggagagtgtaatgaagtttcatattagtaagaacgagactcgcctactggatttcgctcttgcttcactggaaataattcggcgaggacattggaacttctacaggctggagaatgaacacttgaacaatgttggcaagttcagagcggtgaagactgtcccattgccattccgggaactggaaactgactgacaagacagagagaaatagtgtgattagcaatgctcccgatatcaagggaatttaggatcagagttctaggaatgatacgctgaccctggtagtgtttgctgctagatttggtgtcgaggcgaaaataaagtcttcgggatggccttgaagggttcggaacagccagcgccgatcggttctgcagccacacaaccatctgacctccttcatcccacctcggctcgtttctggctgggcaatcgaggtggacggtgcggccaccgtctcccatcccaattc

SEQ ID NO: 1132 - DNA, 501 bp, Avena sativa
gatgaagcattgacaatggaaccagcgaggattggtggttctctgaggcgggtgccattaaccttgcagtgcctcgacactgctggtatatatcttcttgatgatggtttcagcttcctagtatggttaggtaggatgctccaacctgagctcgtgaacgacattcttggagtcagcttgggaaacttccctgatctatcaaagatccagttgagagaatgtgacaacaatcactcgagaaatttcatgacagtactaagaaccttgagggagaaggattcgtcgtgttaccagctgccccgcgtggtacggcagggcgagcagcccagagaaggcttcttgcttctgtccaaccttgtcgaggatcagatggccggaacaagcagttacatggactggatactccagatccaccgccaaacgcaagctagtaataacgatgctcaaaccgggaatttgtctttgtgtaactgctgcatatgcggctgctgcccgcggtct

SEQ ID NO: 1133 - DNA, 823 bp, Avena sativa
  modified_base (768)..(768): a, c, t, g, unknown or other
ggtcagctatgcacatatgaatctccttgcagcaactcactgaactacgataaccaactgcagagtgaggctagtgcatcgactagattgtaatccctgtcctacttgtagctcaagactgcaacccccttgtccgcctggagaaacacataatctcctctacaatgaatcatgagtccgagaaatcaatactcgagacctgtaagataacttttaccctgttgtgggtcattcatccatggtttcaccacttcagatcaaacaaaagaactttagcaagtcaaagcatcatagtatgtagattcccttccaggctaagatccttctatccttatactaccgaactgtatttgttcatcaccgatgtctaatgaggagactgatgtagccaagtcatctgccaagtctgccgtttggtctggttctgaaacttctgctagtgcactcagcatactgactacttcatacgtatcgtccaggtagaacttagctttgcttggtttctgccccacggtacatgcaaacagtggtgtttttggagcaacaacgctccttttcatggcatctgcaatgttttcaaacatgtcctcatctgacctgtcatccccaatgcataaaacaaaatctgcctgttgccccttttctccttcattgacgcgagtatcttctcagctacaagacctttgctaacaccctgaggtttgacttcgacaatgaactgcccatcttgactgcaactgcttcatttgctagtacactttccaggtnatcaagcatctcctttgcctgagaagatgcaaagccttggtcagcatcccgatga

SEQ ID NO: 1134 - DNA, 883 bp, Avena sativa
gaagctgctggaggcgcggcttcagtttgaggagaagaacgcagccgtcagtcagctgcacgaagagctacaagcatatctggacacgaagaaggaccaggaagctgcaaaaatcgatccgatgcgattgtcagatgcattcgaaaatggtggcgctgcaactgtcgcgatcgcagacaatgctggcggcggaggatgcagtggtgacagtgaagattgtgactcggaaggtggtgatatgcactcgattgaattgaatgttgacgacaacaaattctatacctggagctacactccttcatcaaggggcaaccagagaggtgcgtcgatgcatggatcattttcggatcgagggatagatggcgccggttcacgctgcgacacccggaaaacatccgaggaaatggatgatgcactggagggggactgggcagaaggatgcagcaacggaatgctcaactttgaccatgatgaggagagataccaagcgatcaagaatctcagggagcagatgatagctgggtctgggatcatcatgtcacatggtagggaaaatgctgaaagggagtactgtatcttctgaggtaaattaaagtgaatcaatttggtaaagtcggcgctaaccgtactgatcaaccactgctgatgctagctagattaattggtcagtcagacaggcatctatagtcgaggttttgctttgtggatgagttttcttcatagttggggttaccgttcaagtgtattcagttccatccttgtactgtcatgtatatatggtaaggagatgaacatgtataagctcgtttggcacccatcattgcatttcatatggcagaaatgaaatgaaaggacactgagagcatctccgtcctaccaaaaa

SEQ ID NO: 1135 - DNA, 580 bp, Avena sativa
ttcccgggatggaccaccaatcattagcttcagtgatgcatcatttggttatcctggagggcctattttgtttaaaaacttgaattttggtattgacctcgacagccgtatagcaatggttggttcaaatggcattggcaagtccactatactaaagttaatttctggagacctgcaaccaacttcgggaacagtgtttcgctcgcccaaggtcaggatggctgtattcagtcaacatcatgttgatggacttgatttaacggtgaatccccttttgtacatgatgagatgttttccgggtgtacctgaacagaaactgaggtcacatttgggttcctttggtgtctccggaaaccttgccctccaatctatgtacactttatcaggtggtcagaaaagtagagttgcgtttgctaaaatcaccttcaagaagccacacattattctccttgacgagccttctaatcatcttgatcttgacgcggtggaggcgctgatccagggtttgctcatattccagggaggagtgctgatggtgagtcacgatgagcatctgatcacggggagcgttgacgagctc

SEQ ID NO: 1136 - DNA, 773 bp, Avena sativa
cagcagcaacagaatgaatccttgtagttgttagcactctactgccattattgtttctggaaaagcacatttaataatatcccatgctgatgtgtcccataagtcatcaattataataaagtacctctcattcaataaatactctctgatattttgaatcaaatccaaactgctactttcagaggactgttgtccagtaagctttaataataaattctggagaagccttggtacatcaggctttagagataccgatacaaatgcatgacaagtgaactgcccttcaatcttgcggcacacttcactggcaagggtggtctttccgagacctccaaatcccacaatagaaaccaccttcagctcttgatctggatgcatcaacaactcaacaagctcatctctaggggtatcaatacccataagaccagccgtatccgcaaaaatggcgagtgcccgtggatcaatatgaacaatactggacgtagggttgtactcatcaagcttgtatcttatgcgccgctcatgcacttcaagtacacgatcctcaatccccttgatcttgttgccgatttgatgacgcaccttaagctttttaaggcgttcaacactcttcttgagaaacccagtggttgcaccttttacttcaaggtcatgcatgaagtcatcgatgcagtcttcaatatcatacgacatctccctcacttggtctctccacaccttagcctgaatatcaagctcgtccattcctgcaagcttcacaagaagagcattca

SEQ ID NO: 1137 - DNA, 814 bp, Avena sativa
ggagatcaaatccggcatcgatggcgccgaggcactgataaggaagatggatcttgaggcaaggaacctccagccgagcctgagggccgggctcctggcgaaactgagggagtacaagtcagatcttaacaaccttaagggaacgttgaagagaatcactaccggcaatggccaacaaggggcgagggaggagttgctagagtcaggaatggcagatacgttggtgctatctgctgatcaaaggtcaagattgctcagaacatcggaaaggcaaaatcagacaacagataggatcaaagatggccatagaaaaatgctggagaccgaagagcttggagtctccatcatgcatgacctgcatcagcagcgccaatctctcttacatgctaatgatacattgcacagtgtggatgataacattggcaagagcagaaagatcatgggtgccatggtgaggaggatggataggaacaagtggattatcggacttatcataaccctccttgtcttggcgatcctagtgatcctgtatttcaagtttgtgcattgagcgattccttactgtccaacagcatttttatacagtacgacaaacagaactgaggaagacagctctatatttcccagtgtgttccacactttccatgtcaacttttgtttggttttgaggaaccattttcatgtggccatgtttactatggtgaatgtgttgtttatggaagtaatattgagatgatgtacacctttgtagataaaacatatcttgtttgtgatggacatgcaatgcatgagcagtttggattttgaattggaa

SEQ ID NO: 1138 - DNA, 731 bp, Avena sativa
ggcgctcgtatggttagagagttatttgagatggctcgctcgaagaaagcatgcattatcttctttgatgaagttgacgctattggtggtgctcgctttgatgatggggctgggggagataatgaggttcagcgtactatgctagaaattgtaaaccagctggatgggtttgatgctagggggaatatcaaggttctcatggccactaataggcctgatacattggatcctgcacttctgcggcctggacgtttggacaggaaggttgaatttggcttacctgacttggaggggcgtactcaaatattcaaaatccacacacgcacaatgaactgcgagcgagatatccgattcgagctactggcacgactctgccccaactccactggtgctgacatcaggagtgtatgcaccgaagctgggatgtacgcaatccgtgcccgcaggaagaccgtgacggaaaaggacttcctcgactcggtcaacaaggtcatcaaggggtaccagaagttcagtgcgactccaaaatacatggtgtataattaagaaaataggatttctttcttgtctgtactgtacatgttttacatccgtgtggtagcagtgctttggggtttttcgtatccatcattttcgttcgcgtgatggctgtagtcttgaaaatcactgtgagttgggtgccctgggcggaccaggaccagaccagaccgcttttatcaccctgtattgcg

SEQ ID NO: 1139 - DNA, 763 bp, Avena sativa
atattagttgagaacaagaagaactttgacctcacgaaggccttgaccttagtggcagaggttcagcctataagaatagacagtgatgttataaatgaggctgcacaatttgtaacacggagactggagcaacttttggtcgatgagggaataaactgtgaaatagtccggtcagtgctaatggagcgtgcaaactgtccttatctagcatcacaaacagcagctgaaatggaagcattttcaagaactgaagattttccaaaaattgtcgaggcgtattcaagaccaactcgaattatacgtggaaaacaaatcgaatctgcttgggaggtcgacgcaagcatattcgagaaagatgaagagaaagccttgtggagcgcctacttggaggttgctgataagatccaccctggtgtcgatgttaaaaccttcgccgatgcctctctgcatctgatacagcccctggaagacttcttcaacaatgtttttgtcatggcggaggatgagaaaactcgcaataatcggctggcgttgctgaggaaaattgcaggtttgacaaaggggatagctgacctctcggttttaccagggttttagccttgggcaagaaggtcatgaagctagggatgtgtcccatttttgtggctgttttcatgtagtatatcttttacaattgctactagtcattaaactggaaaatgaatgactgcaacgtgggaattcaatgagaatgtaacacagcgcttgcttttttgtaaaggaa

SEQ ID NO: 1140 - DNA, 824 bp, Avena sativa
gggcttcatgacgcacatcgcctcgggacgagggacgccgatgcggcccggaccgatcgacgcctacctgttcagcctgattgacgaggacgagaagagcatccagccggggaacttcgagcggcactggggcatcttcacctacgacggcatccccaagtacaacctgaacttcgggacgccgaactcgcagatccagagagcgagcggcgtgcagtacctggagaagaagtggtgcgtgctcaagccttccgccagactcgacgacccgaagctcccggacaccatcagctacgcgtgctccatggcggactgcaccagtcttggttacaagacctcctgcggggcgctggacacccggagcaacatctcctacgcctacaacagcttctaccagaagaacgaccaggacgacgtggcgtgcgggttctcgggcttcgcgacgaccaccggccaggaccccagcaccgggacgtgcaggttcgggatcatgatcgaggccgactcggccttctcgtggaagctgcagcaggtccgaagcaactggctcctggtgcttcttcttgcgctcgtccatctctgtctgtcattctcgtaggcgcttgtttcgtcagagatggctacagagagcttaacagtctggcggcttgaggatatttgatgcctgctgtcagtgtgttcatccacgtaggaactttttttcgagtcttctcttctttttggtggatgcggatgttgcggcagcacggttgagttcttgttagtgtagctttggtcttccggtaccattgtgattgggaattgggatgatgatgatgatgcac

SEQ ID NO: 1141 - DNA, 678 bp, Avena sativa
  modified_base (639)..(639): a, c, t, g, unknown or other
gaagactacgagttcctgtctgagattgagctcctgtcacggctgaaccactgccacgtggtgccactgctggggtactgctcggagcgacagggccggcagctggagaggctgctggtgttcgagtgcatgcccaacggcaacctgagggagtgcctggacctgaagagccaagggaggaagcccatggactgggcgacccgggttggcatcgcccttggcgcggcgaggggcctcgagtacctgcacgaggccgcggcgccgcgcatcctccaccgcgacatcaagtccaccaacattctcctcgacgacaagttcagagccaagatcacggatcttggcatggccaagtgcctgatgaacgatggcgtgacgagctgctcgagctcgccggcgcggatgctgggcacgttcgggtatttcgcgccggagtacgcgatcgtgggcaaggcgtcgctcaagtcggacgtgttcagcttcggcgtggtggtcctcgaactgatcaccggacggcagccagtgcaccggagggcgagcggcggcggtggcgccagcgacgagagcctggtgatgtgggcgacgtcacgactacgagacagcaggctggtggtggcggagctgccggaccggcgctgaagngagcgggttcccgccggaggagatgcagatcatggcgca

SEQ ID NO: 1142 - DNA, 760 bp, Avena sativa
gtatggccggtccatcgagttcttggaggccgcactcaccatcatacgcccctcctcgctccttggcggtgagattcaaatttggcttgcaatggcatacgatgccaataggcgacacaaggattgcatagcattgtacaaacaattggagaaaacacatccgatgattagcatcaggaagcaagcagctgatttcagatacattgcggaggcacccaagttgaagatctccaacgatgaggtggtcacaataccacaaattggatccagctgggactggtacgccggaacgtggagtgacaagatcgaggaacaagaggaaaggaacagaaagattgtggccgccagcagccaacctgaatcttcggcgaacatccttggcaacctgtttctcctgcgaccgccgagcgaatggaagaagagcgactgggggatcgtcacgctatggatcgttttgatcgggacggcgttctatctgcagagatgaatgtctcctggcaactcttgaaggcacagttgacaacttgacactatcaggccagagctgtatgaatgaacatggcatgtagcaaagggttgttgggagacagcatcgacactggtgaattagatttattgttttagttgtgctatccaggacaggaaaggaagctatacatacctattcttctatgtactggcatagcccagttgaatattatcccccactcgatgtaataccgacaattagaatgtaacaaatgcttatattgttacttaa

SEQ ID NO: 1143 - DNA, 467 bp, Avena sativa
ttttttttttttttttttttttttttttttttttctgcaacttaggtaaattaaccgtattactagttattatttattattagttcaaaagcagaagatcacaatggtaataaataacagtacatcaggacagtcgggggtcggtcaaacaaagcatgtcttccactttccggtacatgggataacagggaacagctttgatgatacagacaaccttgccgggaggcaacaccaaaatcgggagtccagaaaccgtctctctctctatctctctctctctctactgagaggtgcttagatcatagctcgacagtgccaacttgaaatggggatcctggtgttttcaacgacctgacggagatcactgttgtggcggcggctgctgctgcgctgctgctggttgttggtagttgggatagcccgtgtaagccccataaccatacatgttagggccttgatgccgtcgc

SEQ ID NO: 1144 - DNA, 494 bp, Avena sativa
gtttacgtgaaaatattggcgcttttgtaaacgcacttttacttgctaagccggttggcttaaagaaaacttcgaaatatgttggatacgtgaagaagtttacgttgagtagcacgatgggacctggattttctgttaccataccctcactatcggcggcggctgataattataccaaagtgcaagtcagctaattaaccattttatttgtgggcacttgcaaccagtgccttgcaagtgggctggcctattgcagctgagcacaacgttttaacgaggctgagcacagttgggtggttcctgttgggccacactcggatgatagttttgtggtaaagaactttcagcaaacagtatcttgctaaatttcttatggccacagaaattatgtgattgctttcgatggtccactcatgtcattcctcagcgttctgcagtttgttgtatgcaatataatctcgagttcattatgaaaaatgattgtaggagtaggt

SEQ ID NO: 1145 - DNA, 693 bp, Avena sativa
caaacccatagtcctcttcctctactactcccaggtcgtcttcctcgctagcagcatcagcgctaatcctcccgctaatcaccaccgcgttaatccatccccaccccctgctaccgactactcgcgcgatggcggcggcggcgacggctccggtcgaggtgccggtgaggactgtgaaggtcactaatgtttccctgagtgcaactgtacaagacattaaggagttcttctccttttctggagacattgaacatgtggatatgcaaagtggtgatgagtggtctcaagttgcatatgttacttttaaagacgcccaaggagcagagactgcacttcttctttcaggtgcaacaatagttgatctttctgttatgatcgcgcctgctccagaatatcaaccaccccctaccgcctctgctccactgatgagtggaaccagagtagcagtcggtggtggtgacaacgtgatccacaaggctgaagatgttgtgagcacgatgcttgccaggggtttcaccctgggcaaagatgcggtcggcaaggcgaaatcattcgacgagaagcatggcttcacatccactgccggtgccaaggtggcttccatcgacaggaagattgggctgagcgagaagttcaccctrggcaccaccgtggtgaacgagaaggtgaaggagatggaccagaagttccagg

SEQ ID NO: 1146 - DNA, 590 bp, Avena sativa
gtcagtatggcactgtttgatcacaagcctcggcaagcactcgtgggctatctcagcgtcgcgtcactcatatgcatgttcgcatcccctttgtcaatcattaatctggtgatcaagaccaagagcgtggagtacatgcccttgtatctctcgctctccatgtccttgatgagcgtctcattcttcgcatatggggtgttgctggatgatttcttcatatatattcccaatggaattggcgctgtcctgggcgccatacagttgctgctatatgcctacttcaggaaagaaggatccagaagagatgagtgcacacggccattactagtcacacatgcatgagcatgcaagacaagaagcaagcttgggttccacaaactatttactgtcatgatgcggcttttctcttctttttttttccctggtcacgaggttgcactatttcaatggtttgtgtaaactttaatattagtgtctggttttggaatgtgtgtcacgtccgtttgacaaatctggagtgctggtggtggatggataactccagatctgctgccaactgccagatatatatggtcatacttttaaaagaa

SEQ ID NO: 1147 - DNA, 663 bp, Avena sativa
ctccagtactgagccggagagtagtagatcagggtcgctaggtgtccacctcctccgctgtaggtggccacggctcaagtgaaagaaatcctagctaacatttgccactattaataaagtcaacatatccaaaattgtataaataaagtgataaatagtaagttcttatacaaaaacacacgccaaaattgcatatcttaataaagcaacatatccaccacactgttctgacaacctgacacacacatacacacgcagatctcacgtgtctaccgttactgttattctgaattctcaactccaaacactaaaacagggcacaactgatgatccatgcaacttgacattaaatagtagcgacgtcgatcactcaatggtctgaacacgaaaccatagagatttcagtgctgggcgggagggtggtagatcggagttgaagacgaagggtgtcctccgccgtatgtgggcgtgggtgggacggggtggtagtccgggtggggctgcggcttgggctctggcttgggcggcacgggcttcttgtggtggaaatgctccaagatgtgtttcttgaccggtcccacagcggtcatcgacggctccgcgtggtatatcggggtggaggggtgtcctcctcctccgccgtaggtgggtgtgggaggaact

SEQ ID NO: 1148 - DNA, 702 bp, Avena sativa
tcacaaaatcaaaacagtgttccaataaaagaataggacaaaaagggacgaggacaacaaccaggtcaagcagcaggacgaggacaacaatcaggtcaagcagcggaacaacagaagtttcagttcccatttcttttcattaacttggttgttatgtatgggtgcacccatataggccttctgccattgtttggcaatatgacacttgaattcagtcaggcggaaagtacatcccatattatacaccccacacagtagaacaggaacaaagatacatgcgatgcagcgacgatggctccaacatcttccacctggagacctgcagcatcagcccatcgcgtacttttgggtccagctcctcgcagtggactcatacttcacacggtcgctcttgtacatgtgtgcaatctccggaaccaacgggtcgtcggggtttgggtccgttagcagagaacagattgaaaggagtaccttggaaactgtcaatgcagggctccattgctccttcaagatatcaagacatatgctcccgttactgttgatatttggatggaaaacctttgtcttgaatgcgaccttgggtggcttaaatgggtagtccggtgggaagtggatagtaaccaaaaagacaccaccggcatatgggctttcggttggacccataatagttgcttgccagtaggaacatatcttctgccacag

SEQ ID NO: 1149 - DNA, 618 bp, Avena sativa
  modified_base (32)..(32): a, c, t, g, unknown or other
ttttttgaaccagaaaatgacggctcacaacngaaaaaaggggacaggaagtaacagtccagtgtctactggattatgtttacaacctttttccgacacaggtagtggcagataaactctgcttattgaacaatatattctcgacttggaaagacaaagcagaatctaaatgagtatcatgacatacaggcacaatgcctaggcatgatgcaatagcaagactgcatagcacgatgcagctcactgtacattattgacaaaccacgagctgaaggctccttagcccatactatgcacggctgcatagcccactgcacattattgacagattaatatccagttcacgaccaatggctcaaggccctagcagctactcagcattgacgattcagagctcaagttggacgacccacttttgattgacaagtcaacaacacacgacaaagctgggacttgagatatccacttgcgtccaccaacaacgcagacacgcaacgcgaccagtaaagtaacggggttaaaatgtcctgtcagagatagctaatgacaccacggagaaaagacagcaactacgatggaaagaactaaaaggccacggctagcccacgaataggcgcg

SEQ ID NO: 1150 - DNA, 825 bp, Avena sativa
gattatcctggttttggattatcgtatggtcttcatggctacatttcaagctttgatggaatggtggaccatgtgattgagcaatatgcaagaataagaggcagggcggatgtgcgtgagctcccacattttctcttggggcagtccatgggaggtgctgtagctctgaaagtacacttgaagcaaccaaaagaatgggatggagtgcttcttgttgcacctatgtgcaagatttcagaagatgtaacaccaccagcgccagtgttgaaggcactgagcatattatcatgccttcttccagaagcaaagctatttccacaaaaagacattggagatttggggtttagagatccggtgaaaagaaaattatagtgagtacaacgcgatttcatataatgaccagatgaggttgaggacagcagttgaacttttgaaagcaacgagggacattgaatcccagttggaaaaaatttttgctctccgttgctgattcttcatggagcagcagaccaggtaaccgaccctcatgttagcgagttcttgtacgagaaggccagtacggaagacaagaccctcaagctctatgaaggtgcgtaccactctatcctagagggggagcctgatgatcatatttcaaccgccatcaacgacatcatttcttggctggattcacactgttgagtacggttgtacatggtctcattcattgtcacaattctcgtccccaaaatagctgatataccaaataataaaattcagtaatgagatctttgcttccttgggcagcatgaaagtcactgctgcccttagctttcaggaacatgc

SEQ ID NO: 1151 - DNA, 700 bp, Avena sativa
gaacgaggggctatctctgtttgatgcaatactgattgtcccaatgtttcaaattgcatggactttcttctctatttgtacaggatttgtttactttcaagagtatcaagtatttgatacactcaggataatgatgttcatattgggcatgacatttgtcttcataggcatatccttgctagcacctgatgacagtaaagctgatatcaaagatggctatagccctaccgagggccctacaattgatatgaacagtgaagcgcgtgtatcaggaaattgcaggtccagaaagttgcagatggaggagacagaagtagatgatacagactcgttctcgacttcagtaaaagtgaaagcaaaacaaatattgtcgagggcgaagtcagcttgctccatgtcacttggcctcggggaggagacaatcagcgcttcttctgtgcttgcaatgccaatggtttcctcaagaacaacagggtttagaggaacaggaaccgaccgatcaaagtacattccattgcagtccaccgattgggataatctatagctggtaatgttctatagatacacgccacagatgtttaccttttgatagttatactagttattattagctgtaacatgagtgtatagttccagcattcccttgaaacattgtccataaccccgtgttgtaattgtttgtaacagctgcctctacacg

SEQ ID NO: 1152 - DNA, 774 bp, Avena sativa
atagcagtatagcataaccaaggaaggtagaggattgtcaaaatagaggtagcgcctaaggtgtgctcttggtggcctggatgcaccctgtaactctgtgttgatgattatgttgccgtttacattgggaggagttgcttgatgaattgcatactggagcatgaggctgcaatggggtttctatactccggtgataggttgtggtaccaagtgtggcaagagacaagtaccatcaatttctcttgttcagaaaaagaaacaccatatgttgaggacaggcatgctggcagcaccaactccgcatgaacatacaactttgttcgagagtctggtggagacacgacatagatgtagtgaaaatatacataaccaatttctcttgatggctagaggattgtgggagctattcactagatgatgatagcatttccgcaatgtataagtgattctcataacatgatactgatgtacaaaggctctattatcttctcgttctgctttctcatcacttgaagatctggtcgttgcgaaggatcgccatactttcctgagcagctgggctgacaaaggaagcagcctttaggaaagcctgtcgtgtgattcataggtgaaataaatgtaggtctttggtgtttaaatatgtgtataaaaccgttgcaatcctctataaatttgtactcccgctatgctactcctttaagtatttgactaatgtaagtttggaacttatattcgtgactgtcgtaatgtatttctatattctacaaaaaaaaa

SEQ ID NO: 1153 - DNA, 790 bp, Avena sativa
gatgcttttcggaagcgactattttgaagattatgttggtcagcttgctctggcatccatagcttcagtggaggttgatgaaggcgcaaacagtcaagagaccagagcaaaggttcaagagaagataaaaggaatgcaacaagaaagagtgcaaaagcttactcagagcctaaagaatcgacttcaaccatatgtggatggccgaaaggatgaatttgtggactgggcaaacgcagaagctaagcgtttatctgaagcagcttttggtgaagctatgcttcacactgttggatatatttatgtacgacaagcagcaagagaacgtggaaagagtaaattgtatatgggcgtaccattcattgccgagtgggtaagggacaagggtcacaccattaaatcgcaagttagtgctgcttcaggtgctatcgctctgatacagctacaagaaggaatgaaaaagatggaggctgccaatcaggaagagcagcttatgaagagttttgaggagaaaaaagacgccatgcttaattctctatggaaaatcaatgtggttgacatcgagtcaacaatttcccgagtatgccaagcagttctaaaagatagcactgtcccgaaagatattctgaaattgcgagcaaaagcattgaaaaagcttggaactatattccaaggtgcagaatctctctaccatcgcgagaacagcctacgcgtggaaactccgacgaaagaggagggcgcagtgtcacactgaagactgcgaacagttttaacaatttgtgaattatttgga

SEQ ID NO: 1154 - DNA, 780 bp, Avena sativa
  modified_base (248)..(248): a, c, t, g, unknown or other
tttgaatcttcatctacacttgaaatccgactcggtgcagtcgtgcaaaacaaacacacataaatgaacttgttgtcaatacatcaacatatagtacacaggctatcaaccggataacggttttatttttcaaaaactagctcgtgcttctctgaacacttaatcactttctcatgcgctcttctgtttacgatgtgtccttgccggccaaccggggtttcggtctggagccagaaccgaaggggaanctaacagtacattgcgcacggtactagaggcttagcaaccggaaaataccaactaggcacaaggccggaatgttcgatctgtcgcacctttcgccgtttctcaggtgggatgcctcgggcttttgctcttgctagccggacagccgggttgcggtctgtagctgagacgaagagtgggcctctaacaccgtcacacactactcagtcggtttacgggtttagcaggccgggccaaccggcgagcccccgggtaggggttgccggcaccggaaaactgaaagcaggaaggaaaacaacatctgacgagacctcgagggttgcttgaggtcagaaaaaacacacacattgtagttgtcggtgtagtagggtcgaaggcgtgattccgcaggcgttgcggatgctgaaacgatccgactggcgttccagccggatagcctggcccccagccggacaggcaaccaaacgcggcgtagccggaatcggtccctagccggccagacagccaaacgcatcaggctgcatcgagccggcc

SEQ ID NO: 1155 - DNA, 628 bp, Avena sativa
ggatcacaagtctgagggacatggtttgcaggaaaaggttgctcaagctcaaccacagaatgacgttgactctacatggaagcacgatgggtttttcaagttggaagaagaagctcctgttgccaaaaggaggccaggatttaaggagatgggaatgccacttaaggaacaagaatcagctgttatagaaccagatgcaagattccgtaaacctgatcaacctggtataacctctggaatgggagaagaaaggaggaattaccactcacgggaattcatgaggtccgatgatagaggtaccaggagggggttttctgatttcaggggtgctggtcagagaaatggctatgattcaaggggtcgttttgctggtagagggggaatgggcagagacaggttcgagtaccaatatggtggaagaaatgacatgcatgaggctgcaggggatcaaacagaaaaatggaagcatgacctttatgatcagacagacaataccccagctccaatgaccgaagaagagcagattgcgaaagttgaagcactgttggcgctgtagctgtccgttttgttgttgctttgcgatgggccgatgatagttatcttttgcatttttctctggacaatagag

SEQ ID NO: 1156 - DNA, 423 bp, Avena sativa
cacagcaatgccttcattgcctgccggtcaattcacacggtcaacaagataaatgcatcagctgtgtatccactactcgagaaattcttcaaataccaggagggctattacaaccagccaacatacacgaaatcaagagcgacggttgttgacgaaataaccaataacctcgtcgcccctgtcataggcgaagccaatctggcagcatacaaatctggtttcaatgactcacagtcagatcaggccacaaggatttctttcaagtatggttgtgcacgaggtgtgactgggacaccctatttctttgtgaatggaatgccactcggtgactctggttctcctgtggactacaataagtggatatccacccttgatccattagttggcaagatgtagggagttatatctcactgcaattaaggt

SEQ ID NO: 1157 - DNA, 633 bp, Avena sativa
ggtttcaggttgatgacgtgacatgggtctcgagtctgcacatgcatccatccacgtgtcgagtccaggtcttcggttgcatcaagtctagacctgctctttggggaagtccacccatcctatcaggagtgtcggagagtcctcactaactcatgcatcagtacatgtgtcagcaagccttgttcatctctggggggaagagggttaagttggctgcctgctaactttgctaggggcatctagaacctccaatttcttatttggaggtgagattggtttctattattgcctgccgtgccgatggttcttcggtgtggcaagcatgcttacggtctgggtgctatcactttcccttgcatacattacattgcattgaactttggtcgtatggtcagtcactacaagtccgcattgcttatggatccattatcacatacatgatcacatgaatattttgtactgccgaggggtctaagttcactatgtttgacatgtcccctcctaagctagtagcttgtttatttcctatattttcgcacttgcattgtcttgcattcattcttggatttttttgtaagggtaccttgtggtcaaagttcgacggcctgccgttgtaatgaccctgcatacgtc

SEQ ID NO: 1158 - DNA, 862 bp, Avena sativa
aaagaaaatgcagagatcagattgtcagaccctctgcagtaccaatcaattgttgatgctgaatggaacattatttacgacaagttggacaagtgtgttcagagtggggcaaaaatagttctgtcgcggctagctattggtgatcttgcaacacagtattttgcggacagagacattttctgcgctggtcgtgtcacagaggaggatttgcaacgtgtaagctctgcttcaggcggaactgttcagacctctgttaacaatgtcattgatgaggtccttggaacatgtgaggtttttgaggaaaaacaagtaggcaacgaaaggttcaacatatttagtggctgcccatctggtcagacagcaactattgttctgcgtggtggtgctgaccagttcatagaggaagctgaaagaagtctccatgatgccatcatgattgtgaggagagctgttaagaattcaacagttgtgcctggtggtggtgccattgatatggagataagcaagtatctccgacagcatgcgcggacaatagctgggaagtctcagttttttgtgaattcatttgctaaagctcttgaggttattccaaggcaactttgtgataatgctggatttgatgcaactgatgtcctcaacaagcttaggcagaagcatgcatctggtgatggtgctaattatggtgtcgatatcaacactggtggaattgcggattccttcgctaattttgtgtgggaacctgcagttgttaagatcaatgcgattaatgccgcgaccgaagctgcctgccttattctgagtgttgacgaaacagtgaaaaacccaaagtcagagagcgcacaaggtgatgctgctgcgatgg

SEQ ID NO: 1159 - DNA, 835 bp, Avena sativa
catttatggcggcatgcaagactggaactatatacatggaggctgctttgagttaacccttgaaattagtgacgtaaaatggccaaaagcatctgagcttcttgtcatatggaaacaaaataagatgagcatgctcaatcttgttgcaagccttgtgaagacaggagttcatggaaggatatttgctgcagatactggccgtcctatacctggctcacttatggtgaagggaattgactcgaagataagtgctagcagaacttttggggattaccatcgaatacttgcacctggtgagagctatgaagttgtggcgtcgatggagggcttcacaccaaaaagaacacgcatcatgctggagcgcgaagctatgaatcttgatttcatcctggacccagatggaacgaacgctcaaacaaagccgcttcccaacgactgcggctgcgatgacggcatcaagccgttcctcatccgggaagcttacctgtggctgtacctcctggttctgttctttctactggccctttatctgctcttcaggagaagaatatcgtcgaggctggctaggaacccgccgaaacgtcctgttgccatttgagacggatctgtctatggtagtgcaacttcgttgtagctttcagccttatttaacgcctgttgcccacaagccggattaaaatgcggtcaatgtgtcacggaagttttgcctagatggttttaacttggatatgcttatatatgttattagtcaatcatgtgatttaactggatacagagatacatgatatagtggattagtttcgcagatggatcttcttagttttgtcatgtcatc

SEQ ID NO: 1160 - DNA, 667 bp, Avena sativa
ctatccaagcagattttgaatgagcaaactgatgaccgtcagaaggatctaacattcatcccccttgcccctgcttgtgtggtaatccgcgtattgactccagtgtatgccaccctccttccctctggcccattcatctggagaatattctggatttttctctggtcagttctgacctattttattctcgccatcttcaagataatagtgggtttgatactgcgttgcctcgcgacttggtatataaatctatgtctcacaagaaaacaacatgtggactgagtacttggcactaggaattctggtttttaaggtgcaatcattgcgaagacaatttgctgtggtgcgtgaagtacatcacccatcgcatcagccatgagttcagccatagatgcccatatgacagaaaaaatagtacagtgcagaggaatattacaaatatcttcttttccggcgaatgtctcgttggttcaaggaacttagtatagtccaattttgcttcgtttacagtttctttctgacatccctctgtggatagttcatagtttcacaccaaagttatctgcctcaacctagagaagatttttgcaaagccctgcggatctgtcatgtaagacatatatgtacatttccgttgagaagaaaatatggcaattttgtccaaaaa

SEQ ID NO: 1161 - DNA, 899 bp, Avena sativa
tcttgtaattgttggccttgtggcatatgtgaagacccctcgtggcctccgcactctcaactctgtctgggctcagcaccttagtgaagacgtgaggagaaggttctacaagaactggtgcaagagcaagaagaaggctttcacaaagtatgccctcaagtatgacagtgatgcaggcaagaaagagatccagttgcaactcgagaaaatgaagaagtatggcactatcatccgtgtcattgcccatactcagattagaaagatgaagggcttgaagcagaagaaggctcacctcatggagatccagattaatggtgggaccattgcagacaaggttgactatggctacaagttctttgagaaggaagtcccagttgaagccgtcttccagaaggatgagatgattgacatcattggtgtcaccaagggtaagggttacgagggtgtggtgacccgttggggtgtcacccgccttccccgcaagactcacaggggtctccgcaaggttgcatgtattggtgcctggcatccggctagggtgtcctacactgtggctcgcgctggacagaatggataccaccaccgcacagagatgaacaagaaggtttacaagatcggcaaggttggacaggaaacccatgatgcttccacagagtttgacaggactgagaaggacatcacccccatgggtggcttccctcactacggtgtggtgaagggtgactacctcatgatcaaggggtgctgcgttggccccaagaagagagtggtgaccctccgccagtccctcctgaagcagacgtcccgcttggccctcgaggagatcaagctcaagttcgttgacacctcttccaagtttggccacggtcgcttccagaccaccgaggagaagcagaggt

SEQ ID NO: 1162 - DNA, 848 bp, Avena sativa
gatccagtgacggagatgctctttatcatccgtgggaagctggaaagctccaccacagatggtggccggacaggcttcttcaattcaatcaccctcaaatctggcgatttctgtggcgaagagttgcttggatgggctcttgtccccaggcctaccgtcaacctgccatcatccaccaggacggtgaaggcacttgttgaagtggaggcgttcgctctccaagctgaggacctcaagttcgtcgccagtcaattcaggcggctccacagcaggaagttacagcacactttccgctactattctcaccactggaggacctgggccgcatgtttcatccaagctacttggcgacgccataagaggaggaagctggccaaggaccttatgctgagggagtcattctcctccatgagacaggacgaagacgacgacgcttacgctgagcataatctcgcacagaaaatcttgactgcagccaggaaaggatctgacagccatagagaactgccaaagttcaggaagccgtctgagccagacttctcagtggagcatgatgactaagagaaaaggcgatgtattgtctgctacgacgagattgctggctctgctgttgcgtattgtgtttgatctgcaaatatgaaccgagttgacatcagaagcaactgattattcgtgttagaaaattgctggaactcaactttggagtctctttacttgcgacggaacaccaagcgtggaacagcagactgcttgatcggggttcttggtttgggagaccaaaaaagagtgatagggtagtgcttgctgatttgttttaaggaaaagaaaaaaaatagcaattcagtagt

SEQ ID NO: 1163 - DNA, 670 bp, Avena sativa
  modified_base (585)..(585): a, c, t, g, unknown or other
gcttagcagtgagttggttaatgccaagaacatagctgtcactagatgctgatgctctgtctgccagtgtgttgaacctcaggcacgaatttctgaaagcaaaagaattcctcaactctgacatggcaacaatagaagagaacagtgggttccaccactcattggcacgtttcgtagaacacgcagatgatgagaccaacttcctgttcaaagaagagaagagactgagatcattagtgaagaaaacaatccggtatttccatggaaatgacgcgaaagacgatgggttcggcctctttgtcattgtaagagatttcttggtgatgctagataaagcatgcaaggaagtcgggggcatcgcagaagaaggcggcaagtaaatctcagagcagtggcagtggcaacctagcatcccagttaaattcccaggagaaacagtttcctacagttttggatcatcatttagatagttcggactcaaacgattaactttgggatatactcttagatgtactttttaggccatttcttttcctcgagacgatgtaaaaaatatacccatttgcataggcattattgtatacntacacatggcctaccacatggtttgtagagccattattgtatacacaaatactacatgcacatggtccgtacatggttatatatc

SEQ ID NO: 1164 - DNA, 579 bp, Avena sativa
caatatgaaaatgtgacaatgtttctcctcctctgcaactggtgcaggtagcggtgatggcgctgatgtgaggagcacgtcgagcatggagacatcttccgacaataacaacaatagtagcgccagtaaccagaacaaatcgcttccgccgccgtcgccatcgccggccgggaagccgccgaacggcaccgtcagggagcaaccgccgttgcgaaccctccggtcgctgacgatgcgcacgacgagcacgggcgacctgcggaagagcatgatggaggacatgccgatggtctcctccaaggtggacggccccaacggcaagaagatcgacggcttcctgtacaagtacaggaaaggggaggaggtgaggatcgtgtgcgtctgccacggccacttcctgacgccgacggagttcgtgaagcacgctggcggcggcgacgtcacgaacccgctcaggcacatcgtcgtcaaccccgcgccgtcggtgttcttgtaatgccgaaatgtacccctacgggggggagacgtgttctttcctccctttctttactctgaattttagttgtattattatgttta

SEQ ID NO: 1165 - DNA, 683 bp, Avena sativa
ccgcactaaggcttttcctctgtttgatgccttgggagagttgtatgatggacagaccgctgagggaacctataactttacctccactcagcaatcccaacaaccaatccttaaagaagtggagttcgatcctgaggttagttctgtagaggtcatacaaccccatattggagagaccgcggtggatgttgaggctgatacacaaggaggcatgcaagaggccagttttcaagctacccaatagtgactgatgcaccatcaacaagcactgatatcgaacccaaaaaggcgttgatcaaatgcagatgtagctgcaatgatggaaaaaatatattgagatgaagacaaagcaaattgaggacacgaaagctgattcaaggaatgtggatgagttctcaatcaagaactgcattgctcgcctaagcacaatggaattctcgcaagaggagaaggtgaaagctctacgagtctttaaaagtgcagacaatcgcgagctcttcatctgcactgaccttgagacggctgtcatgtggctgcgaagcgaatggcctagcaaaggtgtgtgctgagggaaaagacatggagctctacatgaagaagctcaagaagaagaaacacaagggtgatgtggcgatcaattcgtgtgcggtttacagtgaaatactatatatgtattcgctgtg

SEQ ID NO: 1166 - DNA, 522 bp, Avena sativa
aaaagtatattgagatgaagacaaaacaaattgaggacacgaaagctgattctaggaatatggatgagttctcaaatcaagaactgcattgctcgcctaagcacaatggaattctcgcaagaggagaaggtaaaagctctacgagtctttaaaagtgcagacaatcgcgagctcttcatctgcactgaccttgagacggctgcgatgtggctgcgaagcgaaatggcctagcaaaggtgtgtgctgagggaaaagacatggagctctacatgaagaagctcaagaagaagaaacacaagggtgatgtggcgatcaattcgtgcgcggtttacagtgaaaatactatatatgtattcgatgtgctttgttagttgttgtgtcagtattttctggaaacaaatcgactatctcaaaatatttgagattatagaacattgtatttcattctgttatcttgttttgtttcagctttcagctatgctcaagctttttcagaatgatattattagattcaacgttgct

SEQ ID NO: 1167 - DNA, 903 bp, Avena sativa
cagctattgctcctcgcctacagccgagatactactcaatatcttcctcaccaagaatggcaccaacaagaattcatgtgacatgtgcactagcttgtggccagacccctacgggaaggatccacaaaggagtttcttctacttggatgaagcattcaactccctcggaagagagccaagaatgtagttgggctccaattttcgtgaggcagtcaaacttcaaactgcctgcttatcctacagtacctattataatggtaggccctgggactggtctggcacctttcaggggtttcttgcaggaaaggttggctttaaaagaaaccggggtggaactaggccgtgccatcctcttctttgggtgcagaaaccgccagatggacttcatatacgaggatgagctcaacaactttgctgattccggagccctgtccgagctgattgttgccttttctcgtgagggtcctacaaaagagtatgttcagcacaaaatgtcagagaaggctgccgacctttggagcatcatttctcagggtggctatatatatgtctgtggcgacgcgaaaggcatggccagagacgtgcaccgcacgctgcacaccattgttcaggaacagggctccttggacagctccaagacggagagctatgtgaagagcctgcagatggaagggagatacttgagggacgtctggtgacaagtgccaccccaggaaatgaagcactgaacaattcagaatacacaagcgtgtgttctatacagtaggaatgtagcgaaattatgaaacaccacaagtactctctccagtccctgagttggaattggcggggaaatacacatgtaggatcggtgaggctggcatgcagggatggaacatatagtactgggctcattgatgtata

SEQ ID NO: 1168 - DNA, 850 bp, Avena sativa
cggacgtgctgatcccgctcttcctgtcggcgtcgcaccacgccggcgaggtgcagctgctcatcaccaactacaagccgtggtgggtcaacaagttcgcgccgctgctgagcaagctgtccaactacgaggtgatcaacttcgacaaggaggaggccgtgcactgcttccccggcgggcagctgggcctgtaccgcgaccgggacctcatcatcggcccgcacccgacccggaacccgcggaacctcaccatggtggactacaaccggttcctccgccgcgcgtacggcctgccgcgcgacgtgccggcggtgctgggcgagaagacggggacgcggccgaagatgctgatgatcgagcggaagggcacgcggaagctgctgaacctgcacgcggtgcgggagctgtgcgagcagctcgggttcgacgtgaccgtggcggaggccggcgcgggcgacgtgcgcgggttcgcggggaaggtgaacgccgccgacgtgctgctggcggtgcacggcgccgggatgacgaaccagatcttcctgccgacgggggccgtgctggtgcagatcgtgccgtggggcaagatggactggatggccaccaacttctacgggcagccggcgagggacatgcagctccggtacgtggagtactacgtgtcggaggaggagacgacgctcaaggacaagtacccgagagaccactacgtgttcaaggaccccatggccatccacgcgcaggggtggccagggatcgccgagatcatcatgaagcaggacgtcgtcgtcaacatgaccaggttcaagcccttcctgctccaggcgctcgaccagctgcaggactagaccgt

SEQ ID NO: 1169 - DNA, 901 bp, Avena sativa
actaatcgagctttcttgtccatgtttcaatgcatcattgaacatgaccaccaagacacacatgcacacaatagtaactatttttttttgtacctccaagtcatcacctcttaaaattctcaaaagaacatctcacaaattaacaaagacaaagattaatctagactctagctaacagaccaactcaccaagaaactcttgcaattcacaatccatgcatgcatgatactatctctcagcaaaagacactagccagcaacatcccaaaacgatcataaggagatagtagagcagccatgtgtgtctcatggaaagccatgtggggagaacaaggaggacggccctccttgcgctgatctgctcccgccgtcgtcaccgtcgccgtggttcatcacgtccatccctaggttcaggtacaccatcctgttgtccaggctcaggttcatggctgtgctcgctccaccggcgccgctgtacacgcccccaccgccgctgccgggatggtgctcgctgtacatgggcaccgcggcattgccggccgcgtcctccctggacatgaccatggcagccgactgcacgagctcaaggcagaggcggagcttgtttggctcgatgtgggtaagccccggcacggcacccttgaagaggaagtcggaggtgagcgtgcggaggatgtcgagcggcgtgacaccgtcgacggtgcgcacgttggggtcggcgtggtggtcgagcagcacggccaccatgtccgggcacaccatctcggcagcgacgtgcagcggcgtcttgcctgcgggccccgccgggtggttgacgtcggcagcgccgagctcgaggagggccttgaccacctcccggctgcagttctcgaccgcgtagtgcagcgcgagggcctcgtcga

SEQ ID NO: 1170 - DNA, 405 bp, Avena sativa
ttcttcgatgtcaaagttactgacaccaatagcacgagctttgccagcatcatgtagcttctccattgctccccatgtagctgggatgttaggtgttacatagttttcagggctgccaatactggttcccttcttaacgctaaatggccagtggataaggtaaagatccaagtactcaagctgcaggtcattcagggattcgtcaagtgccacaggcacgtcttctggggcatgatggccacaccatagcttagaggtgataaacagatcttcgcgcttcactacaccctcttcaaatagcttcttcagagccaaaacccacctctttctcgttagttgtaggccctggcgcagtcgatgtgccggtagcccgccttgacggcggcgtagacggcctcgccgacg

SEQ ID NO: 1171 - DNA, 711 bp, Avena sativa
attgaggagaatggctggatttcgtgatttcagcagaaaaatggtgaaactggaatggatactcaactggactacctttgtggcagcaagggtggtcagccacatattgattacatacagactgatcaccgatgcacacaagtttgacaagggcatagagcttccgttagctctttttggcatggcaggaatgaatccgctcaacatttccttagggcttgatctatttaaagcattcgcacgagagagaaatcagcagaggcatcaggactgaatgtgcctttcttgacagtgtactgtaaattttggcaaggttatagtcacacaaatgtatatcaggaggcagaggtatgtttaagtgttattagggtgtgtcctgaagtgccatgtatgttttatgtatgttgaattgtattaagatgtcttccagaaagggattatctggctctcctgccattagtggacatttcatcatgacttacacccttagaaaacctggatgcagcatttgcacagactagagtagaaaaggaagaaaatgtatgtattgttttaccgtttgtagacttgacctagtgtgctacagagatgcttaggcaacttgtttgtaagcctgcactcctttttctcaaactactgattcaatgtcttgcagtgaatgttgttcattgttgttgattcacttatggtcttgtattatattcatcatgc

SEQ ID NO: 1172 - DNA, 627 bp, Avena sativa
catgatcgtgtgtatagcaagactcatccacaagcagttcagaataacagtttcagtcacgcactaaaaagacaaatggaagtgatgaaatgttcagagtgacacatgaaatgacgcgaatgatgcacactaatccacaatcactgatcaggtgcttatttaataaaatagctaatgcaagtctgtattctgaaagtgctcagatctctgcgacattgaccagtgaagacagcatctagccctggagcccgatgatcccgcaagcaacacgcgcaccagcatttccagtgctcttgctaagctcatgtccacccttgccaagatcatcagcatcaccatggacaacaacagcacggccaacgattgaatttggtccagtaaggggaatatggcagtcctcaattttgatgttagcaacaccatccgctccagctgtcacatttccaagatcaccagcatgacggatttcatcttctggtgccccatgcacgtgaccagcggggttgaagtgtggtccagttgacatgcagccattagtggtgtcaccaagggcatgcacatggaacccgtggagcccttccttgagtccagagacgcttcctgtcacggcggtcgggccatctccgg

SEQ ID NO: 1173 - DNA, 728 bp, Avena sativa
aacgaggtcgcgatcgcgcacactcacgccagttcactcgcgcagcaagctagcctgccccgctctcgcacgatgtggagccgtgatgcccgcgcgcgccttctcgccgtcgccgtcgcgtgctgcatggccgccgcgccatgctcggcgcagggaacgacggcggcggacgccaccaacggcgccatgccgtcgtgcgtgtcgaagctggcgccgtgccagggctacctgaacgccaccgacgcgacggcggtgccggacacgtgctgcgacccgctcaaggaggcggcgacgacggaggcggcctgcgtgtgcgccatcctcatgaacaaggccgcgctgcaggcgttcggggtcaagccggagcaaggggtgctcctcgccaagcgctgcggcgtcaccaccgacgcctccacctgcgccaagtacgccgccggggccggggccggcaaagatgcagccacttcaggtagcactgccccgtcttcaggatccacgggaactgcaacttctacagcggccaagccaacggccagcgcaggcacgatgcatcgccagagcttgaaggccgcatcttccttggtagtaggcttcagtttcatctggtggtcgattgtggcttagctaagagctggggaatgagtatactggtagtatactcctatgtattttgtttgtaattgtcttaataaatatatatctatctggttattttgttacaaaaaaga

SEQ ID NO: 1174 - DNA, 702 bp, Avena sativa
aattgacgatgttgataagcgtagatggcgccccaacatggtcatctggtaggggaccgacgggcttgtagctcccctctttgcctctactacggagcatgagctcaataacagaaacacatactggaacaaggcatgtcggtcgaaagcacattaacgcacccaattattaattgaatctgttgttttcagctttgacatgttaccatgggtactgctaagcttctgcatgcatgctctccagctaaatgaacaaaattagactacgtcaataccagtaaacagagcatacaggctcgctagtgttgctaggtaaggttatattcacaagagataactaggacacaatgtgagcgtcactcagaaccacgggtgccacgtcggatccatcatgcacaagttcctcgaagataatgcggcttccactagatctgtaacgcctctttggacagactgaggcggttctgttgtgttctcttcctcgtcagcaagatagtgtggtgatattgatttgatacgattgatgacgtgttccacattgtttaccaccttatgctggaaatctaatggattgatcattccagcagcaactggaacagaagggatgccaagtggccttcgccatgaccaagataacagttcgtcgcggaaaaacatagccagatgatgccatatgtgttgggtttgtttaggtgaaaccac

SEQ ID NO: 1175 - DNA, 963 bp, Avena sativa
agtctaaatacactcctttcacatcttatatttcaaaacggagggagtagcatctagtagtagtaagtacaactccttttggcgaagtttcctggcaaaaacattcgtatggcaacacaagcctcctcatatatagcacgagctactgcctgaataaaaagcaacatttctcatatggtggatggttaggtgctcaagtatggccccttctggcagaacatagggttgcaaaaagtagcatccggttcaactaattccacatcatcatccattcagagatgtccactcaccaccggatcatgttttcagaggagctttcttcaccctgtcggatatccgatcaggtgcattggtgtgtgacttgaaacggcctcgcccgccctcgtccgtttccttcttctttactatctggacgacatcctcatcttgcagaccatggctaagaccacaatgctgtggatagtgcctagcgctgactccccacacaagcacatacttcacatccttaagcaagctcctatggatatgattgcagaagtcttcaactgtgcaaccaccccggtctgtagaaagaacaaccgggtctccaaaatcaggctgctgaccctgcggctttgtgtacactctcaccagacccatttcctcccacattcttgctaacagcctgtccaagttcaactgcatattgcagctgatcacaagtgaattcggttgccgagcaagattatccacatcatcaatgccgacaacatcaatcttgttgtatacataaacacacttgatatacttccgattcccttcgatgacatcaatgaaatcatccacggtagcatcctcacggaataacacctctgcattatgaattttatactcatgaagtatctgatagcagagcttttcatcaatatgagttaaaggcgctgtgctgttgaaactaatcccaccagtcttcttcctcttgaa

SEQ ID NO: 1176 - DNA, 925 bp, Avena sativa
tccgagtcggcgaaatctccaaacactgttaccaccctgcaacgccctcatgatagggcactgatttcacagaaccaggagatcactcacaggaggtgtttgtaccacgggccgtgaacctgctctgatatagttgctactttgagtagcacttcggctgccttcactacgcggtcagtgagttttgtcgccccgatccgcccgagggccgcctcggcaagtttcttgcccttcgccccgctgccacccagggtaatcgcacggaaagcacagtagacagatcgagagaccttcctgaagacggtgccatcggtatggaggcttttaaggaagaccctggtcaatatctgcttcctggcctcaatcatttcatccgagcaagggctggttgaggttgccgaatggatcatcacctcaatgatcttgtccgtgctaacatcagaaaacttgtctagtagctctgtgagtgtgtcgaacagtttcaaggttgaattttccagttcagaaggagtgatctctgagttctcactcatcagaacttgacgctggacaagcatgctagtcgcgataacaatcacttgttggaactgactctgaacggcacgcaacctcagccaattgagcttaaatgtctcagttaccgacttcctttgtatgccctccatgctgctgataagctgcaatagcccaacccttattatcctgtcaaggccttctcctgtgcactctggtagccctgtattttctgctataggcactgtaggttgttgctgatctggaactccacgaccagctcggagggtcgtaacaaatggctgaacatgatctgttgtgggcagggtctggaaggagctgacataatcattccaatcttcttctaccatatcctttgaggtagaaatccactgaatagttaaagggagag

SEQ ID NO: 1177 - DNA, 883 bp, Avena sativa
aacggcaagtcgagtttctgtccatgaagctggccaccgtgaatccgcagctggacttcaacaatttgcctaacctgctcgctaaagatatgcagcagtcatgtggcccgttgcagggctcacatttccccctggacgcctcaggtgcaccgctgccctacatgagccagcctcaccaggggagcaacccgctgggttgcggcatgagcgacatggacgatcagggctctatgcatccgctagacccggcgttctgccggtcgatgggctcgcagcaccattttctcaacggagtcggcgatgctgcatcccaggttggggcattctggcaagatctgcaaagcgtggttcagatggacatggggcagagtcaggagatcgccacctcttccaacagctacgacggttcgttgcaaacggtccacatgaaaatggagctttgattgacatcgccgggtggagaagctcgatcggaccgaagaaaagcctcgaggccacgcccgctgtacatagagaggaagccagtgatcaagcttgccatccatccatccatggaagcacactctgagattcaacctaacaacgttgggccctagtagttccttagcttctactactaatttcccatccatcttcctggtgtaatgattcttttgaacagaacaagaacggaacgctagctagctctgcctatgatcatctcctcctgggaagtttagcttagctagctacaaaaacatgatcggtacatagatttcggcgcggcacacgctcggacccttgccaattatccccttcttgaagcgaagagggaaattgaagatgtagtaatagtatcatttgtattgccacattatatatatatatatatatatatatatta

SEQ ID NO: 1178 - DNA, 778 bp, Avena sativa
cggctgtcacccctgaaattaaggatgccctggtgaagaacataaggaggagaatgacgccacagccactgaagatacgtgctgatgttgagatgaaatgcttccagttcgatggtgttctccacattaaggaagccatgaggaaagctgaagctgctggaaacgctgattgccctgtgaagattaagctcgttgctcctccgctttatgttctaaccacacagacacttgacaaggaccaagggatcgcagttctgacgaatgcaaccaaagtttgcgcggatgctatcgaaaagcacaaggggaaattggtggtgaaggaagcagctagagccgtgagcgagaaagatgataaactatttgcggacacgatattgaagctgaagttggcgggtggaggaggttgagtggcgacgaggacagcgaagaggaggaagacactggaatgggggatgtagactttacaaaagctggtgctggtacagactgaatctcctccggtgctacactggttggatgagttcacttgtacagcagcgccagcagggaaggaaggatgtttggttgctcctgtttgaggatggaggatggatcatttttactctgttagatggtggtggttatgggttgagttgtaggctacctgtagtcttacatattgatttgttttccttggaacgctaatactgaatgctgttagattcactgttgctacatgttttcatcaacatttatacatggtatttttttctaaatagttacttacatgcgaaaaaaa

SEQ ID NO: 1179 - DNA, 527 bp, Avena sativa
aaggtcttgaaggtttcatgggaagggggcgcagagtactatactgctgcaaagttggaagatatatttaagcaatttggcaaggttgaagacattctgatcaagaccagaaaatcaaggagcaagggttcagcaattgttgtcatggcttcaaaagaggcagcaaaaaccgcattgaagaaccattctgtgtacaacgtcttcccagtcccattgatggttgctcctcttgaagaatcaggtgggacatcggcattcgcaactccaacctctgaaccgagggtaagcaacattgaaggaactggattctgcgatatggaagcatcagtgttccggaaacttcaagaggcccaaaagaggaagcaatgtggataattggtgcttcgtggaacatgagctagcaacctacagaggacatttgtcgtcgcaagtcgcttcgtctgaggatcatcaggacagttcagttacaaagtcgaaacagttttatagctttgttgctgatatattgttgtcagtccagcacatgc

SEQ ID NO: 1180 - DNA, 609 bp, Avena sativa
ctgtaaattgactacaccttgtaatcaacagacaagagcgtactaaaattcgaactaaactctatttggtcatgctaacatcctccattatcaaccagaactgagaagaacggcagacttttcacatgttggtctattactcttcagcgcattattacatctagaaaacactaatctgattgttctagcagaaaagaatacatgttcaacctattggtacaacaacactattgtttcaatatcatacagtatccagaaatgcagttgtactcaaagaggactcgggccaatgaaaaccgagcttcacgacgaattcgagtttcatgtcgtgtattcagcatttatttcaacatacttataacttaggtcacagccccacgcctttccactgcctcctccattccctactgatacatcgatgttcaccgtaccatggatgtctccagcatctttgagatacttgctagcagcagatctgtcaaaaggcagtggttggccacttttcattagtggaataactccaagggaaatatcaagttggtctgcattaaagtgaacgcctgaatagccgacagcgcaagcaatacgtccccagttcgggatcccggg

SEQ ID NO: 1181 - DNA, 662 bp, Avena sativa
caagtcatctacacgctggactctcgcaatcaatatgcaggaaattgacgatttcactattcaagtggattcagaggagttggttcagctgggtggtaagagcgaggtcgacggatggcataccatccagtttgcaggaggcaagagctcaccaacgaaattccagctaaccctcttctggtcaggcaacgcaacacatgcatctgcagaaggagctaaagcacaggattctcctctcttgctaaagctaagaacagatgtggacagagttacgcctatggttgctacggtgcttgagaagctcccaagttggtgcactcctttcggcaagtccacgtctccttacacgttggctttcctgaccgctcttcctgtcgatatttaggcagcgcgcattgttacgtaccccacgtctagtgtattgacatagtattcacggttagatcaattccatcatccattgcattcatagcttcagagttcagaacgtacacggaaagctgcagcagcttagagttcaggaggggccttgaagcgctagagacagtagacgaggcagccctgcgtcaaaatgtgtgctacgaatgaatagtcgtttgatagtaaaaaaaacttacagatagagtggaggttgtaataaagacgaatgtattttggatgtt

SEQ ID NO: 1182 - DNA, 757 bp, Avena sativa
caggggttcaactggatctcgctgcaaggcggagactgcctcaaacgcctcacaattgccaagaacactgggagtgtgtatactgtggggatcttaaggctcccggtgttagagcagctgtcgctgcgtggtgtccagtggagctggggagccgtcagctatttgctgcagtgtgcaaccgaggtgaagcatctggtgatgaaggttgagttctgtggtgattttgaaacgctccaaccgttccccgaggttgatcttgttgaattcttcaacacccacccaaagcttcgcaagtttgagatccatggtgcaatgtttgcagcactgtgccaaaagaacagcctgaaaaatttggattcaaggttctcgatatcttcattggaagaggtcctcatcaccgtgcgctcacccttgaatgctgagcagaagctgaataccctcgagtccctcatcagttacagcccaaggctgcagaggatggtcattaggatctcgcagatgaagaactgccatgaggctgcagatgaattctttgaagagatttgcaagtttgcgcacatgaataatggcagagtgcggatagaatagaagacgccctgctgcatctcttcatgcctgggctgttgtgagttgcaaccgaaccattgagaccttgagtagatactgtttatttagttcaattcagctcgagtacttgagctattttgtttgtcattgttatgtgggctggatcacattgacagttcagcatgcttaa

SEQ ID NO: 1183 - DNA, 611 bp, Avena sativa
cgggttcgccaggctggtcaactccgtcgatgtgatgatgggtgtccatggcgctgggctcaccaactgcgtcttcttgccgcagaacgccacgctcattcagatagtgccgtggggtggcctcgactggatatcccgcaccgacttcggtaacccgtcggagatgatgggtctaaggtacaagcagtacgctatcggcgtcgacgagagcagcctcaccgagcaataccccagggaccatgacatcttcaagaaccctatctctttccacaagcgtgggttcgagttcatcagacataccttcatggacaaccagaatgtgaggctggattgcaagaggttcagaccaattctcttggaggcactggacaatctcaacccgtaaagaaaactgatgttcttgtacaacccttccatttttaccaaattcgttttgtgtaaaatttgttgcccatcctctcttggcctgtgtgagaatgtatgtatggtcttctcagctatagaatttttctaggaattacttgtgtaagctatataaaatttccgtcgcagcatcgctgcaaggctggaacaagatccttcaaatgatataggtccatcagatcattcgt

SEQ ID NO: 1184 - DNA, 671 bp, Avena sativa
ggcttagcaagggaaggaccaacagcagatcaaactcacgtgtccacagcggttatggggacctacggttacgcggctccagactacgtcgccacaggccatctcaccaccaagagcgacgtctggagctttggggtagtactctacgagatcctcaccggacggcgttcgatggagaagaaccgacccaagaaagagcagaggctgctggaatgggtgaagcagtaccccgtggaaagtaggcacttcaccaagatcatagacaccaggctcgaaggccgctactccaggaaggggactacagagatcgccaagctggccaaccgctgcctcgcgaagcgctcgagggaccggccgacgatgagggaggtggcagagggcctgaagcaggcgatgcagcacaagcagctggacggcgagagtggcgcgccgggggacagctcgagctcgccgcctcgcgacgtgcagggtaagccgacggcggacgacatcgctgtggcttcggcgaggcgccggatgcttcaccttgctgccctgggtgaaaacgggaacagcattgcgaggagattcatgttcatgagggctgccgctgcttcgccaactccatcgtgatcttctgggcgtgttcatgtccttcactccgtgtaatgtacagtatctatcaagataaa

SEQ ID NO: 1185 - DNA, 830 bp, Avena sativa
ccgggatgggggagagtgtccgagcgcgtgcccttggtagccctagctagggttcgtgttcgaggtgggggaaggcggcggagatgtcgacgccgtcgaggaagcgcctcatgcgggacttcaagcgcctgcagcacgacccgcccgcggggatcagcggcgcgccgcacgacaacaacatcatgctctggaacgccgtcatattcgggcctgatgacacgccatgggacggaggcacgttcaagcttaccttgcagttttcagaagattacccaaacaagccgccaactgttcggtttgtctctaggatgtttcacccaaatatttatgcagatgggagcatctgcttggatattctacagaaccagtggagccctatatatgacgttgctgccatattgacttctattcagtccctgctgtgtgatccaaaccccaactctccagcaaactcggaagctgccagaatgttcagcgagaacaagcgagagtacaaccgcaaggtccgtgagatagtcgagcagagctggactgctgactaaggcagggtaatggtgccgttgccagaatgtcacaataagcaagtggggaagttatccttctggcctggctatagttggttcacagtcgaaacattgaacatctccagttattgcttgtaggaaaacaatctagtgattgtgtgttgttctgtctggtgattttgtgttctggttcctgacattgtcttttatgttgtggtgtcgttctgtctcatgacatgggcgtcctgcatatgtaaaagttatagcctggaatggttcattgacttgaggacctcatcgcacttg

SEQ ID NO: 1186 - DNA, 748 bp, Avena sativa
  modified_base (725)..(725): a, c, t, g, unknown or other
atggatgtttcagcaagctttcccaagattttttttggcttatttgagatgagatatcaactcatttttgctctgattcggttccacagcaagtctgtctccacttctcccagcatctattcactcagaaccccacccagtgtgaatatggctggagctgacatagacaaagcatggcaaggttgcaatccttgccatctgaataaatgcatagattggcagtggcaagctcgttccctgccattattatgttcattgctgaaatggaaaagagggagaatcctgaaatccacttagctgacggtctttatatcggtacataattatcgaagcaggccacatgatgcatcattacagagaggttttctacctgaaattgactgggttcggcactcctgcccaaatctttgttcagttaacaatctcatgtggtttatgcaattatgagtctagacttctgtaatatgtatattatgtaaatccataatttgaacaagtacttcgtaatggaacgcttgtaaactctcaattgaacctctgcagctagtctccttggctgcatcattgttcatcaagtatgctaggtcagtagattaagtggattatgtagctcgttatgttgtttctgcatcaagaaccgagcatacatgtggagccaactgaggcaatgtgcagcaaaggcgtggatgtgatccaagcctttgttcattattatctatctcatnttatgcaactactatatactatg

SEQ ID NO: 1187 - DNA, 516 bp, Avena sativa
caatgaaaggttccttgtcccggagatgctttttcatccaattgatctcggtatgaatcaagctggccttgctgagtgtatagttcgtgctgtacaagcctgccatccctttattcaacctgtgctgtatgagagcattatcttgacaggtggaagcaccttgttccctcgatttgctgaaagactgcaaagagaacttcggcctattgtgcctgaggactaccatgtgaagataattcctcaagagaatccaattcttggcgtctggagaggaggatctatcttggcatccagccctgatttcgcgtcgatgtgtgttacaaaattggagtacgaggagatggggtcggcacggtgccgtcgaagatttttccactgaagactgaagagttaacccagcagttccgtagagaggcaaaatagtagtttgaaatatgagacaggcctgtttagatgtgatgatcaacatctgtcgtgcaaaattagaggattctgcggaaggtttcttctaggagt

SEQ ID NO: 1188 - DNA, 877 bp, Avena sativa
ccagtccaagtcactaatacctaaccttactaacacaagaaagcaatgaacacaggttcgagttacacaacatgaggttaacgatctaactaagaatgccgctgcagaccttgttgttaacttgtcgcatcgggcttatttcttccttccgcgggtcgattttgttttcttgtttgcggctgcgctgcttggtttctctgaagtttccttccgcttcaatggcactgatgtgctaacagttggcttgaaaaatgactcgagccttccttgtgatgatttattcttcgccgacttaatcttctctatggccttcgtcacacgatcttgattgaaaccgttttctttcaccagaaaattcacgaggccctcctcatcaggtgcagtccatttgagctcaggaatatccaaagtaacatcgggttccttgaacaagcgccgagcttcttgataaggccagtcctcagcaatgtgatatttctctttattaatattttccagaattccctcgatggacccatgttgacgaataagcttcagagctgttagacccccaatacctttaatgttatcacagtagtcacatccacagaggatgcacaagtcaataaattggtccatcgtgaattcaagctcctccaaaattttcgcgacttcaaattccataacaggtattttcttggaacttggatccatcaaatgacggacaaaccgtggagctccaaaagtaagtgagtccatatcttctgatgcaacagcatacaccttgtcatttttgcaagcgcagcacattgtgattctgcttcgcaaggagcctctacacaggaacgcccatcagtcttagtagtcgcttacaatcctcattatgctgcttagtgac

SEQ ID NO: 1189 - DNA, 966 bp, Avena sativa
ttgatgctttagtcgatggtgcagctccagtcctgtctcgtagcctatccgagctcgtggcattgaagctgctggtggttgattgagctgataagatgctattagtcttggaaccatcaaaagttctcctgcttgtatttgcaccatcattagcgacggattcttcttgttcatcttctccttcagaaaccaccgacgagcttgcccagccattagtgttgtctcctttgttttttccgagcaaattttagaagtctcttgaatcctttttggagaatctttatgaaaaactattgcaggtgggttttcagcatttccccactcaataatttctggttcgttgctatctgcttgcaacatttgtgacaatgaatgacggattttggggcttgatgatggcaccggttcaattgctggtgaggtgacatcctcgcctgtcacagtttcaccaacatctgtaacttctggatgttctacttctacccaggcagctgatgagatgtccatttcctcgtcaacaggtttgacctcaacgacagagggctcaacctggtcactggagcccatttctggcgcggttacacttgagcccttgttttctgtttttttcaatattcaagtcattatcgatggaaatttctaaattttcatcaacatcatgtgctggttgagcaagatcagcctcttgtaccttgatagttggctcggttgtcacaggagattgctccttatcttctacttgggtaacacttccaatgtccttcgaagagtcacctagctgcagccccttagtcttaacaacaccagaaccaacaccctgactaatcccagtgactttcttcgcaggtttggattctagtggtacaacactgcttttctttgggaccttgttgtacaagcctgactttgtcgttgcactagattttcttctgaagcaggtgaactcttagccactcggctcggctt

SEQ ID NO: 1190 - DNA, 502 bp, Avena sativa
aaaggttggattttgccgagatgaaattcagcttgtattttcttggctatgaggatttgtctgcagcccctgctgatcctgtccagcggacaggatggacttttgggcaaaaggctaccatcgagctcactcacaactggggcacagaaactgatcctgaattcagagggtaccataatgggaactcagacccccgtggctttggccatattggggtaaccgtggatgatgtctataaggcatgtgagcgcttcgaacgtcttggggtagagtttgtgaaaaaaccagatgatgggaaaatgaaaggcatcgcattcatcaaggatcctgatggctactggattgaaatatttgacctgaacagaatcggggaggtcacggctacagcgtcctgaagtgtttgagcagcaaaacagaaaaaaggacttagcactttcagaaatgttagtatgaactcagttatggaactatgttagtttcttgtactgctacagcatcatga

SEQ ID NO: 1191 - DNA, 879 bp, Avena sativa
gagaatcagctgatacttggacaatgtttgttagctacattgaagcatggggctacaacaggtctagttgcagaaacctaggtcatcacacgtctaacaaagaactacagatacatccttccaagggaaccttcacaagagcctctgtaatttgttccctcatgaaagcttaaacttcaagatcaagctgtgcatactgcatagtagcactacaccagagaccagattctcttgcactccacacatacagcaaagtcaggaatcaaagcttgttgaaaaactcaaggtgctgcattctaagttcctaagattgagcatgacagcgattccagtgtcacaaaatcttggaatgctaattagcctaacttgctgcttctccgatcctttcaacaatctagtttcatatttatcttgattcccgacaaagtaaacatgggggcaagtttcaacaaggaacgggtccttgtctgtgtatggataacatcctaggctgttcggtgcagtcggagcaagatggcgccatgtcaatgtcctttccatgaattctagcatgtctttggcatcagagtacttgtagaggtcatctatgttctggccagacgttccaagaaacttgacattgtcaaggtcaaattgatgtggattcggacatgatgaaaatgtattataagtagatgctccagcaaaaaggcatctatgcaaaggctgctgaggcaaagaaaaatttgctggatcattacaccctggcataatatctacaggtaatgacgccacaagctgagtcagcattatatccagttcttttattggctcagctatcctcggttgatcttttgcagctactgtctggccgttcaagtatctgggtgcaatatgtac

SEQ ID NO: 1192 - DNA, 817 bp, Avena sativa
gattctgcccttattgctccgtgtctcttgcttcttgctgtcttctggcctggcttccgtgaaccccctctgagatttttggtgcctgatttgcttcttcttcatggtaactgaactgctggcgaaaactaacctgttttctggctggggattggtcaaggtggcaagcgctggacttcgcgcggctcaaccacagcaccgtctccttctacgacgacccggagccggagaccgcagcctcgcgctggaaccgagtcagcctcaacgcgtccaaggtgggtcagggtttatccaaggatgctaaggctcgcaagttggctttccagcactggatcgaggctattgatccaagacatcgctatggacacaacctgcatttctactatgacgtttggtgccagacccaagctggccagccattcttctactggcttgatattggtgaaggaaaggatgttgatcttccagtctgtccaagggctctgctaaagaagcaatgcattcgatatcttggtccacaagagcgtgagtactatgaatacatcatttcggagggaaatattatccataagatatctggagaaccacttgatacaaaccagggccctaaagggacgaaatggatttttgttatgagcacatcaaagaaactttatgccggggagaaagtgaaaggtgtattccagcactctagctttttagcaggaggtgctaccatagctgctggaaggtttaccgcagaaaatggagctatcaagtccatctgggcatatagtggccactacagaccgagtgcggagaacctcagcaacttcat

SEQ ID NO: 1193 - DNA, 367 bp, Avena sativa
tctaaatcccagcacaatacaagctgtcacaaatacacgaatacgtacatacacaaatcccaacagagggagggcttcagttttttcaaatcccagcacagtacatgaacaatatacacgaataatagcatcaaactctcggatttcagtacagcatacgcgaataatctttgaacatgcacaattcagactcttaaactttagtttttttcaaattcgacaacaaagtatgttacttaaattacatataatagccgttcaatagtcttggaacttggatggatttctgaagattttgaactcggatggacttctgaagacttgaacttggcatcctggtcgagcggatcttgcagatcttgcgccg

SEQ ID NO: 1194 - DNA, 758 bp, Avena sativa
gcaaaccctaggttgtattgggaagaaggatggagcatgaggggtcagcgaatttccagtgtcccttcgagtgtgccgagtcaccatgtgcagtttgaatataagaggagtgagaatggaagcggaggggtcaagaataatgagcaacaaatccatgctacactgctgaatttataaagtaaggcataattccgcaagatgtggcaagtcgtcgacgagaggcagtggcagccgccttgtcccaactccatggcgagtgttagcggccgacgatgcgaccctgggcccgagctcctcatcccctttcttcgcatgatgggaggcaccggtagcagcaacaccttctccctcgcgccccaaacctgcaatgagtctcctagatttacaagctgcaaggtggaggagtctacccctatgggatttcatgaggttgatgctccgatgaaaggcaaagctaggagatatgggtctaaattcccagttggaaaagtgacatgtctagatgctgaagatctccaattactacactcgtctctggtgtcatgttcccccattatagaggtgtatggctattgtaatttgactgtaacaatttgagtgaaattaaatctctgcataaactactgtaatttgagtgagctatgtattgttttgtattactgtgatttgaattgatgtgatttgagtgcaatacctactataatgtgactgctatgagccatttttgaaaatttgactgactgtaatttgacttcaaa

SEQ ID NO: 1195 - DNA, 584 bp, Avena sativa
cagcagggacccgccgcagacataggagaggctaaggattcactcaaggagagctttgtgctgcagcaagcagaaccggtggccattcaaaaggagagtggcgagccaaagcgtaaggtcgtgaagcggggcagtaagctagagaaggacagggagctgttggaactcgcccagaggtaccatagagtggtgacagagagggatgcagccgttgcagttaaggaaaaattagaatctctttgtagagaatttcagcgtcaaaaacaaaatgttaaaggaagagtgccaaagggtgtcaacagaggggcagaactttcggatggacatgtccgacaaattcgagaatgctatgaaggctgtcagtgtcaagcttgaggagcagaaaaatgaatgcattgctcagttcgaagagaacaattcgctgagaaataaactcaaagacctcgctgatcaatataatatcattcagcagaaatatgctcatcagttgaaagaaaagacgctggaacttgagcttgctgatctgaaactaaacacatcaagcgaaggcagctcaagacacacccaaatggtgttgtatgccg

SEQ ID NO: 1196 - DNA, 928 bp, Avena sativa
gcatggggagagtttgaaggtgctggtgtcatctcggtatgtgagggatcttgccacactggttgttgcttatggtataagcattaacctcgttgaggtcacatggaaatccaaattgaaggcacagttcccaagcccgaatgagtattcttcgttcatgggcgatttctcaacggctactggcatagctacattcacaatgatgttgttaggcagagtaattttcagaaaattcgggtggggtgttgcagctacaatcacccctgcagtgttgcttgccactggagttggattcttctcactgcttttgtttggtgagccattgactccccttctagccaagtttggaatgacgcctttgcttgccgcggtcttcgttggggcactgcagaacattttcagcaagagtgcaaagtacagtttgttcgatccttgcaaagaaatggcatacattcctttggatgaggacatgaaggtcaaaggtaaggcagcaattgatgtggtatgcaacccactagggaaatctggaggtgccttgatccagcagttcatgatcttgtcatttggatctcttgcgaattcaacgccataccttggaggaatactgcttgtgattgttctggcgtggttgggcgctgtgaggtcccttgactcgcaattctcttccctggcaaaggaagatctggagagagaacagactctgaaagcagagacaattgaaacaacagctcaagttgttggaacaggaaatggttcgctccaagaaaatggtgctgttcccacaaacggtgcggtcaccaaaccatcgcaagaaccggagagtgctgcctctgaaaaatctggccagcagtctcaataagtttccctccaaagtaaaattttgttagtacaggtctttaaaggaaccaaatgttgcttgcttaggcct

SEQ ID NO: 1197 - DNA, 1075 bp, Avena sativa
ctgcgacgagagcgaattgattgatcgcatcttgggaccaaaactttcgatcatcagaatataatttacacatttaccaaagaatcaacaaggacgtggtccgctggcacagcaatcttggacattagtcatcagctgcctcttttggccccagggaaggaaatgaaggaaatgacgcagcacctgtgcaccatccctctgatcacatgtgaaagggcatggcctccagggagaaggatgtggcaaaccaagaacaacaaatttcctctagggaattttctacgcgtaatacatatacaggctatttgcagcagcacatgcaatggaattctcggtggggtgccatgcgagatggagcaacttcgtcgagaagtctaatgaatttccattggcatcaacgcctaggttttctccacctcttcgcacaccacgggccatagaggtcatcgtcccccgtgtgggtctgttcggatttgccatttgacgtctcatcgggttcctgctggcttccaaagtggtcacctccgtactaccaggagtagaaccaaaaacacggaacaggttaccataagagccagttgcaacatgaagtccatccccactaagacaacactcgaacttgtcaaatattgagtcgttctcatacagatcacaaagcctaggtcttagatgttcatggacctggaaggttgaaacaggacctgaatccatgtttagatcccatagtttgagagtcatataatcacggctaagaagatatcttccgtcccttgaaaactttacatctgaaattgatgcaattatctccgtaaagaacgatcttgctccaggtgcttcatgctcctcaaatatcttggaatggttgtcacacaatgcagattgccgcagatcgattagtcggatagaaccctttgagctactatatgccagtgtattacaatgagtggggtggaactccgcacaagtaatcacctcagtcagatcttccatgtttgtaggcttcacatcaacaatgttaaaactctaggctgtttatttccagattccatagatttattcgcaggtcatctgctga

SEQ ID NO: 1198 - DNA, 543 bp, Avena sativa
ttttttttgtttaatgttaactaccaacttatttttctttttccattcatagtactactaggcaatagccacaagacttatatctcgagctacaatgtcttaagacgacccaacattttaccacctaataacacgaaagagaaggaaaacatagcatgccacggctataacttatcacaaggtagagacctactagtatcaaaattactcgactctctcacaaacgctaattgtgcctgggagattcaggggaaaacagaggccacttctctcgggcacgagccgattcaatcgcccggggaaaaacccaagagaatgcggtctcctccctcccagcgcacaggggattacactcactcacttctgcatcatcacaccagcattatcatcaataagcttaaaacctctcttaattcacacgcagaaatacaccgtctgcaggaagtcgtccatgccacggccgaagtcgcagccgggcatctccaggaagtcgtcccctatgtcgtccaggtcgatgtcgagctccagctcctcgtccgcgaa

SEQ ID NO: 1199 - DNA, 759 bp, Avena sativa
cctccactccatccttaaggtagctttgagtatgccaaggacagacctatcattttctctagcttccagcctgatgctgcacagctcatgagaaaattagcaaagcacataccccgttacttttgaccaacggagggacagaaatctacgccgacgtgaggaggaactcattggaagaggcactcaagctgtgtcttgccagcggcatgcaaggtatcgtgtccgaggcccgtgcaatattcaggtttcctgccgctataccaaagatcaaagaggctgatctctccctactgacttacggaacattaaataacgtgccggaggcggtgtacatgcagcacctgatgggagtgaacggggtcatagtggacctcgtgcctgagatcaccaaggccataaccgatctcatcgccatgccacacactgacatggaaaccgtggatttaagcagcaaggtggtgaaagatgtgacgttgacaccaaatttcacgaggcgggagatctcgttcctgctaaggctcatgcctgagctcgtgcaatagcgcgctcctggatgtaaccgagtggcatacaggaacagggagaaccctttgagggagggtagtaaaattatactaggttgatgagatgtcttacaatgagccctcatcctgttttctttgtcctgggagaattggaggttggtatgtacatgttgtagcgagggactgggggtttccaattgaaccatcacaagaggaaaaggtaccgaattgtata

SEQ ID NO: 1200 - DNA, 767 bp, Avena sativa
cgcagtgcaggaagaataaacataataactggacctaactactcagggaaaagcatttatattaagcaggttgcattggtggttttcttgctcatattggaagctttgttcctgctgattctgctgttgttgggttgacagataggatattctgtgctatgggaagcaagtcaatgacaactgagcagtcaacgtttatgattgatttacatcaagttggaacaatgctgagacatgcaacatcgagatcactgtgcttactggatgagtttggtaagggcactctaacagaagatggtattggtctacttggagggactatcagtcattttgcaaattatgattatcctccaaaggtccttttgtcaacacatctgacggagatcttcaccgaaaactacttaccacagtctgaacatataaaatgctataccatgagtgtactgaatcctgacggacagacaagcaacgaagatatcatatttctttaccgacttgttcctggacaggcgctcttgagctttggacttcattgtgcacagcttgctggtgtccctgatgaagttattcagagagctgctagtgttctggaggacatccattccaagagacctataaggcgcatggtctgtgataaattggtggcaaaggaccagcaataccaggacgcgatggcaaattgctggccttcgatcctcgcagtgatgatctgaacaacttcttcgaggaatattccccctgagccgtagatcaggatgctttggagt

SEQ ID NO: 1201 - DNA, 682 bp, Avena sativa
gtgatgtctgtgaaaagcgcgtcgatttgtttcatcaacttaagttgtatccggaagaggaagctggacctcaatcaaccaaaaaacctgtggtcatggagacatacgatgaagttgtcttcactgagcccagtgaggcttttttcctgcgagtgcaaaatcatcctgctgctattgtgccaaggttaccacctggtacactgtcttctctaggccctatggaacttatgccacacgataagaagcgttatgaaaccaaggatcatccgttgagccagtggttctcaaacttctctgaagcagatgaactattaaaactggctgctgctcgtcaacaggtgcaggctcacatagccaagttgagaaggcagttaaccatgatagagggaatgccccagcaatccagaggtctttctgttcccggccaacagtatgggcacggctaatctaacgctagctgttgtaatgaagatgttggaagctgataacaactctctaacggaacatgatggctgtatcactgtacctgtattgaatgtgttgccttaggcttttgcaattaatgtttacctgccagtgtccacaatctacggatcgtactgcctccgtgcatctttagggaacagtacttgcttctctgttgtgtcccttgcacacaccaaaaaggttaatctgtactgtt

SEQ ID NO: 1202 - DNA, 715 bp, Avena sativa
gcttcgtcgacgccgccgacaagttccgcgtcgagtccggcacccaaccggacattgacctggcgaccatcacagatcggatggaggtgaaaaaagcggtccagtcagggaatgttcaggaagctatcgagaagatcaatgatcttaacccaacgattctggatacaaatccccaattatacttccatctacagcaacaaaagctgatagagttgattcgtgcggggaaaataaatgaagctttggagtttgctcaagaagaacttgctccaagaggtgaagaaaaccaagccttcctcgaggaaatagagaaaactgtagcccttttggtgtttgaagatgtaaaaaactgtccgtatggcgaactgttggacgtttctcagcgcttaaagacagcaagtgaagttaatgctgccattcttacaagccaaagtcacgagaaagatccaaagctccccagcctgttgaagatgttgatttggactcaaaaccagctgaacgagaaggcagcatatccccgaatcaataacttctccaccgccgcgctggaagatccggctatatgagctgctgccgaggtgttgactacggagcttaggcaacagcagccttgtctgcctctgtacacactctctgtcttaggtctattacttgttcgttacctgcagtctgcaacacctgaacacgcttgtttcatcagtgttcgagctcaata

SEQ ID NO: 1203 - DNA, 894 bp, Avena sativa
aactagctcaatcactaaaagggacatttgacaaccagaatgtatcatttgttgatgctgctaactctgctggctacaagatacatccagaggatctacataatgtgtttttgaaccaagatacatatttttcatttatagaattgcacatcgaacagggtcccatcttggaaaaagaaggtgttccaattggcattgtaactgctattgctgctcctgcaagtattaaggtggaatttgaagggaatgggggtcatgctggagcagtcctcatgcccgcgagaaatgatgctggattggcggcagctgagctcgcattagcagttgagaaacatgttttggaatcaggatcaattgatacagtcggcaccgttggtattctgcagctacatccaggcgctatcaatagcatcccaagtaaatcacacctggaaattgatctaagagatattgatgagaaaagaaggaatgatgttattcagaaggttcaccaatctgcgattaatatatcaaagatccgcgcagtcgagctatcagaattcaagatcatcaaccaggatccacctgccctgtctgacaaatcagtcgttaacgcaatggaattttctgcaaaacagctgggcctgcaatacaaattgatgatcagcagagcttatcacgattcactcttcatggctagagtatcaccaatgggtatgatcttcattccctgttacaaaggatacagccacaagcccgaggagtatgcgtccccagaggacatggcaaatggagttcagatgctagccttgacgatggccaaactatccttggagtgagcacggcatggggaggaatcaagagggtagtgcccaataatacgcaagctcgccatccccgcattacgaaaccatg

SEQ ID NO: 1204 - DNA, 750 bp, Avena sativa
  modified_base (108)..(108): a, c, t, g, unknown or other
tccaactcccaccccatggccaattttgagatcacccagtaccaaggtgcactcgttgagaacactaggctttatgtcgacaagttgtacttgcgccagatctggtcngggacaaccaaaccaaacaccagtaatagaaggggatgatactcgtaaagagtatgggaggaccctcgtcaacaactgggcaatatacgatagcttggctgaggacgcagagctcgttgccaatgcaagaggtattcatgtgaatgccgttgactggtacaactcattcaacatggtgtttatgaacgaaaggttcaagaattccacccttgaggtaatgggagcaactatcggagggaaaggtgaatgggctattgttggggggcaccggtgagttcaggatggcacgtggtgttattgacagaaccttctttgatagaacatctgacggagaaattatggaacttactatcgaggcattctaccgcgcaaaaaatatccctgctcctacaaagacagacgacaaaaacaacaacgtctaagttaacccagtattgttgctgctgctgatggagcatttctaaataagatggtcaatcacctgatcccgacaccagttattttagtttccttgcatgttccagcataaataaggtggttaagatcctctgtgcatgtgacagtgtgattgttgatctttgtatctcgactctcgagtcctttgttgttgttgttgttgttgttgttgttgttgttgttgtt

SEQ ID NO: 1205 - DNA, 585 bp, Avena sativa
cagcacaagccaataaaggaatccttgtcatctgcgatccctgttcaggtaaaggaagtgcaacaccaactgtttaaggcatcgccgacgtctgtgatccccattcagatgaaggatgtgcggcctcaaccaccaaaggaaccagtatcacttggtaaggtcgcaccactggcagctccgttgccagcaacctggcctccggttaagatggaggctccagctcaagccaaggactcttcacaggtagtcaccagtgaagtcccgtgccatgctgctggttctaccgtggctgctgaatgcgccatctcagcagagtcgacggctgctgatgctgacaagggtgagggcgtgcatgacgacgcagtgtccgcggaagcagctgaggacatcatcaagcatctagagataaaatgagttggagtaaattgcagagcttctcccagattttgtaattagctgcgtcgtgtgcacatcccttttctgttttagttttgcatgcgcgtgggttcagattagaggctcctgggcttggcaagctgcattctggtagggacwcctaggtttttgttgtagaacaatgatgat

SEQ ID NO: 1206 - DNA, 682 bp, Avena sativa
gacctgtggtattgtaggatattatttcgaacataaagaactaattaatctcacaaaataacaccattttctaatccccactgcaggatgtgagtaccttgaaagctagaaacagtaacccagtaaatagagctaccatgttgttctcgagggatccttcatagagagattgtgcattgaagttttcagctgtgtttgcccccgcaaagtgactatagcaagtctatcacttccgtttttcataaagatttgtctccttgggtgttggttgtttctcgaggggataacatcagttttcttagttgcttatccaatgtcatctgctgatcaagaaatagtagccccgggcatctagtgcactcggctcttgttttcccaaacacgtgtagcacacacagatccgcgagcagacacatcttttaccgagccggtctgcattatcgatccgatgaattttctgctggtcgaggaacagtaggcccatcagctgttgcgctctgtttgtgtttttcccacacatgtgtgagccggacaatcctggatacaaatctgtggctagacaaatccttcaccgagccagtttgcattgtggatcccggtgaagtttctccataatattatctatcggcaatattccaacagggtgagaaagaacacaaagaccggacgtgagagatgagcc

SEQ ID NO: 1207 - DNA, 665 bp, Avena sativa
tgagaagctaatagagggatattgccaagcatatgtcaatattatggacatgagattcatccagtcattggtgcaaataaaaagctatagatttagtctaaacctctgcatatccaccaataacacaaatggtgaacacagctgcaacaaggtgaagatgcgctcagagagtagtgggaaaatattggggccacctgtaccgaagtcatttatttctgagcatgcttgcaacacctacacgggtgtttctattggcgacataactgtcgatcatgattacaatagtgaagtgcagtttaagcccttgggataccatgtggagattggtgagggaattagcaacactagcgtggaaagcagagaaggaataaaggctatcatcggtatgatgaacagggccgagtcattgtatgtgcatgacaattcatccatcgccactattatcactgaagacatggtgtccacaggttacgacgaatcggaacttacatggcaacacctgaaacagtgtcatgttgcgagatgccccaagatggaacagtggtattactatttccctatagtctcaacgctcatcaagtctacggcctatgatgctagacaattgtcaatttcaatggccatgcggaggccctccaacagctatcgttgtgggccgtcctgcc

SEQ ID NO: 1208 - DNA, 857 bp, Avena sativa
gatttcagatgcaacgatcagctctactgcaatccgggcatgcagatgaggaccatgggcgatgatgccgccatgcgtggtcaggtgtttcgacagggcgccggtgagttccctaatgttcagtgcatagggactgcaaaatctggatctacgatgcccccaacctgtgggggttcaatgccttcgggctgtttgccgaattctgaacagagatgaaggacctgcgaggtgcgtatcttctccttgctagagactaccggtctccacatgcaaggaagactgtacaaattgctagcttctatctgtagggtcgtgttctgtttcgagatggtctcgctgatgatgtctccacggtgcctggggcgctgcacttgcaagttcgttggcttacagggaaatcctcctttgtttttcctgttcagttttgttcctggagttcgacagcctttctcctatgtactgggggtactctccgacaaatagtataggtgggcagaggattcgacggaaccctgaataagtagatgcgcgccatctgtgttctgtgccaggatcatgttcagttttgtgtaggcctcaagctggatatgaaccttgtgttagctctgccccgtatgaactgttccgagtttcgagtagctggtaatggtatggctgcgtttctttcgtgtccgtggttcaagaacatgagttcagtcagtttgtggatgcttcattatttgattcttgagcaaataatatgtactataaatgaacacgttggttggctcttttgaactttcagatgtatttggtaccaggtagggcccaaactcgcccaccacaagtgcctcactttgttaattacagtacaatga

SEQ ID NO: 1209 - DNA, 892 bp, Avena sativa
ggtagagatgacttacattatcttcacaaagatttgtcatctagatctcaaacctgtaaatatactatttgatgagaacatggcgcgccaaaaatattggactattgtttttcaagaatcttcagagaagaaatgagacaacctgtccttgaaaaaatcgatgggccaagggcatacatggtagcgcgagaatacttagctggtggagaaattacacttagtcagacatatacagtttgcgggttctaattatgcagacagtaactggacaaaatagaagaaactactcaaacataccaagtatacttgaaagttggaagtaggttggagttggacgcatcgaagaaggggcgtgtattcaaaaaatgtaaccagcacgtgaaagtatggattgagatagggagactttgcatggaccttgacacggggaacagcgatgaaaggggctcaggataggaaggagaagaagaagcaggtgcagccgcctttccgtggatggctgggctgatcaacatgtctgcgggaagacgatccaaatgggctgaacaaacatcatggagatgagttttctgacgagacgagaatgccccctgttggcaaaaagtttgttgcagcaaaccgtctccttcagagttcagacaagaagcttgtccagccaaaggagttcccttgatcccaataatacatagttccaacttgttgtcagacaatcattatgagaactcacccagcggctcgggaccgcaggcataaatattcacaatttctctcgttgaaataatgttaacaatattttctaatctcgtttttggtattggcaaatttaactacaaagtgacactcaatagcaaaattattattagagcaaattcagtatgttagaagttcagat

SEQ ID NO: 1210 - DNA, 894 bp, Avena sativa
cagccgcagaatcgccggagaaggagtgcctccttcaaccagggggaggagaaggatgggagtccggacacggcaatctgatcgcgaggatagtgtgcgacggactgtttatgtctctgatattgatcagcaagtgactgaacagaagctggctgaggtgttttctaactgtggacaagtggtagattgccgtatctgcggtgacccccattcggtcctgcgttttgctttcattgagtttgctgatgatgctggtgcaagggcagcactaacacttgggggaaccatgcttggttactatcctgttagagttttaccttctaaaacagcgattctaccagtgaaccctaaattccttcctcgaacggaagatgagaaagaaatggtctcaaggactgtatattgtactaacatagataagaaggttacggaagatgatgtaaaggttttctttcaacggttatgtggaaaggtttctcggctgagactccttggtgattatgtacactccacatgcattgcttttgttgagtttactcaggcagaaagtgcaattcttgccctgaacttcagtggtatggtccttggctcccttccagtcagggtgagcccctcaaagacaccagtgcgtccgcggtcgccccgtgtgatgtcgaactgagctccgtctcgttcgttccttctgagtctgtcatcaatgtcgggcatcccaggtggagcttctggtgggccacggcctcatcagaactctcgcctcgcggatcagtaaactgtcattccgagagtactccagtacctagtctagttgctaaaatgctaatgttcgtctgttcgttcgtcaaatacccatcatgtgttgggagaggggcgacggtttccatttctttcattcga

SEQ ID NO: 1211 - DNA, 748 bp, Avena sativa
ctgggggctatttggtccaaaaaagaaaccatcacaggaacgtcgagcaaaatcagcaaacgggaaactgtcgggcgattgtgtggctgctgtcattggaactcaggaatcatgtcaacctgaagataatcatcagttgggttcaacatccccttctaatcttgaggatgagtccagtcttttggaagaatgccttttggcgtcaattaaggttctaatgaacttagcaaatgacaacccaactggctgtgaacatattgcatcatgtggtggacttaataccatggcttccttgatcatcaagcatttccctacatttgatttctccatggacaagaaccatgtcatgaaagaaagagggtcctctgaccgagatgtcgatcttggacaagaaccgacctattctgaggacagcaaagcacaccaagttaaagctatgcaactgcgagatcatgagcttgattttctggttgccatattgggcttgcttgtaaatcttgtggagaaagatagtcttaatagggtacggcttgcatctgcccgtgtttctgttgatctgcctacacagagtgaaaaggcacagagggatgttataccactcctctgttcaattttcttaggtagtcaaggttctgcggaagcttctgcacctatatcaccggacgatgaagagtctttgatgcaaggagcacgagaagctgaaatgatgatcgtggaggcctatgccgccctcctgcttggctttctt

SEQ ID NO: 1212 - DNA, 814 bp, Avena sativa
gcttgcgtgcatttagctcattgaagatctggcaaaatacaaaggtattgaagataaatgtgttcttcattttctcagccctatctcgactttcattctccagccgcagaacttttgttccagagaaattaaagattagaaggattgctatttggtaaatggcctggacaaacaaatttctccacataatattggtcacaaggggttcccttcgaccaacaggatgtctcttcataaggttgtctgttggtggttcagttgctaaagcaagagcccccagtgtatccatgataaggttcacccagagaagctcaacagcatttagaggcacgtcaccagaagacacagctgcaataacattaatcacaagtgcagcaacattaacagtaagctggaactggatgaatttctgaatattcgcatagacagagcgtccccagcgaacaaccttgacaacagatgtgaagtcatcatccaagattataatatcagagctttctttagcaacttcagtccctgatatgcccattgaaagacctatatcagcctcatgcaatgcaggagcatcatttgtgccatcaccagttacagctacaacatggcctttccttttcaaagcttggacgagcaaaagtttgtcattcggagatgatcttcccatgacagttatcttgtcagcaatctctcctcttgaagattcagacatctcgcggaagacttttccctctattacaaacggctccgaagtaacaccatttgcatctaatattccgcactccaaagctattgccttagctgtgtcaatgttatctcc

SEQ ID NO: 1213 - DNA, 935 bp, Avena sativa
acacatctcttgtccaaaaggaattttgtttaccagcgaacttcccaaccggtgagatcattctaaacccgatgcaccatttgtacagtgtatagctgccaagttcctaaactttgtcaagctagtaaaatattgtcctttgttcacaacggcttcaaaccccagtttacgagtcagcgagaacgaagcatctcactcatgttgtcttcaacctcaagagtatcgagtcaggctaaaagctagcgtggttagaagaaatcagtactcaaatttctgcaagcatcaatatgaacaagcactggaatttggtagctgataatttctgtcacttggagagatgttcagtctcacaccggtggagttggtccttcggcaccttgcttcttcctttttggccaacactttaggattaaattcttcaatggagtctggggaactggaatgaacttcccaacaaaagccaacggccagctgacaaaagcaatacccacagaaacaagccaaagctcccaactgagtctcacagttgatgtaaatttccccaggaactcaataattatcacctgcagcacaacagttatgctcacaacggccaaaaagagatggtttcttgaaactccttcaaatatgttcagctcttctggtttacgagaattgaactcattaaacacctggcacaggacaaatgtgttgaatataaatgaatttttcactttgcttgagtgttcaagggtatcttgagtcaaatgcagaagatttcggcctccaaagttaagcgtcagaagaacagcaacttgatagacagcctgaatgaacaagtttctccacatgatattagtcacaagaggttctctccgtccaacaggtgtccgcttcataagttggtccgttggtggttcagtagccaatgcaagtgcaccaagtgtgtccattat

SEQ ID NO: 1214 - DNA, 398 bp, Avena sativa
ggagatagtggaattttgtcggaaagaaggcttagttatacttgccgatgaggtatatcaagataacgtctatgtggaggataagaagttcaattctttcaagaaatttgccagatcacttggctacaatgaggatgacatctctatagtatcatatcattcggtttcaatggggtactatggagaatgtggcagaaggggaggctacatggagatatgtggttttggagaagatgtgatggatgagatttgcaaggtggcttctctgaccctttgccccaacataggtggccaaaattcttaccagcctagttatggatacacctaagataggggatgattgttttgagaatttttggctgagaaggaagcatccaggcatctctggtgaagcgtgc

SEQ ID NO: 1215 - DNA, 778 bp, Avena sativa
aactgactggagataatacatcactggcaatttatggcttctcttggattgtacttcttgttctggtcctcctatttaagcttttcactgccactccaaagaagtcgactgccctaccgacttttgttcggttcctacagggcctccttgcacttggcatcattgcagcaattgcttgcctgattggatttacagacttcacaattgctgatctatttgcaagtgcacttgcttttctagcaactggatggtgtattctatgcctgtccatcacatggaagcgtcttgtgaagacccttgggctctgggactctgtccgagagattgctaggatgtacgacgccgggatgggagccattatcttctcacccatcgtgttcttctcgtggttccccttcgtgtcgaccttccagtcgcggattctcttcaaccaggctttcagccgtggtttggagatctctctgatcctggcggggaacaaggcgaaccaggagtcgtgaaaaagtcctgtgtgctctgcgcctgtgtgtttggtgttgtatattgctgtagtcgactagggaacagtaggttcggacgacatatgtacataatgtctttagtatggggatgctaatcaattgtggagaatggtctgatgccagattagacgtgtgcatatttgcctcttgtagtttggactacctggatgtaatttggatcatctggtgatttgtgtagcatggtggtagcagtagtaatcacagttttgacttgagtaactggtggctaacaatga

SEQ ID NO: 1216 - DNA, 707 bp, Avena sativa
actgtaagcattcttggtatctcgtacagtacccaaaaaaaaaacaattcctgtgcctctgcagtttttgcaccctcaaatatttcttatcgcttgctctgtttactgtcctacaaaacaagaaagtggaaaccccaaagccacaaaggatgcaatatccccacaatgtatgtcctagcgctatcaagtttcgcataaaaatcgtgacattcccgtagctaatagcgtgaatcaatcacttctaccataatgatactgattgtccgctaaggtatgattgatttacattaacctgcacttgaccgtcgctgcatgtaaagcttgtagtgcaggcgtgttaaacttcacgtggtttttgcactgaatctcctgttgaaatgctacgctcccctctggagaggcagtataggtctcctcttctttggttgacccatatctatttacactaaataatttgcagcatttttatccctggccaccttcctcttcgtctcggcgtgatgatctccaacaaggaatgcgcttgaaataggactgcagaggtcttacaggaacaggaatgaattttcccagataagccaaaggccagcttacgaggccaatagcaactgaaactaaccatagtctccagttaagtctcacaattttgaagaacttccccaggaactcaactattagtatctgaaatacagtagttacacaaatta

SEQ ID NO: 1217 - DNA, 876 bp, Avena sativa
ccttccccttctcaggcggtcgcttgacgagaccgattctgtgtcgccggcggcgacgagaccggacagcctccactcctagcgctcggggcgtccatggatagcggcggccaggcgggctggtacgtgctcggcccgagccaggagcacgtcggcccctacgacgctcaccgagcttcgagaccattttgctaatgggtatctcaatgagagcacaatgctctgggcggagggaaggagtgaatggatgccactgtcttcggttccggaggtgcattctggggtcacaaagaatgttcaacccgaacaagaaattgaagatgatttagagaaattccagaaggaggttatggaatctgagtcagagggggaagcattgaaagacaaggctgcacatcatgacctacacaaagagcatggcgtcgatgatcccgatgagcgaccagcatctccaccagatggtgtggaagaatttactgatgacgatggcaccatctacaagtgggatcgcaccctgagggcaatggttcctcaaaatgatgtatcgggtaaaatggaaggctatgaagagaatggcatatcaggtaaaaaggatgactatggacttgacgacatgacttttgcagttgaggaagaagtatttcaaccaccagacattcctgtttcatccacattagatgaaaacaatgctttaactgaaaaacaaaacaaagaaccagaaaaggtaggaaagagacaacaaaagaagcgtaagtctactgagaagctagctgaaaagaaggaagctgacaagcctccagaaggttggtttgatctcaaagttaacacaaatgtctatgttactggtttgcctgatgacgtcacagccgaggagat

SEQ ID NO: 1218 - DNA, 241 bp, Avena sativa
ttttgtcacgaaatgtatgcatatttaccaaagtggaaaaaagaacaatgcaactgattcagtatactcagcagtggtagaaggaaaacaaatcaaagaatacatatacgcagccaaaatgtaccaaatttaccctgaggaatccacagtaaatacaacgaaatctcacatctgcagatggctcagtaaatagatcgggtcatgtggttttctaagcaaaagaatggactacctgcagcgc

SEQ ID NO: 1219 - DNA, 715 bp, Avena sativa
ttgagctagaaaatcatctagcagaggcccagaaacaagcatttcgccttgtgaaaagacacagagaacttgggcaatctttggcggactttgggaaggcgattaagcttttaggcgcctgcgaaggggattccttggaaaaggtgttttctgaagttggttcaaagtcagagatgttatcaataaagcttcaaagagaggcagacaaccttctctttaactttgaagaacctttgaaagattatgtgcgtgctgtgcagtcaataaaggcgactatgcttgatcgagccaatgctttcaggcagcactttgacttggaccaggagaggaagtataaagagcttaaccttgaaaaattgaagttcatgaaccctgagaagttctctgaatcggaacttgagttcagtgagttgaaaacagccagcgaggaggccacgaagaggtatgatcacatagttagcgtaatgaacgaggagcttgctcgattccaggagcagaagacagctgatattggacttgcattccacgaatttgccaaaggtcaagcaaagttagctaaagatatcgctgatgcatggcgcagcgtcctcccaaagctagaagcttgttcaacgtcataaaggaactgtcttagctcattgtgtttgagatagtggttggccccttgtgagttttaggctgatttttttttccagttcgaaattgacagcaattc

SEQ ID NO: 1220 - DNA, 348 bp, Avena sativa
agcgcaagcagcggttcatatatccgtcaggcgcgcaagcatgtttggaagttctagcatgcctgggagtgcggctgggattaatgctgttcgtgactgtaaaggggtagttcactcctacttatctatgaaactttcatcagaagtggcaaacactgctttcagagtattatctggttgcaaggtgaacaaagtctgtccactggagtttgatgacccttcatcggtcgttaaggcatgtgacaaggcatcttcttcaaggaccgcatgttgtgcagctttgcactcttacattgcaactagacagaagcaaatatttgtcacgaacttgcaagcaattaactgcgc

SEQ ID NO: 1221 - DNA, 825 bp, Avena sativa
tcgaggaccacttcgcggcgcagggcctcgcagtcgtcggctactaccacgccaacgcgcgccgcgacgacgccgagctccccgccgtcgccaagcgcgtcggggaccacatcttccgctacttcccacgcgccgccgtgcttcttctggataacgagaagctcgagaaggtggtgaagggcaatagccgcgatgccgttgttcagctatacaccagggattcatcaaaaagctggcgtcaggctggatcagacggaagtagtcagctcagtctaaaagagccatccaccaacgtggtcttagctgatcatgttaccacgaagaaatggcagcaagtcgttgattttgatgaccacctcgatgatattagcaaggattggttgaacccaagcctacttggttgaaacaattttgtgatttagttgttctatatttatttatttgaactggctagaaccaaggtggcgaggcttgtcctgccaaatcggtacactttacttaatagctagactggctatttgacatgggttgtaatttatatgataataagtagatccatgtgtttgtgtggaatcctgtagccaagaagttgatgaaaaatgaagaaaggctgtgattgcaaggtatttttgaaaaggagaggcagggagcaaaagcttgcggcaatgttgtcgccatcataggaagacagcagtgccaatcatgttattaatcggcctacattgttctacatatcgtgtaaggatctttaatctgtgaaagcgtatttgctgccttattgccttcatttgaccaaatgaatggttatcattttgatcaatggac

SEQ ID NO: 1222 - DNA, 779 bp, Avena sativa
agcaactctagctgagcacacccacccccctttcccctccctcaccggcggatcccctcccctcccctacccccggccggacctcctccccccgagctccgcgatggcaaacgcgtcgtcgggatgtaaagtgaatgacgagtgcgtcaccaagttcaacgagctccaggccaagaggctgcaccgtttcgtaacttacaagctggagaagtcgatggagattgtcgtggatcaaatcggggaccgcgcagcaacctatgaggatttcacaaaggtgctacctgagactgactgtcgatttgcagtctatgactttgactacatgaccccagaggaggttcccaagagcaagatatactacatcttctggtccccagacactgctaaggtgaggagcaagatgctctacgcaagctctaaccagaagttcaagacgggcttgaacggcatccagattgagatgcaggccactgatgctagcgaaatcagtcttgatgctatccaagagcgcatcaaagaccgtgcgcactaggcaccccacctgctgcctctcgacaccctcgccaatatggatttatgtcattatagatttggcggtgtgactctgaaactctcttgatcatttgtgggtttgttaccagttgtccgaaacatctccgtggcttccatcatcagaccactgaagatttggttctatcatgtaatcttatcctgccctgttatatgttgggccgtatgctgcactgttccaagttattacagttataaataattaatgt

SEQ ID NO: 1223 - DNA, 474 bp, Avena sativa
atgatgggtttcggcctgtgaccgagacctgcccgacggcacatcctcagacgctgggagaggctgtctcccatctcctcccgctcgcgcttcagcttcttccagagtgcatgaatcttcttctccttcgttttcgggggtgtcgatttggccactttcctctgttcgtgtctcatcggcgtggccagggcatttaccgtcatgttctcatgcttatcattagtgccgcctaggggtgatccatcactagccgcacctaaagatgagcatctgccccaactttctctgttagagcttgtgtatgagcaggattcctcattgtgcctactcgttttatcctgcaaatgctgtccagcactatccggatccacgcctgagaggttatgattctcatctaaaaggaaatccaagtcatcattcttaatagacatctgatttgcactctctgatagcaattcaacaactgaagttgta

SEQ ID NO: 1224 - DNA, 888 bp, Avena sativa
agtatcaacaacacaatccaacttggaagagcacatttctccagtgggcaaagaaaggctacatattacactaaagtgctgtgccttcagcatgtcatcaatcagaacacctttactttgcatgttggacagtctgcgtccctgggaacatcttgtctaacttcacactagagagaaccttgttagggtccagctccatgcgcgccttgttatacgcgtcaacagggaaacgcttccgcaacctaacctgcaattcagcaagttcatccttgtcctttggaacctcaattttggcccagtgctcataggcagaataatcatcccagagactagtttgtatcagacttctgtagttgaagaactcctcggtaatgtccttcctttggcgagggtccgatgttggtaaatacattattataccgacccatgaaaatatatcatcttcttcggagcttgatgctgggctcatgggactcctgctgcgggcagtccaacgctgctcaataggtgcaggcgcaggtacatcttccttctcaatcaactgtagcaactcctccatataatctaaatccttcatacttggtttcgctagagttccagtagggaagcaggtttcattaacccactgctgcccaccacattcaaaacctagtatttcatcactccagcccatgcgatatccctcagatttcttccagtactcagcttctgctttattaatcctgatcacatgatctttatcgagaggatcaagagcaagcaattgatctctcaattcaggaaatgatagttcatcgatcgctgagtctttactttctacttcatttctatatttcttcagtgactcccgataaaggtcgcgaacatgctgcagagcttcatcctttc

SEQ ID NO: 1225 - DNA, 403 bp, Avena sativa
gcatcgaggtgatgccgaggccgacgctgatgccggtgaggctgcccttgatcgcaccgttggatatggtctgggcgatgccgagggagaggccaatgccggagtaggtgaaggacatgacggcggcgacgattgagagccacctttttttttgaaacaaacaagacaccactatattgcattataaatcataactctcatacacgaagcattacatacaataaaatcaagtgtagggtatctattggatccccatacagggacaaaaactatcagtctaagcatgtgagaaaaacaaaaaatcggcacacaccggagtcgcaagaaaattatggcatgatggaaccatcgaccgaaagcaatcgtgatactgattgccaatggagtacagtagtgactctgg

SEQ ID NO: 1226 - DNA, 745 bp, Avena sativa
gtaccagtctattctctacaagaaccaaaatccctacccctgaaaatatgaaacccactcgagtctctggctgaaatctccttcccagtagccgcagaggcatgctccagaaatgagtggcagtcaccacacatgcggatgttcttcacgacacggacgatttgcccagagcctgccattagaaggccataagtagcagccagctttgcactatggtacatcaggaaatgcctcttttggtattcctcgacatcatgtaggacaaaggtggtgtctggttcatacccagccttcatgcactcaagggttagcacatccagaccagcatagatgtccttggactgaggatgtgatctatctctagcgaaaaatgagtgaacagtgttgtcatgaaatgtccagctccttgctggaatcttatggatacccttttcacgcatctccagccttgtgttctctgaacaatgccactttgctgattcagagtacaaattagatgctagaacatatgtggatgggtcgtgtggttccaatgcaagtagatgattcattgctcgcctccgcagtgtcatgttggaccgcttgctacagctttccagcaaagatcgccaaactaatgcaccaggcttgaatggcatactatagtaataaaactagttactagacctacaatacaaaacggccccaaacagccaaggacatatacaagtgctgcaaagtgctccatggcaggttcaatgttgta

SEQ ID NO: 1227 - DNA, 827 bp, Avena sativa
ggtagccgaatgggaaccgttctcccccggggttgaacaaggggaggacatagatttccagttctcgatggatgtcttaggagggtacactgatacgattcgatcgccaagattccattgctcaggcttgaaaggtagcttcagaaatcccctgacgaaacttgtggagagcatgaatgaggacaatgatgatgaagaagatcgaaaggagttctccatgcattcatctcatcggatcccatcttctgagttcaatactcccagtgtgcacagaactactagtttgaatggcagtgtgcctgtcctgaacaggagcgcagatgaacaacttccatctagtatgtgctttgtcaggttgtcggacatgagcgcagaggagtggcatgtcttcatcgagaagttccaggagctgctgaaagaagcgctggatgaatgcaaggcggctggagcacagcgtatgaagcaacggctgggcacttcctgcaagttttgactaggaccatagagcagcagaggagaaatactgttctgctacctgggttgcttttggagcgagtgcagcaaagatatgatcatatctaagtagtaattttcatcaggtcgacgagaactgctacgcatgttatttagttatgttaagacaagtactgcataataaatgcttaccagcctgtgtatattgctttagatgctgaacactaagagtgctattcgttggctgctgctgaacattctttgtgttgtgctgtgagcagtgtaaatatgcacctctgatgtaaatgcttaccttgtgttgaacatcttgaatgaacacttttcatgcgaaa

SEQ ID NO: 1228 - DNA, 951 bp, Avena sativa
gagatgtttcttcatcatatatttcaaaatgaactttgcttgacttatacaatcttaactatgatttttcggtgtctcctgtcttgtaatcatgttttcactgaaaaatgtcttatatattcgtatttatatttaatatgaaaatcccatatagaaactcctatcactgatattggtatttctccgctgttcatgcaatatgtgtttggggacatgttctcttatttatggaagttgataagtcaattatttgtaacctcaatattactttcttattttcgccaatacctgtgctgtttgaaggatgggcttgaggaggagacttttgagcatcacaagagtgggctaatagctgataaacttgagaaggatccgtcccttagctatcaaactggtgattactggtcccagattgtcgacaaaaggtatatgtttgatatgtccaaactggaagctgaagagctaaggacagttcggaaggaggatgtcatcagttggtacaatacctacataaggtcatcatctccaaagcgtagacggttggcaatccatgtgtatggttgcaactcggatattgcggaggctgccaagctgcaagaacagtcatggactgcagttgatgatgttgaatctttgaaggcttcgtctcaattttatccaagcctctgttagagggaaggggaatcctctttgttacaatgctgcagagatcatatctgaagctcagatggcgagctatcattcgtgtggttgcagctggcatttctgaggatgcgaccaagttccgagagcatccgtgtaccgtagttgacacacatacaatcctctatagaaaatccaccacatcgtcaaacattgcattaattgatctgcagcttgtaaaattgctgggtatcagttggaggtcaaacgaatacaaagcttattcttcagttggtaaggtgtagtata

SEQ ID NO: 1229 - DNA, 356 bp, Avena sativa
cgactaagcatatagcaaagataatacaatatcaaatactaaacttttataacacatgatcctatattaaagatgaaatttagagtcagttgaaaaagatctaaccaaacttaaaacggaatgggcttattttattttagttaggatatggtgctccagttcttatttttctgtctttgtttgcttaccaccttaaaagatgtgcaggtagagttgctgacggtcaggtaggaaaggccgttgatgttgctcttaatattgagaagcgcctcttctcaggatctcgcgaggagtggtctctgccctactcaggctgcagtattcgctcattgaatgatcaggtgaaatcttgatgt

SEQ ID NO: 1230 - DNA, 489 bp, Avena sativa
ttttttccttagccaaattaagaggcattttattgctcggcagtccatacagcgcaaaacagtacttcttcaattgaacagtttaagctacagtaccactattcgtccgcttagaagcataaaaaatactcttagttgtatgcttacaagttacttaaccagcagctagcttattcattacatgtcagatactacctccttggagtcgaagagcatccatatctcgttgaccctgccgctgaactcgaagggcgagttgtactgcgccacggtgtaggacacggggccggcgccggcactggcgccgtcagacaccgaagcggcccacttggtcccctgcaggctggcgtcgagcagcgccgcctgctccccgacgtcggagtcggccacgaagccccgaaccggcgcacggccgcgtacctgaccccggcccacctctgcacgctcaggccctcggccggcggcgggtccgcctggttcttggccggc

SEQ ID NO: 1231 - DNA, 772 bp, Avena sativa
tgcatgtgttgcttttggtgcacaactgtgggataattcttttttagaaagccgtgtctacggttatggaatacttggagcacagtttctcgatcatcgacaacttacactaaattagtactataaattgactttgacatgactagtaattagggaaactactataatgaattaataaaaatgccaagtgtgtgagtgcctcatgtattgcttcctagtggttatgcagcaggggtagttctcatggttgggttatgtttggtgctagtatcaagttggttctgaatagatttatcttatccctctctaatagaccaaagttgtatcgtgtctctattgggtttagtgctgccgctaagtctaccatattcatgtaaacgagagcagccgaattctaagtcgcactaagtacttgcctcattacttaccctcatctgctattcctcttttgtgttggctaccgttgtcctgattttgataggtatgagatgatgacgagggttatggacgccattggttattcttcaggactctttagtcccatttcaacctggtgagaagaccagatacacaatacacaacatataagggatatgcttcatgcaacaaactgcagacgagataaccaataatttccgtgatgatcaaagaattggtagtggtgggtatggagaagtttacaaggtacggcatgggtttttagatggtagtaccactagctatgaatttgtgctccattctaacaaggggtttaactaacagggagtgtata

SEQ ID NO: 1232 - DNA, 645 bp, Avena sativa
aagaccaatggagacactatagagtatagacaactcatgaaagaggaaataaggcctgcacttaaggatgtggtttgggcgtggcaaggtgattcacattcactccctgtccctcagaaattatccaaggatcacaggcacctgcagtcacctttgccaccacagcagctgcagtcacctttgccatcacagcagccacaggagtaattggccccattacaagtctgctaccacgaaagccacagggcgagatacagccaccaccgccgtggtattaacagtacgttgttgccacctataaaccatgtggagaattgaagcagccaggatcgcagcagctgcatgatgttttgggcagagtcaataacttgttgagagacatatcattggatcatcaggcgtgtaccctgttctagtagatcgattgcctaccatttggcattttccctcctgtgtcccctttatgtttctgcattttcttctgatattgtatattccttgttacttaaagaacgtccaattttgggagcctttgggctacagaagtttttccagtgtgactgaagttgttggttagccataagggtatgatgtcatgcaaccattaccatactggcacttatgaactaggcaatggatgtaaat

SEQ ID NO: 1233 - DNA, 551 bp, Avena sativa
ttagcaaacttggtgcggaatatccacatttaccatatatccaaaagagttccctgtgatgaacaattctgagctcactacaccatgttcaagagtccagcgacacataagtccattagagaaggcagcctcgtccaagtgatgcacacaccatcttataaaactactacagaatctgggcagttcatcgcaggggctgctggttgtagtggctcttctctttcttctttgctgccgcgagctttgccctcctggctgcagcctcagatgctgcgatctttgctgctgcgtccaactctttgctcgacttctttttctcatggatgctaccttctttatgcgctccttctacatccaccgcaacggcgtcttcaccaggttctgcaccagcaggatcgtcggccacgtcgttcagatccggtgcctctttttgcctcctttgaagacttgtctttcttagctttcttcttcttggaggtcttgctctctaccggagcaggagcatcttccttttctctccatcagcagcttgacctgtgctttcttgtcgt

SEQ ID NO: 1234 - DNA, 818 bp, Avena sativa
cagacatggcactaaaagttacacggtgcagacatgagattctacattttagattagcttgcggaaaggtcaggactggccaaagaaaaattctttaataggaaaaggaaaggatggaactgacatcgttttcttcagtaagttagttgtgttgctaggtttggtatgctacgttgggcttactttttccatgtttgtgccttctattgcagggtgtcgctgtgatcactgctacaggttgccgggtctcttttgttgcaagttactgcttgttattgttgctccaggctgctgctggttcagagactgtagcaaaatgtgtgtacatctccatgaaattgttctccagcaggccttgaaggatttatctttggagatgcaagaaatcagaacttgctctattggcaaagatcagataattgcctccgtatgtatcaacgcttcaccatttgatgacatcaatctaagcgacgttgccaaatatgaagctaagcttgcagactgccagcgaaagctactagctgcagcagactgggcaaacatgtttcaagaagaggaatgtctgaaggctaagctagatagtgcctgcaaagaagatgaaaaacttgttgtcgcagccaaatgtcaagaaggaagagttagttccccaggattccaacatcaaaaaaagaagtatcctatgcacaatcatccactccaccgccttctgattgttgtatcggcgctaggccatcggcaatgaaaaggaaagtacctaagatgcaactcactatgtgaagtatgcaagcatggtttggtttcgtttgcgtttgttctta

SEQ ID NO: 1235 - DNA, 931 bp, Avena sativa
ttcaattcctaggtttatttctagcacctcatgccaagtagaagagttcgttgcgtaattctgcttgtggtgagcagttgatgatgttgacttagatttctttgcgctaagaggtgtttggaacacgccagctttttatgttagcacattactggaaaaaacatagttgccttttatggatggataggtatatatgatgaaaagtcgattgtctcttaatggcgacctgctgttttaacatcttctacgcagggggtctaacaaattgacatgttcattggtgcaggtatttggtttggtgccctccaactctgtctcgtgacatagcctgttgaaagcttcacaaaccaggagcttagcatggacgaatcaatgacggattctatggtagcgagcttctgggggcctgttacctcaacaatggagttgtgcgaggagaattatgcgcgctcgtcgtatattgcagaattctacaatactctctctaatgctccatgcattcttttggcgcttattgggctcgtgaattgcctccgccaacgtttcgagaaacgattcagtgttctgcacatatccaatatgatactttctattgggagtatcatcttccatgcaaccttgcaacttgtcctacagcagagtgatgagactccaatggtgtgggagatcctcctatatctgtatgtccttttattcaccagattggcattacaggagcacgatgcctactttccttgtcctatatggtgctgcatttgctgtagtccatttcttcgtgcgattccaagtagtattcaagctgcattacattggcctctgccttctgtgcatcccacggatgtacaagtactacatacagacgaaagacttggctgccaagcggctcgcgaagctgtgggttctgaccatattcctggcgactgtttgctgg

SEQ ID NO: 1236 - DNA, 756 bp, Avena sativa
gtatggccttgtttaccacttaaatatcacagatgacaaaagtatcttggtatacttattttcatggctcgtaattctgggggcgttgtttattatgaaggttatatctgtcggacgccggagatttggcgcgagttttcagctattcttccgactgataaagttcatgatatttgttgcattcgctgctgtgctggttgtgttgatactcattcttcacatgactatacgagatatatttgtctgcatcctggcgttcttgcccaccggatggggaatactgctgatcgcacaagcttgcaggcctgttcttcgggtagcagggctatggggatctgtgcgtgccctggcacgggcatacgaggtaatcatgggggtgctgctctttacacccatcacggttctgtcatggtttcccttcgtctccgagttccagacgcggatgctgttcaatcaagcgttcagcagaggacttcagatctcccggatccttggtggccagaaggagcgggccgctagcaccaaagactaacttaattagctcttgtgctcagttgccgcctagtacttcagaatacttaggtgttgtacatactcggcagggtatatagtatatttcttgcgattattacagcttcatgtgagttgtgaaatgtgtcttctttgtgacaatttggcatacaccgatttcttgtgtaaatgctacaagtattaatggacattttgccagtgatcaggagacttcagaacattggt

SEQ ID NO: 1237 - DNA, 749 bp, Avena sativa
tcttatctgagttcattctttcattcccagaacttttctccaaaaaatgttgcttcgagctaggttctggtgttggtttggttggagtatgtcttaactacgttggtgcttctaaggttattcttactgatggtgatgcatctactctaacaaacatgaaggcaaacatggaaatgaataatttatacactgaggattcccaattattcaagaataaggtagagtgcaaatatctttcctgggaagaagcatctgataaagatttatgggactgtgagagagatgtagttcttggtgcagatattgtatacaatccctcgtgtgtgcctcaccttgttcgagtactttctatgctacttagaggagacgatgggcggcgacacagaagtgtcgatgcggcagccaacgaagaaactagtgatgtgaacggcgcaactggaggccgtgttgcctatatcgccacggttattcggaatgtggacactttcaattgctttgccaaggcagctgctgactccaagttgtctattgtcaacatcaccagcaccgcggctccctcaagttccttccttacatgctctcgtatgataggtcgagcgtgcaacttcttaagattaagctgtcattatcagatactgatgacggcaactcctagagttctcttctcatattaccattttgatttaatcatagtcacatcaataacattggtaccctggatacaattatgtagttgttttatgtttgca

SEQ ID NO: 1238 - DNA, 353 bp, Avena sativa
ggtagatccatagatgtgataattctgaaactcaaaacagtatatttgttcatactaaacctaacccgcagggactatatacggtcggatctgttcgacaccacggtataatacaacattgacaaaaggggaggaaaggaattttgttcaacgtatacaactccttctcattcattctgttcagctgatgcaattgcagttgcagcgacagtgacttgttcaccccctttctcctgttcaactcccctaccctcatcatctgggaccgccactgtcttcacttgcgcgacaatgaccgtaatgtcatccatcttaccgcctgttaacttggctccaaagtgcttcttccacca

SEQ ID NO: 1239 - DNA, 894 bp, Avena sativa
caaagtgcactaaacatttgatttaataccaacgacacaacctacatctgacttttcaaaatgatatctgatagttgcatctctaatgacaaataatttcctccgttacaaaaagaacgtcttcatgtgaacggcccacaggcagaacctacatccgactttacaaaatgatatctgattggtgcatcttcaatgacatataatttcctccgttagaaaaagaatatcattatgtgaaccgcccacttctaggatctgcatgcattgtcattccttgttgtccataaattgcttgatttgcacctcctcccactcctaggaattgaactgaactcagccaactaccccttctttcaaacacacagaatctattataagctgatcattataattacttgattagtcttctgaatagctccacagccacccattccaccttgccgctgcattccaggtctccatcagggattaaaagattctttgttgctacttcaattgagtaaatcactgtatgtagtacccccacggtgccgttcgcccgagccggcggcgtacatcagctctgaatgatctgaaagcatctgcatctcatcaaggcaaggttgtgacacgtcagcgtagtactcgccctcgccgctgtctgcacgtcgtccgcaactgcacccaaagtcctaaacaaaaatagttctaatgctagataatcatctactagtactactgtcttactactaacctgacaagtgatacctccagatcagtattatatgagaaaacaagagggatttaagaagatttagcaacttttgtttttgcagcattgattaagatgagccttgcctaggaactaattaacacgaaccaccaggttcgtttagagaaattaattatcacttg

SEQ ID NO: 1240 - DNA, 724 bp, Avena sativa
cggcactcacgccgccgatgactcccccaactacctcttgctcgtggacgccgtgctcccgctcccgccccgcctggccgccgctgctgccgcggagggcggtgccgtgccggccccgtccgtgtccatggtccgctcggcgccgcaccagggcgaggtcaaccgcgcccggtgcatgccgcagaggccgcataccgtggccaccaagacctgcgtcgatgaggtgcacgtgtaccaccttgccgacgatggccagaaggccggcgccaatgtcgtgctcaggggtcatgaagcggaggggtatgggctggcgtggagccctttgaaggaggggtggctgctgagcggctcatatgataagaagattttcctatgggatctcaaggccgggaatggagccccagttctggatgcgcaacaggtgtttgaggctcatgaggattatgttgaagatgtggcttggcacctgaaagatgaaaacctgtttggatctgttggcgatgactgcaagttgatgatttgggacttgcgtacaaacaaaccagaacaatctatagttgcacaccaaaaaggaagttaactctttctccttcaatccatttaatgaatggatcttggccacagcatctggcgatgcaactattaagctgtttgacttgcgaaagctatcaagaagcttgcatacatttgacaaccatgaggggagtctttcaggttgaatgga

SEQ ID NO: 1241 - DNA, 694 bp, Avena sativa
aggaggctgagaaggctgtggagatgttccatcgctacgatgtgggtgggaggctgttgactgtgaacaaggcggctcctagaggcgcccgtgtggaaaggcctccccgtgattccggatcttcgttcaggatctacgtgggcaacctgccgtggcaagtggacgactctcagttggtgcagctgttcagcgagcacggcaaagtggtcgacgcaagggtcgtctacgacagggacaccgggcgctcacggggattcggtttcgtgacgatggcatcacagacggaactggatgacgcaatcgccgccctcgacggacagagtttggaggggcgtgccctacgagtgaacgtcgccgaggagcggcctccgcggaggttctagatgaagacgtatttggcagcggatgacatcaggctttctgcggaagagtcagagtagcaacgcccgacactggtctagagtctccattatcctcccatccatacttgttcgtcgattcactgcttttttttcttcttgctatctgtctgttggttccatgatctcaattcgtcgatgcaattcaaaagttttgtctgacatatatatatttaagccccatgtgtcttgctccgacctccgagacatgaaaaggatttcagaatcttcttgtgatcatggttgtacctatatatgcgagttgtgtttgtagt

SEQ ID NO: 1242 - DNA, 851 bp, Avena sativa
atgccattcgcgaagagatgaaagacattgagattgtgtacaggcctcttacagagatgtatgaagctgccgctgaagctgatgtcgtgttcacaagcacagcgtctgaatctttattgttcacgaaggagcatgcagaggcgcttcctcccatttctcttgctatgggtggtgttcggctttttgtcgatatatctgtcccgaggaatgtcggtgcctgtgtgtctgatgtggagcatgcgcgggtatacaatgttgatgacttgaaggaggtggtggaagccaataaggaagaccgtctcaggaaagcaatggaggcccaaacgatcatttcccaagaactgaagcggttcgaggcatggagggactcgctggagaccgtcccgaccatcaaaaagctgaggtcgtatgccgacaggatcagggcttccgagctcgagaagtgcctgacgaagatcggggaagacaatctcaacaagaagatgagaaggtccatcgaggagctcagcaccggcatagtgaacaagctccttcacggcccactgcagcacctgagatgcgacggcagcgacagccgaacccttgacgaaacgctggagaacatgcacgccctcaacagaatgttcagcctggacaccgagaaggcagttctcgagcagaagatcaaggccaaggtagagaagacccaaagctgagaccagaagacagctctccccatgtatatcttgcttacactaccccagaatgttgcaacattctactcccaatattttttgatactccactccacttactgccgagctcgtcaattgtgtggtgaattagcgccatggcagcctccaaatctgtcg

SEQ ID NO: 1243 - DNA, 807 bp, Avena sativa
ttcctcgccaagatcttgttgatcttgtggaggtcgttgctgagcttctggtctttgttctgcttcctggtcttcctgccatcctgcatcttcaccccaaactggaatgccgccttcggcatggcttccttctgatcattgtatttcgcccactcctcttccgtctcaaagtcccaccggtgaagacggcccttcgcccgtccacccatatccatcttcgacaaatcatcttcatcgtcactccctgcaacctcttgattatacccctgataaccaggataacactcagagtaactatccgaaataaaatttgggtctttctcccgtgcatctttttccctcagctgcttaagcctgtcatcatcacgtttgaaaactgaaccgagacccttatctttgtctgcttgagtcatcaaccttggatcctggggtatatttgggtcagctaatacatcataccccatagtaccctgttgcatgtactgttctggataagccaactgctgttcagcatactgatagcctgcccactcgccttgatatccagcagctgccatttgggcttgaatagcatcataaccatccaattgtggctgccaggcgtgagcaggttcagatggtcgaatagggccatacacaggttcagtcaaatgggactgatcctgatggttatgtggggattcatccatatcttcggagatggggctctgactcatttccttgttaggaacagtatagtcaacaccatctccaacgaatatgtcatcatcatcttctctagcaatagggaccgacggtttatgtttc

SEQ ID NO: 1244 - DNA, 481 bp, Avena sativa
ttgtctaagttcgagcacctccatctcagtcttacattttgtagctattcaaaatctctagcaacacaaaactacagatgagatatagtgaacatccagtaaaagtttcaacatgggcagagcataacccagcccaccaaaatcagtacatcatcttctcgttctttcttcatatcctacccttatatttttagagccgtcaaagtacccagtggcataaactacaagcatgatgcactccaatagcgaccaaaaatctcaagctaaccgagtcagtctccattcagttgggcttttcttcctggcacttagagcatgtacatgtgaatccataatctgcgagctctgcctgccgctcctcatacggaagatcttcatcaatgtaggagatggtaatctcatcacctttgctgataggccccagagcaattatcactgcatgaccgtcattgtcctgcagcgttcaacagcttttatcagc

SEQ ID NO: 1245 - DNA, 565 bp, Avena sativa
cagaacagggctctatctaccaacaagtgatattgatgttgtaatatttgagtccagggttaagactcctcaagttggcctatatgctcttgcgaaagcattgtctcagaaaggtgttgccaaaaagctacaggtaatagcaaaggcccgtgtgccaattgtgaaattcgtggaaagaactagtgaaataccttttgacatcagctttgatattgatggtggaccagaagcagcggactttatcaaggatgccgtcaagaagatgcctgctttaagacctttgtgtatgattctgaagattttccttcatcagagagagctcaatgaggtctatactggtggggttgggtcttatgctcttctcactatgctgatcacacatttacagttgatctggggagtgaaagatatgatgggccatgtacaatcgaaggagcacaatttgggaattcttttgatcaatttttttgacttttatgggcgcaagttgaacaactgggatgttggaatatcttgcaattctccaagaacctttttcttgaagagtgaataaagactttgtgaa

SEQ ID NO: 1246 - DNA, 437 bp, Avena sativa
agctgctcagtaagaaagtaagtattgcctattcagatccaagcaagagtaagaagaaccgtgaagcaggcactacctccaaaggacaggataaattgccttctggaggtgatcatgatgaaaaaatgtcagttgacgagaaggaagcgccaaaaaggtgatgcgaagatcacaggaaagtagcacgctattcgcaccgaggtctgtgatcaaaccccttggttggaacaagagtgagaagccggatgttgccgcggaagagctaaaaatcaaaatgatgatttcagaaacctgttgcttaagaagtgatgttcgtaggcaggtcagttcttgggtatcttcatatccactatatgctaggacttgtaccttgtactacttgttgaatggaaccttcccgcgagatcgcccatgaatacaaggaattattaatctga

SEQ ID NO: 1247 - DNA, 612 bp, Avena sativa
gctgcccttcttaagatggttcataggtggcagttcttctaaaggcccaaaacttcttaactgcgttgttcgctctccctggagtacacttgatgttgttgcagaggtcaaacaacccattctcttcctttctggattacaagatgaactggttcccccttcacacatgaagatgctttatgacaaagctattgaaaataacagaaattgtagatttgtcgattttcccagtggtatgcatatggatacctggatgtctggcggagaccgttactggaggacaatccatttgtttctagaccaatattctccagaagtacagagttgtgatgctagttgcgcaagtgaaattgctaacgatgtcattgatgaattgaagatcacttcaaacaattgattcaggtgattgttcagctacattccacctgaagaagccaaagctgtgaatatatgtgaggctgttcaccatcccgtgtgctgctgctgctgcatttgtctgtggagcaacatatatatttctgagtctggtgttgcctttgactgctgatttcttgtatcatgtctgaattggctttatccaactatctgcatttttctgtactagtagtagta

SEQ ID NO: 1248 - DNA, 644 bp, Avena sativa
gcctaattggaaacaatcccagcaatgtagtacaggaagaggttgccatacggtagcagtgcttgatgagaagatatacgcaattggtggttatgatggtgatgctggagcaatggtggccactgttgagttctacgagccaagaatgccatcatgggtggcggttgaaccaatgaactacaccagagggtaccatgcctcagctgtgcttggtggctcgatattcacattcggtggggtcaaaggtgaagcagatacaattttggatgtggtggagcgctacaaggaaggctgtggctgggtgaataccgggatgaagtcaatcggcaggagatgctactgttctgccatcgttctctgaccgactgcctttctccaatctccattgacaccctgaacttactatctaggcttctgctgattagtgaccagcaagcaaaactgttaagaccttggaaggtgccctcttattctgtctgaattgagaagcccttgtctcctcgatctgagaaaccgtcatctttcttttgtctttttggatctgaattaacagtgcgtcaacatatgcttggaagccaaactgaaatgcgaacgatacgaactttatggacaataatttgatttcatctcgtatgtttatgata

SEQ ID NO: 1249 - DNA, 916 bp, Avena sativa
tcacaagatctgtggaaaggaggtgccacatggttactggatgttctgccgtggaagtaaaagtgaaacaaggggatttagctgtggactttgggttttgcttcattcactgactgtccaaattggggatggcgagagccaatcaacctttacatcaatatgtgacttcatacacaatttcttcatctgtgaggaatgtcgcaagcacttctatgaaatgtgttcaagtgtatcagttcccttcaagtctgcccgtgatctcagcctctggctatggagcacacataacaaagtcaacgagagattaatgaaagacgaaaaagatttaggaactggcgatccatcatttcctaaggttgtctggcctccaaaggcactttgcccgtcttgctatcgttcttcaagcaagactggtgatgaagctgtgcaggttgactggaatgaggatgaagtattttctttcttggttaactactacgggaagacgctcgtatcatcgtacaaagagacctacatggagtcgcaagagaagaagcttgtaggccatgtggggccactatctgatgatgcgtcctcgagtgctgcaagagtcccaattggagctgccctaggcgttgccattgctagctgtacatttggggcactggcttgcttctggagagcccagcagaagaacagaaagcaaagaaagaactggaactgaaaaacagcccaccagttgcccacccttcacttcaccacaggtggcctccgtgaatgtatattttctgggcaggttaaaactcttggtaagtagtccagagagagtcggcgcaaaatctaatgttcaagctgtcatttagacatttacagatgaaaaacttgcagaacagaagaatcatggtctaactcatgtgattgtttgtgcaacgatatg

SEQ ID NO: 1250 - DNA, 811 bp, Avena sativa
aatctgactgtgaatctcctggcctagttaatacatggaagatttgtactgtcactcaggtggagttaaagcttttgatcagaatgttcccagtttggtctgcaatgctattatttgcggcagttcaggaacaaatgttctcaacatttgtagagcaaggaacagcaatggagagacacatcgggtcttttgaaatacctgctgcatccttccaatgtgtagatacaattgctgtcattatgctagttccagtttatgagagggtcattccagtattcagaaaattcaccggcagaccgaacggcattacaacactgcagcgaatagggattggtttatttttctccatgtccgcaatggtgtcagcggcgttggtggagagtaatcggttgcagattgcgcaggctgaaggtttggtgcaccgcaaggtggctgttccgatgagcatcctgtggcaaacaccccagtacttcctgctaggtgttgccgaggtattctccaacattgggttaactgaatttttctacgatgaatctccagatgccatgagaagcttatgtatggcattctcacttcttaacgtctcggctggaaactaccttagttcgtttatcctttctctcgtgccggtattcacggcgagaggaggcagcccagggtggatacctgataacctgaatgaagggcatctggatagattctacctgatgatggctggtcttagttattgaatatttttatctttgcattctgtgccatgaggtataaagcaagaaggcttcctgagagtcagttgaccttggcattgtaa

SEQ ID NO: 1251 - DNA, 622 bp, Avena sativa
ttacagccgacattgtctaaaactaagcatacaccttatcaaccatctctaaccatgaactgctaaagaaacatcttcaagttattacagcctttgtatgaacaaaacgataccgatttcatgtctcgatatctccatcccctcctttccatctacacatacagaaggcaccaccatcaggagctctatcttcctctcttgcaccacatctgacacacctccaggtgcacctgctatacatactgcagacaaatgacttgcttcatctacagaagagcttcacacgttgccttgttgtgtcctacttgcttgcacctgctacatagccgtataagagtggtttccttgttggggttaaacctcttccttctcggtttatctgacgtccgtggcctgggaggtgggatcactgccgcagcactaaaatcaaaggtatccatgtcaggaatcgggacgattgtttctgagtatgtcaaatggtagctctctattctgaagaactttgagcagtagtcgtagaaagatcgcccaatcctgttaaacacggcaacagcatgcatacaagggagaccagaaagttgccaccttcgacaggtgcattcccagtttgtggcagtctcag

SEQ ID NO: 1252 - DNA, 506 bp, Avena sativa
taagatgtttggattatgaaagaaatatatctagacccctttagtcttatatttaaaacggagggagtacaacccataacacatcttccactgcagccaatacataataactccatagccctaattaaccctacctccttccctaaccacattccattgcatgaacctttctcccaatcaaacgcccagctcagctcagctcattccgcagcagaggcagctattacccttcgattcctcgggtgatgcctctttctgccccggcagtaccggctcccgcacaggcactcaaacactttcactggttgcttctcgtcctcgaaatcaatgccgtaatcccatgtcagttcctcaaaagcctccaccttcgtgcttgtgaagaatgcaagatgataatagtgatggtcaggagtctccacttcaacaggaaccgctgctagatttgcatcacggcatctgtggwtgatagrrtctgccaacattccccgtaaaatgttccatctagg

SEQ ID NO: 1253 - DNA, 176 bp, Avena sativa
cacctgcatgacaatctattcaagggcgctctcgataacgggcattgatgatcggagattactggaacttcattccaaacgatgaatcaaggttccgctcggttgcgtatctctcgcagatttggtggtttgaagtcagagggsmggkatgagttctgcttcccagaaggtacata

SEQ ID NO: 1254 - DNA, 762 bp, Avena sativa
tgtcagatggggctgtgaaaattacattcattgagggctaagaacaagaagtataagtatgctctattgcgaaatatcataatgtctgctcagtaacactgtttttcactttgcagtgacggaggttacttcaatgcaataatgagcttcccaccaaattatccgaacagccctccatcagttagatttacttctgaaatgtggcatccaaatgtttatccggatgggcgcgtatgcatttctattcttcatccacctggtgatgatcccaacggttatgagcttgctagtgagcgttggacaccagttcatacggtcgagagtatagttctgagcatcatttcgatgctttctagtccaaatgatgaatcaccagcaaatattgaagccgctaaagactggagagacaagcgagatgagttcaagaaaaaggttaggcgcgccgtacggaaatctcaggaaatgctttgaataaaatgggagtaccggggaagttagccatgccttttaggtgtgcaaggttttgctgtggatctccaaatgcccatccggcgatagcaatttcacttttcccctgtatattttccatttagtgtctccacgggcggtcttgtcttggttgtctctggaatctcactgggactgaaccttgttgtatttgcgtggctttgggctatcatgattgaaaaacttaaagagttgccactcaccataacatttgtaacgaatctgatataagaggacacattcctagaaaaaaaa

SEQ ID NO: 1255 - DNA, 841 bp, Avena sativa
agtgacattgcataacaatgcaacaagtcccagatgataactcagaatgacagatccaggttccaccaagtgatgataaccatgagccagaactgacaataaactttccatgtacgtcgattcaccctgcaatgcaaggtgtttaccctgctacaaagcatcgcgacaaaaataatcctcgtgggttccttgattatttgggaaacagaattgacgatctaatgctgtacgggaaaaaaaaataacgctcaggagtaggggcttgtaaaccaatccccaaaagaatccattcttcaggcttgcatccagtaacctacttcagattagcgatcactgcatcagtaacttcctgggtggtgctatcgccaccaagatcctttgttctgtatctgccttcctcaacgacacgcttcactgcagtttccagacggtcagcgaacgatgggaactgcaaatgcctcagcatcatggccgacgatagaagcagggcgactgggtttgctctctgctgctccacaagattgtcatttcccacgtttcctgcagaagcaccttgctcgaagatggcatggtcctgacccacattgcctccaggcatgacacctgttcctccaacaagacctgcagctgtgttggcaaccaaattaccgtaaagattaggcgtaaccataacatcaaactgttcaggccttgaaacaagttgcatacagcagttatcaacaatgatctcattgtactcaatactaggatattttgcagcaatctcacggcaagactccaagaacaaaccatcagcaagcttcatgatgtttgctttatgcactgctgtgtactttcttcc

SEQ ID NO: 1256 - DNA, 849 bp, Avena sativa
ctactgatacaatcatacatacatatcttgtaggcatttgtgtaccttcaagctaaaaacaagatcaatcacaccacagtaaatgctgcctgtacatacatgttacagaaagagaacaagttggcatatatgatcagtgatcaacaagagctgtccatgaactccacaagcaactccctgacggtgcctcctgtccggccatcttcccagccgcgccgtagatcggtgccatacccctgctgataggccctggattcgctttcactgtgttcacggaatccccgagatccccaaggaactcctcgtagatagccacgtgctgaagcgtcacacagatgtgcagactgttgggtctctgcagagcattgaggtgccatccttttgatgacattatgtcattcacctcaaatatgtcaacggcatccgacccaaaggccacaactgtcatgtccggcttcccgatcacaaataatcctgggatatcatcaattcctttctgtatcttctttgagacttccatgatttgactcgtactttccaaataaccatttagtccgagagacatcatagcagcccaagctcctgcgattagtccacctggcctgcttccagccatagtaggggaaacatagagcccaccagtccattcggtcacagcaacaaattggtgctttctaatctcatggttcctgtacaggacagtactggtgccttttggggctagcccatacttatgaacatctgttgaaattgacgtaacacctttaacagaaaaatcaaaaggaggtatgggatacccaagcttacgggcgaaaggcaatacgaagccaccaaggcatagatcgacat

SEQ ID NO: 1257 - DNA, 882 bp, Avena sativa
ccacactgcggtcaactccgccatttgtcatctcaatgagtacctcttgtaccggcttggtgtgatctttggggttcacaaattctgtgcagccaaatttcctagcttcttcaaatctgttggcgttcaggtcaataccaatgatccttgatgctcctgcaatccttgcaccttctgcagcagcaagtccaacagctcctagcccaaatatggcgactgtcgaaccctttggcggttttgcaacattaatcgacgcaccaagaccagtagaaataccacagctaagaacacagactttgtcaaggggagcctcagggttgatctttgcaacacaaccaacatgcatgacagtatactcactgaaggtggaagtcccaacgaaatggtaaattggcttgccattgatagagaaccgtgacttgccatcaccgatcatcacacctctgtcagtgttgatcctgagcagatcacacatgttgctctccgcagacttgcaatggggacattccttgcactccccagtgaacacagggagcacatggtcaccaggggcaacctcagtcacaccctctccaacactctccactatgcctccagcttcatgaccgaagatccgagggaacacgggagtctgccccttggcctcccagaagtagacgtcggtgtggcagagggaggtgaagaggatcttgacgcgcacctccatggcctgcggcggcgccacctccacctcctccatcgacagcggcttccccgcctcccatgccaccgcggctttgcacttgatcaccttccccgcggtcgccattgttctgtcgcctaaaaaatttccaccggaacgaaaaccacaatctcagcaagaaacaaagcacaaatcgcttc

SEQ ID NO: 1258 - DNA, 316 bp, Avena sativa
tggatagtgccttgataatggactcatatatcccaattcctttgaggtactcatctttgctcaggaactcgttatggtcatggagcagtattggtgtgttcgccataggagaaaccgaatgctggaatgccaagttcgcggaaataacgagcatcggtagacgccggaaaaatctccggcttactaagtttgccaccagctctcttcacagcttcttcgaacacaggccaccatgggtttgagctgtcagcagttgtcattgctggcttcccgaagttgtcaaggacagagcccttctgtttaaactcgaaagtca

SEQ ID NO: 1259 - DNA, 722 bp, Avena sativa
tgctcgcgagctcgaaaccctcagtcggtcggaggcagcggagggtggggcgagcgagatgtttcgatctctttcctccgcggcggccgtcgccgtggtcctcctctgcctctccggcgtctgccgcggcgccgagcagctcgggacgagggagtgcgaggacctggggttcaccggcctcgcgctctgctccgactgcaacgcgctccacgagttcgtcaaggaccaagagctagtggatgactgtcggaaatgctgcacggaggattcagacgattctatcaacaagattgtatactccagtgcaattattgaggtatgcatgagaaagctggtgtttatccagaagtcgttggcttcctcgaaggggacaaagatgacttcccttatgtagaagcccagtattcttatggcgctccaccaaagctcataatgcttgacgacaagggtgaccagaaggagactataaggatcgacaactggaagcgagagcatattcggcaattcctgacagagaaggtgaagccagagaaatcagacagctgattatttgtgacgagttcctcgactttagaaccctattatgtacttcattcggtgatctgtacctaaaccttgtagcatgtgtacacctcaacagtttctacaagacagcctgttatttatgatgtgcatgcaatttttcttagagcaggctttttggaactttggtctaccactaa

SEQ ID NO: 1260 - DNA, 681 bp, Avena sativa
gttatggtgggcgtggtggcggttttggtggtcgtggcggcggtgggttcggtgattctggaggatttggtcgttcgggtggtggatttggtcgttcaagcggcggtggcggtggattcggtgattcagggtttggccgttcaggtggtggtgggggattcagcgattcagggtttgggcgctcaggtggtggtggtggattcggcggttcagggtttggccgatctggtcggtccagtgggtttggggattctggctcaggtgggtttggtagcggctctggtagctctggctatggaggatttggcagctttggaggcaaaagctcttgaagatccactaggctcagcaactcagcatagcctagcaactccttaataggagcaaatggcaacttggctgcctacttgagcttgatggttcttatcagaagaggttacttattcttattcggccaaggccgaatttctagtgaacaccatacgcttatatgcctggagctgccaactttgaaggcagcaggaaataatcacgaggtttttttgtttgttctctattctctttcctgatgcaagctatttgcagtagggttccttgtaatatatgcagtgtgtcttctgcggataacgatattatatctgcttttaagtagttttgtaactaagtaaaaaaaaaaaaaaa

SEQ ID NO: 1261 - DNA, 770 bp, Avena sativa
cgaggaatacattgcaactgcctattcaagcatccgtcaggaggaagccaagtcaaatgcaccacattcttacacaaccatcaggacacttctgagcatcgtccgtatttcgatcgccttggcaagacttcgattttcagaaactgttgcccagagcgatgttgatgaagcactacgactgatgcagatgtcaaagtactcgctctactctgatgaccgccagcggtctggccttgatgcgatctcagacatttactccatcctgagagatgaagcagccaggacgagcagcatggatgtgaaatttgctcatgctcttaacctgatctccagaaagggttatagtgaggctcagctgaaggagtgcctggaggagtatgcgtccttgaatgtgtggcagatccatcaaaccaccttcgacatccacttcatcgatgcctgatcaggaagcgaacattcattataatcatacgattgagaacatcatgggttgatgcttttgggcgtcggaagtcattgtctgggacctaacaagattgaaagagttagtggtagcaagaactgtactagtctagcagagccattgttatatgttcctgtgcaccgtggaggagcatttctacttgtcctcaaatctcattggttggcactggattgtatatgtaactctgttacgtttctttacctattagctactgttttgttggagccaaaagacgattcgagctgaatcttatggaactgttgatttttgtgtctaaggaaaaaaa

SEQ ID NO: 1262 - DNA, 916 bp, Avena sativa
ttgtcattgctacattcctggatccaagaggaaataagactacttggatttcttctatagcaaggtgtcttccaatgaggagcaaaatttctaaacaagtggatattgatttagattgggtgaaaaaatatgtcaacgaatatgagctacttgcagcgacaagcactgcatcctcgacacctcctagtcaatgaaatgccactattggatcacctattgcaaggaaaagaaagttagaagaagattttgcccagcacaagtctcgtcggaggtcacgtgtacacaagtctgagcttgacacatatttggaagaatcatgtgaggaggacaccgctgactttgatgtcttgggttggtggaagaggcatgccaaaaaaaattccaatattgtctatggcccgtgacttttttgcaattcctctcagcacgatggcatctgaatctgctttcagttgtggtggtaggatacttggggacactagaagctcattacccctgatatgctacaaactcttgtttgtgctaaggattggttgttcatttcaaaggatgataaagttgcaggacaaggacaataaggacgaatctaccaagttctctacagtttcctagatttatctgggttgaaactgaatgaaagagcacaatgaataatgtctacagtgtatgacttttcacttggagttgtgaagaagggcattcattttattttatactgaaagacatgatcagtttattagggacctattcttgatgtttgtaatattttgtgcaactaattctagtgagtttatgattgtagagacactataatttatactgatagagatgattaaggttgttttatttttattgtagtttttctagtttcatgtgtactagtgtgatggctgtacgtactcaaataagtgtacat

SEQ ID NO: 1263 - DNA, 310 bp, Avena sativa
tcccgggatgggaggcatatcatctctgcagtttgtcctcccgataacatggtcacatgggcaaaagtacggcatcactctgaatcagctagtctcgtggtggagcgagaaaccccgctgagcttgcggggcaaaagaaaaggggtctattctgccaggttatcatgccgacattgtggtctggaaaccccgagacgcagttccgtcttgatgacagccatactgtataccacaagcaccggaacatttcggcgtatcttggcagtgagctatctggcaaggtcttgtctacttttgtgagagggaacct

SEQ ID NO: 1264 - DNA, 665 bp, Avena sativa
  modified_base (637)..(637): a, c, t, g, unknown or other
aacataaggatggctatgtattggctttacaaggtagtcaacctggagactcactggtgttcattatctggccatggggcacaacaaagaagctacagtggagatgaagttgatgggatggatgaaaccctctgcccgttggatttgagacacagggaatgattatagatgatgaaataaatgctgcgcttgttagaccactacctcccggagccaaacttcatgcactcatagatgcttgccacagtgggactgcacttgatttgccgttcctctgcagaatgagcaggagtgggcaatatatatgggaagatcacaggccacgatctggtgtctggaaaggaactagtggtggggaagctatttcatttagcggttgtgatgataatcaaacatcagcagatacttcagccttgtcaaagatcacttcgactggtgcaatgacattttgcttcatccaagctattgaacgtggtcaggctgccacctatgggagtatcctgaactccatgcgtacgacaatacggaacacaggaggtggtgattcaatggctggaggtggtgcggttacatcgctcatttcaatgcttctcacaggggggagcgctagtactggtggattgagacaggagccaanaactaactgcatgtgatacatttgatgt

SEQ ID NO: 1265 - DNA, 680 bp, Avena sativa
cgcctccaagattatgcaggccagggcgctctctaatcctaagatccaagttgtctgggactctgaggtcgtcgaggcctacggaggcgcaggcggcggcccattagctggcgttaaggtcaagaacttggtgactggtgaggtctccgatcttcaggtgtccgggctcttctttgccatcgggcatgagccggccaccaagtttctcaatggacagcttgagctccatgcggatgggtatgtggccaccaagccaggctctacacataccagtgtagagggggtctttgctgctggggatgtgcaggataagaagtaccgtcaggccatcactgccgctggatcagggtgcatggctgctttagatgcggagcactatctgcaagaggttggtgcacaggagggcaagtccgattgactatctcaggatgaagagaccacctccagcccttccaaaagtccgttggcggcgcggaaagctgcattatgagctttctggtttaggttgtctctactgcctattgtttctgttgatttcttatgatgcttaacagcacaatattattcgctgtcgctaggtcccagatcatctccattagtgttctggaaaatgatacgaatttggtgtcgatggaggccgaatttatttaatacaattagaatgaacttgtgcaaaaaaa

SEQ ID NO: 1266 - DNA, 721 bp, Avena sativa
gtgatgcttgggtcgagttggctgggcagcaatactccccagccagattggtgcatttgttctcaccaagatgaaggaaactgcagaggctcaccttggcaagtcagtctcaaaggctgttattacagtgccggcttatttcaatgacgctcagcgccaggccaccaaggatgctggtaggattgctggactggaggtgctgaggattatcaatgagcccactgctgctgctctgtcatatggaatgaacaacaaggagggcctgatcgctgtattcgacttgggtggtggtacttttgatgtatcaatcctcaagaactctgcagacaccacaatctacagcatcgagaagagcgtcgacgagtacaaggacaaggttcctgctgaggttgttacggaaatccagtcagctgtttctgatctgagagcagcgatggctggcgatgatttggacaacatcaagcagaagctggatgcagcaaacaaggcggtctcgaagattggacagcacatgtcaggtggtggcagcggcggcgctgcaggcggcagcggcagctgcagtggtgaccagactccagaggctgaataccaggacgccaaggaggccaagatgtagatttgaatctgcatcaggtttctacctttttttgtgtacccagtttaggaagttaatatattcgtctacctccgggtgcttagagttctatgagggctacgatac

SEQ ID NO: 1267 - DNA, 775 bp, Avena sativa
gactggcttcatgttcgctacgagcttcaccacgttggctaataattgcatcgatctcgtctagaaaaatggtagatggtgcatgatgcctcgcaagctcaaataacactttcactagtttctctgagtcaccacgccatttgctaacaattgatgaggctgaaataattgaaaaaggttagtgttgcactcagtagccacagcttttgctagcattgtctttcctgttcctggcggaccaaaaagcaatatgcctttccaacgtgataacagacctgtgaagtacttgggatactttataggcatgacaactgcttctttaagaagacgctttgcagtttccaagcctttaatgctttcccatttaacacccggactcccaggaataatatccctcaacaatgtctctgctaagttgcgtgtttctgcagattcaaaagaaggaagtagagatttctgcggcggcccaacagcgtccattgccccgttacggaactcgacatttctatccagcaggtcgtactgctcgaagactgccaggtcagcgccgccgttggcgtgggcgatgtcggcggggcctgatccgagcggcgcctcgtcgtcgtctccgtcgcccttgggcgcgtggcggatgccgaggcccgcgtcgtagtagcgctcgaagtcctcgaaggaccagcgggtaatggagggctcgtcgtcggcggccatggcggtgaacggggtcacacgggcgggtcgacggacccccgcgcacgagacggccggacgcgac

SEQ ID NO: 1268 - DNA, 769 bp, Avena sativa
aattcacaagaagttttggttcccggaaatgtcaatcacattgtgcgctgactttgttgtgtgtgcttccctgtgaacagaggaagaggtttgggctgctgatggctgctgctcttctggaaggggcttcggttggacctctgattgagctcacgatagagtttgatccaagcatcctcgtgacagccttcgttggaactgccattgcattcgggtgcttctcttgtgccgccatcatcgccaagcgcagggagtacatgtacctgggtggtttgctctcttctggcctgtcaatcctgctctggctgcagttggccacatccatctttggccactccattaacagcttcatgtttgaggtttactttggcctgttgatcttcctggggtacatggtgtacgacacacaggagatcatcgagagggcgcaccacggcgacatggactacatcaagcacgccctcaccctcttcaccgacttcatcgctgtccttgtcaggatcctcatcatcatgctcaagaacgcaagcgacaagtctgaggacaagaagaagaagaagaggaggtcctgaacgttccctctgcacatagtagataccgctaccagtaccaccaccgctaccattacctaggaaagctggcgcagtaaattggcgcctgtgtttttactttgttaattcgcgcatgtgtggatctgatgcgagtttgaagcttttgctgatgcggtctacgttctggatttcctgtactcctgttgcgttgtttgaag

SEQ ID NO: 1269 - DNA, 945 bp, Avena sativa
tactcaaggagtacttgtaatctgtggaagtgaatgaaatacaaagcttctgcgtgtggaatcaccacactatccctccctagattccccctagtgcatttagtccccacctttagtctatccatggcatctgccgtgacaccaccacgacactacacatgcaaataaatatactgaagtccggccacttgtgtggcattgtaattttctgctgatatatggtgagattcctctgtgaactatggatgggccattttatttgccctggaaataaaacgtcgtatacatgtgaaacccccagtaaattgctagattacctatgcaaccatacaatacagaagaagagtatatgcaggcacatggctcatttcagtccttatggttccgtattcacaacaagggttcagtttcagtttatagcacatcttcctcttcatgtcttgctcgggctgaaaacacattattgatgtcctgcgaatcgacactgaacttgctgacaggtgcttcatgctgccacgacagggtacgaagcgcaggtagccacagcacacatgttcttccccagttccatcttgaagtaaccctcatcgccccactcggcgccccatgagttcttgatgagccaatacgggacgccattctccacaccataaccaaccgccaaaacagcatggttcacatcgttaggggtggttccacaatggtcactagtgtaaactccgctcttgtactgcctgaaaccgtcgatcacctgaaaggcgacactgactgggcgaaccaaaccgacggcgtttttcagttcatcctcagcattcagtgtgatgttaactgagtccttaacctgaactgcggcattttcaggcttgtaatggcaggcgccattgacacccttgtaagggtaagactcctcggtgtcaattccaccattgtatttgatgtactcaa

SEQ ID NO: 1270 - DNA, 673 bp, Avena sativa
ttttgatcgttacagattaagcagctgttataaaaacccactgttcacaactcctaaaactcgtccatggaattctttatagtgagttgatttccatttacatacatcaatttgtaccttatgcaccacctttgcaatatcatgctaccagatggcaaataaagcactgtaaaaagaccaccggtaaaaatttgactcatctacagttgcaaaattctgacgtgtatatgtgttcaagagctcagatgaaaatttgcttgctttatctttattatacatggctaacactccgtaatatggctcgcggtaacaaaattgtccacagaactgctcttcaattatccctcatttgcaactttcaggagctcatcccaggttgtgatcttctctctaggcttgttattcaactggcctgccgtcttctctttagcatcgatcttctcccagtcatcgaaggacacatagcgggtattcttttgttctagaatctcaagtagtcccctccggcctggcctcttcaaatcagatgaggccctcagtacgccctttttgtcatcttcaaggatgctagccactgtttcctcagcacaatggagatttgtagcaacaatcccagttggtcctctcttcaaccatcctaccacgtacagtcctggctccaccttggcagtct

SEQ ID NO: 1271 - DNA, 738 bp, Avena sativa
attgtgaaggaaagcggagaagacaggaacttactgcgtgcaattcttcacaatgcaagcagcagcaaggtgggccttggcgaggcggagaactttatagtggacaactgcaagagcatatattttgcaggatacgagagcacagctgtgacagctgcctggtgtctgatgctccttgggctgcacccagaatggcaggaccgggtgcgagaagaagtgatggagctctgtgggggtcgtccagtagactcccaatcacttcagaaaatgaagaatctcacgatgataattcaggagactctgcggttgtacccagcaggtgcctttgtatcgaggatggcccttcaggaactgaaccttgggggtgtacacataccaaaaggtgtcaacatctacatccctgtctccaccatgcaccttgatcccaagctatgggggcctgatgctaagcagttcaacccggcacgcttctcagatgctcgaccccagctacactcttacttgccattcggcgctggcgctcggacctgccttggccagggattcgctacagcagagctcaaaatactgatatctctcatcatctccaagtttgaaatgaagatctcaccacactatgagcattctccaacactcaaactcattgtggaaccagagttcggtgtcaacctcaccttgacgaaagtgcgtagagcttgtagattctaagagggcattgtggtttgatataataatgtt

SEQ ID NO: 1272 - DNA, 517 bp, Avena sativa
actctccagtgtccacaactggtcctactacaacaatcatagagagcaagcgagaggctgcatccgtggtgagagagatcgaccagctaactagctaggagccatggcggactgggccccggtgttcatcgggctggtgctcttcatcctgctctcgccggggctgcttctgcagatcccgggcaagggccggatggtcgagttcggcaacttccagaccagcggcctctccatactcgtccacgccatcatctacttcgccctcatcgccatcttcatcctcgccctcaacgtccacgtctacctcggctgagcagctccatcgtctctcagcagttaggtaccccggacccggacccggaggaaggaaatccacatactggtactagtagctactgtctgtcgcttcgaagttcaggcatgcatgttcaggattcctggtttagattgtaggggcacagacccactttatatatgatgataatgttcactgggcaattagtctggactttgacat

SEQ ID NO: 1273 - DNA, 908 bp, Avena sativa
cacttcacgacagagggtgaggtggaatttaggagtgttatttacattccaggaatggcaccgcttagtaatgaggagattatgaaccccaaaaccaaaaatatccggttatatgtcaaaagagtatttatctccgatgattttgatggtgaactgtttcctcgatacttgagctttgtaaaaggtgtagttgattcaaatgaccttcccctcaatgtttcccgggagattcttcaagaaagccgaattgtaagaattatgcgcaagagacttgtcaggaagacatttgatatgattgaggaaatctctgaaaaagaggacaaagaggactacaagaagttctgggagagctttggaaagttcatcaagcttggttgcattgaggacacaggaaatcacaagcgtcttgccccactgctacgctttcccacttctaaaaatgagcaggatatggttagccttgatcaatatgtagagaacatgtctgagaaccaaaatgcaatctattacattgctacggatagtctccagagtgcaaagactgctcctttcttggaaaagctggtccaaaaagacattgaagttctttaccttatcgagccaattgatgaggttgctattcagaacttgcagacctacaaagagaagaagtttgttgatataagcaaagaggacctagaattgggtgatgaagacaaggatagtgaagaaagcaagcaggaatacactcttctgtgcgactgggtaaaacaacagcttggtgacaaggtggcaaaggttcaaatatcaaagcgtctcagctcttcaccatgtgttcttgtatctggcaagtttggttggtccgccaacatggaaagacttatgaaggcacaaacacttggtgacacatcaagcttggagttcatgcg

SEQ ID NO: 1274 - DNA, 528 bp, Avena sativa
aaggggctagagcctgtcattaattatgaaacagtgggtgtacagtgatattacaaaggaccccataaggacagaaaaataaaacataggtccctggcatttgtagataggaccttgctgaaagattgcaattacaaactaatcctatctcttccccaccgtggagcagagcgaggcgagcgctgcagccgagaacgacgacggggacaagaccacttgtcgccggcccagcaaagccctcagagcccgacctcgagaagggcctcccaatggaggttgagaatatgccggagctcaccggcataatgaagattcgcgcccacatggacggcgaagagatgctccaggaagaagaggctcttgagctcctgggccactccggcgaatccttgacaccgctaccactttcccccatccccaccatggagaccgagaggaagagaggaagcagggcaagaagaatagccagagtagcaagggcacgccaccaccgcgccagataaagcggctcatcaacacccaagaacc

SEQ ID NO: 1275 - DNA, 729 bp, Avena sativa
ttcccgggatcgtctcgtttgtaagtactaccaaggcaggcgggaggcagggcacctccgtctccgccccccgatactaaccgccgatccgcagcatggacgccaactggcagcccgtgcaggggtccaaccccccacccgccggggttgacccgaacgccgccgccgccgccgccggagacgactggcgcgcccacctgcagcccgaggcgcgcagcaggatcatcaataggataatggaaactctgaggaggcatctaccagtaataataccagagggattgaacgaacttcaaaaaatcgctgtgcgatttgaagagaagatctataacgcagcgactagccagcctgattatttgcggaagctttctctgaaaatgctctctatggaaacggggacaccacaggctcctggaaatgctcattggtttccaaatcaaaacaaccctggtcaaggatggcctatatgattgtgtcgattgttgtataaactcgcgtctccagcgtgtgcagaagaggcttgcggttctgaacaggcgtgacaagggtggttgctcctgtatgatgttcctgctgctatctgattgtccctacagtgtttcttgttgtcattgacatgctttcatgatgtacctgtaaactttgtgcaactcaaatcagtttcaaatgtacagacttccacagttaatatgattattactcatgttttgcctctgtttaaaaagaaaa

SEQ ID NO: 1276 - DNA, 789 bp, Avena sativa
aaatcacttcgtgatcctgtttactaccgttgcaaccctgatccccatcatcgtgtgggctcaaaatacaaggtctacccaacatatgattttgcttgcccatttgttgatgcatttgaaggagtgactcatgctcttcgttcaagcgaataccatgatcgcaatgcacagtactaccgtgtccttcaagacatggggctgcggagagtagaaatctatgagttcagcaggctcaatatggtttataccgttcttagcaagcgcaagcttctctggttcgtccaaaataagaaggtagaggactggaccgacgcacgctttcccacggtacaaggcatagtacgtcgtggtttgaagattgaagcattgatccaatttatactggagcagggtgcatccaaaaatctgaatcttatggagtgggataaactctggacaatcaacaagaagatagttgatccagtgtgtggaaggcataccgctgtgctgaaagacaaacatgttcccttgacacttactaatggtccagacgaaccatttgttcgaatcttgccaaggcacaagaagtatgagggtgctggaaagaaggctacaactttcgcaaacagaattttgctagagtatgctgatgcatcagtcattagcgtcggtgaggaagtcactttgatggactggggaaatgctatcatcagagaaatcaagactgataatgggacgattactcaactagttggtgaactccatcttgaagggtcagtaaagacaacaaagctagaaactgacatggct

SEQ ID NO: 1277 - DNA, 441 bp, Avena sativa
gatgttcctgctcacaaggtggtgcttgcggccgatcaccagtattagggcccagctttggtcccatgaagataaacatgaagtgcataacaattgaagatgtggaggctcctgtcttcaaggccttgctccatttatgtattgggatgagttgcctgacatagaagagctcactggtctcaatacaacttgggtgtccacttttgatggcccagcacttgcttgctgctgcggaccgttatgctttggagagactaaaattgctctctgaactcaagctttgtgaagatgttgcaataaacacaagtcgcaaaacacaattggcgctggctgaacaacaccactgttatcaattaaaaactagtttagcttgaaaattcgttgctttgcctgagaatttgaaagctgtcatgcagaccgaatggattcgactaatttgca

SEQ ID NO: 1278 - DNA, 881 bp, Avena sativa
gattatgcatgatcatcaaacaagacgctccaggggctttggatttgtagtttttgattctgagcaagttgtagatgagttgttagcaaaagggagtatgattgatcttgctggtgccaaggtggagatcaagaaagcagaaccaaagaaatccacaaatccgccaccatcagctggtagtgattctagatcagcatatgctaggaattctagggaccgtccttccagggatgatactggtgttggaatggctggtgtctatagcaactacaacagtggatttggtccttataggaaccatgcaagttttgctggtagtctcggtaatggaggggtaggtgactatcaaggtcgctacggtcgttattatccaggaataggaagctatgaaagcatgtcttcctttggttatcctagccgctttgggccatatggaggaggttttgatggaccttatgctggagggaacttaagtgcctacaggcgaggtggtgatgagagctttggtggccctggtagttctagctacagtggcaccatgtatgctggggcatatgatcctgcactaggtgcttatggacctggtggcgctcctgatatgaatagggggagttatgccccaggccgatatcacccatattgatgatggaaactgtccttcagaattgagcccagcatagtatcctctacaaggttgctgctttatctcgtgaattagtactaagaatgttagaaccctgtcatggatgaacccaccttaatgttctgtaaatgcttgctagttcgtctgaacttcaagcttttagtgatccagtgtctggactagtagacattgtattcgtggttttgtttggcatgttatagatcatggtacttttaga

SEQ ID NO: 1279 - DNA, 848 bp, Avena sativa
gctactggagtaacaacctggttgactgacaaagctggtcgacggctacttctcattatctctactacaggaatgaccatcactcttctcattgttccgtgtcatttttgtgaaggacaacataacagagggttctcatttatactctgtaatgagtatgctttcactggctggacttgtggcatttgtggttgcattttctcttggcttgggagccatcccatggataataatgtctgagattcttcccgttaatattaagagccttgctggaagtgtcgcgacccttgcaaactggatgacagcgtggctcgtcacgatgacagcgagcttgatgttaaactggagcaacggagggacattcgctatatactctgtggtggctatggggacccttcttttcgtgtgcctgtgcgtgccggagaccaagggaagaacactagaggaaatcgcgttctctttccgctgaagcccagaagcagcacacacaggccaatcaccaggtagtatacctgaaggttgtttcagaaccagtagtatagtgcttccttgagctttggaatgcgtcagcagaattggttccatggcttgccgagtcaggccttggggtctggattcggtaatcgtgctgccgtgtttttgcagggatttgtatcatgtttttgtgtaatagtgtattatcagtgtatctgttgtatgtgtaattagaaatggggtggaatgcagcaagacagacacccagccccttgcagtcaggagaagagcaattttgttggttacatggtttcattcagcagttgtgcccaatagaataattcagttgtaatgtccaataataaattttgaat

SEQ ID NO: 1280 - DNA, 694 bp, Avena sativa
agagacggttcaaaggaagtcactgcaaagaagccatcctctgttgcaaacggtcccccaaagctgacgtcccttgtcagatgcaacgatgctactcgagataaatacagggagcttcttgtcgaggcctttgtcaaggtctccccagaaactagcaaggacgacagagaggaagtgagggacctcttggaccaagtagatgcatgtgacccatacagagtggctgtgacagtggagtcggcgttgttcgagaggctggggcgttccaacgggactcaaaagacgaagtacagatcgatactgttcaacctgaaggctgaaaacaaccctgatttccggcgaagggttctgctgggtgaggtgaggcctgagaggctcgtggacatttcccccgacgagatggccagcgacgcgaggaagctcgagaaccagcagatcaaggagaaggctctatttgactgcgagcgcgcgtcggcacccaaggcctcgacggaccagttcaagtgcgggaggtgcgggcagcggaagacgacctactaccagctgcagacccggagtgctgatgagccgatgacgacgttcgtcacgtgcgtgaactgcaacaaccactggagtttctgctgagcgccgagtagttgttgtactggtagtagggtgttggtcctgttagcgataccatttgaagaatcgaaca

SEQ ID NO: 1281 - DNA, 521 bp, Avena sativa
atgagctgcacactgtgcctgaggatgagcccgtgtatcatgatgcgcctgacgcacacaaagacaattgaggcaatgacatgcaacatggagcgcaaggaaaacatgaggcttgtacctaggcgatccctgtgtatctgagcgacacaacttctgtatccactgcatgagtcctgattgcacatcataactggcttggccagcaggctttgcttttcgagttagtaccagactcctgggtcgcgggagtccttgttgaattgccctgtgagacgtttattgtcgactgcatgtagactgaattattcctgtgtgcaccaactgtatgtttatgccgggctcctgaatctctcttgctttgtaagttcaggcttcccaatgcggtacgtgttgtattatcccctagttttctgcatggatacatggatgtacactatttagttccctgcacatgtttgtaatgtttgtaagacagacaggtttgtgtcagaataaataccatgttgacatacttccaaaaa

SEQ ID NO: 1282 - DNA, 704 bp, Avena sativa
tccaagtgtgaattcctcaagtgttaatgctactcggaaaattccaacaccagctcctgcgtattatggcaagctgaaaaataggaggatcatgtacaatgaggcgattccgctcactgggaagacggtgaacaacacagaaccttttaacagaacttctgaaagcagcaagttacctgataagaagccagcatcatccgtagttgtttctgtgctagctgatcccagggaggctggtgatggagacagtgatccgaggatgtctccgaagtccctctccaggatatttgtcgttgttctccttgatggtgtcagatatgtcacatattcctgcactcttcctttcaagagctccagtcctcatcttgtgaactaacccataaaatggatcgatgagtctcatgatgcttgaggggctgtgttgtctgccaaatccgatggccgatagattaataacgatcttaggctgtttcctaaccaaggactgaacttcatatacactcggcctgaggtaattcaagtttgtcgaaggtttgaagtgtcgttagtgagacgtggttctgcaagtttagataacgagtgcagtttgtgctgctgcgataaccgggttcttgagctgtactctaacctttagtgttattatgatgtaatactgttttgaggaacttgaagacaaaatatacatgtagtttacttgaaaaaaa

SEQ ID NO: 1283 - DNA, 887 bp, Avena sativa
cggcgaccgatgctcccgcctgcacaaccgcccctctgtctcgccgaccctgctgctctgcaacatgtaccagcgcccggacatgatcaccccgggctcgacccgcagggcaaccccatcgaacccagcaagatccagggtgacttcgaggacttctatgaggacatcttcgacgagctcagcaagtacggcgaggtggagaacctgcacgtctgcgacaacctcgctgaccacctcatcggcaacgtgtatgtctcgttcagggaggaggaccaggccgccaaggccctccaggcgctgcaggggaggttctactccggccgtcccatcattgccgagttctcgccggtcaccgacttccgcgaggccacctgcaggcagttcgaggagcacaactgcaaccgtggtgggtactgcaacttcatgcatgtgaaggagattggcagggagctgaggaagaggctgtatgggcacctgcataggtcccggaggagccacagcaggagcagcaggagcccgagcccttaccattaccactcgagggaccgtgatcgatcgtcccggttgtcaagggaccgtggcgactactatggcggcagcttggaccgcggcgactatggggattactgccaccatagccgtaggagcagcgaaaggaatcgcaactatgacagcgatggtagcaggcggcggcggcacaggagccgtactaggagccctgtcagggagggcagcgaggagaggagggcgaagattgagcagtggaaccgtgaaagggaggcggcgcaggcctgagagttccggtctcattgcaggttgccgtgctgccttgtgcaccaaatgatctagcctattcagtgttttctgttgaacttcatttggatgtg

SEQ ID NO: 1284 - DNA, 596 bp, Avena sativa
  modified_base (583)..(583): a, c, t, g, unknown or other
ggtaagtgatctctattgttttttttttgtacatattttaaatcctgcttgtctgcgctgtatagaacatattggaaattgctgattaacgacagcagccttttgctaaagcttcattgaaatttccattggagacagttgatggaagatttagtactatgttaggaaagcaacatatttcgcgtagaacgtggatgtaagactggatggactcggtcatctctcaactgcataactacactggatcctacctacagttataatctaacgctatactaataaaatagtacatgcagttgcacggttctgatttacttttctggtgcatgtcttgtttactcaatgtatagtgatgtcgtacctgtgtcctgcaggttagtcttgacaatgggatggttcaagcgtttgatacgcggacagcttcgtcaaattcaaatcctggacagcccacatttactctgcatgcacacaataaggctgcttctgcaatatccttctgcccatctaagcctaatttcattgcaacatgtggaacggataaaatggtgaaactctgggatatatcaaacaccagcctttcatncgtggcttcgctg

SEQ ID NO: 1285 - DNA, 516 bp, Avena sativa
acttggagctgcctgattgcccccaatgagtggagatataatccaacgaacatttcaagtaatggaatggaatctgtggaaacaggttggatgagtaggagtgcaagcatcaaagagatggtggcctcaatttcttgaatatccaacgaacattcgtgctgctgcagcgctgcacatccaggctataacaagtggtatgatttaagaggattcttccatagcagagtccaaagatttgactcacatatgcagattataggtggggtagggtagggaagtaccaaaacaagcagacatcatcacagagaagagtgctaacttgtctcttcagggatgtgcatgccaaagccacgtttcatcttctcgattgtaggagcaagctttccaagattgcgtaacttctgtccagttgtatcatcgaccacatttcctgagatgtcaacggtatatgatttyccagtgaaacgttgaaggcctctctttacaagcaaaatcaaaatccttctgatgaagtcc

SEQ ID NO: 1286 - DNA, 902 bp, Avena sativa
tgtgatcgcgatttaataacttttttttttttttcaaagaacaagtttagtgaatagttcatattattatttctctcagcgagtacaaagcaacgacggtgccagctccagctgggcatctgctcacattacaaggaccgcagcccaaattgggacacaacccctcctttttattactagtataaggtataaatgtgatagggcaccatttcaacatatggttacagaccacatgttgcgcacggaaatcgcagggatacataaatgagttcgaagaatcggaggcgccaaagccaattcatgcgacactgtaggctttccctggccgcagctcaccgcccttgaggaagccagagtaccagcgggcagagttcttcatatacctcgtcctctcgttggagctcatgtccacgccgcacagaccgaatcgcgagctgtagcccaacaggaactcgaacacgtcgaggaaagaccacacgaagaatccctgcacgtccgatccgttccgtacggacaagtagagggcttccaggtaatcttgcaggacctctgacctgaagtcgtcatggtcatacttaacttccagattatcctggagggactctgacttgtagccatcgccgtgctcagtcttgctcggaaatccaaaggggtctgggaatccgatctcatggatcaggaccggaggatttctgtacttcagtttgatgtgctccattagctcccgtagagcccagggagaagccttaatgcgtcccttaaaaaagtcttgatacgaatctgtaatggcagctgtgtcagcgtagtagtccctctgcttcagatcaaacgcgctctggttggcttgcgtgtggaaaatgtagtagaaggtcaagccgataaagtcaaatgatccggatact

SEQ ID NO: 1287 - DNA, 758 bp, Avena sativa
gatgaggaggcgggtcggggagcggctgccgaggttcacggcggcggagtcggcgctggtgaagggggcgctggacttcgtgggcatcaaccactacaccacctactacaccaggcccaacgacaccaacatcatcggccgcctcttcaacgacacgctcgccgacaccggcaccgtcagcctgcccttcaaaaacggcaaagcgattggcgacagggcgaactcgatctggctgtacatagtgccgagagggatgaggagcctgatgaactacgtcaaggacaggtacaacagcccgccggtctacatcaccgagaacgggatggacgacagcaacagccccttcacttcgctcaaggacgccctcaaggacggcaagaggatcaagtaccacaacgactacctcaccaatctagccgcatccataaaggaggacgggtgcgacgtgcgcggctacttcgcctggtcgctgctggacaactgggagtgggcggccgggtactcctccaggttcggcctctacttcgtggactacaacgataatctcaagcggtaccccaagaactccgtgcagtggttcaagagcctcctcggcacctccagctgaggctttgggatcggggaagcgcacttgtttgggcatttggtatcttcttctcgtgcggtggtgtcacggcatgcattgctgtcttccagtgtgtgatgttctagtgcagcagccgtcaggtcttgtgctctcttctgtgtatagcttctac

SEQ ID NO: 1288 - DNA, 981 bp, Avena sativa
ctatgaagtagctactgaaacagacatgtgcccaaggacgtgaagcttcgttttggtgcactatctgcacaaaaatgctcatgcagcatatgctccagtgagaaagatatttgacagtttgatagggattcaaggcatgagtggggtaagttgtttgctgaaaaggtcaccaagggccccacgaacatccatctgatcacagcagataagtttggtaattaatggatagaactctcgtaggtgcttcttgaatatctgagcatccatgatacacattccattcaaaaccttgataataacaggtgcacgtaggtcaagtacacggtgtatgtccgcactagcagtttcccacgtgcttggctggagatcagacgcctctctcaaaatctgaccgcaaaaagatacaagcttcccttctgctaaattcttgagcttttcttgttcatcagattctatactaaatccatttgtttcgccagctgatctattagcatcattgtccactgtcgacttgtgtagaatctctaaataaatagtagttccagctagttcctgacgaagaagatttagtggtggcctttctggtggcatatggtgcatcctcgtccgaaggttcgaaggtgagttatatgaagaagcaaattctaggagagagagcaagatatccataattgtgatctgttgagtggcctgtagcttgctccaatacctcttctgtatactgtcgatagccccaagcagcagcagctgagtgatgcatttactccgaacagtctccatcatagggttctcttcttcttcagtcttgtcaactccatcagcatcaggtgccttcacaggtgaggatggaataacatcgtccatttttccctttgatttggatgtaagactcctgaccaaagattatccatcatattacccataaatctttgtccaaaggtttgactaggtgggacactgcagcttgtgttcttcctgatg

SEQ ID NO: 1289 - DNA, 491 bp, Avena sativa
tgactcagtggatggttttctcttatgacatatgacttctccggaccacaaaaccctggccccagtgctcctctaaagtggatacagtattctttagcaacacttctcccagccaaggattctatttctcgtggttattctcacatgatattcgttggaattaatttttatgggaacgacttttcttctttccaaaggtggtgctggtagttctattactggaagagatttcattcatttacttgagaagtacaagccatctttgcagtgggatgacaaaagttcagagcatttttgtatatattcagatgaaggcgtgaggcatgctgtattttatccaacactgatgtccatttctgtacgtttggatgaagcacaggattgggggacagggctttcaatctgggaaattggacaaggtttggactactttttcgatgttctgtaggaatatttcgtgtatgattgtcagttaactgtttggcttattg

SEQ ID NO: 1290 - DNA, 849 bp, Avena sativa
gtctaaccttgactaaagttggctcaagccaaaacactgatgtcatctctgagtcaacagaacaagaagcagctccagaggcaattaagcccattggtcgtatcaatgcatcaatggctgtagggaaagatatgctatacttatatggaggaatgatggaagtgaaagatagagaaattactcttgatgatttgtattcacttaaccttagtaaactagatgagtggaagtgtatcataccagcatctgaatctgaatggttggaaatttctgatgatgaggatgatgatgaggatgacgacgatgaaaatgatagtggtgatgatgctatggagacagatgaagaggatgaagagtctgacgaagaggtcgagaagaatgtagatatgtccggtgcagtgtctctactgaagggtgaacgtaagaaactgcgcagaaaagagaagcgtgccaggatagagcaaatcagggttatcctcggtctttcggattctcaaaggaccccaacgccgggagaatcattgagagacttctacaagagaacaaatatgtactggcaaatggctgcctacgagcacactgaacacaccggaaaggagctccgcaaagatggttttgatcttgccgaaactcgattcaaagaactgaaacccatactcgatgagctggctgtgctagaggctgaacagaaggcggaggaagaagccagtgggtcaaccagttccaagaaagacaccaagaaaggcaagcagaagagtggagcgagataaagacagttttttatatcctaatagggatttgcatggtcaatcccatagactgccaaacatgccgttagaatatgattga

SEQ ID NO: 1291 - DNA, 891 bp, Avena sativa
agtcactgaaccactcgcaggacgacagcggggaccgcccgatcttctcctcgaacaggtcgaacttgttgagcaccaggacgaacggtgtgtcgcggaaacatgggtgcctgattgtggcctcaaacaagtccctcgtctggatcatcttattctgaaggcgcctactgctgccgcttgtaggggcacccaactggtcatagtcgctgagtgacacggagaatatcaccacacggacatcctcaaacatttccacccatttgcagccctcgttcatgcccttggcatttactctaatcagctgatatttgtttattgcctgggaggtcacgtcatgactgtcgccatagagttcagacataggactccgttcgtccagagtgaactcaataaaggccaacccattcccttgcgatactccttctgcgtatattacatctttctctgaaggttcgtactcattacttgatacttcaatggccctgctcaagaaatattcggcaacgtcggggagaaaaagcaattcgtcctttcttttatatgttgcttgtatagcaggatccttccacatctcatcaacaactggtgcatattcacgtgtagctgcagggaagaatgcatctaggtctcccattgctatgatgtccaatagccaatctgagaacttcttcagctttgcatttattgagtatatgcaagtatttgaaccattggatgtgtttccatcttgttgggtatcctcatcttctgaatttgggttatttgatatagccaaagcctcttcctcgaagcgctcacggccctctaacagaatcccaaggtacttgaacatgttgctttggatcattagtttgatattgtcaagttcttctgggtaaatctagttccgta

SEQ ID NO: 1292 - DNA, 320 bp, Avena sativa
tcccagaccctctagtgggagtgcctccagcagtatcagttgtgctgatgtctctgatggggtttggtcttgtcatggtatggtccaagaaaacacaagtgtagcctctgcaaaaccacccggctggactggcacacgatacaattcaccacgaattcttcgtcgtcgttaagctaaaatcgccaagaacaaccaatcacgatatttatggaggcgaattttatttgcagaccatagatgactaggggtgcaagtgaccaccactgtagcatcccaattgtctaacaattgcaatgctactagcctagtctagatatatg

SEQ ID NO: 1293 - DNA, 769 bp, Avena sativa
cacattgacgaggtacagttgaatacaggaggcaaactgaaaaacgaatgatacaagaaccaaaacacttcactgctttatttgtatataaactgcaacaacacacacactagtcctgaaaagagtctgtaacagccatagagtacaaccaaaaaccgtcatgacttgagcctggacctggacacagacatgaccacaaagtaactgtttgatccccaacaaaagaaattctcatcttgcagagttcccagaaagcgcgtgctgctggctgtagatgaaccacagtcagggttcgcatgagcagcctccaccggacgatgcggccttgaaactgcgctcccactggtccacaggtgccgcttcagcatgaggtacgtggttggggttcttctccctcttgtcgcccttcagctgtttcatagcatgcttcaacgccggcagaagagcctccatgcactctgccacagcattagggttgcctggcatgttgatgataagtgttgatcctcttatcccacacgctgctcgggatagcatcgcaaatggtgtcaccttcaaactctcctgaatcatgacaaatgcaaggccaggtgcttctttctctatgacacctttagttgcttctggcgtaacatctctaggcgtgaagccagtgccacctaaggtcaagacgaggttgacgcggtcaatgtcgctccacttcaccagaatctccttgattttgtccacttcatctggaactacagcagtggcaacaactgttgctccc

SEQ ID NO: 1294 - DNA, 720 bp, Avena sativa
gcctgcacgcaaatgcgacgaatcgaacggaattttgagcaggtcaaaaaataattcatgtgggcatggctgaatgcatgatggttgaattctgttacaacagaatggcgaaaccatgactggctagccgtggaaactagggactatctctctctctaacagcgctaggtatggaaacctgttctgaagcgtaaaggttcacaaaatgttctgtggcttcgatgggaagttagaccggtggcccgttctacaaagtctacaccctacatgctctgaacgcccatgtcttctttatagcataactttgaaatggggagatcgcttccctgtagaaacaaccgaggacgacgccaaaatcccagctgtttatcttcaagcagattttacttgttcaccgtctgttgcatgaggtcgtgcatcacgccgccttcacaactctctgcctccttcatgtaggatgtggttcaggatttcccttggcatccctgcttgtgatgatgacatatggtgcggagaacactataggtcatatccatatcagctcatgccactgggatatttggttcaccaaggttcacaaaagcctctgcacggatcatgcgtagagtgacagtatgccaagagacaagatggtccaagaagtttgacacgtatgccctcctgtcatccttgtaatctaagtagtaggcatgctcccacaagtctaggctgaggattgga

SEQ ID NO: 1295 - DNA, 929 bp, Avena sativa
  modified_base (176)..(176): a, c, t, g, unknown or other
tgagcggtcatttaggggccttagctggtgatccgggctgtttccctctcgacgatgaagcttatcccccatcgtctcactggccgaccttgacccccgttattttggggtcatatctagtattcagagtttgcctcgatttggtaccgctcgcgcagcccgcaccgaaacagtgntttaccccctagatgtccagtcaactgctgcgcctcaacgcatttcggggagaaccagctagctctgggttcgagtggcatttcacccctaaccacaactcatccgctgattcttcaacatcagtcggttcggacctctgcttagtttcatccaagcttcatcctggtcatggatagatcacccaggttcgggtccataagcagtgacaatcgccctatgaagactcgctttcgctacggctccggtgggttccgttcccttaaccaagccactgcctatgagtcgccggctcattcttcaacaggcacgcggtcagagatcactttcccctcccactgcttgggagctcagcacggtttcacgttctatttcactacccactgggggttcttttcacctttccctcacggtactacttcgctatcggtcacccaggagtatttagccttgcaaggtggtccttgctgattcacacgggattccacgtgccccatgctactcgggtcagagcgtaagctagtgatgctttcggctactggactttagccatctagggtgcggcactcaaccgcttcgcctagcagcacaacgcttgtattgctctcccacaaccccgttttcacggtttaggctgctcccatttcgctcgccgctactacgggaatcgcttttgctttcttttcctctggctactaagatgtttcagttcgccaggttgtctcttgcctgctcatggattcagcaggcagttt

SEQ ID NO: 1296 - DNA, 836 bp, Avena sativa
cgcctgtagaaaagcctgctccaaaacctagtgctaaaagtgctgcgaaaaagggtaagcaggcatcaacgagtactgaagtagtagaagatgatgttctggatgatcctactttagagaagcttcggcaacaaaggcttgtggaagaagccgactttaagtcgacagcagagctttttgcaaagaaggacggcagtgagaagtcgctagatactttcatcccgaagtctgagagcgacttcgcagaatatgccgagcttattgcaaacaaaattcgtccctatgagaaaagctttcactacatgggtctacttaagaatgtcatgagactttccatgacatcgttgaaaggtgcggatgcgaaagaaatatcttcctcggtcacagcaattgctaacgaaaagatcaaggctgagaaagaagctgcagcaggcaaaaagaaaggaggagcaaaaaagaagcagctccatatagagaagggagaggaggaattcgtcgctggagcgggtgcatcttatgatgatccggacgagtttgacttcatgtgattggctggaaggggagtagcctcttctatgtaatacctcgaggcaaggcagagattagagttgcggcagcctgtgttccctacagaggcaccaaaagcttggaactgcatgggaacatgtccatctattttgaggttgattttgactcttcggactataggagaaacagtttgcggcgtcaatctgcaaattgtttttcgttttcgcgagctgtttgtgcttcttactcttgttctgtggtactgtattcttttggccaactgtactataacgcgtttctggttatat

SEQ ID NO: 1297 - DNA, 499 bp, Avena sativa
ccgggatgtcagttagaattgcaaataagtgttcacaggtttcccttcttattcaatcttttagtcctactatggattgatttggagccaatgcatgtcatctcttccttttctatggtgttggtgacggacaggtagttgtgatggagcacacttcttatcggcagctggaccagtcgacctccttccccggccaccccagatcggttccccccgccttccgtggactccggcgctgacctattgtgtctccggtggagatgtcgtccatctccggcatagcgccgccgccctcctcctggtcccatgtgccggctccggcggcagcgtcgctcccaaatccaccaccaggagtcatggagatgtgtggtgcgcacgcacggcaaaggttggctgtcatcaaccctgctttggcgggcacggttatctttttctcttgcctagcattttgctagatcctttaggtccgtgttgtattagcagatccccaaatgaatgt

SEQ ID NO: 1298 - DNA, 536 bp, Avena sativa
  modified_base (236)..(236): a, c, t, g, unknown or other
ttcttttctgaaagttccctgtatatcacacttaaaaactagtttgtacaaaaataatgtcacacggcaaaattgagatacagatagtcctttgacattgcatcagccctgactctagtattcttaagttacagtatacaccttttcgggtacacacactagctgcaacataaacagtgagatcccatgactggaatttttgagttgtaggatgatgaaacaaggcagagatttcncacggcaagtgctactgacctacaaaatctttagatggagtagcacaagccaagcaggactataatttacaacagctccaggggcagcttctggtttaacattgcctggagtggatctcaataatctacaagctcgccaacagtatatgggttgtcccttgcagcttctaaacccactatgagctgcccaaattgataaaaggcagctcatatttttctacgaccatatgtacagctgaggtcaacgtcgaaaatcttggaaaaaccatgtctctgacgacagtcaggtcgttaagagag

SEQ ID NO: 1299 - DNA, 618 bp, Avena sativa
ccgtaccgagcaagcgagcagcagccatggggtttgctccggtcgcaacatactcttcgttcctagcgccaccgccggcgaggaatacggcgtaccggacgcacctcgccgccgcagggctctcctcgagggcgtcctccttcgccgccggcagcgggctcgccgtggcggcggcttcggtagcggtggccgcgcggccgaggcggacgggcgcgggaggcggcgcgctcgggtgcaagtgcctgttcgggctcggcgtgccggagatggtcgtcatcgccggcgtcgcggcgctgctgttcgggcccaagcagctccccgagatcggccgcagcgtcggcaagaccgtcaagagcttccagcaggcagccaaggaatttgaaacggaactgaagaaagaacccgaggatggcggcgaccagcctccacctgcaactgccactgccgtgagcagcgacggtgaagagaaaaaggagctggaggcgtcgagtagcaaagaaagcacatgaggacaggtcgaggctcgcgaactggagtagaagagttgtgtatgtaaaaacagtgtgatgttttagcacattgctcccttcttttttgtattcttctttgcaggctgtg

SEQ ID NO: 1300 - DNA, 408 bp, Avena sativa
agcattcatagtccattatcaaataactaaattatacacttgcaacacttaataaggaatagtgtaaaccaaaatcagatccataaaaccaaatgcaacggcatttcccaggacaagagaaaggtacctctgcatcagttccatggagagtcacacgatagacaacagatacagatttcccatcagttgagtagactatgttgcgaacctccccggaccattctgcaaaggtttacaaaatggtagaagaaagacagggaatgtggttctcaacaatttggcctgcattgaacttaagtcctcctcaagaggacacgtaaattatactataactagaaatttacctggagcatgcatattcagaattttgttggtgatgtgcctgcaaaaggcatcaaaagtgagatc

SEQ ID NO: 1301 - DNA, 735 bp, Avena sativa
cccacagaaagctctctagtgttggtagcatggaagaaagccatttccttcaagcatcattggacttgtcggatagtgcttcattggagaggagagcgtccacagaaagtaatatgtcatactatctgaggagcatgactccaagtgcttttgagtcagcactccgtcaaaaggatggagaattggcttcttacatgtcacgcttggcctcattggaatctattcggaattctctggcagaggagctggtaaaactgacggaacaatgtgaaaagttgcggaatgaatctgctgctctgcctggcctaagagctgaactggaagcactgaaacaaagacacttccaagctctagaacttatgggggaacgtgatgaagagttggaagaattgcgaaatgatattgttgacctaaaggatatgtacagagaacaagtcgatcttcttgttagccagctccagacattgggcgctcgtgtatagtgctactgaccaagagattttgaaggctgaaaatattttgccacagttcaaactatggcgagctgggagttcacaattatacgacactgtacaatgtgaagatttttgttgttgatttcattagatagtttgttgtatactagattgaatattaacagttttgcatttattgtttgcaaaagtttcattcataagagggcaagtaactttaatattttaacataaacgtgaaagctactaaataaccaaaaaa

SEQ ID NO: 1302 - DNA, 653 bp, Avena sativa
tgtgcctataagagctaagttgatataattcaaacgggtttctttagttttggcatgcatggctctgcgtgagcctggcaatcaatcatcaatcaaggtgatacaaatgtatttcctttatttccatctcgcttttcctggctgattctgtacaaccaattgatcttctacagaaagggaggtggtgatggtacaggttcagtgatgggtagatggattcaaaatgcagagaatcaagcatttgtgagacatattcgaagaaatatgcagacataacaggtttatgcgagttgatgcacattctcttggtgtcatctctgtatattggactacgaatggaaaaacgcaggctggggatccgtgtgcggcatcctttgactggaactgctctaacatctgcactccggtggagagaataaagcagagtgaaacagagtgcctcgcaccgagcctgagcaggtggagctgttgatatccgtatagcctcctccccagtttcagccaaagctttttgtgctacaagaataatgtgatagaagtcgatcgttgggtggaataattagattaatgaagctgcaaacggttacagttttatggcaaagatgttaggcactacatgaacgagtaatctattcttcccagatggaggtggc

SEQ ID NO: 1303 - DNA, 624 bp, Avena sativa
cggagctttcatctttccaagataaattagggacagaggcttacaataaggtagatgtcattggtattgatgaagcccagttctttggcgatcttcatgatttctgctgcaaagctgctgaccgtgatgggaaaattgttgtagtcgcaggtctagatggtgactacaaaaggaacaagtttgggtcagtgttggacatcatccccctggctgactcggtcaccaagctaacagcacgctgtgagttgtgtggtcgccgggcgttcttcacattgaggaagacacaggaaaccaggactgaactcattggaggagccgatgtctatatgcctgtgtgtaggcagcactattctgacgggcagattgttattgaagccgcaaggattgttatggatagagagatccacagtgacccacgctgtgaggtatctcattgctaggcagcgtatgcacttatgcagtgttctggcattacccacatacgtaacttttccagaaaactacatctcttgtgattcatgccaacatgcacttggtgagaaggcaataacgtgctgagatgtgcaaccagcctgtgaacccgagataccagggcaacttcagcggtgccctgtttcggacaca

SEQ ID NO: 1304 - DNA, 610 bp, Avena sativa
gtaggaggaagggcatgagaaaaccgcggtgccggtgccggtgccggtgccgttttatttatcatacacgaccatgtttacagagcatatgcaaaagagcacgctgatccctgcaccttcatacatacatcgtcttcgcttcttctttcagcacccactatttgagcaaccctcgccagcactggacggacgggggtggaggctcagttctcgtgatcccagacatcggaagcgctcttgtacggcccgtgggtcttgttcacaaacagctcctctccggtcaggacacgcttctcatctttgatgctgcacaggacctggaagtcctcttcggggatctcccatccaaacacctggatgttctccttgatcctctcatctttacttgatttggggataacacttgttcccctctggagagcccatttgatgagcacctgccctggggtcttgttcagcttgttggctaccttctcaacaacagggtcatgagcaagattcttctctgaagaacccaatggagagtaagcagtaacatggattccatgcttcttgcaggcctcgaatatcttatcgttcttccagccagggtgcatttccatctggcata

SEQ ID NO: 1305 - DNA, 602 bp, Avena sativa
ctagcagtgaacaaactacaatatggcaatgtggcgaggcaccaagtctgaaacttgttggaagttctaatgactaagaagtcgtagaacagctaaaatatcagaaccttgtttgttttttctgacaacacagcagaaacttttgctagtcttatgaaaattagagaatatgtcggtcttgccttttctgcaccaggcagcatgatgatgaagtgatgcacaatgttggtaatcacaacacttcttaaaccatgttgacattgatcatgagttgaatctgcaatcttcacttttatgagccaaatacctccttgttgcaaacagggcataccttgttgattttcaaccatttagcgacacaagtttgatggtactgatgctcacagggcaatgttgttagcttatctcggctcttgtacgccatacaacatatcacacattcatcgtgcttttcctttcttgagaatatcctaattttgtatgtagaagacttaaggagtgctatcatatcttctggcaaacctttgctctctgtcccaatagtttcccctaattgctgtagttcctcataagtcatattgtcaggatcaacgctatcttcc

SEQ ID NO: 1306 - DNA, 313 bp, Avena sativa
ttttttttcttcccagaccagacaggtctgattccatcaaagcacaatttatcaaggccatggaacaagataatactgtggaagttccagcccagaggaagcatggcaaatctaatagtcactagcagggaacaaacttcaatctggcaatgcagtgatgcaccaagctaaaaaaaatcagaacctaagcatcaaccttgtttgttttttctgacaacgcagcagaaacttttcgttagtcttatgacaattrgagaatatgtcgtcttgcctttttccrcaaccaggcagcatgctgatgaarwgwtgcaca

SEQ ID NO: 1307 - DNA, 769 bp, Avena sativa
ccatcaacgggcactcctacttcaacctggtgctggtgacgaacgtgggcggcgccggcgacgtgcagtcggtgtccatcaagggcacgcgcacggggtggcaggccatgtcccgcaactggggccagaactggcagagcaacacctacctggacggacagtgcctctccttcagggtcgtctccagcgacggccgcacactcaccagcaacgccgccgcgcccgccgggtggcagttcggacagacgttcgagggcgcacagttctagccttaccttcttcgatctccgcaagcattggaggtggaagagaattaattattccgcattcgtgcccatggacggacggaagagaaagaaaggccggccgggctgccgtcttcgttatactagtagtgaagaagaaagaggctcccggtcccgggctatgctgaggctgctaattagcacccgcctagacgtttccttcttctcccgattattttgcaagtctcaagtttattaaaggcttgaacaagtactactagtgtgttggcagcagcactactccttgctgaaaaaagagagaggagttgattattgcattattaggtatcgttacttactacctttggtggtttgtagtcctttgtactgggtggtggccttaatttgtgatgaaattgaagatcgcaaaggccatatttatggatcgatccatgttctagccagctactagctgtgtacagtagttccttccattgaagaagaagaagaattgtaggaaaaaa

SEQ ID NO: 1308 - DNA, 614 bp, Avena sativa
agtggcaaggcaagaatatgcatatgctagcctgatggctgctgtccgcctgtcggcttctgctcgtcgtccttcttgggtgcggggttgaagggtgcctgctcggcgcagtggaggttgaggccggacctctcccggccgaaccccatgaggtcgaggtagtactggtagtgcgagatgatgacgttcatggggtcgatgaagcccctgccgcagatggactcgccgtagaggaggttcatggtggcgcccaggcccgggagcctgtggccgagcgtgtcgttcttggtgggcttccagatgcccgtgaaggcctcgtgcgccgacggctgcttcttcttgatgggcgtcatccaccgccacatggccgccgcgaaggccagcgtcgcgttctgctccaggtactccgggtggctcagcaggtcctccttgatgccgtcgccggcggcgccgtagttgtagttccagtagacagggatggcgccgcggccgtagtactcgacgcccttgacgcaggggtactgcgtgtaggagtcgtcgcagtagccctggtcgggggccagctcgtggttgtagcagagcccccacgccagcggaccgccggatcccgggaa

SEQ ID NO: 1309 - DNA, 895 bp, Avena sativa
gggatcgccacgacacgaaccagcacgagccgtgcacttctccctgcgctgcgctgcccgccccgcccctactacaactacaccacccaactcgttctttccctggcggtcgtgggcgtcgatagaaccaaggattttgaggttcggcgagccgagtcggcgagtatggggatctcgaggcggttcctcctcgcggtggcgctgctgatcgccgccgtcgtggccggggcggcggccgaggagcaggcggcggtggacacggcggtgccggtggagatcacggggggcgtcaaggacgccgcggaggcggacgcgctcagggcggagctggcgcagctcagggagaagatctccgcgttagagtcaggcattgcagagagatcccaggacctgaagagcaaggatgatggcatcgcaaagctggagaagtacattgaggaaaagtcgcagaaaattactattctgcagagcgagatcacatccctccagaaaaaggggtctgtggctgctgaggagcaggctggcaaggccgttgcccgggctgttgagcttgagaagcagattgacattctcaataaggagatcgaagcactaagtagccagagaacaacacttgaggctagagctaccaaggcagagaagaaggtgcaagatttgaacttgaagcttgagtctcttcaaaaggcaagtggcgagcaaaagcggacgatccagaagacggaacgtgctcttaaagttgctgaggaggaattgatgaggctgcaaaatgaagcaacaactaagtcaaaactgctgacagaggtacatggagcatggttgccaccatggttagtgacatattctgctcgctatgcggaggtggtctcagggcactggaatgaacatggaaaacctg

SEQ ID NO: 1310 - DNA, 561 bp, Avena sativa
atgaaaatcatacgcacacagagtgcttgtcactcaggggtttatgttacactcccgtataaacacttgatcgtagtttacatgtcgcgaccagtattttcggtatttgtacagtccaatctcgagccagggtttcaggttcccattgtagtggatgacagatgcccgcctgatgtccttctcgttgacgtttggattgtacccgagacccaaaacatgccacgagtgatcgaggggaaatgtacgtttccaaaatgttacgaggcctgcagggagggtgcctagcttccacaatagcctatcttcgttcaggttctgccaggtgtggtagacgtcagtgatgttttgctttctccactcggacaaatcaaacatgttcatgccatatgcccaaccgcaagcttgtggatcaaaattgctggcgataagaggattggagaagttgaggtacttatcaaacctatggaaggtctctccacaggtctcaacagcaccattgaccttgcctttgagatctatcgaccaaagcgcacttaggtcctgctgcactacagtatcatc

SEQ ID NO: 1311 - DNA, 796 bp, Avena sativa
cacaggtacggaggcggcgccaactcgctcgccgccggctactccaagggcaccggcctcgccgccgagatcatcggcacgttcgtgcttgtgtacaccgtcttctccgccaccgaccccaagcgcagcgcccgtgactcgcacgtcccggtgctggctcccctcccaatcggcttcgccgtgttcatggtccacttggccaccatccccatcaccggcaccggtattaacccggccaggagcttgggagctgcggtcatctacaacaatgacaaggcctgggacgatcagtggatgttctgggtcggcccgatggtgggcgcggccatcgcggcgttctaccaccagtacatcctcagggccggtgccatcaaggccctcggctccttcaggagcaacgcctaagctatccatgtaagtgatatgcaagatgagtgccgaagcaatggcacttgagggaaggccgcggaaggaaaataaggggcgattttatctttcaagagtttgccgctgcaatggtcgtgtcgtatcttgtcttgtttcggcagctgcatgcgttcgtgtgtgttggcttcttcctccatgtaattcatcgatcacccgtccagtgtgttgcagtaattatgtccatgggatcgatcatccgtccaggagtattaattttagcatgtagtattcacgttcctattttatttagccatggtatatagtatgatctttgccttctttatagtagtatcttggtgctgcatgccgctctgaaatcgatcggatgccccaggtgatcatgaacaaa

SEQ ID NO: 1312 - DNA, 917 bp, Avena sativa
gatctcgtctcctctctcccccctctcctcctcgtcatcgtcgtccgccgtctgctcagttagcgttgaacaagaaaggcggcggggtaccagctagctagctcccgtagctagcagagatggcgcaggcggtggtgccggcgatgcagtgccagatgggcgcgctgggcaagccctccgtccgcgcgaggccggcggcggccgggggaagggtgtggggcgtcaggagggccgcccgcggcacggccgggttcaaggtgctggcgctcggccccgagaccaccggggtcgtgcagaggatggaccagctcctcaacatggacaccacgcccttcaccgacaagatcatcgccgagtacatctgggttggaggatctggaatcgacatcagaagcaaatcaaggacgatatcgaagccagtggaggacccttcggagctacccaaatggaactacgacggatccagcacagggcaagccccaggagaggacagtgaagtcatcctatacccacaggctatattcaaggacccattccgtggaggcaacaacatcatagttgtttgtgatacgtacacaccacaaggggagcccatccctactaacaagcgccacagggctgcacaaattttcagtgaccccaaggtttcttcacaagtgccatggttcggaatcgaacaggagtacactttgatgcagagagatgtgaactggcctcttggctggcctgttggtgggtaccctggcccccagggtccatactactgcgccgtgggatcagacaagtcatttggccgtgacatatcagatgctcactacaaggcatgcctttacgctggaatcgagatcagtggaaacaaacggggaggtcatgcctggtcagtgggagtaccaggttggacctagtgttggtattga

SEQ ID NO: 1313 - DNA, 1021 bp, Avena sativa
agattttgttggatcaccatgcagattgcaacaagattctaaaagatttctgttcacctctcatgattgctatctatactcgtgcagtgaaatgtgtgaacctactgctagaggctggtgccgacgtgaagggtatgcatggtatgatccccttgcaagttgccgtagcaactggactaactgacgtcttgaagcccctattggatgctggtgcagatcccaatgttcgaaatgattatggtcagttgccaatacaagtcgcggcatgtcttggtacacgcgaagatgttgagatcctgtttgaagttacttctcgtattccagctaaacatgcatggagcgttgatggaataattagttatgtaaagtcacagccaaagttggaggatctccctttgtctaaaatgtcaagagctaagttgaaagaagaaggacacaaagctttgcatgaaggggattacaatgctgcattagaattctatactatggctatggttgttgatcctgaacacgttgattcaaacttggtcggcactaggggttttgcccgtcttctactgggaaatggagagggtgctttaaacgatgcccatcattgcaggacaatgcgacctgactgtgcagattcatgctggctgcaggggtactcacatttgctactaaaggagtatgaaaaggcatgcgatgcatttcttgacggtctcaaattgaagccatgtttagttggaatcgagaaggggttaaggcaagctctgaacttattgaaagtgtctcgtgccgacaaggacggctcagaaaggctacgtcttgaaacacgtgttttccttccaagagagcaaagtctgagacatcaactcttttgacaaatagcctgctgcgtgcgtgcgcgctgaagagcgtggcgcttgatgccctgttgagtattgaactgtaggttcatttcttgtttgcggctgcaactctgaacattttgctggtcatgggtactgactgcgctgggtgctagaaagtagaaactgtt

SEQ ID NO: 1314 - DNA, 345 bp, Avena sativa
cagaccttatgtccatcttctctgatgacactggaaccaccagtggatccacagaacccgcagttggtttgcaaaaaggagcagcagctgcaaagaagggccatagtcttcaggatgccttgcagaaggatgccaccgcacggcatgtcggtgtgacaccaacagggaacaatcctaatcttttcaaggacttgctaggctagaatatacagcagctgttcagtgtgcacaagtggagttttctccccaagatgatcttatgggtgtgctggtgatgatcaagctgtttgatcagcacaggaacgagagggtatacttggttgagtcacaaggcacacaggggat

SEQ ID NO: 1315 - DNA, 972 bp, Avena sativa
aacaaattttgaattactcacatttaaaattagacatgtgaaagtcggtttaacataaacaaacaaattccgataagatgatagtttgtgtagccattgcctttgacaacaaaacgatttgaattcagcttttgagcatattgatttaatccatgtattgtagccgcattgctcgctctatgatcgatatgaacttgaggtcggtggagttgctggaaattgagcacagagaaaagctctcagtccactacaacatcaaaaggggttttattgttaataaggtgcgttctgtttcttctgcttggaggaatgtcattagagaaggagatgttatggagatcattgatggagagtgcggttccactctacctcagctggaagattaccttcttaaacttggttggggatgcttggacaaaagccttgctcaactctcgacaatagatttgaagatccgagtccatgatatcatcagacggacaagtaaagacatcgttgttgcgctggaatatgacttggtttgagtgaagttcgtctggccataagtgtcagctgtcatttttatgatagctatgttgattctcaagcatcatgatcagtgtaacatgctctcaataggctatcagaaactcctcttcgggcctatcttcacttatatttcttcagctcatacaaacagttcttgctctacagctctagcgattcaggaatcaaattcacaagcctctctactacatgatgtaacattcccataagcaaaatgtctagggatcaaattcatatagtagttttaagtacatgaccaaaactttggcacgtattgctaacatgtgtccgattttatttcaaaagcgtacttttgcttgtatgtactctttccgatccatattagttgacttagattcacctagataagatgtatctagttaagttttagtgctagatatatctgtatgtagacaaatgcatgtc

SEQ ID NO: 1316 - DNA, 393 bp, Avena sativa
gatatttagctgcacaacatcagaagcaatagtatttttctacacatgttttaaattttcttagaggtaaaataagcatatgtttcccagttctttgttaaacagagttgattcgtagttgttggaatgttttgttgagtctgtaagtaactttgtccgagtgatgttactgtcttcattaacactaggggagcccctgattttcatcaacgttgctctcctaggcatggccacatctgtacaggaagttttattggatgtccctccaattgctgaatgtgaagctaaatatgcattgttttactcaatatcgtcaacccaggcgcacccggcacgtccggtcaatctgctcccttctgcgatagatcagcgcctacatggattttcttgact

SEQ ID NO: 1317 - DNA, 405 bp, Avena sativa
tttttttttttcttttcttaaaaagaaaaacacacgagcattttgtatacgacctgacaggctcgagatttattcaggtataaggggaagcgaaattctgtagtctggacaacaagtatttacagtaagaactgcgagactatagaatgacaagagcggaaaaaggtggtaacgcctatgctgttcatcgtcaatcacaaaacgatggggttcacaacacacaacagtcctagaatcattacatcaaatcttctcccgtggtacgaaccgtattgctttgacctctgtaaatgacacccaccacgctccctagtatgttgctccggaaaagcagtgccattctcagatatcatcaccatgcgcgacatgctgctgctgttgctccttcttggctgtccaaaggca

SEQ ID NO: 1318 - DNA, 1060 bp, Avena sativa
gagatggttaaccaccagggtgtcacattattgccgagcaggtaagccaccatcctccaatgggtgtagctcatggtgagaacgatcattttacttatgacattacatcaaagttgaagacaaaattcttgggaaactcagtcgaagtttatccaattggaaggactagagtgacgcttaaaaaatctggcgtggtgttggaattggtaccaccgttgacaaaggtcaacaacttgatatttgggcgcacatgggtagactctcctggagagttggtcatgaacaatctgacaactggagacaaagctgtgctgtacttccagccatgtggctggtttggggctggccgatatgaggtggatgggtacgtatatagtgcagctgaagaaccaaaaatgatgataacaggaaaatggaacaagtccttgagttaccagccatgtgatcaagaaggtgatcctctgccaggaactgagctaaaggaggtctggaaagttgctgctactccaccgaatgacaagtaccagtatacatacttcgcacacaaattaaatagctttgatacggcgcccaagaagctcttgccttcagactccaggttaaggcctgacagatatgcccttgagaagggggacatgtcaaaatctggtgcacaaaagagcaggcttgaagaacaacaaagagctgaaaaaagaacacgggaaaccaaaggggagcaattcactccgaaatggttcaacatgacggacgaaatctcccctaccccatggggcgatctggaggtgtatgaatacaacggcaaatacgcggagcaccgggctgccatagacagctcgagcgtcgccgaggagacggacgtgagctctatcgagttcaacccatggcagtatggtgactcgtcttcccaatgatttcagagggtctgaagctacaacccatcttgtttatcatctgaagaacgcttccaggcctttgcattgtgctgatgatccatatctctgctccgcagcttcccgtgccttgtagtattatgacctttccccttttctcttcatgctct

SEQ ID NO: 1319 - DNA, 656 bp, Avena sativa
cagaaaatatatgttggttggcatcgagttcaactgataatatttcgacaaaacataagtacaaaaccatatactctggttattattcaactggtcgagttacttaccaaactaaacacgcgtgcactctcacttgggctctgatttccagtgtcaaaacctcactaccagcccgctctgcgatgccaagaaaaacaatctacagacagcaatcatctacagagccacgctctcggcggcggcctcgacgacggaccacggcagctcagcctcagcgccgctcctggcggcgttgggcacggagcagtcgttgcggatctgtccctgcttgccggtgagcacgttgatctgccccatcttcaccatggagaagacgaactgcttgaagaatgcggcctggtcgacggcgaacttggtgacggtgggcttggtcctggcgtcggtgtgcaggtcctggtcggaggtgaagagtccctggcggttgagaaggtcgacgtagtacttgttgtcgaacacgtttggggtgcggatgtcgttgttggtggtgttgtcggtgttgagcgccgggcaggtgagcttgagctgccccgcgaagaacttgttcatggtcacgtcgttctgcgggaagagccgctcctggaaggaggtgcagtgcg

SEQ ID NO: 1320 - DNA, 791 bp, Avena sativa
caaagacaaatgcctattggcttggtctgctagcccacctgcagtcttcgtccgtgcctagaaaggatatatcttgtattaaggaattgacgacactgtatgaaagtgccacaattgaggacttgtatcttgcatatgagcacttgaaagttgacgattcatctttatttgcctgcatcggtattgctggtgccgattctggtgaagacatgaatgatgatgagcctgatatggggcttcctggtatggttcccatgggaggccggggtctatcaactatgaccagaccgaccacatgagttgtacacttttcacgacccaactttctcaaggtatgtgatgccgtggagactacatatcaacctagctcctgaagagaggatccctatgtgaccctgtggagactacatatgatgactgtatactagcaagtactctagaccccattaatgcgttccttgggcattgcaacagcttggtatatcatttccccagagaatagagttgattgttgccaaagtcttgaaagccttccaaggaaggccttgttcagaattgtatagtaaagatcgattcgattctttcacattcctgagttgttgtaactagtattctgcagagtcatcgcagaagatagaatgacaataggatcgatgataagttactgagcaatggcaaagtagcatagggcatctgtaacacaatagtaataaacattgtactcttgtaacattcagttatttttgtctcggtgtaaacttgagttatttataatgaaaaggttcacaaaa

SEQ ID NO: 1321 - DNA, 712 bp, Avena sativa
aaggtaaaatagatgccactgtcatggaattgtccagattgatttttactctagtatttgagagcactcatctatggagtcacaaaggattatatgttgtaacgggaatccacaaacaagtaacaccaggcagctcagtattacaattcagcagggatgatgaggaggcgctttctagtgatggagtattagaccctagacgaacccagcttgcgctcaaagagtcggcgtagcagatagacttgaatgacgctggctgcgataagagcagccgactcgaatagcgccttgtggatggccctccggctcatgttctcgttcaatattgcttgccggtcggtttgggcttctagccagtgctgctcgaactgaatgttgtaaagtgcttcatctaactttgcaatttgttcgaataaaggtgcaaaatgttcatctttggcatgttgatcgaaatatgaataatggccaacatgcacatcaaagtctatggtttcgtgatacggggatttattggtgaagcagaagcgatggacacctctcttctgaactatgaaatcaaacttatcactggtcttgtcacgagaatcacggacttgagctccagtagaatctttaaccacgaggtccaccccatcctcactataatgccacggagtgtcagccttgatcaccacgaaggagacatggagagtatccccctcgtagtccacgt

SEQ ID NO: 1322 - DNA, 868 bp, Avena sativa
gagaacgctacacgttgcttatgccgattgaggggtcaaccctcacctgatttggtttcagagcaggttaatttgattctggatgaactgtcatatgttggtgaagagaaaaaagcaggcttcagtgagatctttcaaggaaaatgtctcaaagcaatgataattggatgtggcttggtgttctttcagcaggtcactggtcaaccaagtgtgttatattatgccgcgacaatctttcagagtgctggtttctctggagcatctgatgccacccgtgtgtcaattcttcttggcgtactgaagttgattatgactggagtagctgttcttgtggttgacaaacttggcagaagaccattactcattggtggtgttggtggaattgctgttgccctattcttgctgtcttcatactataccttcttttcgggtgcttcttatgtggctgtaatagcacttctactgtatgttggcagctaccagttatcatttggtccgattggttggcttatgatttcggaggttttcccgctgaaactgcgaggccgtggactgagtgttgctgttctagtgaacttcgcctccaatgccctggtcacttttgctttctccccactagaggacttgattggtactggggttctcttcgcttcgtttggggtgattgcggtggcgtctcttgcgttcatattctgcatcgtgcctgaaactaaagggctcaccctggaagaaattgaagccaaactgtagacccagctgtccgtaatgtcatagtaattagcatcttcttcattgctcttgttcagggattttgcaagcgtcatagtattacattaagaaaaccacttatttatatgtgagtaaatta

SEQ ID NO: 1323 - DNA, 913 bp, Avena sativa
tgagaaatataagtacggtataaatttcaaatataaatttgtatatagaacttaagctcctcagagcatcccgagtgccagtaaagagagcagacagtgatcatacatttggagagtacctgccttctcgggcttcttcatgtatgttttctcgttatggatatccgaatccatatcccagtagtctcttcctctttaacgtatataaggcgctcatattgttcacttcaaaatttgtgtgtgaatagtacaaaccgatgttgcaagttattcacagctctcaagacacccacactctacaacctacaaaacaaaatcggcattcccatcaagtattgggaattgtggtgcttggtttggctttgtgtcacatgcaagcggaagacagttactttgtcggtaccccaatctgctgcagagcagatttgatgtcatctgtagtgcaaccctggacttcgatgatatttgagctgtccagcgcgaccacgtcctgtagggggtatcgcctgaccgtgtggattctgtttgccggaatattgaagtcgcccttcaggattatggtcctgtggagaccccctagcagttcttcgtaatctgaatcaccactttcaccaacgaggactacaatatttggcaactctattccccagcgtataaacaagtaccttattgcctgagagcgagacgcgtgaataggagttacagacagtctggtagcactgtggttataaagcgcattacaacggagcgactggatcctcatcaacttcctcaactcctttagaggaggtagatgatttggattgaccactttaaatgcaagacaataggcagaagaatgttcagaatcttcaaatatcatttgcctttcaattcttccctttctttctaccactgaagtagcccatttcac

SEQ ID NO: 1324 - DNA, 637 bp, Avena sativa
atgagcgcctgaggcagtctatcttggagaaagttcaggctaaacagtttgaagcgctggcctctgttgaagacaagatcctccgaaaaatacgggataaagagtcagaagtgcagaacattaacaaaaggaactctgaacttgaggagcagattagacaaatggcaggtgaagttggtgcgtggcagcaaagggccaagtacaatgagagcatgatcagcgcactcaagtacaacctggagcaggtatgtgcccaccaaagcaaggacttcaaagaaggctgcggtgacagcgaggtagatgataccgcctcctgttgcaacggtggtgccgtcaatttgcaactgatgccgaaggagagtaaccattccaaggattcgacggcatgtagggtctgtaaatcaagtgaggcgtgcatgctcttgctgccctgccggcatctttgcctatgcaaagagtgcgagagcaagctgagcttctgccccttgtgccagtcctccaagatacttggtatggagatatatatgtaatgtacaatataatttatgtaccacttgaagtatctttcgagatactgctgtacttagacatcaatgtattgtcaaactgtagaacctattgatcactctgaagaaaa

SEQ ID NO: 1325 - DNA, 940 bp, Avena sativa
gccaagaccagaacagaaagatccggacggacgatacgattcgaccttcgcaccgcaccgccccgcatcgccatcggccggctcctcgcgacgacacctgcttccctcgtcctcagctccgccgccggaccacgtcgccgccgtccgagaggccattggattcgtggcgttggcgagcgtgctcgcgaggagagcagggactgcggcgactgttcgcgggatgagcttcggtggcgccagctccgtcgcggccggtgcgaagcggccgttcgagtacgggcggacgcatgtggtgaggcccaagggcgcgcacaaggccaccatcgtctggctccacggcctcggcgacaatggagccagctggtctcaactgttggaaactcttccccttcctaatataaaatggatttgcccaactgcacctacgaggcctgtggcaatttttggcggtttcccgtctactgcatggtttgacgttgctgatctttcagaagattctcctgatgatattgaggggctggattctgcggctgcacatgtcgcaaatttattgtctaccgagcctgccgacatcaagcttggtgttggtggctttagtatgggtgccgctactgcgctttactccgggacttgttttgcccatggaaaatatggaaatggcaatccatatcctgtgaacctaagcgtggctgttggtctcagtggctggctcccatgtgccaggtcattgaagaacaaaattgagagctcacaggaggctgcacagaaggcttcatcattacctcttctgctttgtcatggaaaagctgatgatgtagttctctacaagcatggagaaagatccgctgaggcactgaagtcaaccgggttttcaaatgtggcattcaagtcgtacagcagactcggacactatactgttccagaggagatggacgaagtt

SEQ ID NO: 1326 - DNA, 855 bp, Avena sativa
agcaactttgttgctcaggcgttaaggaaggagcctttgacggtttacggtgatggcaagcagaccaggagtttccaatatgtttctgatctggtaaatcatctatggatgaaataattatagcaatgctatctgaaaatggcttggtagaatagcagtaatcagcctcccagtggctcagaacttttacataacttacaaacaagaactcttgtaaaaaaagggactcggccatctggcattacatgtcatttgcattccttgtacttattccttgtcttcttccaggttgaggggttgatgaagctgatggaaggggagcatattggaccattcaacttgggtaaccctggtgagttcaccatgctggagctggccaaggttgtccaggacaccatcgacccaaatgcgcggattgagttccgtgagaacactcaggacgacccgcacaagcgcaagccagacatcaccaaagccaaggagctcctcgggtgggagccgaagatccccctccgtgacggtcttcccctcatggtcactgacttccgcaagcggatcttcggcgaccaagatggtgacggcaccaccagtggaggccaataagcgtagagcggaatacaatacttcaaaattttggtggcctgcttctagcttcttggttaatctccttactgacaaagctgtggccacataagtccttgtgggttttactaaataccttggttgttggtgtaatgtcattcttttcttgtcattttctgtcggtctcagctatacggatattcaagttcaattgtcggtgataaacctggatcttctaattctctgttgggatgatagcatatatggtataaa

SEQ ID NO: 1327 - DNA, 710 bp, Avena sativa
cgacgatcacgtcgaagacatggaggatgattatgatatggatgatcctgctgatgacatgggagacggcccccatgagcgaggcataagggactccgattcggaggatgaagagtacggacgatcgaatgataagatcccagatacttcggcagcggatgcaagaaaaggaaaagacattcaaggaataccatgggagaggctagctatcacccgtgaaaaatacaggcagaccagattagagcagtacaagaactatgaaaacattcctaattctggagaagcagcagctaaggaatgtaaaccgactgagaaaggcggaatgttttatgaattcagacaaaatactagatcagtaaaatcaactatcctacattttcagctgagaaatttagtatgggctacatccaagcatgacgtcttcctaatgtcacattactcagtacgtcactggtcagcattgagtggtgtggatactgaactcatgaatgtccaaggtcacgtggcaccaagggagaagcaccctggaagtctattagagggtttttctcagactcaagttagtaccttggcagtcaaggacaatttactggtagctggcggttttcaaggagagctaatatgcaagcaccttgaccgagaaggataagcttttgctgtcggacacatatgatgataatgctattactaatgcagttgagatattcaat

SEQ ID NO: 1328 - DNA, 525 bp, Avena sativa
ttgtaaaatgcagccaggactcgggatacccattgcttggaatcgtgataagctgtatatatatatatattagcaggatcatatccctactccacatatacatcagtgtatagtggtacaacaaaaaatctgtatgccaagcatcatatgctggtaaataggacgaggagacagggggttagggagtgtgatcttcaacaaaccaaagaactgcagcaggaagcttaagggtgtggttacaatggtgggtagaagtatgatgatacagagaagccaaggaagaggaggcctccaatggtggctactgtgccctgagatatcctcgacgccagcatgctgccacccaccactgcgaatgacgtgcagatggtgtgccccaacgttgctcctacagcaacacccacagcattcttgtgcgtagccagcgcgatcgtggctatctgacttcggtcaccccactcagccaggaaggtcaacacaaataaagaaaaactaaccaagaaataggagtacagaacatcccgg

SEQ ID NO: 1329 - DNA, 1009 bp, Avena sativa
tcctggtatatctgaaactgctgctatttttgctggtgttgatgtcaccaaagagcctattcctgtgttgccgactgtgcactataatatgggagggatcccgacaaattatcatgggcaggtggtggatatcaagggtgataacccagacaatgttattcctggtctgttggctgctggggaagcagcttgtgcatctgtccatggcgcaaaccgtctcggtgcaaattcacttctcgacattgttgtatttgggagggcctgtgcaaatagggttgctgagatttctaagccaggagagacacagaaacctcttgaaaaagatgcggggaggaagactattgattggttggagaagctgagaaattcaaatggatcactgcctacttcgaaggtccgcctcaacatgcaacgtattatgcaaaataatgctgcagtatttcgtacacaggaaactcttgaggaaggttgtgagctgattagtaaagtacaggaaagtttccatgatgtcaagatcagtgacagaagtctcatatggaattcggacttgatagagaccatagaattagaaaatctgctaataaatgcatgcataaccatgtattcagctgaggctcgccaagaaagcaggggcgctcacgctcgcgaagatttccagacaagagatgatgagaagtggatgaagcacacagtagggtactgggaagacgaaaaggttagactagactacaggccagttcacatgaataccttggatgacgaagtccagtcttttccgccaaaagcacgtgtttactaatctggacgtggctgccagtgctttggttgtttgagaagggtatagcttacagtgtggtgtttcccgagttgcaataaatcagggacctacaattctcccaaagcttaggaattgtaatttcgtctccatagccaatatgctttccctgtctcctgtgaacttactgaaagcttctgatggttatattttggtccygygtcacccttcagt

SEQ ID NO: 1330 - DNA, 863 bp, Avena sativa
gcatgagaagtcatgctacacagctgttttgaaaggccacatcgcactagatgctgctgtgtttcctaatgggacgacagggcatgctcttgacattcttgcaagaaccccactgtggaaaaatggtcttgactaccggcatggcacaggtcatggaatcggatcttatttgaatgttcatgaaggccctcatctaattagcttcagaccttctgctcgaaatgtaccgctgcaagcatcaatgactgtaaccgacgagcctggttattatgaagatggaaacttcggtataaggttggagaatgttcttatagtcaaagaggccaatactaaatttaattttgcagcgaagggtttcttatcatttgaacatataacatgggctccataccagacaaaactgataaacattgccttgatgacccctgcggagatcgaatgggtaaacttgtaccactctgactgccggaaaatcttggagtcttatctgaatgatcaagagaaggaatggctgcggagggccaccgaacccatcactatgagcagttaagccagacacttcattggttaccgctgttgtgcggctgctccactatttcatcgactgcgatcagtgtgaatagcagcaagtgaataccactcattttttacgtatttcgtgcttccaagtagagtgtgaggctggaaataaaagtgaggatactgaatgcttccttcccattaaagttcttgccgagaggggaaacggtaaaatgatacttccctccgtccacaaataagtgtatttctaatcttgtctttcaagaacacgcacggagtgctgcgtgtcttttatattaagatagagaatagttttaacaaaa

SEQ ID NO: 1331 - DNA, 536 bp, Avena sativa
gggatcgacagagtgcttctaaagaccaagtctgccgagctgaagacaactggtggaatcttgctgccttcgactgctcagtctaaacctcagagtggtgaggtggtcgctattggagagggaagaatcattggggatagcaaagtggaagtcagcatccagattggagctcaggttgtatattcgaagtatgctggaacagaggtggagttgaatgactccaaccatctaattctaaaagaggacgatatcattggtattctggagacagatgatgcgaaagacatgaagcctcttagtgaccgtgttcttatcaaggtagctgtagctgaagacaaaacagctggtggtctgctgcttaccgatagtgttaaggagaagccatctattggaacggtcgtcgctgttggtccaggccatctggacgaggaaggcaagagggtcccgctgccggtctctgcaggcagctccgttctgtactccaagtacgccggcgctgagttcaagggtgccgacggcacaaactacattgtgtt

SEQ ID NO: 1332 - DNA, 467 bp, Avena sativa
catgaatgcagtgctattggctcatagttgacaagaaatttatttcatctgcatacaccgcatgttctaatggcaactcttgtgcttggagacagcaatacatatctatcgtgtaccgacattcgtctgatctaaatttgtttctgcatacatgaccctgttctaatggcatggtttttctactgtctactgacatttgtctgatcatgattttgtgcagttcggtatcttggggacgatgggaggaggcaatgacaaccatgacgagagggacaaggggctcatgtccaacctgatgcaaggtgttgctggtggccatgggtacccacccggtggccatgggtacccgccgcagcagggataccctccccagcaagggtacccgccgcagcaagggtacccaccgcagcagggataccctcccagcaaggatacccgctcagggataccctccgcagcaaggctac

SEQ ID NO: 1333 - DNA, 713 bp, Avena sativa
cccgggatgacggcgtggcgcaggggcacggaggaagaaattcccgtcgagaaatcaaccgaaagcttctgagcgagcgagcgagcgaacgtggtttggattcgatggcgggggaggcgaggccggacgcgcagctcttccagctcctctccgaccttctccagcaggtggagtcgatgagcaatcaggaagaggtagaactgagagcaaaaatcgaggcacttggcctagaagtgacaaaggttccagagccgacacctaagcaacttgatgagttagagatagccgcagagctggacagactgtcggcaaggatcgagaacgtcgacaagatgatatcctctgccatggcctctgatccagagatgaaatcgcttctgagcagcacttccaatatctggatgcccgtcatcaccgcatccgccgatgaaaggcgagggtttgcgggaacaagtggcgaccaggaagagcaggggaaatcgaagtaaatagcttggactgaaactgcattactgcattttgtgtctgcattctgttacatgacccttgcatgagtatatcaccatcgcagctatgtactatacaatattatttttttgtgcaaaactgggaataaacagacatgctgttcatgtatactggagcacgttaatttgcgagatctttgatcgtaataaaatctgtggatccttgtttggcttcttcttaccaaa

SEQ ID NO: 1334 - DNA, 1015 bp, Avena sativa
gtaacatatcttgctccaaaattccatgcttacgtctgacagatgagctgcctcagtattgaagcagaagtacatacacaggttttatagcctagaagatagtactggactatcagccactcgtctaacaagttggtctcaatttggcttaatacagcagctgccactagtgcaccaaaaatccttaaactggcaagttacagagaatagtcttcagcgttattcactcaggattgaccttttgcttcttagagtgctccttgtttttcttggcgtcacggcgctcccgcttcagacccttgatgtcacttgtcaaggccaattttgaaacctcttggtctggaatgtagaccctgcccaacttgccatcaattggattatccgagacatttttcaccttcttagcatgaccaggagccttcatagcttccttctgcaaactgtcagctggacgtcggttccgcctaactaccaggtccatcgagggcccaacttcaaccagctccattctaggaatagatgtgcctgacctttttagacggagagcacagtgcatcatgtagacagtagtaggggaaattgctgtgcacacgaatatccgatctacaccaacaaggttcagattctccaccacctctcctttgaaatgatcaagcagcatttccttcaagtgcttcagtccttcaacgctctcgaagtgttccccaatgaaggcaaagaaaggctttgtcccaagcttaggtgccaaattcttattatacgcataggattctatggatttgtagttctcaactcctacttcaacaaggtcatatatgtggtgatcgtaagtccttcccaaaacaaggttgttaggcctcttctttgagtgagaaccatacacgaggaggctgcagtcagatttaagggagaagaactccagggaagtttcaccccgctctcaaacggcctgatgttgttattcttcttggtgaacttcacagcatggtcacgcttcaggtggaaaagatccgat

SEQ ID NO: 1335 - DNA, 684 bp, Avena sativa
  modified_base (599)..(599): a, c, t, g, unknown or other
gcagtatgaagtattgcagtggtgcatatgtagattggaagcatggttcgcaacggacgttgacaatatatctttgaaaaactgggatcaggaacatgttcttactggtggacatgggcttatggtgaatggctatgatcctgttatcaaagctctctctcgagatcttgatatccacctgaaccacagggttaccaaaatcatccagcggtataataaagtcattgtatgtgtggaagacgggacaagctttgttgcagatgctgctataataactgtccctctcggtgtactcaaggaaaacatcatcaagtttgaacctgaactcccagactggaaactatcagcgatcgctgatcttggtgttggcctcgagaacaagatagccctccggttcgacacaatattttggcccaatgtagaagtactgggtagggttgcccaaacatcaaatgcctgtggttactttcttaaccttcacaaagctacaggacatccagtccttgtatgcatggtggccggcagattcgcctatgaaatggagaagctatcagacgaagaatcggttaactttgtcatgtcacagctcaggaaaatgnttccgggccactgaaccagttcagtatttggtctcacggtggggaactgacccaaattctctcggttcctactcatgtgacttgg

SEQ ID NO: 1336 - DNA, 791 bp, Avena sativa
cgatctctctctgccctctcatgcacgagaggtcgtcggggccgcacgtttcccctcctccttgtacctgccgctcctgctcctctcgctgtccctgctcccgaggccgtcgaactgctggtggtgtcgcgtggaggacgacgcgtgctccctgccgatggggttccgggcgacggactaaacgaaaccggaaaccaaaaccggaaaaggaaacgggaaataacaaagtaagaaaaaaaggacaaagttacaagactatgggtatgcaagttgtcccgggaaaagggcatcaatggaggatttctatgagacaagagtcgatgatgttgatggagagactgttgggctgtttggggtgtttgatggtcatggtggagctcgagcagctgaatatgtgaagaaacaccttttcagcaatttaatcaagcatccaaaattcatgatagatacaaagtctgccattgctgaaacattcaaccatactgattcggagtttctgaaagctgatagtagccactccagagatgctggctcaactgcctcaacagctattcttgttggtggtcgcttggtggttgcaaatgttggtgattctagagctgttgtctctaaaggagggaaggcaattgcggtttcaagggatcacaaacctgaccagacagatgagagacagcgaattgaggaagctggaggctttgtgatgtgggctgggacgtggcgtgtcggtggtgttcttgctgtttcgcgagcatttggtgataaacttttaaagcagtatgttgtcgctgatc

SEQ ID NO: 1337 - DNA, 899 bp, Avena sativa
acgtcagctgcaattcaggcccttgacatcatttaaaaagctctatcctgggcaccgcaggaaagatgtagataactgtatcaacaaagctgctaatttcatagagagtattcaaagaagtgacggttcatggtatggctcttgggctgtttgtttcacctatggcacatggtttggagtgaaggcattagttgctgctggtaggacgttcaagagtagtcctgcaatcaggaaggcgtgtgaatttctgatgtcaaaagagcttcctttcggtggctggggagaaagttatttgtcatgtcaagatcaggtttacaccaatcttgaaggcaagcatgctcatgcagtcaacactggctgggccatgctgaccctaattgacgcaggacaggctgagagagatccaacacctctgcatcgagcagcgaaggttttgatcaacttacaatccgaggatggggaatttgctcaacaagagatcatgggagtcttcaacaagaactgcatgatcagttactcccagtacagggacatcttccctgtgtgggcactcggagagtaccgttgccgagtcttggctgtgggcaagtagtatcacatttattgggccagagcatatggctatgtgcatccgatctttgttgttctgtttggttacggtgtacatgctggaacagtgtatttttcgtaataatgttatatatgttcaggttagatctggtagctgtatggcatgaccttttcccctttgatggagaagtagaggaataaattagtttgtacatccgaatctggtgaaggttgctgcatctgaaggagtatgcatattgcctgtgaatggcctcggttttctcagggcagtttgtgtctaattaatccaggaaagtttgttcatctga

SEQ ID NO: 1338 - DNA, 746 bp, Avena sativa
  modified_base (350)..(350): a, c, t, g, unknown or other
cccaggaccgtcaccaacgacgagctctccgccatgttcgccgaacacggcaccgtcgtgcgagccgaggttatgtttgacaagtacagtggtcggagcagacgattcgggtttgtcacgatgagcactcccgaggaggccaatgctgccatcgagagcctgaatgatactgaggttggaggtagaaaaattaaagtgaatgtgactgagagcttcttaccaaacatcgatgtgtctgcaccagaaccagagcctgcgtttgtcgacagccagtacaaggtttatgttggcaatctcgcaaagacagtgacgacggaagtgctcaagaacttcttctctgaaaagggggngtcctcagtgccacagtatcccgagttccgggaactccaaagtccaaggggtttggtttgtcacgttttcatcggacgaagaagttgaagctgcagtttctactttcaacaacgcagaattggaaggacaaaccatccgtgtgaacaaagcgtagacgtagcagatatttcacactggaggcaaggggagaatatctcggcggcacacctgtagacggaggggaactccgagactagattctgtaacaaagtttaaaaggcctttgatgcaatttcactctggcactaaacgattttttgtataataccagcatatggaagaattttgattgtcaaacccattgttcatatgaagcagccgttgtttaccatacatttctactgattgcactcagg

SEQ ID NO: 1339 - DNA, 926 bp, Avena sativa
ccgcctcctctcctccagaacctcggccatacacgctgcccccttcctccccgtgcgcaccactctttccttcgccgcttccgcgccccgccactggcgcattctcgcctccgccgaggaggcgcccgctccggtggaggaggcagcagaggaggtggtggaggaggccgcggaggaggtggtggaggaggccgcggttcccgagcctgttgaggttcagcttgccgccgcgagcgctgggaaggacgccgacatcttcgccgttatcatgattgggtcgagacagtacattgtgatgcccggtcggtatatatacacgcagaggctgaaagacgccaatgtcaatgatcagatcatattaaacaaggtactactagtgtcaacgagagacaaagcttacattggtatgccagtggtgaccaatgctgctgttcatgcagtggttgaagaacagggactggacgataaagtgatcatctttaagttcaagaagaagaagaaataccagaggaaagctggtcacagacagccaaacacaaggttaagaattaccggcataagtggatatgaggaatatcctgctgacccaatacttcaggttccagcttaagtgtaattgtaagttgtttagttacaaacggctggtagtacattagaatgcaagagccctccccctacccccactttcgttaagttgatgcattcagaatgctgccagacatccagcagttccatcctttgtttattccacaagctctctttttcgaccaactgtattatcttgattgtgcctaaagacaggggaaagatttttactacaatgtggagatgttatcgttggattgtgcaattctcacggttgttgagacccaaactatataccattgctaatactactacctccttttgaaaaaaaaagaaaaaaa

SEQ ID NO: 1340 - DNA, 926 bp, Avena sativa
gtgcgccgtcattttacaccatcttctgctaaagccagcggggcatcattttctgtggaaggtcaaaatcctggatctgaggactacaatgttaagctaagaatcaagtcattcaccatcccggaattgttcattgagatccctgaaaatgctacagttggttcactgaagagaactgtaatggacgttgttactagtataattgaaggtggcctccgtgttggtgttcttcttgaaggaaagaacattcaagatgataacaggacacttcgtcaagctagaattagccaaggagataatctagataacatagactttacacttgaatgtgaagctgggcaatactcttcccctggcatcagaatacctgagggaatggattttcttggtgcagatgccatgaaaccattagccatgataaagtgtgaagagcctttttctgaaactaaggccagttataaccaccagcattctcttgcggaaatgaccatgcaagaaacatcaacaagctcacaggccatcgtccctgttgcctctccaaaatcagaggctctagccattgtgcctgtttgtaagtcaaagcggcccgcaatggggcaaagacgcataaggaggcccttttctttgcctgaggtggaggcactagtggacgccgttgaacagctcggaacagggaggtggagagacgtcaaaatgctcgggtttgacaacactgatcataggacctacgttgaccttaaggacaagtggaaaaccctggtgcacaccgcgagcatatccccgcagcagaggcggggcgagccggtgccgcaggggctgctcgaccgcgtgctggtggcgcaggcttactggtcccagcagcagcagctctcaggcaaagcttcaggacagggctcctccagctgctgaaaggaaagctgatactg

SEQ ID NO: 1341 - DNA, 228 bp, Avena sativa
tacttcctactaccttgcttctttttgtggcgatgtgcctgcctactttccatgtatgacatggttccctttgttttttgttgccctagtgctagactgctactgctgtaggtgatggtggatcatatagtaattatatataatgacctttgtgttatactgctatatagatgccaatctgtagtggggaaaataattgagtaagcttaacaacgcacctcttatcca

SEQ ID NO: 1342 - DNA, 644 bp, Avena sativa
aacttatcataccgttgggtatgctcttactagaggcggcggatgaggcctccttttcttgcatgggtggaccttcttttttggttttttatggaaaggcttttctatttgacttttgacaacctctatcaaaagaaaaaggaccacaggagacaggacactttttttttcgggtgtcatgacacacgaactaattatttgacatggaaatctggaattgcacacactaacatgtggaaataacaacagaccaacgactcgttgacttcacgtgtccgtgagccggtgaccgcttcctaaatcggccaaacgacgcgtccacattccggccgtagcacaagctaagcggcgtcggcctgcaggtggctgccggcgacgtcgatgacgaagcggtacctgacgtcgttcctctcgagccgctcgatggcggtgttgacgtagtccatcttgacgacctcgacgtccgcggtgatgccgtgcttccccgcgaagtccagcatggcctggcagtcggcgacgctgccggtgccgttcccggcgaggcgcttgccgcccgcgatgatggcgaaggccggcagctccatgggcttgctcggcgcgcccaccaccaccatctgcccccatccggctttagcaggtccagc

SEQ ID NO: 1343 - DNA, 761 bp, Avena sativa
ccgggatgcgatagacagagacgccgcaccgcgatacataaatcgacgcccctcgcctcggtgagaaaccccaccctagatcaaacaaatccctcagaaatccccgaacccgagagcgagacagagtcaatcagccgccgagacgagatgtccgccatggagaccgacgcccccgacgtgccggcgccggccgcgcctgcccccgccgccgagggctcctccgccgcagggccctccgcccgcaagcccaccaagcgcttcgagattaagaagtggaacgccgtcgcgctctgggcatgggatatcgtcgtcgacaactgcgccatctgccgcaaccacatcatggatctatgcatcgagtgccaggcgaaccaggccagcgccaccagcgaggagtgcactgtcgcctggggtgtctgtaatcatgcttttcacttccactgcatcagcaggtggctcaagactcgccaagtgtgcccattagacaacagcgaatgggagttccagaaatatggccactagaccaacctctgctgctgctgggtggccttcttgcctactgccgcactggaagctcaggcctatcttcttatgtcgaacatcacaatcttcagctactttagaacatttgcatctacagtcatccttatcaactttatgcgcttctgtgtgatgattttgtataaaggatctgtgtattcgcacatctaatgctatcgtattaattgatttccccatttgcctatgctgtggtaccaaaa

SEQ ID NO: 1344 - DNA, 1041 bp, Avena sativa
tgcgagtcgacgggttacgaaacctgggatgcgcaaggaagctgacgattcctcccgcgtccagaagccgtgcttcgccatcgaaacccccttctacgccgccgccagaggattttcttctgaaactcttattccaaggaaacatgatgtaggtttggctgaggtcccagcaactacggctgctttgaagaatcccagtgtgaaaattgtctacgacgagcataaccatcagaggtacctgcctggtgaccccagcaagcgtgcctttgcctactttgtgttgagtggtgggagatttgtctacgcatccttgttgcgtttgctcgtcttaaagtttgtcctgagtatgtcagcaagtaaggatgttcttgccctcgcttcacttgaggttgatctgtcaagtattgagcccggtaccactgtgactgtgaagtggcggggcaagccagtttttatcaggcgcaggacagatgatgatgtgaagctggccaacagtgttgatgttgcatctctccgtgatccacaggaggatgcagagcgtgtcaagaaccctgagtggcttgttgtcattggtgtctgcactcacttgggctgcattccccttcccaactctggggacttcggtggctggttctgcccatgccatggttcacactatgacatctcaggtcgaatcaggaagggcccagcaccctacaacctggaggtcccgacctacagtttcctggaagataacaaaatgcttattggctaagagcactgaccatagaattaatcttatggtgctgtgctgccattttgtgttggtttgacaatacaccttttggttgctggagtatacctttgatggactattatctatctgagtgcagtgctcttacttgcacccggtagtaaagaataatcagctgctactttggtactgttgattaatttacagtacaaaaatgggcctctgttttcagagctctgtaggaacgatgatattgtaatatcttagctgccactgtgaaggttatgtatgattgctttcttacaaaa

SEQ ID NO: 1345 - DNA, 629 bp, Avena sativa
tagatcgcgattaattaactttttttactgatacttgaacatgattattcaacttgctacactgatgatggtgttcactaaggatactgcaaatgggttaatcaacttattacaaataattatgaatagtgctctctaaacactaatggtgacactgctactgcaaatgggttattcgacttattacaaatatgaatagtgctctcgaaacgctaatggtgacactgatactgcaaatggattattcgacttattacaaatatgaatggtgacactgctagaagaataccacagagcaacaagtaatggcgcggcgaataatcaggcttgacgcttcctcctgttcattcgccactgtctcatgacgaactgagcagcttccttcagagacgccttccgttcttctctgaagttccacagctctccaactggatacctggcgccagcgttatactcgttaatttcatgcagcgcctttgtcaccaatgtgtatatttcttcaccatgctcttcctttaatccttgaagcttcgcgtcatcagcatcgattatttccttctccttcccatcaaccatgacaaccctaaatgggtgccagtctggatttttaatttcagcytcccacttcg

SEQ ID NO: 1346 - DNA, 815 bp, Avena sativa
tcccgggatccgagctcggcagcgacacgactcgggggcgaactcgacggcgacccggaggcgaagtcgactgctgccacggtgacggcgctgcctccgcttctcccgcgccctcccccacgacggaggcccctcgccggaagctagaagaggtgtagtgttatctggcttcaagccttcaacagagttgccgtgtaaagatttttttttttatcttccattttccataattggaaggttcagaatcttaaaacatgagctctcatcgtgtgaagtggaatgaggacaatctttatgagattgaatcaaacaagccagtgaggcaaaagataactgagcccaagacaccgtatcaccctatgatagatgatgatgagtcactatcaccaacacgccctttcgacaagtgtctagatgagactgttaacgcggaagctattttaactgctttaaatggtgtggcttcttcaagtaaaaatgattcaaaggatgatgactgggcaacctcagatgatgatgcagatgccatggaacatgatgatgactcggaaggtgacaaaggatcggtgagcttcaaggagcatcgccgtgttcactatgatgaattccgcaaggttaaggaactaatgcgctctggatctctggtcgaagaaggggcaaacaaccaaaacaagaccgcagaagaaaaggctaagagcgaatcgtcgtcacctcaagcatgagcaacaaagtgaatttcatggtcactaagctagggaagcgtgcagttggcgcccactatgtattgtttgatccttgtttttcatatcagatca

SEQ ID NO: 1347 - DNA, 698 bp, Avena sativa
  modified_base (12)..(12): a, c, t, g, unknown or other
tttttttttttntttttttttttaccatgaatcaaatttgcaacctgacagattacatatctcagaacccagaaatgaatgtacaggaagaaaaagaaaatgataatgggacacacacgaaaactcttacaaaagtttgtggtagatactttttgacacttttaacgctactagtagtaccaatcttggcatgacgaaaactggaacgtgcagcatatgattcagtactggtcaaatatagcagcccactgaacgtattacgagtctacaaggtacataatcttgatccaacaaataaatccggcaatacagctcaatggtaccccacaatctcaaacatagtagcttacatggcaagaacttgagaaaagaacagccagaatagagtggacagacccagacaactccgagcttagaagcacttcctgtgaacaatcgctgggcctgactcatcatactcgccctttgagatccacatctgttggaaggtgctaagggaggcaaggatggaccctccgatccagacactatacttcctctcgggcggtgccaccaccttaatcttcatgctgcttggtgcaagggcagtgatttccttgctcatgcggtcagcaataccagggaacatggttgagccaccactgagcacaatgttaccgtacaggtccttcctgatatccacatcacacttcatgata

SEQ ID NO: 1348 - DNA, 910 bp, Avena sativa
tggaggagggatccacagaacctcccttctcagtaccagagcagcacaatcttcgagaatgcgacgccggacgaagtaagggatttctttggggacgatgagttccgcatttccaacaagtgggatgatatgcttatctcttacaacacgttggaggagtgtcagacaaccgggacgatgaaagtgcattgggttcgcaagttccccttcttctgcagcgacagggagtacatcattgctcgccggatatggaaactgggaggcgcgtactactgcgttacaaagggtgtgccatgttcatccatcccgcgacgcagcaaaccacgtagagtagatttgtattactcaagctggtgcatccgtgcagtggagtcaagacgagggaatggtggatcgactgcctgcgagattctcttgttccaccatgaggatatgggcatcccgaacgagattgcaaagatcggtatccggcagggcatgtggggatgcgtgaagagaattgagcctggactccgtgcctatcagaaagccagggctgcaggggagccaccttcaaagagcgccttgatggcacggatcaacaccaaggttggcgacaattttgtccgaggattggaatccaacagcgaccagtcagatatcatggaagccgaagagaagcccgtgaagaaccgcgtagcgaggttcctcgtgctcggcggggctgtggctctggcctgtaccctcgaccagggcctcctgacaaaggccgtcatctttggcgtcgcgcggaattcgtggggcagaggacaggttgtagttatctgtgatctttctcaggatcatatgagccatatttgcgtggagagaaatagacgatctggctaacctgtagcacgtgacatttaacggcagatgaagggcattggtg

SEQ ID NO: 1349 - DNA, 958 bp, Avena sativa
tttgatataaaactcctttttagtgatgtataatttttacatcacctctaccttttctggatgctctataatacatcatctattagagatgctgaaaaaaactataaaatggctgttcaatccgtggaccattgtataccacaattgggccgctacatagggcctaggcggccttccccccagtgggccgtacaaatgctcccattgcaccctgaaagccattagctgtaacatgaccatcagcgatttggagactcagcgatttggagaccccctattaccccagccaagattaagtagtaacataaagaatttctacagttacaactttcttatagtactgtactaataagtaataagtatataacagatcaagacgtatgtgggtgatatacttccgatttatttcatcagttatctctaattctccgtggatacataagagacatgtttactcgggaccaccgtggaggcttccacgtgagacttcaatcaaagcttgggaacaattcttcttccatgggaaggtctactgggcaggttcaaatctttccactggggatcatcaaccttggagaaatatttttccactaccccgtcgtgcacctgaccaagacttggtggcatccactttgggtttcgatctttgtctactagtatagccctgcatccctcaaagaagtccctactgaagtcaccacgcatcacatggcaaaccattctatattctcgccgcaagcattcgccaacagtttgcagtctcccttctcttatcgatgcaagagagattttcagactagtaggagaagcctttcgcaacgatttaattgcaacagtaacccattcatcagccacacttggagcttcttgttcaagagcagatataatctcttcaactgttcttttggagaagcatttgttgatgatttccaacctattcaaagcactactttctttc

SEQ ID NO: 1350 - DNA, 712 bp, Avena sativa
ttttttttcttcatcataaaaaaataatttgtatccattgaagcgtatgtgattaatctgcggtattcagggcagaaaaagagaaagcttggacacaatatacattgctaaaaaggctaccaccaaacccacaaaaagaggtgatggaatttattcccaggttctgtttccacttgacaaagttaacacaggaagaatacacaatggatgagtttccacaaagaacacttagcaccgctgcaccgaagcataaaacgcggacgatgttcaggcgacaccatcaacaagggtaccataagctagagcacgagttcagctggagctaggggaatgggtaggcatccccttgcagcagcagcaccttgtatgttcagcaacaacacttcactcctcatcatcgtcatcgtcgtcctccttcttgagcttagtggttcctccgactttgtcgatgggcagcttcatgttcccaaagggagtatcgacatcgatcttgcccttgatggtgtaccctgtgcccctccccctgatcatgtcccagacggccgagccgagatccttgggcctgaacttgaaggggatctgcatcttggtgatcccctgcttgtcgatcttggtggagtcggtgagctcggcgttgacgatgctgtcgtcgccgagccacatctcgtactggagcaggttgagtcccaggtcgaagtcgttcttgttctcg

SEQ ID NO: 1351 - DNA, 775 bp, Avena sativa
tcgcaagacaaggagaaaaccttttccagcaaatgcatatcacaataagacattcatatccacatcacataaaagttatactttgttggtatattaactccaatcctgaattttcattgactgcaactctcaattttatatgttctgtctacaaagaaatgcagtccacaaggacacaaacattattaagtttgggggaaaaacaatgtatagttctgttctagctgcatgaatgaaatcctctctagttttccatataagctctcttgactgagttccgttcggggtccaaaactttcaaagctaaaccatgaccacggcactatcttcagcaaccgccttctcttgtctaccgacgcggtgcaggtttccttccaccacctggagcttgctcttcctcatcggagtcgacatctccatagacccacagccccaccctgtccttctttgctttctcctggaactcttccaggttcttgagggctgtcttcctctccatggtgtcccatctcttgcttctttcaagacgagcaagcccttcctcgagcatggcagcatttatgctggattctgtctctgggtcaaccagagtcacaatgagaatagttccagtgccctgtccccttgattttccaccagaagtgtcccgttcttcgatcattgcttggtactgttttgaactgctaagaaggcattgactaagatactcagctgcttcctggccacaatcatcttccaaaccaggcacttttatgaaggcaaggctgcacagctg

SEQ ID NO: 1352 - DNA, 983 bp, Avena sativa
agttgttatttggtttcattgttcatgtggttggtctgatactaattttgtttattttgcgtgcattttggaagttgacaatctaatactgatgggcaatttaatccttgtgctgattttaaatttctatgcactctcctgcaactgcaagtacctgttatggcgagtctgagggccagcatagtgttcttgagcacaccaaacaggctttgtcatgtttgaatatgccaatgtggtccaagttattttgatgaattaggaagtggtgtggtgtctgtctgcatggagtcgtatagtctatgagttggagttgtcagcatggctgcagggggtgctgtttatgttttgtaaggtcagaaattatctggcattgctggaagcccagcctatgtggcacctgaggtgctgtcagggagctattctgagaaagtagacatatggggagctggagtgctactccatgtactactgcttggttcacttccatttcaagggggctgtttagatgatgtctttgaagctataaagacagttgagcttgatttccacagtggtccatgggaatcaatgtcagtttatggacgggatcttattagtcgaatgttggatcgagatgtctcctctaggataaccgttgatgaagttcttagtcacccatgggtgttgttctacactgaatgtaccctgaaggcagtaactcctaatgtaagtgtcactaacaaggttgtagcacccaaacttccatgggaaagaattaggtcacactgtgagtcgtcagcttcagattcgtcaagccagaggtctgaggatcaggatgagtgtggcatagttgatgcacttacagcagcaataacacatgttagaatatcagagccgaaaaggactcggctctgcagcccggccattcccatacagcaggagtgttcttcaaacctgaagacttcaaacctctgtacggcattctgacatgaccacaatgtata

SEQ ID NO: 1353 - DNA, 858 bp, Avena sativa
tttcacctgttggaatatgcatgatggtgtgtgtgtcttacatcctcttccatctgtttgctcctgcaggaatactagcagcaaagaaaagagaatagtgcaatatactactgtaggaaaaaagagtgaagaagatgcagcatagttttagtttcagtcccttttttctttaaaaatactttctccccttctctctcctcaagtcgatggtactaagcacattactaaaccaaccattagaggagaagggtaaagaacagcaagcaaccccaactgctttttaaaaattaacagtgccagatacagtaggcccctctcctattactattaccataagatgatgcattagttacagttagttaattacctctagtactactactactaccaatactgccaccaccaaccccacattgatgtaccaccaaagctcctgataagccaccaccacacacagccactagtcatgtagaagaagcagcagcagcacattaggtgcgatttgtgaatgatgtttagccacaactacaatgaaggatactgcggtacaatgtaaccagaacagcagcagcagcagcagagtgcttttctcgctgtattgcaagacagtacaacgagatacagtggtaatggacaagtgacagaaaggcataggtgagctaagctagtgttctgtgttgggtgtataatgtataatttcacaggatgaatgaatgaagatatgaacagggtcaccaggtcagttgcatgtaggcctgtcgatgggagatggggaggaccaccccggcgctacgatacatcgcaccccaccgtgctgccgctgccgtgctggtccggcggtgctgcggtaggcgaggt

SEQ ID NO: 1354 - DNA, 427 bp, Avena sativa
  modified_base (111)..(111): a, c, t, g, unknown or other
gaagagctagaggtgtgaactcggatggatcccagaagttgtcatttgagggttagtctgacatccagcatgaagttggagaatggagggaatggatggggtctgatgtcnctttggcaatgacatgacgaaaacaacattccagcaaagttccatcatgggaggccattagatgtctaccagctctagattatggcaagtaattttatggagccttgctcacttgcaacttccgcggttgcggtgtaactggctctatatttgtaccagcaggctccctgggttgacttgttaacttcccaggggttgccctactcttctgctgtagatctagattggaaatggatgtgatactattctcctgtactctcaaggccccatttgtacttccttccgttgtaatataagatttgcaagaawggttcaa

SEQ ID NO: 1355 - DNA, 693 bp, Avena sativa
agaagcagctggatttcaacatatactcgaactcataggcgcaagaggtagccgagggatgtgccaaggagcgccacgtaaaccacaaacagcaacgggaaacctatttgactctttgggtttcctttcttctgtagaaatgccatctcttgctgcaacttatcccgctcctgggtcatagacctgctctcttctctcagctttattatcatcttttcagccccttccaatttggattcaaggttattgagttttgacttcagattctgaacatcttctgttacatgagataattgatgattctgcacactgaaaagtcctcgatcacctaaggtaataacttcttttgggagagtttcttctagagaagactccttcgaagttacactgttttctttcagaggaggaagttgatcaatggtaattgcagatgtatcttttataggggaaggagattcatctttaacagggagaggagattgattttttagaggtgggggagattctgccaaaatagcaggttcttcatgcagtatcactggaacttcttcaaggattggagactgcttgacaggataaggtatgtcagtcacaagagctgaaatttgttcctgaggagcaggaacctcttctccataactggcactcattctcaacattcagtgtgtgtcttgacacaggaacctcaactgc

SEQ ID NO: 1356 - DNA, 563 bp, Avena sativa
  modified_base (517)..(517): a, c, t, g, unknown or other
tcaagtttcagcacccccccagtgccacatcagcagatactcactctgccccagcatcatatgcaccatccacatccaactctttcgatcaaactgcaccagcattatcaggctcctctgtagatggatggggtgaagttgagaacgataaccaggaagggaatgatagcgacaacgaaggatgggatgatgtagatccattcgaggagaagtcaccaccatctcttctttccaacatacatgctgctcagaaacgtccggtggtgcaaccaaagcaaccaattccaagttcatcaagatcaaatccagcaatggcaccaaaagcagatgatgctctatggggtcctatggctgttccagcacccaaaagtgcatcaaagtctgcagacatcaaaccctcggtatcacacaatagcgatgatgacctctggggttcaatagcggcgcctcagccgaaatcatctgggaggccttcaaagccagcagcagcagcaaacaatgacgacytagtggggtnccatcgcagccacccccaccggcaactaaagctaggcctctagcgt

SEQ ID NO: 1357 - DNA, 779 bp, Avena sativa
  modified_base (666)..(666): a, c, t, g, unknown or other
  modified_base (680)..(680): a, c, t, g, unknown or other
ggtatcaccatttgccatccatcagcagcagcttgcttttatgaaccagcagcaagctttcctaatggctgctcttaaatctggaaatgcaccccaaatggttccagggaatgccagtctgctaaattctaatggttccagtgctcccaatggaagcgtgccttcccaaagctggccaaatctaggttatcaaaacccttcatcaattccattaggagcaccacagaatggtgtcactaaggctggggctaacaatcaggacttcacttctgggagctttggttttggttcacctggagtgtacaacaacgtaagttcagccatgccgtcaaatggggtcacaaccgcaagtgctagcaaaagcacatcatccaccacctcttctaccctcccctctcaatcaggcaaagagtacgatttttcctcattaactcaagggatgtttacaaagcgatgaacaccttgccatgcttggaaatggatcagagagcctccgattgaggacaaacacggcagatttagggagaatgttcgggggcttgtacactttccttcttgtggatacatagttacatcaccttgtagctgtcctggaccaacgagagtggggatatagcagaatgttgctcatgttgtttcctacagctgatgtctcattatttcggngctgccaaaaaacnttgaacagaggttccattgtggccttgtgaacttccatttattagagtgtaatgtaactcttacattctcttgttcagggcgtagttgcaataccatat

SEQ ID NO: 1358 - DNA, 676 bp, Avena sativa
gtgtttcaatcgacagcgtgttttcccatcttgcgtgggtgcaaacagacaggaagtctggtgggcttggtgatctgaaatacccactgatttctgatgttactaagtcaatttcaaagtcctttggtgttcttattcccgaccagggaattgcgctgagaggacttttcatcattgacaaggagggagtaatccaacactctaccattaacaaccttgccattggtcgcagtgtggatgagaccatgaggacacttcaggctttgcagtatgtccaagaaaacccagacgaggtctgcccggcaggatggaagcctggggagaagtccatgaagcctgaccccaaggggagcaaagagtacttcgcggccatctagacgctagagaacgcgctttgccgcctatcttgattcttgatgctgccgcccggttgttccagtcactgcaggatgtggagttttgcttctgcgagagccttttatgtgtttgcgtctcgtcgacatttctttgctgtgagaaccaatgtgtagtagcatatgtgcattattctgcaacattttccccaacaaataaggttctggtttggccgtatattgctggcaagcgcccgtttccctgcttaaaatggttatgaaaagttatggaaattttacatagattaattatcaatgatgag

SEQ ID NO: 1359 - DNA, 773 bp, Avena sativa
aatagtatacaatgctgtccttaaggctcataatgctgtcatatcacacatgcagcctggagtaaaatggattgatatgcacaagctggcagagaagactatacttgaatctctagagaaagaaaatattatccatggggatattggtgcaatgatggctcggaggttgggtgctgttttcatgcctcatggtcttgggcacttgcttggaatcgacacccatgaccctggaggctaccctgagggcttagagaggccaaaggagccaggactaagctccttgcggaccataagagaacttaaagaaggcatggttattaccgtcgagccaggctgttatttcattgacgctttgctgaggcctgctagggatgacccaatttcctcaaaattcttcaactgggaagagattgagaagtacaaaactttaggtggtgttcgtattgaaagtgatctgtatgtgacagcgcaaggatgcaagaacatgacaaacgtcccacgggagacgtgggaaatcgaagcggtaatggctggcgcgccatggccttcccgtgtttccggcccctccgtggcaagaacagagaacggcatgcccaaagcctgagcacttgcatagaattgtccatgctccagagcaaaaacgtaagaataaatgattctatgaaataatataggatacttgaataataaacagttggacctctcaaagtgtcgttttgtgttttggctcgtccgcggttgatggtctactggcgttttatatgttcatcaca

SEQ ID NO: 1360 - DNA, 645 bp, Avena sativa
tactttaagcatgaagctaccaatatcaaggttgcagcgtgatctcacagattcaactgttttgagaaacttgggtgttgggttaggacattcactcttggcttacaaagccacaatgcagggaatccagaagctccaggtgaacaaagtccgtctggatgaagacttggatcaaacatgggaggtccttggagaggcaatacagacagtaatgcgaaggtatgggatcaccaaaccttacgagaagctgaaggaatttaccagaggccaagctgtgaccaaggaaagcatacgccgattcattgagactctagatctaccagaggatgtgcgatcaagtcttttggagttaacaccacactcatacattggagaggcggagaagcttgctaaaaatattgtgaatgtggttgatctgaaatctggatttaggatcgagtgactttccaatccttttttgacaaggacggcaagaataacatggagaaacttggaggtgaccatcacatagcttagcctttaaagattgttggtcacattaatatcttgtcctcattaaaaagcttctgggggcatgcggtgatttatggaattgtacactgagtattcattttaatgtgcggagttccattttggacaaaaaaa

SEQ ID NO: 1361 - DNA, 690 bp, Avena sativa
tttctagcaaaagtcttttcaatgtgttcctgaaaaaaattcttgatgcggatctcctacaagttcaggtctaatgggtatacagtatatcgatcacatcgcgaggcacaaaccagttggccctttcaacactcaaacagctccccacgttctgagtcaccactatgctccaaataaaaggggacacgtagttttctagagtaaggatacacggtctaactcgagtacagttacacctcagaatgaactttcagcacctcccaacaaaaagccggtgcgatattctgatactatagcagttggattaatgtttccaaactcggaccaagggtccggctaaagccaccactatatcgccatctccatctcaatcttcttgtgcgggtcgtagctgtccagcttgaagtccgatgccacaaaagaatcaatatccttcttcgaagggtttatcttcagaattgggaacgtttgggctgcttctggatctgctcctctaaagctcgaatgtgcgttctgtaaacgtgggcgtcccctatgacatggatgaaatctccaggggagagaccacaaacttgagcaatcatgcatgtcagaagggaatatgatgcaatgttgaatggaacaccaagtcccatgtctgcagagcgttggtacatctggcacgatagctccccattctcaacataaaat

SEQ ID NO: 1362 - DNA, 899 bp, Avena sativa
cggcttctagaatggttatttctgctgctggcaatgttaagcatgaagatattgtacaacaggcaaaggagttgttcagtaatctgccaactgaccctacaacagctggcatgttggtggctaaggagccagccacatttactggttctgaggttcgaatcattgatgatgacatgcccctcgctcaatttgctgttgccttcaatggtgcatcctgggcagatcctgattctattgcactaatggttatgcaaactatgcttggttcgtggaacaagagtgctggaggagggaagcacatgggttcggagcttgtacagagagtagcgatcaatgagatagctgagagtataatggcattcaatacaaactataaggacactggcctgtttggtgtctatgctgttgctaaggctgattgcttggatgatttggcttttgcaattatgcaagagatgagcaaattatcatacagggttaccgaagaagatgttattcgtgcgcgcaatcagctgaaatcctccatccaactccatcttgatggtaccactgcggttgttgaggacattggacgccagctactcatctatggccgtagaattcctattcctgagatttttgccagaatagatgcagttgaccccagcactatcaggcgtgttgcaaaccgcttcatctttgaccaggatattgctatcgctgccatgggaccaattcagactcttccagactacaactggttcaggcgcaggacctacatgctccgttactagattcatctagcggtgtaccatgtttacagtctcggaaggcaagataattgctttattggcatcagtataccaaggccacacatccacgcacatattatgtgcagaagtggaggaatttttgagtct

SEQ ID NO: 1363 - DNA, 719 bp, Avena sativa
aacaaggtcgaaaagttctgtgacctttgctaactattacactgaacaagaacgcagtctttggtgacagcagtgcattgtctccgggtggtgtccgcattggtgctcctgcaatgacttcaaggggtctggtcgagaaagatttcgagcagattgccgagttcctccaccaggctgtgacaatctgcctgaaaatccagaaggagcacggcaagctgctcaaggacttctccaagggcctggtgaacaacaaagacatcgagaacctcaagggcgaggtagagaagtttgccacctcctttgacatgcctggcttcacgctcgatagcatgaagtacaaggaataggatgatacatatggatggtgtgcttgtctccgctaagtccatatggtctgtacttataaaccatctttgccaccactcgatgccacttgtgaatggtgctttatgaattttgtgtgctcgccctagacaggttcgtaaactgctcccacctgttggccctggtttctgtccacattgcgtcatatttgtttgtatgatttgttcgcttggaatcatggaacggtgagtattagctcataatccttcatatgattaggctaacctgtcatatgagcattctgtcccttaaattcttgttctattgtgttgcttagatggaaatggtatggaacctctcaaataaatgtatgctatatgagatctagttaaccg

SEQ ID NO: 1364 - DNA, 559 bp, Avena sativa
tttttttttgttacaggaaacaattctaaggcgaaacatgcatgtctggtaagtcctcttagcatacggaactacagtaactgtcaacagcttgcgcgaggcaaactgaacatacacaggcaaatatatgaaagtagcaacatccgacgataagaaaaacgaagaagatttggtacaacaacagcaagagtctcgactaaactatcaggtcccagctaagacgcagtacagagagggccaagaggaccccgggcagatgatggcaacatggatagcttgctatggatcacctgctgtagaggagatctggttctagattttaccctcccagaggcactcaggggaggggccaccattattacggttcttaacggatgaggcgtgcgttaagagatcccaaagatgaggcggtggttggaggcccatggcagaagcacgctcccagcgctgaagccggttaacgccgatgcatgggccgaacttcatgtctaggtcaaactgccgaagctgctcctcttgctcaccgaagtcgtctttgaggtctaaggatccgtgagag

SEQ ID NO: 1365 - DNA, 770 bp, Avena sativa
gcgttcggcgcgcagctcgtgctcaccgacccggcgaaagggatgggagggacggtgaggaaggcaacccagctctacaaggaccatcctagcgcctttatgctccaacagtttgagaatcctgccaatgtcaaggtacactacgagacgaccggtccagaaatatgggaggacacacttgggcaggttgacatcttcgtcatggggatcgggagtggcggtaccgtaactggtgtcggcaagtacctcaaagagaagaaccccaatgcaaagatctatggagttgaacctgccgaagcaaatgtcctgaatggtggcaagccagggcctcaccttatcactggaaatggagtgggattcaaaccagatattttggacatggatataatggataaggttcttgaggtgaaaggtgaggatgctgttaagatggcgcaacagttggcagtgaaagaaggtcttctggtggggatatcatcaggagcaaacacggtggcagcgatcgaacttgccaagaggccagaaaacaaagggaagctcatcgtgactattcatccgagcgcgggggagcggtacttatcgtcggcgctgttcgagggtttgaggaaggaagctgaggctatgcagccggtgccagtggactaataacttggaactacagaatgagtgcatacagaacaaaattcactgggtgccatgtttgcaagtgccagttgtacggttgtacgtacctcatttgtaatcttcagtttgtgcctcatgtggacaat

SEQ ID NO: 1366 - DNA, 690 bp, Avena sativa
tcgctccctcaggttgatgccgaccttccattcgtcggcgaccatccgggcattcaccagctgatcccacccaacagcttctgctgccttttgcatggtgatgctagaggcagcagaagctgccactttattattaccaaagctctccacgaaccatttctactgtcactgtctcggtaattaactaagtacaccactgatggattgtacaggtattctctcaatgggatacagtatcacagcaaaaccggagccaacacatccaacagccaactttcaccttcgctcgcaaaatctggtgttggaagctgccttgtcaaaacatgttagcaccagctcctcctccccctgcctacggctagaaagacagatcagagctcgtctttcaaaggctcggttgcagccgcctcctcggtcaccgctgctgctgcctgccctgcagtctccttgttcttcctgatgtactcgacgatctcatcagctgtcctgcctccgtcgtacgagaccatcttcccgctgggagtgacgaagtacagggtcgggtaaccctggacatcgaactctggtggcacgtcattcgcggtagcgtccagcttggcgatgacaacatcctcttcactttgaagagtggcagctgcctcatccaggatgggcgctagcttcttgcagtgtccacaccagggagcgtag

SEQ ID NO: 1367 - DNA, 823 bp, Avena sativa
aaatctttcattgaccaaaaccacttccaagatacatgtacttgggaacaagtgtcaaagtaaactgcttgaaataattgatgctagtgaattgccagaatttcttggtggcacttgtacctgccctgaatatggagggtgccttaaagctgaaaaagggccttggaaggagccgtacatactgaagaaagtccttaatggtgaggcccagtgtgctcggcagatcgtaactatttccaatggagaggaaactattatttcttatgccaagtccaagtaccaaacggtacgtggaagcgatacatcaactgcagagtctggatctgaagctgacgatgtaacttcccccaaagctctgagaagttacatttctcatcctaagttgacccccgttcgtgaagaggtcaagatgattagggccactagcttttctacccggatgccagaatatgacgttcctattgttgacaaggcagtggatgcaacatggaagagagaacttcctaagaaggcacccttcccatccacagactcttctctgaaaagcaccactaaggcatccaacaggtccttggatcagattcttccagctctgatggcttttgtggttgccattgtaacactgcttcgttcagttaaagatatcgccacaaagagattatctgataaaaatgagtcagaagaacaaagccctgaattatatcacgactcctcctcaaaaccggagttccgccccccatccccaagccctgggtttgctgaatctgacctgtttccgttagtcttgcaaagactggcagagcttgaagagaaggttcagacg

SEQ ID NO: 1368 - DNA, 894 bp, Avena sativa
ggcagagcagtggctgcaatgggggcttatggatgacgcctttgaattcatcatgaagaacggtggcatcgatactgaagatgactacccttacaaggccttggacggaagatgtgatatcaacaggcgtaacgcaaaggtggtgagcattgatggctttgaagatgtccctgaaaatgatgagaaatcgctgcagaaggcagttgctcaccagcccgtgagtgttgccattgaagctggtggccgggagtttcagctgtatcattctggtgtcttcagtggaaggtgtggcacacagcttgaccatggtgttgttgctgttggctatggcactgagaatggcaaggactactggatcgtccgcaactcatggggcccgaactggggagaggctgggtacctccgcatggagcgcaacatcaacgtgaccactgggaagtgcgggatagccatgatgtcatcgtaccccaccaagaagggtgctaacccgcccaagccatccccgacgccccccacaccaccgacaccacctcccccggtcgctcctgaccacgtctgtgacgagacccagtcatgcccggcagggagcacctgctgctgcgcgtttggcttcaggaaccactgcctgttatggggctgctgccctgtcgaaggcgccatgtgctgcaaggatcatgccagctgctgcccgcctgactaccccgtctgcaacatcagggctggaacttgctcagtgagcaaggacagcctgctgaccgtgaaggccttgaagcgcacccttgctaagcggatcattgcatgaactcgtcgagacggcggtgaatagaaggatgcggctgcgtggagcctttctgcttctgtgcacccagacctttgttacaaaagttgaaccag

SEQ ID NO: 1369 - DNA, 874 bp, Avena sativa
tccggcgccgcctttgcggccactctgctccagcaccaccggcaccaccgaccgccactcctacacgaggcgggtcccgacgaaggcgcaaactggcgtggccaggagcaggccaggctatccagccgtttggccgacccgacttgctggctgagcgagcttcaccaggtcgcacaccggatctcgagcagttcgcgttcccccctataaaatcctcccctcccccgccccccaatcccaccacagcaacagccaccagatcccctcccaagactcccaaaagcagcacccgcgcttacgtccagtctgcgccagagttgaatctgagtttactagtacttcgggagatttaatcaacccgccgagatgggttcccaggcgatcgagaagaacagggagggcgcggaggtgtaccacggcgcggcgctgtgcgcggagaaggcggtgcagctgctggcggagaccaacatgccgctgggcctgctcccgctggcggacatcgaggaggtgggctacaaccgcgccacgggcttcgtgtggctgcgccagaagaaggcgctcacgcacaccttcaagcagatcgggaggcaggtctcgtacgccgccgaggtcaccgccgtcgtcgaggaccgcaagatgaagcgcatgacgggggtcaagagcaaggagatgctcatctgggtcacgctctgcgacatgtacatcgacaaggacgaccagtccaagatcaccttcaagacgcccacggggctcggcaggaccttccccgtctctgccttcgggaaggaggacgacggcaaggccaaggcgcccgccgccgccgcaccggccgccgaggcgaccgtcgccaagtgaagatcaggtcaggcggacg

SEQ ID NO: 1370 - DNA, 648 bp, Avena sativa
cctcaatactgaagccgagaaaaaacttggcaggcttgttaaggagaagtatggaacagaatttttcattctctatcggtatcctttggctgtgcgtcctttctacaccatgccttgctacgatgaccctgcttacagcaactctttcgatgtcttcattcgaggtgaggaaattatttctggagctcaaagagtgcacacgcctgagttgctgaggaaacgtgcaattgaatgtggtatcgatgcgagtacaatatcatcatacattgaatcattcagttatggtgcccctcctcacggtggtttcggtgtcgggctggagagagtggtgatgttgttctgtgccctcaacaacatcaggaagacgtcgcttttccctcgtgacccacagaggctcacgccataggtttcttttgtgggacagacagcttgtgcccaacgctttcaccatgtttaccaatctgctagtcaagttaccccaatactgatggttgctgcattgcgctgacataacaacactaccaagtagcaccgtcaattggttttagagcttctgctatattcacaaagcttgtgttggtaccaattgtggataatacttgttcccatcatcagtttgctgaaggtgttttgcttttttcaaaaaag

SEQ ID NO: 1371 - DNA, 464 bp, Avena sativa
tagtgccggacttaaggagcaggaagcaataaatttttctggagaagaaaatgaaggatagccctcagttcacatatgacgaaactgttcagatttgcgattttctgcactgcaatcagttctgcaggaagattttcaaggctaccgagattgaggttggtgttgtgaggaaagaagaccgtgtttttcagagcactcaagacggaggagatcgatcagcacctaacagccataagtgagcgtgattgagtggccatgaaattcactcttctgtagtgctttggcactgactgttctgtttaatagccggccaagaaacattcgatgaatcatttcatgtgtagcaaaaagaaacgggcatacacttgccatgtattagttggatcgatcatcatgtgtggtttaatttgctacgatttaatttgatggtgctggcagttgcatgtttgagctaaaaaaaaaaa

SEQ ID NO: 1372 - DNA, 737 bp, Avena sativa
tggcgctgcacaaggaggccgacatcctcgccaggctcggcaccgtgcagacctacgggcagccccgcgtcggcgacgacgccttcgtgaaattcctccgcgacgaggtggagaagaaggccgcggcggcgtactaccggatcgtgtaccgctacgacatcgtgccccgggtgcccttcgacatcccgctgctggccgagttcgcgcacggcggcacctgcgtgtactacgacggctggtacgacggcaaggtgctcgccggggacgcgcccaaccccaactacttcgaccccaggttcctgccgtccatgtacgagaacgcgctgggggacctagtgaagggggcgttcctgtgggccagggccggctgggactaccgcgagggccccgtctcgctgctctaccgcgccttcggcctcatcatcccaggactcgcctcccacagccccagggactacgtcaatggcgtccgcctcggccgcatccagcctaagcaaatctaatccatcatggtgagatcgatctcctccagatagtgagacgatcgatgaataagttgttaatttgttcaagagtacgctcgttgctgtgtcgtcgtcgtcgtgtgtgcaagagtacgctcgctgctgtgcgtacttgatctgccgctctgtctcggcaataattggtcaatgcaagtctagctgaataatgcaatcagtgtcagaggacctagccagctgtggtgctaaaaaaaa

SEQ ID NO: 1373 - DNA, 856 bp, Avena sativa
gacgatttagtgcattttgacttcatggatcctcctgcaccagaaactctaatgagggccttagaagttctgaactacttgggggcgctcgatgatgaaggcaacctaacacctctaggtgaaatgatgagtgagttccccttagacccccagatgtcaaagatgcttgttatcagtccaaagtacaactgttcaaatgagatcctctctgtatctgccatgctctcagtacccaattgctttctccggcctagggaggcacaaaaggctgctgatgaggcgaaggctcgatttgggcacattgacggggaccatctcacactgctgaatgtgtaccatgcatacaagcagaacaatgaggatcctacatggtgttatgagaattttgtcaatgcccgagcgatgaagtctgctgataatgttagacaacagcttgttcgcatcatgaccagattcaacctcaagatgtgcagtacagactttaacagtcgcgagtactatgttaatatcaggaaagcaatgctttcaggctattttatgcaggttgctcatcttgagcgaactggacattacttgactgttaaggataatcaggttgtccatcttcatccgtcgaattgtatggatcataagccggagtgggtcatctacaatgaatatgttttgaccacaaggaatttcatccgcacagtcaccgatatccgtggagaatggctgattgatatagctccacagtactatgatctgaccaatttcccatcatgtgaggcgaagcgtgtcctcgagaggctacataacaagcgcgagagggaaagagctgccaatagaagctgaactgatgatattctcctggttg

SEQ ID NO: 1374 - DNA, 468 bp, Avena sativa
gcactgtctcggataaaatttcaacacggtatgatcaacaagaaaggcaggagctttagaagcagatccacatttcagtgcttccttcacatagaagtagggtgcattacattatggtgaattacacacctggctggattatccagctttattattgccttgatccagtagactcgatgtagcattacacgataacacatatttacatccacgctcacataccgatgtatacacacaaaaaacatattgagctactaggccccaccctagggaaaagaattgcttgaccacacaaaactggctatctacaccaacttgatgagcaaaactagcctagggttagagtgtatcactgcaagctatacagtgtcactgagacaacacaccgaacatccatataacctcccagaacggcatccgcgagtgcattacaagaacagagtgttgcgaaacaaacaattgaagctt

SEQ ID NO: 1375 - DNA, 612 bp, Avena sativa
gattgcctggagagaacttgccgaaatctatgtttccttacaaatgtacaaacaagctgcattttgttacgaggagctaatattggctcaaccaaccattccactttaccatctagcttatgctgaggttttgtacacactgggtggcttggaaaaccttcaaaccgcaaagaagtattatgcatcgacgatccaattgactggaggcaagaacacgagagctctctttggcgtgtgtctgtgtagcgcggcgatcagccagctgaccaaagggaggaacaaggaggaagacagctcagagctgcagagcctggccgcagaggcactgctgaaggactacaagcaacgtgcgtcgtccaaggaggcgcttgtcgcgggcatgctgaagaacatgaagctctcctgatcctcgttggctcacaagggctttagctttagcctgtggtaagctagctaggtagcgagcgagcagcacggttttggagacagacaccaaccagcagcattgtaaaactttatttacgcaagatccttactactgtaccacattttcagttttggattcgttgttcttaccatagaccaataagggaaacactgtactattgtaat

SEQ ID NO: 1376 - DNA, 781 bp, Avena sativa
gatttatgtagcttgtacagctgtaccatggtttgtatggaggccttgaagaaacatggctgtctgcttcttggcctgtttggagtatcttcgggatcctgcttgtacctgtgtgctgtgaagttgtgccgtcttcgatgcgtactgcagaaccggtttcagctacttgggaacattttcagatgtacacctgtacatactgcacgtatttttatgagtgaagttgcttattatttcagtagttcggatgaacaagtatcagccgaattgcttaatattattatttggaagcttttatcctctggtttaggcatttgtattgatagcaaattagttgtcgttgcggatgtcatcttctgaagctattggattattattatgctccaaggtgtgtttgttagtagtcatatttgcccgtattatctagtattaacttggctgatactaggtatacaagctattttctctggttctgcgccatctcaattgagagctgcttcaatgtgtgtttgttagtagtcaataagccaatttaccttttcataccgatggacaaaattattctgttccttgaattgatgtcaagctaatttttcaagtataagctattaagtaacttattgatgaaaaaatataattgtttgttgaattgatgatataagctaatttattcagttacaaatatattcgatcttgaattgatgatataatctaattaattgatggacaaatttatttgttaatataaaaattcttagctcagttttttatgatcacttgc

SEQ ID NO: 1377 - DNA, 843 bp, Avena sativa
gactgccgcaagaactgcggcgaatgccattatgtccgccagcgcagcagggcactattgatctgcagagcggaatcctcatgccgaagagaaggattacaagactgcctacagtactcttgaagcattcgaaggattcaatgcactggaggatgctaaggccatcttctgcttgaagtacatgcttctgtgcaagataatggttaaccaagctgatgacgttgcaggaataatctcgtctaaggcaggcctgcagtatgttggtcctgatgtcgatgctatgaaagctgtggctgatgcctactcaaagagatctctcaagtactttgaaactgctcttcgtgactacaaagcccagctggaggaagacccaattgtccacaggcacctctcatccctgtatgataccctcctggagcagaacctgtgcaggctgattgagccctactcaagggtggagatcgcgcacgtagcagagatgatcgagttgccaattgaccatgttgagaagaagctgtcacagatgatccttgacaagaaattctcggggaccctggatcagggtgctggttgcctcatcatcttcgaggactcgaagaccgaggcgatcttcccagctactctcgaaacgatttcgaatgtagggaaggttgtggagagcctttacatgaggtcggccaagatcatggcttgaggaggtcttttattctttacgtggtgtctctgattaaaaccttacttgagctactatgttagagtcctcaggacatgatattgtgcgtagcgccttttcatccttgcaaattgtttctttaagctaaatgtctcgttcatggacaagaa

SEQ ID NO: 1378 - DNA, 955 bp, Avena sativa
cgatggatgctgcaggtcatcgaaggcgtcgccgcctgccaccgcgccggcctcgtccaccgcgacctcaagcccggaaacctgctcatctccgaggacggggtgctcaaggtcgccgactttggtcaggccaggtttattcaggaacagccatctaatgaaccggaaattcctgctgctcaggagccagagagactcactgcagctgactacctacatgagatcgaccaagtccgggccaagtccacttatggagatgtcgacagaatgagccttcaggatggaaacacctcctgtcttgccacttgcagcacagcagacatcgacgatgatccatttagagcctcctattcatatgatgctgaagaagacatgggggatgaagagtctggcgccttcacttcttgcgtcggaacacggtggtttagagctcctgagctcctgtacggttcaaccaactacggccaagaggtcgacctctggtcactaggatgcattttggccgagcttctgaatatggagcctatattcccaggccaatctgacattgaccagattggtagaatcattggggtcctgggcaacattacagaagagtccttcccaggctgctcaaatttaaccgattacaacaagattttcttcaacaaggttgaaaagcctatgggcctggaagcgttacttcctagcagatctgcttctgaggtcagcatgataaagcggctactttgctatgacccagcaaagagggcctttgcttctgacttgctgagcgacccatacttcaccgaagaacccttacccgtgcctattgctggactacaagtaccaacgtcgaagggtgaggatgacaacgactctgaggaagaatggggtaattacagagacggcaatttggattcggacgttgatgaattcggttccatggatgtcaccaagaccgacaaggatttca

SEQ ID NO: 1379 - DNA, 683 bp, Avena sativa
cacagacattgctgatgtgtcaaggatgttccaagtgatggtgcactgccaagtgcctataattggattggtgatgagtgaaagaggtttgatgtcaagggtgttatccccaaaatttggtggatatcttacctttggaatactcgatgctacaaagacatcagcatctgggcagccaacactcgaagaattattggatatttacaatataaggtgtataggacctgatacaacggttcttggtcttatagccaacccagtaaagcagagcaagagtccaattttgcacaataaatgtcttcagtctgttggatacaatgctgtttatctacctcttctggcagacgatctcgctagattccttgacacatattcagctccagatttttcaggatttagttgctctcttccttttaaagtggatgcagtacattgttgccatgaacatgacgctgttgctaagtcaataggagccataaacactataattaggaaatcagatggcaaattagtggggtacaatacagactacattggagcaatttctgctattgaggatggcataggaggtccagggtcaaaggatgctgctgtgtcacccttggttggcaggcttattgttgttgtaggtgctggtggcgctggtaaggcaattgcttatggggcaagagaaggtgcaagag

SEQ ID NO: 1380 - DNA, 887 bp, Avena sativa
cgccaattccaacaaggtcgttacattaaaacatcctcttctaaaaataatgctatataatggatttagtcctcaagtaaaatgtttaggaacatattaaaaaacttagaaagaacttgctagaagcctatacaacggaaatgcgtaatatatataaccttagtttcttttccttgttgagagaagaaccacaaaccatagcgtgtgatgttctggacaacattttagtggaacgggacagccagtgtaccagtgatgatactaaaaaaaacataaacctttcatattctcctttaattttcattttgaccattcatggctatgaatttgcatgtcagccaggtcaacgtcgtccagggaggccacctccgctacccttacgtatgaaggtgtttttatttttcggctttggtaattcgtggatatccagcacttgcatcgtcctttgctttttcgcattttgtgcttcctggtaattttcctgaagcctctttctggccgaatcgagcttctcaagatccaaattattatccttctgttccctcattgtcctagctggagcagatgacgaagtagttgaatagttgcttctgttattcggcttcgtatgatgatatatgggagcagggcttgctctacgcttctccattgtcgcctcaaatccattgttattgctagacctagaccgctctgaactcaaaccattgtgcctctctggtgggctgggcgaatacttgaagtctgaaacctgagcattttggtagcttttgccttgggttttctcaggcgagtcaccatcagatagaatcgagctgccactggagttatggagccgcacccagccatccactatctccttccacttcctgacgagcagcttcaccaac

SEQ ID NO: 1381 - DNA, 695 bp, Avena sativa
gaagaacttcaggtgattctggctcctctccaccaaggcaatcagatggggactcgactaacaagacagtatatgttggtgggcttgaccccaatgtcagtgaagatgaactaaggaaagcatttgctaagtatggtgatgttgcctctgttaaaattcctgttgggaaacagtgtggcttcgttcaatttgtcaacagagctgatgcagaagaagcactacaagggttaagtggatcaacaattgggaagcaggcagttcgcctttcttggggtcgcagtccagcaagcaaacagtctaggggtgattccgggcaccgacggaatggtatgtactatggaacacctttctacggtggatatggctacgcgtcgccagttccacacccaaacatgtatgctgcggcctacggagcctaccctttctacggtaaccagcaactggtgagctgacgagagaggttgtctctgtttcctccaatggagaacaaggttttggtccagtaagcatagtagcgtatgatgacatattatagatggccataaaagtgggcgagagagacaggtatatgcatgtgatgtctgcagatttgtgctgctagtagaacctaagcttgtagacaataaagagctattcgtattcttttttaagaaattttgacttggtaataaaactaattggttgtactaaaaaaa

SEQ ID NO: 1382 - DNA, 820 bp, Avena sativa
ggcaaagagggattgtttttctcaggccctgcactagtttttgacggcgaagaatcgatgattacagctatatcagaaaacccatcagattttaagggaaaagttgtagtgatccgaggagaaggaccaaaaggtgggcctgggatgcctgaaatgttgacaccaacaagtgcaataatgggggctggtcttgggaaggagtgtgccctgctgaccgatggtagattttctgggggatcacatggatttgttgtgggccacatatgtcctgaatcacaggaaggaggcccaattggtcttgttgagaacggtgatacaatcacgatcgatgtcagcaagaaagtaattgacgtggacttgacggaagaccagcttgaagaaaggcgaaggaaatggagcccaccgccacacaaggtcactggtggagcactttggaagtacataaagctggtgtcttcagcctcaagcgggtgcgtcaccgacgagtagggtccatcctatgttgtgctaggttgagcaaagtttgtgtcgcttggggcgttagtggattggctgatgagcagcattttttcctgtaagagagttttttttgtaattggtagaggcgggacaaataagatgccagtttccagtggcttaatgaagcaatggtgaagggaagtggcgaagaataataatctagtgttgtcggtgtggtggagaattagacagcttagagtttctcctctgtaatctgtagttgagacgtgtccaaatttatgtgaaactgtgagctgctttctttgtttttttgtccaatgattgaatggagtcaaaaaaa

SEQ ID NO: 1383 - DNA, 921 bp, Avena sativa
gtcaagtgtaatatgcagataaacccagagaaatacaagagcatctcatctggcttcggtgtcctgttaaaggagcaaggggctcggggattcttcaggggatgggtccctaccttgcttggttacagtgcccagggggcctgcaagtttggtttctatgagttcttcaagaagacctactcagatatggctggccctgagaatgccatcaagtacaagaccctgatttaccttgcagggtcagcttctgctgagctgattgctgatgttgctctctgccccatggaagccgtgaaggttcgtgtgcagacacaacctggatttgctcgtgggttgagtgatgggctccccaagttcgtcaaagctgagggtgttgctgggctttacaaggggcttgttcctctctggggtcgccagattccttataccatgatgaagtttgcttcctttgagacaattgttgagcttatctacaagcacgctgttcctgttccaaagtcggagtgcagcaagcctttccagttaggtatcagctttgctggtggctacattgccggtgttttctgtgccattgtttcccaccctgcagacaatctggtctctttcctcaacaatgccaagggtgctaccatgggtgacgccgtgaagcagattggtgttctgggccttttcaccagaggattgcccctacgtatcgtcatgattggcacactcaccggtgctcagtggggaatctatgatgcatttaaggtcatggttgggctcccaaccactggtggtgttgcacctgtaccagcggccgaggaagtgaaggcagttgcttgatgtgtttcgtgacgacgatgatgaatgtattccttggtgtcatattggtggatgcgaatgtatcaaatacctgagtttagtacccaaattgtttat

SEQ ID NO: 1384 - DNA, 705 bp, Avena sativa
aaacaattaaggagtgcagcagagcacttgagctgaatccttcatacgtgaaagccctgcttcggaggggagaagcacatgaaaagctcgaacactatgacgaggctatagctgacatgaaaaaaaatcattgagctagatccttcaaatgcacaagctaagagatcactgttccgacttgagccactggcagcagagaaaaaggaaaagatgaaggaagaaatgcttgcaaagctgaaagatctgggcaactcggtgctggggcgcttcggaatgagcgtggacaatttcaaagctgttaaagatccaaacacgggctcgtactctctttcttttgagaagtagcataatctaatggcatatacgaacatgtgaaccaccatggctaggtgcccgctgagtcactggtatcgtttggatcatggtggatcatttcgagttggtttatactccgaatgtcgatccaaagatgaacctagccaatccttgtttattactctcttttggtgatgtgtactcgttgcactcgaggggtgattttccgtgaatccatgtcgatccatagatgaacttgaacaagtggttctgtaaacagctttatttttttttcttcttctgtaaggattaccctctgtgctgtagtatttttacacttgcagatgcttacctttgttatcttctcctttgtgagttggttggttgtaa

SEQ ID NO: 1385 - DNA, 854 bp, Avena sativa
  modified_base (27)..(27): a, c, t, g, unknown or other
tctacgtgctgcatatacaatcctganagggctattgactatctgtactctggaatacctgagacccgtagaggccccacctgtggcccgaggacctgctacagttcaacaggcagcaagcctgcaagctccatctcaggctcaggctgcacctctaccaccaattcagccatctggtggcgcctctgcagggcctaacgcaaatcctctaaaccttttcccccagggtcttccaggtgctgggtccaatcctggtgctggtgtgggtgccggtgctcttgatgcactgcgacagcttccacagttccaagcactgcttacattggtccagtctaatcctcaaatcttgcagccaatgcttcaagagctagggaaacaaaacccacagatcctgcggttgattcaggaaaatcaggctgagtttctccgcctggttaacgaaactcctgagagtggtgccggcgcgtccacaaatatattaggcgcgttagcagctcaattgccacagcctgttacagttactccagaagaacgggatgccatccagcggctcgaggggatgggtttcaaccgtgagcttgtgttggaggtcttctttgcatgcaacagggatgaagaactggctgccaactatcttttggatcatggccacgagttcgaggatcaacaatagatgttagattggtgaccccaaggaaagacagagacatcagcagtacagttcagtgtcgattttattaatatcttttgctgctgagtaacactaccaccgctacgtgctgttagtgcaatgctgctcactgtttcagtttcttgtatctggagatgcttttcgaagtacatattaatatcat

SEQ ID NO: 1386 - DNA, 1020 bp, Avena sativa
gaccacttcaggataaaaaggtccctggaaagaagccacctgctggtgctcctgcccatgcacctgtttcagctgttgatgcttatcagaaggtgctctcatccattgctgagttctctgggttcggaaggctcttcaagtcgtcagaacctgtggagctgacagaggcagagactgaatatgcggttaacgtggttaagcacatatacgaaaggcatgttgtattgcagtacaactgtaccaacactatccctgaacaaatgctagaagatgttactgtctatgttgatgccacggatgctgaagagttttcagaagtttgttcaaagcctcttaaaagcttgccatatgatttacctggtcaaatttttgttgctttcgaaaagccagagcatgttcctgctactgggaaattttcaaatgtactgaggttcactgttaaagaggttgacacatcttcaggggaagtcgatgaagatggcgtggaggatgaataccagatagaagaccttgaaattgttccagctgattatatgctgagggttgcagtctccaactttaggaatgcttgggaaaatatggaccctgaaagtgagcgtgttgatgagtatggactcggtgctagagagagcttagctgaggctgtgagtgctgtcactggtatccttggcatgcaaccgtgcgagggcacagaggtggtaccaagcaatgcaagatcgcatgtttgcctgctatccggcgtatttatcggggacgtcaaggttcttgtgaggttatcatttggcctaagcgggcccaaggaagtagcaatgaagctcgcggtcaggtcagacgaccctgaagtcagtgacaagatccacgagattgttgccagcggctaaagtggattgcctcaacccctgccaaaacttgtgtagagctggtaaatagtcttcagattcatggtaaaaggaaaatggtgaatgtaccctgttgatgctccggtgttacagaatgctcttagctttcgcttcctctgtg

SEQ ID NO: 1387 - DNA, 618 bp, Avena sativa
  modified_base (495)..(495): a, c, t, g, unknown or other
cccgggatgtcgactccacaaatttcctcacgaaccaggcgcggagggaggagaagtagcgggcggccggcgacgaggcgaggcggagaagatgtcgtacctgctgccgcacctgcactccggctgggcggtggaccaggccatcctcgctgaggaggagcgcctcgtcatgatccgcttcggccacgactgggacgagacctgcatgcagatggatgaagtactgtcaggggtggctgagaccataaagaactttgcggtaatctacctcgttgatatcactgaggttcctgacttcaatacgatgtacgagctgtacgacccatcaacagtgatgttctttttccgcaacaagcacatcatgattgatctcggaacaggaaacaataacaagatcaactgggcgatgaaagacaaacaggagtttgtcgacattgtggagactgtctacaggggagcccgtaagggtcgcggtctggtgattgctcccaaggnttactccacaaaatatcgttaactgagctacgtgtgtctggctgtcccatgtgtgtaacttttggcctactaggtccggtatgatgccgactgccagcatgtgacccttgatgtgatgtccat

SEQ ID NO: 1388 - DNA, 916 bp, Avena sativa
gtttcagatctaaattggtttctcacaatgaatatcttgcctgtaaaatatcagtgtaaattggtttgaagcgtgctggctaagcatattgatccatattactggtatcactttctaaattggtctgcaagtgaatgtcattaaatgaacacatatcagtgtaagattgctaagcatattggttaatggacacatatcagtgaatgccatttaaaatttgtttgtcatggagtgccatttggtcgattcatatagctcaagagtataacatatggaacatttctcctcgtatacttagttttctgctggtgatgcgcaggaagaagaaggcggttcacaagaccacgaccactgatgacaagaggcttcagagcaccttgaaaagagtaggagtgaacaccattcctggtattgaagaggtcaacatcttcaaggatgacgtggttatccagttccagaacccgaaagtgcaagcatccattgctgcaaacacatgggtggttagtggaacaccacagacgaaaaagctgcaagatctgctgcccacaattatcaaccaattgggccctgataacctggacaacctgcggaggcttgcggagcagttccagaagcagatgcctggtgctgaggctggtgccagcattggtgcggctcaggatgatgacgatgacgttccggagctcgtccctggggagacctttgaaggagccacagaggagaagaaggaacctgaggcgaagaaggaaccagaggcggagaagaaagaatcgtcgtaatctgtcctcgtagtccattgttgtgaagggttgttggttcagtgttggcatctaccgtgccggagacatgctcttgcgagaactctggcctatctttctttctatgtgctacggttttgtctttggctgctggttct

SEQ ID NO: 1389 - DNA, 545 bp, Avena sativa
gcgttaaattttggaagtttcatgaattgtgcatccctttggcccatggtagcttggttatgcctttgtgcagtaccatgcagaagtgttggtgcatagatatcagttgcaagcaaagaggacaggcatattttggcgcactacatatcgaatgttactgggtcaggcttgtacgagatggctatggctatcgaccatacaccattggtaaggagcacgaggattgcaagatatctccttgtcgtggtagttggcaatgggggcttgacaacaacaggtctccactcgtgcattgagagaaaagggtgtcgttacctccagaccattcacctgtatagaaggcaaagcagggcttgtagtggtacaatgtgaatatgtgctgccatccaagtcaaaggtgcagcagctatcgtctacctccatggtaccacgaagacggcctgctgattggttttgtatagaggtgctataggtggggtggctaaccttcagatctcgcacatggccaagatacttgtctgaacaattatgtatgatttcatata

SEQ ID NO: 1390 - DNA, 399 bp, Avena sativa
  modified_base (11)..(11): a, c, t, g, unknown or other
ttttttttttntttttttttttttttaacacaacatgaacacattttttattgttttaccgtgtactacaaagtgtgtaggagcacatcttttacaatcgtgcgaatcacttggacatcacaaaacaagatacaataattgacggatgccaatgtcaaactggaacaaataaaaaggcggatatatatggcatgcaaattactagagtatgatttgcgtgcagattgacgaggaggtttctgtgatggatgatggatcagatggggcaggtgaagtcgtcggggcaggtcctgccgcactggtttaggaggaggatgaggtcgacggggacgtcgaggtggatgccgagaacgtcggctttggatggcggtgcgagaggcagacggcggcgtcgaggtc

SEQ ID NO: 1391 - DNA, 574 bp, Avena sativa
tcccgggatctctccccctgcctctctccgcctccttttcttctccgccaaccgaagcgaagctagggttttacgatctcctcgccccgaaggtactaccggccatggacgcctcgtccgaccttcagcgactcctcgagcaagagaagcagaagatgatggtgaccgagatgatcggcaagctgacgagcgagtgctgggacaagtgtgtgacgggcactcctgggagcaagttcagctcgggcgagaccgcctgcctgagcaactgcgcccagaggttcattgaggtgaacgagataatcgccaggaaactcgggttacactgagcccgcctgcgctgctgctccaagtagtcgctcttccgaccgtgttttgagttgtggtgttcaccatcagtgtgtttgtgaaatattctgtaggttctgtgggcgtgactttgaagtgtaatctctgtgcgttgagtctggtgtatggtttgcctgcaccctgaatgaatttaacttttgattgatggtgcttagtggaagataaagtttagtctcggtgaagacgagacagtattttcggttacaaa

SEQ ID NO: 1392 - DNA, 563 bp, Avena sativa
  modified_base (551)..(551): a, c, t, g, unknown or other
gtcatatcagcgagttaagttcgagttggttggccaaggctgaggatgcttataaagttggcgatcgtattgatgtcaagcttattgagataaatgacaagggtcaacttcggctaagttgcaaagccttgcttcctgatgcaaaccaagaacccagcagcaacaagcagcaaacgagcggtccgacgaaagaaaagatagtgtacaaagatgatatcattaaggtgaccacaagaagatccaggcgcaagaaagaaggtgagccatctgcagctgaagatgccacagcaaagacccttgaaaacagcacagccgaaaatgcctaaggatttggcttcacaagacagctagacggggaaagaaacagggtgacacgaaacattgcgcttcatcacacggattgcctcagaagactaggccacttacttggactgcaacaacagcctctaactaggattgcaacaacattcaatgaccgtgtgactggaattgcatgacaatgatggctacgcagattacccactctaaattggactcctaacaaaaagggngaattgctgata

SEQ ID NO: 1393 - DNA, 932 bp, Avena sativa
agccaatggacaataattgctaatagaaaaaagaccagaagacagcccgccactatgcaaggaaactgatgatgcagatgctgcatggaatgtaccattacaagcgtgcatccacaaattgcctgttggtccatcagtaagaggatcaaaatggccggagacatggcctcaaaggcttgagaagacccccttctggattgatggttctcatgtcggagtctatggaaaaccagggaatgaagactttgaagcagattatgcacactggaaacgggttgtaagtaaatcgtatgtgaatggcatgggaatcgactggtctaaagtgagaaatgtcatggacatgagagctgtatatggaggttttgctgcagcgctgagggaccaacgacaagtctgggttatgaatatcgtaccaattgattcagctgacacactgcccattgtttatgagcgtggcttgtttggtatgtatcatgactggtgcgagtctttcagcacttacccgagaacatatgacctcctacatgcagaccatctgttctcaaagctcaaaaagagatgcaaattgttgggagtgtttgctgaggttgaccggatactgaggccagaaggcaagctcatcgtgagggataatgcggagacaataagcgaactagaaggcatggcaaagtccctacagtgggaggtacgcatgacctacaccaagggcaacgagggcctgctctgcgtcgaaaagaccatgtggcggcccaaggagatcgaagcaagcatgtgaaacaaagattgaagttaaactgttattactactcgagataggcagcatatgattcttgtccgtgctaaagaaggcaaaagctttgtgcagctgtagaatcatatagtagtatgtgcttttttgccgaacgattgcactctttcattctttctgtgtt

SEQ ID NO: 1394 - DNA, 667 bp, Avena sativa
caagaagttaggacagctatggatgccctatttacagaatatgctactgaattgggagatgttgttgatttctcatcacaagaaaggaatgaagagggagttattttgccagatagtgtgctttcagattgggctgaacatgtcaagcttaagaaagctagcagtcgcaatgagctacaacggtatctagaggaggatttccatcctcttaccaccgactttgacatcctaaagtggtgtgatgtcaactctacaaggtacccaacgcttggcagaattgcacgtgatgtgctggctgttccagcttcatcagttgcctctgaatctgcgtttagcacatgtgggagagttattactgatcacagaagtagcctagcacctgaaacggtcaaagcattgatgtgctttggagattggattaggcctagcggttctttcgaagcaagcacattgcagggggttccataatttagataattggattttgccacactatcttcagatttaaactactgcaatctcacaactgcagcctcctaatctcgaagattcaaaaatagctgagctagcatttgtgatgcatggatcacctttgagcagaacttgtcagtagccttactaaagacaagcaattgcagtacttcataaggagaatcaaacaacatgt

SEQ ID NO: 1395 - DNA, 887 bp, Avena sativa
cttaagccagttgctcagacggccaccccgaagcctactattgccaaatcagaaaagctagctccacttccaaagacctgcgaggacgagcctttcaatcacctgagtaatggagacaatgatttgttcgatatgtttgccttcactgacaagaaggctcctgcaaagccagctgagagtgtcgatttcctcctcccagtgaaacctcttgttcccgccgagacatttgggatgaacatgctctctgatcagagcagcaactcatttggctctaccgactttgggtgggacgacgaggccatgacgccagactacacatctgtcttcgttccaaatgctgccatgccgtcatatggcgagcctgcttacctgcaaggcggagcgccaaagaggatgaggaacaatttcggtgcagccgtgcttcctgagggaaacgatgggatcaacatcgcgcaggatatctgtgcttttgaccatgagatgaagtattcattgccttacgtcgagagcagctcggacggatcgatggacagccttctgaacagtgtcatgcaggacggcgctagtaatggggatctctggagcctcgatgagctgttcatggcagctggtgcttactgaggggccatagcaaagatgtcccaggcctatgtggatgaagaaccggtggcatctgctatgtttcgtagcggatcgaaccgtagctatgctaagattatgtggtgctggcagtggaacgggtacgccgtgtctatattattctgtttatgatgcaagtcgtgtctatgattgggtgcatgttggagactggattttaataaccctaccttggtcatatgactgctgtaatgtgcctattaagtaagtacatgatcgttcttawaaaa

SEQ ID NO: 1396 - DNA, 762 bp, Avena sativa
catactcgaattacatgactgctggagtgcatgaaagcaaatattttgacactggacaaggaaggaacataacatttgagcttgatcttcaattattctccaaggttacgagggccaaagaagagcttcagcctctgcacctctgcaacacttatgtaggtgacctttgccaccacctctgccggcaagatgttgccgaaaagcgcatagtcaatgacctgtatgcctgggttctggttgctcaacacaccgaacacctcagcggttgtgttgccgacattgtaaaagaaacggaccaggccctgcgggaacaggaacatgtccccctgagacagcgtcttggtgtacacgacgttggagttggaggtaatgaaacctgccataatcgtgcctttgacgacgaagatgatctggctcgcccttggaacgttgtggagtggcacgatgccgttagtgccaaggaagacacgcacggcactgaggctcaacccattgattcctggaaaataggagccataggcaggcacaaaggagatgttgaaggggtctattgtgaccggcggagtggctccagagaagtagaagtcattggaagtaactatggcggcaggcttgcattggtagccggctggtgtgtcactcaagaggagattggcaacgcaaaagtcctgcgttagggcgagggataagaaaggcaggaggaagaaggataggaggatggggaggaagacaagctttgccatggttggtgatgtgtttgtc

SEQ ID NO: 1397 - DNA, 902 bp, Avena sativa
tacatcaatgagcaggctgttgagatcataaagaggtttcttctggagaagaccattgatgtcctcctgtacgtggatcgcttggatacatatagaatggatacattggatgaacaagttataagagccatcactacttcatttggaaaggccatttggcgaagaacattggttgtactgacccatgcccaactctctccacctgatggacttgactataatgatttccttacaagaagatcagagtcgctgttgcggtacatccgttctggtgcaggaattggcaaacgggaatctgcggattatcccttgccattagctttggtagagaacagtggaaggtgcaagaccaacgagaatggggcgaagattcttcctgacggaactccatggattccaaacttgatgaaagaaattactatggtcgtctcaaatgggagcaagcccatccatgttgatcagaagttaattgatggtccaaaccccaacaatcgctggaagaagtacatacctctcatcctggcggtgcagtactttttcgtggtaaaaggaattcgaagggcgattcattctgacattgcaaacgggaagctggatgactgggagcagcgttacagagacttggttggaagctgtaacccagtagaccagaaagttccatcaccccgcaatcccaaggcctgaagctggccagtgagagcaaacggcagtctctgcattgtggcctgttcaactctcggcgctgttgttcttttcagactcctgattccggtggtctattttgggggctttatagagttctctgggacaacttgaataaagttgctagttttttagtcgctaagtgtatgtaccccatttcattatgctctcccaattttgcaaatgttattgatataaac

SEQ ID NO: 1398 - DNA, 684 bp, Avena sativa
caccatgataccgccgtccccgtcgagaagatcgacggtgacgtgaagacagaggcgccaccggcggtggtgcccgaggaggagaagaaaggtttcctggagaagatcaaggagaagcttcccggaggccacaagaagccggaagacgctgctgcggtgccggtcacacatgctgctccagcaccagtgcacgcgccggcgccggtcgccgaggaggtgagcagccctgacgggaaggagaagaagggcattcttggcaagatcatggacaagctgcctggctaccacaaggcagctggggaggaggacaaggccgctgctgcgaccgcaggcgagcacaagaccagcggctaatcgatgcctcgtcgagaatcaacaagaccggaccttgatcaaatgttggcgtgtgttttgctctgttctgtgttttaagttctgcgttttaaggttgaaggtctggtctgtgaagcccgttatgtggtggctgtctgtgtctactagtttggactttggaggcgctggcttcagtttggttcagagacaggctccgggtgtttaagtttgtgtacgcatgtgtacttgtgtattggtttatcgctgggcattatgccttaacattaaagatttctgacccagtgtatgtttttgcattttcctgaattaactatattgttgcaatgtaaa

SEQ ID NO: 1399 - DNA, 895 bp, Avena sativa
ggttttggaggtcgagcagaagtacagtgagattcgcagacctgtctatcttagaaggtgtgacatcatcaagacaatcccagacttttggctgacagcgtttctaagtcatccacttctcagcgagcttttgactgaagaggatcaaaagatgttcaagtacttggaatctgttgatgtggatgattctaaagatgtcaagtcaggctactccatcactcttaacttctctgagaatccgtactttgaagacaaaaagcttatcaagtcttatgcctttgctgatgacggaacaaccacaataaatgctacttccattaagtggaaggaaggaatggaggttaacggaaatgcacttaaaaagaaagggaacaagcgcccattggttgaagaaagtttcttcacctggtttactgatactgagcacaagagtcttgctgatggcgtgcaagatgaggttgcagagatcatcaaagaagatttgtggcccaaccctttgaaatatttcaataatgaggttgaagagtttgaaggagatgatgaggatgaagagccatccgacgatgaggctgaggaggatgaggatgaggagaactgagctccttagttggatccatgatcccgtcgtctgcagtttgtgtaggccgtgtccgtctgaaggctgaagtcatgtgacccttgtcgtgatggttttcttttgtgcttgacttagctggaacttagctttaggagctgtttaatgtcttatgaagtactgtcggtattttcgacttaaaggagacctctatatcataatctggctatattatgatgacaatttaacctgctatgtctgtggcccttgtcggtgctgcaaccttgtgctgtttgctataatgctattgtgatgttcttc

SEQ ID NO: 1400 - DNA, 724 bp, Avena sativa
tttaaaatttactacaaagatcaggttcattaactagttacattataacaccaaaaggacaaggcaaagcaacaagtccatgacattttcactacacaagcccgatttagatgtcgataacagtaacaaaattttagctgtgccactcgttactgatagtaacaggatgctcatgataaaactaacagaggataagagaagctctcgaagcaggcagtttcctacaaacaaagcagacataacagcagcttgaaaaacatttcactcatcctcctggctgcggagcctggcaagcttgttcgtgacaacgatatccagctgcgcagcacgctccacaatcaccttgcgcttctgggtagagacattgtgcgcgatctcagcacaatatgtcctgttgtgcatcataagcaactccagctcagagacgttgtggacgacaaacttcttgaacttgttgggcaggtaatgcctggtcttcttgtcagaaccgtaaccaatgttgggcatcaaggtacatcccttgaactttctccttacacgggagtcaataccctttggccggcgccagctgggcttgaggccgatgtagcgatcgctatgggccctcttgaagtgcttggtacgcttcttcacgatcttcgccgtcagcagaggcaccgccatctctgatctctgaaagctgacgaccctaaccctaacccggagcaaaggaggaagaacggcg

SEQ ID NO: 1401 - DNA, 797 bp, Avena sativa
  modified_base (793)..(793): a, c, t, g, unknown or other
gaagagagtacatcccagggtcctctaatcaatgaagctgctagttcaaaaggtagagaagtttgtaggtgatgctacttcaaagggtgccaacatcatgctgggtggtaaaaggcacagccttggaatgtcattttatgagccaactgtggtaggaaacgtcagcagtgatatgcttcttttcagggaagaagtttttggtccagttgcaccacttataccattcaaaaccgaggaagaagcaattcagttagcaaatgacacgaatgcaggcttagccgcatacatgtttacaaagagcataccccgttcatggcgtgtctccgaagcacttgaatacggtcttgtgggtgtgaacgagggattgatttcaacagaggtagcgccattcggcggggttaagcaatctggccttggacgagaaggatcgaaatatggcatggatgactacctggagatcaagtatgtatgcatggggaacctgagttagtgcttgaagctagcctttgcttccacctgaacgaagatgaaccaggaacctgctggggcgctggtgctggtgcactgtcaggtgtatcggaggattcgaggggatactcagttttaataaaagagtaccgtggaggttcctggagaacatagtagaaggtaggaataaagagagtaaagccgcagcagaataaaaaggttgaatgagttgtaaatgatggtaacatacatggtggctttatctcagaattttgtactgatctatcgcgatgttcatttagcatacgcagatgagtttttaaanaaaa

SEQ ID NO: 1402 - DNA, 798 bp, Avena sativa
gcatcggccattgggaggaaacgaagggagagcggcggaggaggcgaaggtatcatccatggccgcggtggttcggagcgtgtggcagggcatcagggagaagggtctcgtaaactttctccgctacgcccgcgacgagggatacctaaaatgccttccggacgggaacttattgcaaaccaaaattcacaacattggcgcaacccttgtaggagttgacagttttgggaacaagtactatgagaaactacatgacactcagtatggaaggcacaggtgggtagagtatgcggacaagggtcgttacaatgcatcccaagtgcctgctgaatggcatggatggctgcaccacattacagacagcactggggataagctgttggaggagaagactaaaaagtacatcatggagcacagacagaactacaccggacagggtgatgatctgatctaccactccaaggggcatgctctgaacccagggcaaagggactggacaaggtaccagccttgggaaccgaagaaagaggagacctcctgatctgaatggtacccgaattaatcatcttttgcgtttcgcatttggtttggtgtcacggagctgaaacagctagccagccagctcggtttcatggaccggacctgaataatgtatctgatactgaatacctgtcctgggcactgaacaaatttcaatccctgtgggaatgtgccaaaaaagaatgttgtggcgaatggatcgtctgtgtttgaatcgaatatttcttttcctgatgttaatgatgcattgatgttaga

SEQ ID NO: 1403 - DNA, 857 bp, Avena sativa
tttacaactgccatacaaaagaacaaaaattgtaatttgtaaagtaacaaaacagaatcccgttgcatattgcaatatacactatccgactctttaaccaaagaaaaaaatgaagttacaaattatttgaacttgaaaccagccttcgtctaaatacataatacaacacaatatcccgtctaccaacctcatgaaaaatgttcaatcgtttgctcaagtcatgacgagatgtaccgtgtacgccaattccacgaagcccaacagttccgttgttgcaaaaatcctgaacatgccatcccttttagggtctacttcttcgaaccacgtgctgcggcaaggtgatccgagacaaaatcaaaagctttagtttcatctttcttggaattgctcatcacggccacatgatgttgaggctgattactcgaattgaaaatatctggcattccagatgcatttgcaccattcattgaattgaaagacaaatgaccaagaccaccattgaaatttcctaaattttgtagtagctgctgctgctgagcaagaagagcttccatggcaccataatttaattgctgcccaggaaatgattgaccaaacatttgtggtgacatgttgtactgcaagggaacctgctgatagaatgagctttgaccaaggataccattcagtgctgcagcactcgccacgtggctagtctggctgttcatgtcaaagaactgtgaaccactgagattactattagtctctgcttttagtcctggctgagcttgggcagtgccattaaggttcaaaccagccattaggtcgtcgacagttcctttatcatcaactctttctggaacatggctcagggctgc

SEQ ID NO: 1404 - DNA, 701 bp, Avena sativa
cgaggaggtcgaggaggtcaacaagcagctcgatcagatgggttacaatattggaactcgattagttgacgaattcttagccaagtcaaacgtatcagggtgtgttgacttcaaggagaccgccgatactatagcgaagcttggattcaaaatgttccttggtgtgactgcaactgtaaccaattgggatgctgagggtacaacttgcagctttgtattggaggacaatccacttgtagattttgttgagcttcctgatacctgccagggccttcagtattgcaatgtgttgagtggagttatcaggggagcactcgaaatggtttccatgaagacggaggtcacatgggtccgtgatatgctccgcggggacgacgcctacgagatgcgggtgaagctcaccaagcaggtcccggaggagtatccctacaaggacgacgactagtttcaatctcaaggggttagttattttggcacgctggtggtcgtctggttttctctgtggctgtaatttctgaaacgattgtgaaggtttacaggcggcacccaccggtgcattatattttgcagctgcactgtgtactgctgatgtatttagtagagatttgtatggctttcctgctttggaagagtgataaatttagtcagggaaaaatctgatgctggctagattatgttgtttattttgcctaggaaaaaaa

SEQ ID NO: 1405 - DNA, 788 bp, Avena sativa
atgctgagcctcaccggatggcatttactttgcagcctcgatgaaagctttgatgtcgaaagctccatcaggatcagactttgtgattacacccttttctgttatgattgcagtaattagatttgctggagtgacgtcaaaggcggggttccacaccgatatacctgacgcggcgacttgctttcctagaccaccttcagcgttcaacagctctttaggagatctttcttctatgacgatttccttcccggatgggagggagagatcgattgaagttactggtgccgccacgtaaaactgcacgccgtgatgcttcgcagaaatcgagaggttgtatgtgccgatcttgttggcggtgtcaccatttgcggcgatacgatcagcaccaacaattacagcttgaacttgtccattattcatcaatgcagctgcagcagagtctgctatcagcgtggcaggtattttgtcatgaactaactcgaaagctgtaagcctggaaccctggttaaatggacgggtttcagtgcagaaggccttctccagaattcctccagagtgaagcgcacgaataatcccaagggcagttccataaccagcagttgcaaggctgccagtattacagtgggttagaacagagatgttttcgaacttccaagcttctgttgaagaaacttagctccatgcgagccaattgccttattatcagccacatcatcaactagcatagtctctgcagcttcgataaagacctgaagatagattttgcatcttttgctgtttcagctgtc

SEQ ID NO: 1406 - DNA, 714 bp, Avena sativa
caaagagcggcgcaccgtgcgagcggcccgaagccccgatatcgtcttactgccttcccaagccgaaaagcgccgtccccttccctttttcctcccaggcgaacgcgaatggagaagggctcaggcgccgccgcgggaggcagcgcgcggccaccgccgatgccgatgccgatgccgcagctggacgacttcccgttcgaggggaagaagcccgtcaagaaccccttcgtccccatcggtgcattggtcactgcgggtgtcctgacagctggtcttgtcagcttccggtacgggaattctcgactgggtcagaagctgatgagggcccgtgtggttgctcaaggcgtaacagttgctctgatggttggcagcgcgtactactacggtgaccaaatcaagctgttcaagaaaggggagagcccatgaacttgactgaattgtggtttgctatgtgtatgtgatgagaacttcatataattatgtgctcaagtttcacatggggctctgctgtgatgtgctgttcaatgctcccagtcttaggtagtagccatgttatttaggcttgggatgtggtatcgaactgatgatcaattttggctcagcctccttgttcacgaataaacggtttccacctgtttgagcctgcggtctgcagtcagatgttatctgatgcaaatgactgacatgaatacattatgtgcgttgtgtgtacaa

SEQ ID NO: 1407 - DNA, 905 bp, Avena sativa
gaacaagaccctcatcgtgggccgccactcgctgccggggtggacgctcctcggccacgtcgagtacgtctcggccggcccgcagccgggcggcatgttcttccccgtgccgcacggcgtgcacgcgctccgcctcggcagccgcgcctccgcgtcccagaacgtctccgtgcgccccggcacgctctacgcgctcaccttcgccgccacccgcacctgcgcccaggacgaggcgctccgcgtcgccgtgtcgccctcgctctcggcgccccgccgacgtcgccgtccgcacgctctacagcgccgacaccgcggatacctgggcctggggcttccgcgcctcctcccccgtcgcgcaggtcaccttcagcaaccccggcgtgcaggaggacgtcgcctgcggcccgctcctcgacgccgtcgccatcaaggagctccccacgccgtaccccaccaaagacaacctgatcaagaacgacgggttcgagatcggcccgcaggtgttcaagaactccagcgtgggcgtgctgctgccgccgaagcagaaggacaccacctcgccgctccccgggtggatcatcgagtccctcaaggccgtgcgctacatcgacgccgcgcacttctcggtcccggccggggcagtacgcggtggagctggtggcggggcgggagagcgccatcgcgcaggtgatccgcaccgtgcccaaccgcgcatacaacctgtccttcgtcgtcggcgacgccaagaacggctgccacggctccatgctggtggaggccttcgccgggaacgtgacgcagaaggtgccgttcgagtccacgggcaagggcggggtcaagcccaccagcgtgaggttcgtcgccgcgggggtcaggaccagggtcaccttctacagctccttcta

SEQ ID NO: 1408 - DNA, 956 bp, Avena sativa
attgccggcttcaagaaaataaaagcattactgcataataacgcaatgcttgctgcagctctccgtacctcatcaaaacttattataagtggtgatggaaaaagagtaaaacgtcggcatccatttactgaatctgatatgcaggagttccagtctcgaattgttgttgcagaaaatcttcctggcgatccttcttaccagaatcttatgaagatcttttcagctgttggcagtgtgaaaacaattcgtacatgctatcctcagactccaaatggccctggtccagctactaatagatctgccaagctagatatgctttttgccaacaagctgcatgcttttgtggaatacgagactcatgaggatgctatgaaggcaattctggagctaaatgatgaaaagaactggagaaatgggcttagagtacggctcctgaatacttgcatgaattcccgggatcggtaaaagggaaaaagggagcgcatgaaggtgatggaaacggtgaggaggatgtctcgacttcagaccaatcaaatgagagacaacttgaaggatcctttcaactgtcagatgtattgccagagcacttgtttgatgacaactcaattgacaaagaaggtccaaagagtgggaaaggctgtggtcatggctgcagaggccgagggcgagtgtatcatcaacagaacaacaatcagtactataatcacaatggcagcaaccatcaccaggttatcaaccgtggtggcaccaatccggttggcacaccaccaaacaagcagcccatcaagcccgagcagctactacctgtggccaacaaacaacctcctggcccacgtatgcctgatggcactcgtggttttgccctgggcagagggaagccgcaaccattgccgacagggttgtgcactgtagagccttaaaaccatcactgggtctcgtgttgatatagatggtgg

SEQ ID NO: 1409 - DNA, 911 bp, Avena sativa
ctctcgtccgctccccgtttcaaatcgagcccaggccgcagccgccgccgccgcgacgccatggtgaggctcaccgccgacctgatatggaagagccccccacttcttcaacgccgtcaaggaccgcgagctcgacctccgaagcaacaagatcgccgtcatcgagaacctcggcgccactgaggaccaatttgacacgattgacttgtcggataatgagattgtcaagcttgagaacttccctttcatgaaccgacttggcactctgttaatcaacaacaaccgaatcacacgtatcaatcccaagcttggtgagttcttaccgaagatgcatactttggtgctgacaaacaatcgtcttacaatgcttgcggagattgacccccttgcttctcttccaaagctgcaataccttagcttgctggataacactgtaactaagcagccagactaccggttgtatgtgatccacaaattgaagcatttgcgtttgctggatttcaagaaagtgaaacaacaggttcattcatttcatttggaatgatttccaaaatgatcttggaattgaccgcagaagtgctggcagcaaaaggggcaaaagagcaactcttttaacttcgagttttctgaattagatgcatgaataccattgaatgcttttagttggcatgcttttctgcgttattttgggggtgcatgattttgtttatatttctgaaattttgtgtgagattcaatgtttctgtaggagaaaattgcagcagcacaaaagttctactcaaaggaggcagaggaagaggcaaagaaggtagctgccaaagcttatattccagtaaaggtggctcaagataccacaaaggaccagggtcctaaagtagttgctccaacacccgcacagatcatggctatca

SEQ ID NO: 1410 - DNA, 805 bp, Avena sativa
ttggtcaaaatttcaattcgtctgaagatcaaaagtaacagcaacaatcctacctctaaatttcgtttcatctaaagatgacaaaatgtaaattcgagtctagaaactagatgtctctcctacagctggaactgattaaattcagcacttgttctaacctgtcaatcctacaatggaaacattgcattcgacgtcaccagatcaaaacagcaacaataaacatagaaatgtgcacaagacagccagcctgtgcagcaacattcaaatactagtataatagtcaaacccatacttcacaataagcaagtctagcaaacatagggaatttcaaatcatacggatcagacatcagacatatattaagctctggactctaaaatgaatcaacataatgttcagtcacagccaagccaagcggacgacgaccacggtgtgttggcccttattgataaccagcctcactcttccattcttaggcagacgcagaaccagtgaaggccacgagcttggtatggatctcatccttcttgccaccaacgaccgtgtggaccttctcaccgtccttgatgaacaggaaggtcggcattgcctcaaccccgtattcttcagcgacgttcttcagctcgtcaacatccaccttcaggaagatggcaccagggaacttcttggcgtactcagcgaacactggggcgatgacacgacaagggccgcaccatgaagcagtgaagtcaatgatcaccagcttgccggtgtccttgcccttggccatgtgggcatcgaactcgtccttggtgtggcaggatcc

SEQ ID NO: 1411 - DNA, 540 bp, Avena sativa
gggatcgcatccgccgccccctcagatcgccggctttacttcgtgagcgatggcgtcgatggcggacgaagcggctgccaatcagggtaagaaggaggaggaggagttcagcacggggcctctgtccgtgctcatgctgagcgtcaagaacaacacccaggtgcttatcaactgccggaacaacaagaagttacttggtcgcgtgagggcattcgatcgtcactgcaacatggttctcgagaacgttagggagatgtggactgaggtcccaaagactggcaaaggcaagaagaaggctcttccagtgaacaaggacaggttcatcagcaagatgttcctccgcggggactcggtcatcattgtcctcaggaacccgaagtgagtctgaagacgccagaagagctacgtcactgctagttgtaacgctgaatgctctaagatgtcagggaatgtttaaagagccgagatggttgtgaagccagaattattgatggtccagtgttgtagtttgggattctgtgatttcctctatatctagtt

SEQ ID NO: 1412 - DNA, 841 bp, Avena sativa
ccaacggttccgctgccgctgtcgctgctccggcagcccccgcggccaaggtcaaggctgcggcggcggaggtggtggtggcggcgcccaagttcgaggactcgaggtgggtgaacggtacctgggacctcagccgcttcgggagcgcgggcggcggcgccgtcgactgggacgccgtcatagacgctgaggccaggaggaggaaatggcttgaagattccccggaggcaagcagcagcgatgacgcggttgtgttcgacacttcggtgatcccatggtgggcatggatcaagcggttccatctacctgaagccgagaagctaaatggccgtgctgccatggttggattcttcatggcgtacttcgttgatagcttgacgggcgtggggctcgtcgaccaaatgggcaacttcttctgcaaaaccctgctgtttgttgccgtggctggcgtgctgctggtcaggaaaaacgaggacatcgataatctgaagaagctgattgatgagtcgacgttctacgacaagcaatggcagtcaacctggcaagacgattccactaccgggccgaagaagtagctgggaggttgaattttgtggtagccaagagggggtgatgcggtggactttctcctccttatgttgcactgtttcttttatatcagcattttgtttcccaattttagtgaggctcgcgacgaactttgtaatacctatgccgtctcttgtaaaaagtatgaactcatttctgtgctagagcctagatgtaaacgctactgagggttacttagctgaatgttttgctcatgctgattgcataataatacacacttgcagccttgcaa

SEQ ID NO: 1413 - DNA, 801 bp, Avena sativa
tagtacaactttgcattaaaatagtaacacgttttgggccaaattcagatcatttaggaacggaaaatagaacacttacattgacatgaagtcgctataacgcgcaaaaaaggaaaaaaatgaagtcgctagtataatattggtacaagcgcacaaccactcttgtcaaatactcaaccttccaatcagctcccagaatcttattgaaaattgcaagccaccagacgcttaacacgtagggtagcgctgataaaaatgaattaataaaagtggtaggggcgcagaatggtcgtcgcattggccggatcggatcggatcggatcagacgaggcggcggcagatggtgaccccatcggcgatggctagctggcagacctcgatgcgcgggtcggcagcgagcctggcgttgaggtccctgattgctgcggagaacctggtgtcgaggtcggacatgggcgtcccgggcggcatggcgacggtgccgccccagagcgtgttgtcgtagatgatggtgccgccgacgcgcacgaggcggagcagctgctcgtggtacttgaggtagttgggcttgtcggcgtcgacgaaggcgaagtcgtagggctcggcgccggcgtcctgctcggcgaggagctcctcgaggcggtccaggccgaggccctcgcggaagtccaccttgtgcgcgacgccggccttctcgatgaaggggcggccgatctcgtagcactccctgtcggggtcgatggccaccaccttgccgtcggcggggagcgcgagcgcggtggcgaggagcgagtagccggt

SEQ ID NO: 1414 - DNA, 761 bp, Avena sativa
cagcaggtgggctatgatacgcccccaccgaatccacctctgaagcctccgcggtcaccgccgtccctcgccgccgcgtcctcggccaccatagtacctttctccttcagcaggtttcaggaactcattgatgctcacagacttcttagcacgctcatcgcgttcagcattttctttcttcttcaaagcatccttatcagcacccagtttgatgaaaacctcgtcatttcctttcttagtggaaagcagctgcatagcctgcagatccttatcaatttcaaccttcctctcttcagacttcagagcaagaagcgctttccgcttctcctccaatactttctcaaattcatcaagagtcatctccttatcttcttcttccttatcttcctccacatttgtagtggcatctttgctgaccttgtcctcctctgcttgtggtgcatcctcaggtgcaccctgcttctcaggaacagggaccttctcatccagcttgagggcctcagtttcctgggcgagaaattcatcagaggtagttccccagttcccacggccagcaccctcgcgcttcatctcatacccacggcctgtgccgctgtggcgctcatagttccttcggggtggcctctcagaatcatcaccgaactcaccttccctataaccacctcggcggcctccctggtatggtggccgagggcccctatctccaccttcctcacctccagttctggcaccatatcctcccctgtagccattggtgtcct

SEQ ID NO: 1415 - DNA, 882 bp, Avena sativa
tactagaagtcactacattctccattgctatataatgtctgagaatttttgtgaacatgctgcccaagaagcatatagtgtgtacacaataacgcaaataaaagaaaacaagttgtatgaaggtcacacattctttactttactgtgacaaataagtcactcctataaaacaaaatgacttacaaaggttccatttctacaaaaagaacttcacacgtgaactcggaatatgaataacaacaaggacctcaaaaattagtttcacaaattgcacacaacttccagtccatggttgacagatgatttatactgatctgtcataccgatacagtagaactctgtaagtatgttgtctgctttctgttggtggcctttgctgtatatcaaacaaccatctgctcctctccatttgatgcttatgaatgttcagggatgtgactcttcatggtttccaagctgatggtgggggtggcggagttgggaacattgggggaactgctgagaagatggtgttcttatcaacggaagttctgctgccagtatcgatatcagctagagaaatcagtgctgcaaccaagccagcatttgctgcaagagtaggctctgtgtaattatagtttgtgcggatatctttgaagccatcatgcctgtcagggccagcaaccattgctccgacgaggatatttgggtttgcctttttagactccctccatttgaaacctcctttgcatccgtagtggacaccgttatgagggattgacgcccctctgtgatgaacacgctttgggtacttctttccataaccaacaacatagctcatcttttgtgggttcttgcctaagaatgtaatcgatctgtgactttgcaaacttgcggaggaca

SEQ ID NO: 1416 - DNA, 599 bp, Avena sativa
agggccttggagacgtcgaagatccccgaaggcttcgccgacagggccggcgggaggggcctcatcgtgacgtggacggcgcagctggaggtgctggctcatccggccgtcgggtgcttcgtgacgcactgcgggtggaactcgacgacggaggcgctgggcgcgggcgtgccgatggtggcgatgccgcactggtcggaccagccgaccaacgccaagtacatcgaggacgtgtggcgcgtgggcgtgcgcgcgcggcgggacgacggtggggtggtgcggagggaggaggtggagaggtgcgtgagggaggtgatggagggagagaggagcgaggagtacgtgcggaacgctgtcgagtggaaggagaaggccattaacgccatgggtgaaggtggcagctccgatagaaacatcaccgagtttcttcgtcaaatcaggtccaaaaaacctgagcaagcaagcaaggcagaatctgttgtgtgattgtgtcgcattttgtgtcaagcttgtcagtcaaaccgttaatcaagttggaacggaattatccgaataaaaattatagggacgaccttgaactatattttaggagaaatcaa

SEQ ID NO: 1417 - DNA, 956 bp, Avena sativa
cgaggaggcagctcggatccgggcccatgctggggcaggtgctgcggaggctccgcccggcggcggcggcggcgtccacggaggcgacgcgggggtactccgccggggcgaaggagatcactgtccgtgatgcgttgaactctgcactagatgaagaaatgtctgctgatccttctgtctttctgatgggtgaagaggttggagaatatcaaggtgcatacaagatcacaaagggcttgcttgacaagtatggtcctgatagggttcttgatacaccaattacagaggctggttttacgggcattggtgttggtgcggcctatcaaggtcttcggccggtcatagagttcatgacatttaatttctcaatgcaggcaatcgatcatatcatcaactcagctgccaagtcaaactacatgtcagctggtcagatcaatgttcctattgttttcagaggaccaaatggagctgctgctggagttggtgctcagcactcacagtgttatgcagcttggtttgcacatgttccaggacttaaggttctggctccatattcctcagaagatgctcgaggcttgctaaaggctgcaattcgggatcccgatcctgttgtttttctggaaaatgaattactctacggagaatctttccctgtttctgatgaagtgcttgattctagttttgctctgccaattggcaaagctaagattgaacgtgaaggtaaagatgttacaattactgcattctccaagatggtcggttatgctcttcaggctgctgagatactgtccaaggaaggaattagtgctgaggtgatcaaccttcgatcaattagaccactggatagggctgccataaatgcatctgttaggaaaacaaatagattggtgactcttgaagaaggcttcccccagcatggtgttggtgctgaaatatgcatgtctgttgtagaagaa

SEQ ID NO: 1418 - DNA, 1002 bp, Avena sativa
tgacgtcacccggatgagagaccactttcaccaacaagcttcagcagaattgatggatgagaacacatgaagcaggcttaacatctctgtgcaggcaaaacccagaattgctaacactaacaatctgacaatcagaaaaaggtgtatacagaactagctgcagcacaaggccacacggatttacattctgaaattttgctttgtcttgatcacacgcttcaatgccgagagccagaagttgcactcgtcccaatcactggttgtcagctgaatctgaatttgcatcgcagtggccaaatcactattatcaagtgcactgcacatctgaatgagttttgatgaaacatttggagagatatcgccactgttgagttttgcaaataaggccccgatcttctttgagttgtcttcaatttcacgttttttagcttgtgtgcctccgagagctttggatgtctcgtcaaatagtctggtgagtgttgcaataacaggtctcagctcagcagacacattcgatgtatcagctgtctgcacagttgggggaggtgcaggaggggcaacggcaggctgtgccggtggctgcacctgtgttgggctcgagggctgtacaggactcggacctgggtgctgagcaaaaccttgattgtttgatggcataaacctggaggctgaattagtcggaacagcaggggtgaacatctgattagggtttgttcctggcacagaaggggcagatggaacaggctggaattgagccggcggctgatggtatgtggtgggaggtccacttgtgtactgggcaggtggtccagacgcaaatgacgaattagcaggagccgtgtaaagctgggagcccaaggtacttggctgctgatattgatctagttttttagactcggtatgttagcaggagtaaaacccttcactgtctgttgtggaaccggtaacggagtggaatttggctgggtgtccactggtgcgttacgaggaacaaacatctgc

SEQ ID NO: 1419 - DNA, 509 bp, Avena sativa
gtcacgacaaccccacacccacccctcttcttcccctccaccattcccctaccctcgccgcaacaaccagacctcgatcccaaccaaacgcgcggagcggagcggagcagcaagatggccttcctgaacaagttcgacccgtggcccgtgttcttccgtcgggagtggaagcgcaactggcccttcctggcgggcttcgccgtcaccgggatcatcatcaccaagatgaccgccggattcaccgaggaggacctcaagaactccaagttcgttcaggcgcacaagaggcactgaggctgggctgaaggaatggctgctgcgcttcttgctgaattagtggcatcaacattgctggcagctttaatatgttgtttcgatgaactcactcaatgcatgtcttagtctatccagttttctattatacttcttttttatgtaataagaggtttctgaatgcataaaccaagaagttccaagcttctcaagatgtgataccttgtttcttacaa

SEQ ID NO: 1420 - DNA, 895 bp, Avena sativa
catagtcgagcctcaagaggccatccttggtggattcccatcaatacatgaatgcattgggaattccaaatatatattttttgtatttttctcagttcttcaactaacggcgatcaaaaagtacaacctgcgcccactgttggcagtccatcgggattcaggaactacactgtaataataaagcattttcaacatttacttcatctcacgcatcacaaacaccagtcatgggctcactctccttggtctcgtctgcatctttgctgtcatgttcatccacatcggcatccttcatttgataatccaccttgaaatcataatcggcatccatgtcattcaggacgctgaacttgttccccttccgccgtttcttctctaaccttttcttgcgaggatcaagtataccctccgcagtgtacaacttgtcatgttgtgtgttaccactagtcgtcttgcttccttcacggtcattcacatcacacatggattcgtcagggttttcctggacaggcccgctctgcgttttgccatcctcgagcatctcttcatcaatctctggtgggtcattacatggaatttcaatatgactgaaatcctccatggattttagaccactaataaatgaagactcagctttgtaaatctcatcaacattaaattctcttccgtcttctgagataattactgcattggcatcctccatagaagcccttttaggtggcagagtataatagggtactttaccttcattccagtcatgaagcactatttttgcagcagcttcaacatcaactataccaccctttttcaatttaccccggagtgtagcaagtttttgaaggaaatcatcaactgaagtaaatcttgggatcttgtacagggagagcaatttctc

SEQ ID NO: 1421 - DNA, 1000 bp, Avena sativa
tacacaatcggtagagtacattggcagcacaagcatgctttattactatataataattacttattaagctaagaatgtccaaacagctacagcccaaaataatctagaatacagtatcagaaccttgccacaagtcctaatttgattacttcatgtgatacagctactatgaattaagcttttacaagttaacactgtagcacctgaaactgacaacttaatcgtgtaccgtgtgcattcaggttccatctcttgggattacaaggtcgacctggagtttgaactccttaagcaagctctatgacaaccgcagatgctcctccgccgccgttgcagacaccagcaaccccgattttgccacccttctccctaagaacaccaagaagggtgaccaaaatgcgagcgccactgcatccaagtgggtgccctaaagacacagctcctccatgtacattaatcttttctgaaggaatgccgagaagcttttgatttgcaagtgcaacagccgcaaaggcttcattaatttcataaaaatcaacacgagaagactctaagccagcattcgtgagagccttcggtatagccagtgctggggcagtggtaaatagttcaggagcttgtgctgcatcggcatatcctttgatccttgcgaggacttgcaatccaagttcttgagccttcttcccactcaccaatactaatgcagcagctccatcacttatactagaagcatttccagcagtaacagtaccagcattctccttgaaacttggtcgaagcttcttcagtttcactgggtcaaacttgtctaagctctcatctttgtcaacgagtactggaggtttccctctaccaacaggaacttcaatcggaacaatctcccatgcaaaagcaccactgtcacgagcagcaattccacgctcattactttgaatagcaaaagcatcctggtcttcccttgtcagggcatgattgtcagcacaaagctcagcacaaactc

SEQ ID NO: 1422 - DNA, 952 bp, Avena sativa
ggaggatatttcgatcaatatggaatcatccgtgatatcattcagaaccatttgttgcaggttttctgtttggttgcaatggaaaagcctgtatcacttaagcctgagcacattagagatgagaaagtcaaggttctgcaatccgtgaacccgataaaggacgaagaggtagtacttggacaatatcagggctacaaggatgaccctacggtgccagatgactctaataccccaacatttgcatctattgtacttcgagtacacaatgaaagatgggaaggtgttcctttcattcttaaagctggtaaagcattgaactcaaggaaagcagaaattcgtgtacagttcaaggatgttcctggtgacatttttagatgtaagaagcaaggaagaaatgagtttgtcatacgcctccagccatcagaagccatgtacatgaaactaactgtgaagaaacctggattagaaatggctactgaacagagtgaacttgatctgtcatatgggatgcggtaccaaaatgtcacaattccagaggcatacgaacgcctcattttggatacgataagaggagaccagcaacactttgtgcgccgagatgagctgaaggctgcatggcagatcttcactcccttgttgcacgacatcgacgcgggcaagctgaagactgttccgtatcagcctggcagccgaggccccaaggaggccgatgaactgagcgagaaggttgggtatatgcagacccacggttacatatggataccacccacccttgcatagagtgctgcccccgttcaatcctcgtaggtattgttttagataggaagagcaaaactttcacggatacaagtgttacgagagctttcactgtactgccgattacgtggcgttgtaataacaggtctgcttggccaaatgtacccccgctacggtgtgaaataaaagaatgcag

SEQ ID NO: 1423 - DNA, 550 bp, Avena sativa
tagttctagatcgcgattaattaactttttttggttagaaggaccaagcgtgtcatgctgtcacaaaaatggtgataacagcgtagtagcaatttacaagaaagactctgaagctagtgaaaattgatagtacaagcagcggcatcagcagaagaagaaagaaaagcgtttgggcatgcgagtagcagcggaggttgagagcatgtgcagtgttcccatactaggatgatttactccgattctccttccttgaacaccttcacccagttgtcgacgctgtcgattacttcgccagtcttcttcaggtagcgaaccttggtgccgtcctcgaggatcttgtgcccaaccctactcgtcacgttcttctcctttgagtagagcatcatgttggagctgtgaatgggaccttcgatcatgataatttcacccggttcttcgtctgttcccttcttgtgctttgacttcaagttcaggtccttcactatcacggtgctgttgtgcttgtaaagccgtacgacttcccccaactttacccttctcacgtcctgcg

SEQ ID NO: 1424 - DNA, 1014 bp, Avena sativa
catcaactgctgaaaagcgtgctgctgagatattgtttggtctaggttttgacaagcagatgcaagcaaagccaactcgagatttttctggtggttggcgtatgaggattgcgttggcaagggcgctgttcatgaatccgaccatccttttgcttgatgagccaactaaccatctcgatcttgaggcttgtgtttggctggaagagaaattaaagaattttgagcgtattcttgttgtcatctcacactcacaagatttcctgaatggagtgtgcactaacatcatccacatgcagaacaagatcctcaagttatatactggtaattatgaccagtatgtgcaaacccgctctgaacttgaagagaatcaaatgaagcagtacaaatgggagcaggaacagattgctggtatgaaggagtacattgcgcgatttggtcacggatctgcaaagcttgctcgtcaggctcagagcaaagagaaaactcttgcaaagatggagcgaggtggtctcgctgagaaggttgtcaatgacaagattctggtgttccgctttacagatgttggcaaactcccaccaccagtgctacaatttgctgatgtcacgtttggatacactccggataatctcatttacaagaaccttgactttggtgttgaccttgactcaagagttgcactggttggtcccaatggtgcagggaaaagcacactcctgaagctcatgactggtgaccttactccattggatggcatggtcaggcgccacaatcacctacgcattgctcaatttcatcaacatctcactgagaagctggatctggatatgccagctctgcagtacatgatgagggagtaccctgggaatgaggaggagaagatgagagcttcaattggcaagtttggcctctcagggaaggcacaggtaatgccaatgaaaaatctgtcagatggacagaaggcccgtgttatctttgcttggctggcattcaggcagccgcagatgcttttgcttg

SEQ ID NO: 1425 - DNA, 902 bp, Avena sativa
gattcggattgtctcgtgtcccaccggtctccataccttggttatgctgttctcttttggtggcaatcttcagcaacgcctcattagagccttctaccaagaatgttggtgcgagaattgatacaataaagcggagtcagtagaaactgaactaactggtttatttaagctgagtaaaccagtccttttatatcccgaaattttcatccatccgacgaactgagtggagatgctctaacagtttctacggaaaacaagtcaagtccatgctcggaggtctggtgcatcttctgttcctcactaggaagtgccagacctacagcccatttgggttattcctctacaaatttgcaaacattcaacaaagcttttggtacagatgcttgatttccttcaataatcaaggtgcaacatgcagcaaaaacaacattcttaacctggtataagcatattcaaaccttggacaaccaggagagcgaaagagatatcaagtactactactccctctgtttcaaaatataagatgttttagatttgtgaataaaatgtatcttagacttttttatcttatgttttgaaacagagggcgtacataactaagtaatagcccaggatcgtacgggcacctaaattgtgtagttagctaggagagactcaatagctgaattcttcgcctgcacatcttcatatcggatccgatagccatgcccaggtaaataccacacgaagtctgcgtcaagcaacttcctcatgctgtccagttgcaaagtcactgactgcttgctgtaaatccgaaagaggttcagatcgtctgattcttcagacttcgcgacgtggtcgccggtgaataatgccttcagcggtttgtacaacaagcagaccgagccctacagaaaaatgta

SEQ ID NO: 1426 - DNA, 745 bp, Avena sativa
tttttgtgaaaacagctatatatagaaacataatgcaacaaaaaacaccaaccgtgacttgggcaattaattcctttgatcactagaactcaggtgcatcatggagccacgcatagcttcttccattacagcaacacaagcagtgccaagaggaatcacaatcagtagatagctcagtttaatccatccaacattctaacttaagtgatacaatcttgatctgatctactaccatcataggaaataagcaagcttagcgaaggcttcatagtacttcacttttatggcaggaaatgggctggataacttccacaattactcggccacgttaaccaattcatactctacttgtgacaagttgttatcttcattcaccgtaaagctggcaggttctggggcggcttccacccgaccccacttgtccaccgcaagcctcatagaagatttgaacatgtcaattttagcgttgcgcatgatcgccgtggcaccagccttcaacaggtcaacttggtcgttgcgggcggtaaagataatggaaccagtctcgtcgccgacgacgcactccgcgatgcggggagcacgagcagaagaggaggcaggggcaccagggcgcacgcggcctgggacagggttggcgctgacgaccttgacgaggaggttgtgaccgttggtgcccggcttgagctggtccaccttgacgaagatcggcttcctgagcgccggcttctcgccgccctgcgccgcc

SEQ ID NO: 1427 - DNA, 966 bp, Avena sativa
  modified_base (331)..(331): a, c, t, g, unknown or other
cgcgtcaagggtccaggaggttgctgagctaggaggactgccaccatgaaggccctcattctcgtgggaggcttcggcactcgcctccggccgctcacgctcagcgtgcccaagccgctcgtcgatttcgccaacaagcccatgatcctgcaccagatcgaggctctgaaagatgtgggagttacagaggtcatcctggccatcaattaccagccagaggtcatgctcaacttcctcaaggacttcgagagcaagcttggcatcaagatcacctgctcccaggagacagagccaatggggaaccgctggtccgctggccctggcccggganaagctcgacgacggctccggcgagcctttcttcgtcctcaacagcgacgtgatcagcgagtacccgttcgcagagctcattgagttccacaagtcccatggcggcgaggccaccatcatggtcaccaaggtcgacgagccttccaagtacggtgtggtggtcactgaggaggcgaccgggaaagtggaacggttcgtggagaagcccaaggtgttcgtgggcaacaagatcaacgccggcatctacctgctgagcccgtccgtcctggaccgcatcgagctgaagccgacgtccatcgagaaggaggtgttcccgcgcatcgcggacgacaagggcctgtacgccatggtgctgccggggttctggatggacatcgggcagccgagggactacatcacggggctgaggctctacctggactccctgaggaagaaggcgccggagaagctggcgtcgggcacgcacgtcctgggcaacgtgctggtccacgagacggcgacgatcggcgagggctgcctgatcgggccggacgtggccatcggccccgggtgcgtggtggagtccggggtgaggctgtcgaggtgcacggtgatgcgtggcgcccgggtgaagaagcacgcgtgcatctccggcag

SEQ ID NO: 1428 - DNA, 767 bp, Avena sativa
ctgtgcagggccggtgaggactacagcctgacggtgaggaacggcaccgtgtgcctcgcacccaccaaccccagagacgaattccagcactgggtgaaggacatgaggcacagcacccggatcaaggacgaggaaggctaccctgcgtttgccctggtgaacaaggtcaccggcgaagccatcaagcactccctcggacagaaccacccggtgaagcttgtgccttacaaccccgagtacatggacgagtcggtgatgtggacggagagcagggacgtgggcaagggcttccgctgcatccgcatggtcaacaacacccgcctcaacttcgacgccctcaacggcgacaaggaccacggcggcgtccacgacggcaccaccatcgtgctctgggagtggtgcaagggcgacaaccagagctggaagatcctaccctggtaaagcttgatgccgtgtacatgttggtttccagttcagtagacagaataaacaaccaggtctgcagctacgatccatggtcagtacgtcacttgacagtcgagatcggatcgcttcgttcacgaattccgatcaggtcgaaggcgaggtggctatgtatcttcgtagtttgaagtggtcgctatatatagatcgatccgtgcacatgttgacatgtgcccttctgtatgtgtgtgagagagagagtcgcactggtgtgctagctgtatctttcgtttctgatgaacaataaccatacatgcatatgcatcttcaattgaacaaaaaaa

SEQ ID NO: 1429 - DNA, 652 bp, Avena sativa
acaaagtttgttgatgggctccttagctcgagacatgaccttacaaccttcaaaaccaatattagagacttcctggtgcaatcgaaggagttttcggtgcaggataacaaggatctgtatgcggaagaggctgctgtacaaagagaaaaggaacggcaacggatgatgtccattcctgggctcattgccccgagcgaattgcaagacgagatggtagattcatagtgtgcctgctgattctgcctttctaatccagtggcctggagagggcctcgacatcatccccccaaaacgccttagtgatcttccatggtggtgaaaggtgcctgctgtaattttattctcggttgcctccacttgactcttgatagggactcaattttgtcgcaagagctgctttggagtggtattggtttgcggcattttgcgctgtgtgggttagatttggtttagcaagcagctcttgcgctcctccttgagtttgtaacatttggttggtgctgtgtgatgagccatgatgatcacggtgcaaaattgtatggtgctgcttattgctagtttagcctatagtttgactgtatgatgtaccaagactgatccagactgataggaaccttataatcctgctattgtactgttatgtagaaaaaaa

SEQ ID NO: 1430 - DNA, 543 bp, Avena sativa
ccgggattgctccgatccaaacccccatccatcatcatcatcgtcactctctcttcctctccaattgggtgcgtcctcgaagatggcgtcgtccaaggtgttcaccctggaggaggtctccaaccacagctccaaggacgactgctggctcatcatcggcggaaaggtctacaatgttaccaagttcctcgatgaccaccctggaggtgacgatgtcctgctgtcctcaactgccaaggatgccaccgacgacttcgaggacgtgggtcacagcaccaccgccagggcgatgatggacgagtactacgtcggcgagatcgacgccaccacgatacccaccaaggtcaagtacgcgccccccaagcagccgcactacaaccaggacaagacccccgagttcatcatcaagatcctccagttcctcgtccccttggcgatactgggcctcgctgtcgccgtacggatctacaccaagtcggagtctgcctagtattgttgtcgtcggtctttccttatggatctactacacccaagtcggagtct

SEQ ID NO: 1431 - DNA, 880 bp, Avena sativa
  modified_base (859)..(859): a, c, t, g, unknown or other
cagatgaaatatctctgaaaactgggacaggaacatgttcttacaggtggccatggtctgatggttgatggatactatcctgtaattcaggcccttgctcagggtcttgatatccgtctcaatcagagagtaaccaaaatcgcccgccaatacaatggagtgacggtcaccaccgaggacggcacgcaacactctgccgacgcgtgcataatcacggtgccactgggtgtgctcaaggcgaacataatcaagtttgagcccgagctacccacgtggaagagctccgccatcgccgaccttggtgtcggcatagagaacaaggtggccatgcacttcgacaaggccttctggcccaacgtgcaggtgctggggatggtcggcccgaccccgaagacgtgcggctacttcctgaacctccacaaggccaccggcaacccggtcctggtctacatggccgccggccggttcgcccaggaggtggagaaactttccgacaaggaggctgtggccctcgtcatggctcacctcaagaagatggtgccagaagccactgaacctacgcagtacctggtgtcgcggtggggctctgacccgaattctctggggtcatactcttgcgacctggtggggaagccggcggatgtgtgcgagaggttctcggcgccggtggatagcatgctgtatttcgccggagaggcggccagcgcggagcactcgggcgcggtgcacggcgcctactcgtcgggcatggatgccgccgaggagtgccggacgcggctgctcatgcggaagggcgtcccggatctagtccaggtcgccgccgcctgcgaggagatggccgacgtcgtcgcccctctcngatttgccgcacgtagaatgc

SEQ ID NO: 1432 - DNA, 534 bp, Avena sativa
ggatgaccaccacagctagcgcacttccttggacactttgaaccaactctttctgatcagcctagctaagcttgtttcacagtgagctccaaatggcttactccaaaaccctagctgctggcatcctcgccatgatgttccttgctccatccatccaagccaccgacccagacccgctccaggacttctgtgtggctgacctcgacggcaaggcggtgtcggtgaacgggcacccgtgcaagcccatgtcggaggccggcgatgacttcctattctcctccaagctgaccaaggccggcaacacgtccaccccaaatggctcggctgtcacggagctagacgtggcggagtggcccggtaccaacacgctaggcgtgtccatgaaccgtgtcgacttcgcgcccggaggcaccaacccgccccacatccacccgcgcgccactgagatcggcatcgtgatgaaaggtgagctcctcgttggcatcatcggcagcctcgactccgggaacaagctctactccaaggtgttgcgtg

SEQ ID NO: 1433 - DNA, 1025 bp, Avena sativa
caagaattcggccttaagccaatgaattgtcctggccattgcctaatgtttggccacaaggttcgatcatatagagagttgcctctccgcatggccgattttggggttctgcacaggaatgagcttagtggtgcacttacaggtttgacacgtgttagaagattccagcaggacgatgcccatattttttgcacggagagccaaatcaaggatgaagttcgggctgctttggaattcgttgattatgtttataaaatatttgggtttaaatatgagttagagttatcaacgagaccagagaagtatttaggtgacattgagacctggaacaaagcagagcaacaactgactgaagcattggttgagtttgggaaggaatggaagatcaatgaaggggatggtgctttctatggtccaaaaatagatattggtgtgtttgatgccctcaagaggaaatttcagtgtgcaactctgcagcttgattttcaattgcccagtcgcttcaagttgacttattctgcagaggatgaagccaagcttgagaggcctgtgatgatacacagggcaatactaggatcagttgaaaggatgtttgccatccttctggagcactacaatggtaaatggcctttgtggttaagccctcgccaagccattgtttgttgtgtatcttccaattcactagaatatgcgaaaaaggttcatgctgagatacgtgcagctggttttcatgttgacgtcgacatgactgataggacaattcaaaagaaggtacgggaggctcagttagcccaattcaactacattcttgttgttggtgcaaaagaggcagagtctggaaaggttgtcttgaggataagagacaaggcagatctatccaccgagagcactgctgacgtcatcacacgtttccgtgatgaagttgcgtctttcctgtgactttaaagtcacagtaatcttttgtgccaaacaattgctactcgtattgtaatttggtgcggtctggggtgaacgacaccaaatca

SEQ ID NO: 1434 - DNA, 575 bp, Avena sativa
ctgctgactacgaagatcgtgaagaagagggtcaaacaattcaagagggcccatagcgaccgctacattggcctcaagactagctggcgcaggccgaagggtattgattcccgtgtcaggagaaagttcaagggagtcacgttgatgcccaacattggctacgggtcggacaagaagaccaggcactaccttcctaacaagttcaagaagtttgttgtccacaacatctctgagctggagctgctcatgatgcacaacaggacctactgcgcggagattgcccacaacatctccacgaagaagcgcaaggacatcgtcgagcgtgctgcacagctcgacatcgtggtcaccaacaagcttgccaggctccgcagccaggaggatgagtagagtgttcttgattgcgttgctatgttttggtatggctcgtatgtaggaaactgttccgcttatctcccatcgtgctattgtcatggatacctgtttagcgcaactttgttattggtggtgactaatgtgcgaaagatttactgttgccttgagaatctaattcttgttgccaattgcttgaaaaa

SEQ ID NO: 1435 - DNA, 767 bp, Avena sativa
gtgcagcaggccgctgagctctctgtggctgctcctaccattgaggcgtccttggattccaggttcctcagcgggttgaaggacgagcgtgtcgccgcttccaagatcttccaaggtgactacaccagcgatgaacctgtcgacaaggcacagctgattgaggatgtgaggaaagccctctacgcctccaagatctgcagctacgcgcagggcatgaacatcatcaaggccaagagcacggagaaaggatggggcctcaaccttggcgagctggctaggatctggaagggcgggtgcatcatccgggccagcttcctggaccgcatcaagaaagcttatgacaggaatgctgagctcgccaaccttctcatcgaccctgagttcgcgcaggagatcatggacaggcaagccgcgtggcggagggtcgtctgccttgccatcaacaacggtgtcagcacccccggcatgtctgcgagtctggcctactttgactcctaccggagggacaggctgcccgcgaacctggtgcaggcgcagagggactactttggggctcacacctacgagagggtcgacatgccaggctccttccacaccgagtggtacaagatcgcaaactcgaagatctgagtgagcggctgctgctcttctgggttgacggcacatcatggttttatcgtctcagtatctttgatgcccggttacgagtccttttcatgtagggaggaactgctgtttaatttatttgagtaatgcgtcatgtattt

SEQ ID NO: 1436 - DNA, 718 bp, Avena sativa
aagatgagagggttcctacgggcatcatccataaccctgagatgtctagagatttgaacaggaccttagttcttccaggaccagagcacagggcttctgttccaccacttcaggtgtccttggacgaaaatgaagtttctgaccaagagggtgatccgaaaaatcatgcaattgctaatggaactgaatcagaagtgaaaaagagcgataaacggttaaaggagaagacgagaaagagaaaagaaacgggaaacacgaaacaagtgccttggaggaaaggtctctacagaaagataaaccgcagactccggatgatttcgagaagttggttaggagctctccaaatagtagttttgtctggataagctatatggcatttttgttagaccttgcggatgttgagaaagcacgttcagtagctgaaagggctttgagaacaataaacattagagaggaggaggagaaactcaatgtatgggtagcatactttaaccttgaaaatgaatatgggagtccacgtgaggatgctgtcaagaagatattccaaagagcgttgcagtattgtgatcccaaaaaggcgtacttcgctcttcttggaatgtatgagaggactgaacagcacgaactggcagatgaactttttgatagaatgaccaaaagattcaaaacttcatgcaagatctggttacgccgcattcaattttctctcaagcaaggc

SEQ ID NO: 1437 - DNA, 513 bp, Avena sativa
ttttttttaagttaaatacgggacagcaatgtcgttctcactcattttaaatagtagcaaaagtctgcaacacataagcacataagaggtccgcaaccaaggcctcaatagtcaaacacggaaacaggtaactggccagtcagcgacaggcagatagataaagcccaacatccggcgcaaaaactcaaactcacccaagttcaaccacaggggataaaagaatagcatcattcgattgctacgactctaactaagcgatagtgttgtcggccagtgatagcccagcaagttggctggtaggggcgttcggattctgctgctgagccacgttgcggagaacatccattgcctcagcaaccttcgacttcagagcctccggagactcgagcagatgcagaacctctgtctggtccatctcgagaagcatgccagtgacctttgcagcttggttgcgttccagtttgctcgaacaagtggatagaggctttctccaagtaacgttctttgctggtc

SEQ ID NO: 1438 - DNA, 805 bp, Avena sativa
  modified_base (772)..(772): a, c, t, g, unknown or other
atgaattgggtagcaaggacaacactgaatacattgctggaggagccactcagaactctatcagggttgcccaatggatgcttcaaatccctggtgcaactagtttcatgggctgcattgggaaggacaagtttggcgaggagatgaagaacaatgcacaagctgctggtgtcaatgcccactattatgaggatgccaatgctccaaccggcacatgtgctgtctgtgttgttggtggcgagaggtcacttgttgcaaatttgtccgcagcaaactgctacaagtctgaacatctaaagagaccagagaactggacgctggtcgagaaggcaaaatatgtttacattgccggctttttccttaccgtgtcccctgatagtattcaacttgtcgctgagcacgctgctgcaactaacaaggtgtttatgatgaacctttctgccccctttatctgtgagtttttccgtgatgcccaagagaaagcttttccgtatgtcgactacatatttggaaatgaaacagaggcaaggacatttgctaaagttcgtggttgggagactgagaatgttgaggagattgctttgaagatctcacaattgcctaaggcttcaggaacacacaagaggattactgttattactcaaggttgtgatccagtagttgtggctgatgatggaaaggtcaaaacttttcctgtgatccttttgcccaaggagaagcttgttgatactaatggagcaggtgacgcctttgttggaggattcctctcccngttgttcaagagaagagcattgacgagtgtgtc

SEQ ID NO: 1439 - DNA, 965 bp, Avena sativa
cgcagacgacagaagaaagcatggaacagcttagtccacctcctcgatcttggggccagcgccgccgccagacggcacgtcctcgtccatgctcatgccggccatgtccggcgtagcgccggcctggtacatcctggcgatgatggggttgcagacgccctccagctccttctgcttgtcctcgaactcgtcggcctccgcgagctggttgttgtccagccagcggatggcctcctccacggcgtcctccaccgtcttcttgtcgtcggccccgagcttggcggcgatcttctcgtccttgatcgtgctgcgcatgttgtaggcgtagttctccagcgcgttcttggcgtccaccttcttcttgtgctcctcgtcctccgccttgtacttctccgcctcctgcaccatcttctcgatctcctccttgctcagccgccccttgtcgttgctgatggtgatcttgttcttctggcccgtcgtcttgtcctccgcggacacgttgaggataccgttggcgtcgatgtcgaagcagaccgtgatctggggcacgccgcggggcgccggagggatgccggacagctcgaacttgcccaggaggttgttgtccttggtcctcgtgcgctcgccctcgtacacctggatcaggacgcccggctggttgtccgagtaggtgctgaagacctgctccttcttggtggggatggtggtgttcctcgggatcagcgtcgtcatgacgccgccggccgtctccaggcccagggacagcggcgtcacgtccagcagcagcaggtcctgcaccttctcgttgccctcgccgctcaggatggcggcctgcacggcggcgccgtacgccacggcctcgtcggggttgatgctcttgcacagctccttgccgttgaagaagtcctggagcagctcgctgcaccttggggatgcgggtggagccgccgaccagcaccacgtcg

SEQ ID NO: 1440 - DNA, 887 bp, Avena sativa
acttctgcacttttttattcgagacaagctttgcttttgtgcaattggtacaaaaggagggagagtcggtaatcttctaaatttccaaccttacacacttgtcgccctcaatttgtatctcccattccaactctgctcactccctccagagaaaaatatctcctatctaacatcttgttctacaatgtcacatcattttgatacctccttaagggagaacatttttaattctctcccttgcactcactacaaaacatgtaggtcaggaggacaatcaacatatcaactgctcaaatggatacccctgttgtcactttgcaatcctaatttagaagaacagtgcagtcagcccatcgacaagggctggctgagttggcatttcttgaagagagtgtgagataaccaaagggattccctaagcttgtgcagattgagctggcattcgcgtatggttgtgttcaccctcgtatgtcacaatgagcatcgacggatcgtccacgcaacgttcaacatgcttccttgctgggcagcccctcacactgctacatttgtagtaccccctgggatgaggggaacccttaattggcttctgcccatacttcctccacgagtactcatctggaggtatatcagcaattttattactaatggcaggaactttaatcgtcctcttcacccgcaacttcctgcttctctttgaacaatggcaccttccggttgcagcgcacttgccattcccatcctccccacgccctgtgcatcgcctcctcggtggctgttgcgtgttcaccgggtcactcatagcaggcccaccgatcaaatggaacgaggaagacttggcatccaggctggccacactaccatccatgctcaaagatgacatgaac

SEQ ID NO: 1441 - DNA, 712 bp, Avena sativa
gatcagggagcgacttttctgaaacttccaagaagagccacctcactcgctgtcagatcggcgattcctcgctctccagcagctgctccggcggcggaaggacggggatcgtcgatctgtggcttgtatatagcgtaggttcggtttggaggcctctcggcgacgctgaggaggcggtgtgcggcggatctcgtccccttcgatgttagcgttctccggagctctgctatggagatcttgcctttcccgagctcttgtttcttcggatctgtggagctcgtcaggccctctccggcgtcggcgtggcggtcgggccagatcttgttgaataaggagaaggagttggagtggagtctcgtgaaggagatgaagggctgtggtgtaagctctcaggagctggcgaccagcgacttcctggccgcggagggcctgtacctgttccaagccatcgagaggtacggcggcggcggcgcgccaccggctgcatcgagctcagcttcgacttcgggttccagtggagctgattgtaattttttttgttttgctggacctttctgtaagaacggaactttaatatcattttcttttccctcgcaaaataaataaatatacgatctctttttttaggggaatttatacgacctggcactttaaaatttgagctagtcagctgatgattcgtaatcctcggttactgaatgttttttacgaa

SEQ ID NO: 1442 - DNA, 735 bp, Avena sativa
cgacacacaaggaaggtactcatgtacaacacagattatatgacatgatgacgccaagtattaccaccttcgaagaacttcgacaacatccgttgcccaaccattgctacactacaacctgactgatataacatttttttttcctctgctcacatatatgatcaccatccttcaattcatcattcaacatactcggctagattcagatttctgctctgctatagaaacccaagttgttttaactttgatctatgctgattgctgcgactgctgttgctgttgctgagcatgctgctgctgcgatggctgctgctgttgttgctgtatttgcagctgctgcatctgaatgagctgggagttcatctgctgctgtaggcccatcttcgacatacgagcatcagtaatctcaccagttgcaagtttcaaacgctggacctcaccagttagtgcttcatttaaagcatctctcagctgtgcttgttgctccattgcttgtagccttattttcaactcgttgttctgagtcgcaagtcctccagagtccctctgtagcattgtcaactgcgctgaaagtgtagtggcctctgtctgcagaacctgtaccttatgctcaagctcttgaatgtacctcatcttgcgctcctttgaccttgccgcagactggcgatttgccaaaatcctcttgacccttttcggatcagtcaaagcaatctctgccaggcgttcatttgccat

SEQ ID NO: 1443 - DNA, 925 bp, Avena sativa
aagaaagtttcaatgtcaatattagtagaaatcactccagcaggtagctccggggaggtgattaaactgattatttgcaatgtgggaacccggtattacatccaggcatccagctacctgaactcttcagggacgtgcataccaaaaccccgcttcagcttctcaattgtgggagcaagttttccgagactgcgtagcttcgttccagttgtttcatcagtaatatttccagaaatctcaatagaatatgatttgccagagatacgtggaagccctctacctacaagcagctctagatctctctggtgaagttctctgccattgacaatgacatcagtatccccaccagcacaatctctggccattggataattgaattctctaataaatggaggaataatgccaatacattctctacccatgataccccaaaatccagcacggcagtcataccagtatgaaccaggctcgacaggaccagccttcttttctgccttcttaagagctctttcagagattggatgtccattgattgaaactttaacactatccatggactgattaaacttgaaacccttcttcaagaaaccagcaaaaaatgatgaatccccactcttaccagttgaggattggtcttcatctaacccagcttcagaagaaccacgagagaaaccagaatttgtgcggccattaactgacgacccactctctgttagagcattggcatcctcaacacatggttgatgcaatttcccattatcttgttccattatattttcctcatatctctcacttgtgcttgcagcttcaggggcagtgttcgcatgtttaagggcactatagctgtcatctttgttgttctcatcaaactccctacttgtgttctcaactttcacgccgcttgctaaatcttcgatgctgttct

SEQ ID NO: 1444 - DNA, 864 bp, Avena sativa
tttaaagtcatgtaaatcaagaccaacatatcatcctcaattaggcctgctgttttattattccaatggttcgccgaaaattgtacatcttccacccgagatctatgtactcccgcggacactcgcaaaggcctcttgtgtaattgagttccctaaacaagacttgaaaatggtaattaccaacggtaaaaatgcgacaggttttggcacgcagatccaggtcatggatcaagcgagtccgacgagcttctcgctgagctcccagaccttgcgcgccttctctgggtcgctggcctcctgcgagagctggttctcgaaggacgcggagtccttgttccagctccagtacacgccggacttggtgaggctgggctccccgaccacctgcgcgagcctcttcccggactccgcctccgacacgaaccccttggtcacgaacttctggaacggcgggaagagcgtgcggaagagcgggatgtgctccctgaagaggccggtggtggcgatgcagccggggtagagggaggagaaggtgatcccggtgtcctcgtggtacctccggtggaactcctgcatggttagcatgttgcagaccttgctgtccttgtaggccttggcgccgtcgaagctctcgtcgccgtcgatcatggcggacccggatgcgcccgtgaggccgccggcgagcccgcggaggtcgcccaggttggccttgggcggcacgttgcccgcgagcgtgttgtcgttgccggtgatcgagccgacgatgacgaggcggcgggacgggtagtcggacttctgcaggtcctccaggagcagacgtgccaggaggaagtggccgaggtggttgacgcccacgctcatctc

SEQ ID NO: 1445 - DNA, 813 bp, Avena sativa
caaccctacatagacggcatcctagaaatctgtcagatgagataggtcgtctatctggagcacttcgtgctcagcagcaaccgcgcttaaggtcaggatttctattggaacgacagggcgatggtgtttggggtgttccactgccaatgaggagcagtagggaaggaagaagattaatggaaattcggaatgcactagaaatgattcagagaggggagaatgtcagatttgagcagtctattttctacggcggtgtcgagattcatgatagacacagggatatgcgtcttgacatagacaatatgtcttatgaggagctattagcactggaggagagaataggaaatgttaacactggcatcagtgaggaggatgtgatgaagctcctgaagcaaaggaaattctcgtcgtggagattagcatctatggaatatgagccatgctgtatttgtcaggaagaatacgttgatggagatgatctcgggacgcttcactgcgggcacgacttccatgccggctgcatcaggcaatggctcgtggtgaagaacctgtgtccgatttgcaagaacaccgccttgaagacctgaaataaagcagcagagaccgcgcaaggcttgtcccgtggcacaattcttcagcgatcgcaagatcgtttaccgattcaaattaccgtgcatttcggcggaagtgttttgcattaacctacagtccgataaaaaaaaagttccaaatccaaaaagaagttccaaaccggtacctgtaagccgcgggccgcggcaataatcgttggaacctgtcaccccgcatttgaca

SEQ ID NO: 1446 - DNA, 709 bp, Avena sativa
gaaacatccagtacatgctgctgggcaacgttggtgaatccgaccttgggttgatccggtttgcaatagggtgcaccaacctgcggaagcttgagctgaggagctgctgcttcagcgagcgagctctgtccctcgccgtgctccagatgccctcgctgaggtacatatgggtgcaaggctataaagcctctccgacaggcctcgagctcctcctcatggcgcggcccttctggaacatcgagttcactcctcccagtgcagagagcatgctgcgcatggcggttgatccggaaccgtgtgtggatcgtcaagcccaggttcttgcctaccattccctcgccggacagaggacggattgccccgagtgggtcaccccattgcatccagccgcatgattgtaaatacatccaagttgtgtgctactaccttatcgccccttgtctcttgggcggcaaccttgtcctgatatggtgatttgtacggatctagatatgatttaggtagctgctttttgtgccgtaataagctagtactgtagccaaggtgtagtgcaataagttgttgtcgctttgtactactatgtatgtataatcgtgtatgtacactaagttgctctgtgctagccttttatctcctctctttgtactactacaccatgtaatcctggaaaggtgtgtgtatgctaagctgctctgtgcttgatccttga

SEQ ID NO: 1447 - DNA, 846 bp, Avena sativa
ttttggtctactaaaagatgaactgccttataacattcaaactcgactacaagcagctcttgaaattacttgtagttcaggacaagagttctaatgaaagcaaaattcaatcatgtgttgcacacaatattttgtcccgagttagtctatcccagatttgatgaattttaactgcatgtggttccatcaaaaaggacttaatcgccttcatctattgtacccaaacaatagtgtacacgttattgtgggagaggctagtgctaccaagtcaaacaaacagaacatgtcagatcaaacacctcggtctgcatccatcgcagtcaaaaaaatgttctcctcgggtatcgggcatactgggatttgcagctgccgcatcgagcagtccagcagctgtgtttcttctctacgctgcttcgggctgaggggtaagcttgtccagatccacagaaatatcaaggccgtgcttccccatggagctgatcattttagggatgtcctcaatcaaagcttcctccattgccttcctatcatctttcttctgcctttttatcacctctgttggccattcagcaacaagcttttggagttcatctttcacgaagggtttcttctgatcagggaggtgcttgtaaaggagtttaatggtggcagcggcattttccggtttgcgttcaagcatagacccctttgcacatgcaaaaccggttgtaagagtatagtgtttgatagacttccctctcagactattgatttcccaaatagattgagagtctccaactttggcagcaaattccatccatatgtcaaatgcagtgcgacgcaacttgactccagcctgaacaaatc

SEQ ID NO: 1448 - DNA, 720 bp, Avena sativa
gacacggtcaccgaagacgatatcgacggtttggcctacctaaaggcagtgatcaaggagacgctccggcttcacatggccgcgccactccttgtcccccacctctccatggccgactgcaacataaacggctacatgataccatcagggacgcgtgcaatcgtgaacagttgggctctggcgagggaccctagcggttgggagagcccggaggagttcatgcctgagaggttcatggaaggaggcagcgccgcggccatggactataaggggaacaacttcctctaccttccgtttgggaccggacgaaggatatgccctggtatcaacttcgcgattgtgaccattgaaatcatgctagcaaatctcatgtaccacttcgactggaagctgccaccagaatcggtggaaagtggcatcagtatgaccgaatcatttggggtcactgtgcaccgcaaggagaagctcctccttgtccctctagtgccacaagattaacaaaaggacggtccatatatagtcttttgtgttttctgcgcagaagattgaggacactcaagactttttactacccatcgcaaaatagtatcatgcatgtggtcttcggacttcttattaagcacaagtgtagtattgaataaataaagcattatcatcaaaatatcattgtatctgtgtctaccagttatgaatgatgagaccataatattgtaggccatt

SEQ ID NO: 1449 - DNA, 707 bp, Avena sativa
cggccgacgcgctccagaagaccattgccgacgctggatacaggcaagttccgaacgcgaagggccaggaggtgctggcgaggaagtacaggatcaggctaagtgggatcgacgcgccggagagtgccatgccgtacggcaaggaagccaaggaggcgctgctgaagctggtggaggggaagtgcctgacggtgcacgtctacgacaccgaccgctacggcaggtccgtcggcgatctccacgccggtggggtgttcgtgcaggagcaaatgttgaagaaaggcttcgcatggcactacgctgcctatgataaacgcccggaacttgccaagtggcaaagtcaagcgcaggccgcccgtaagggcctgtgggcgtcgaagaagccacaggagccgtgggagtacaggaaggcgaagcgcaatggcactgcctaatcaattcataggttgcatatagagttcctccatatgttgtactcttagttgtgtgtatgttgtaaccatggacgactgatttattcactgcaaagggttgtgaagtaggaggggaacattgattggttggtgtgctgtgctgatgtatttggcgatctgtgtaattgtaatgtacccttacttgtattgaatttgctgatgttgctgtagaacaaaaaactggttcataaagttgttgaggccgattttagctatttatggtgttcctggatg

SEQ ID NO: 1450 - DNA, 768 bp, Avena sativa
ccgccgctcagagttctctgctcctactcactcactcactcctcttggcaactctgatctctgcttgctctgctcctggtcactagtctcagtccgtcgggcagtgtagctagcgatggctcagggtctgggaagcggcagtagtgctcgcgccgtgctggcgctggtcctcctctgcgtgctcctccacggcgaggtggccgagtccaaggtctacaccgtcggcgaccgcggcggctggaccttcaactccggccgctggtccagcgggaagcgcttccgcgccggcgacgtgctgctgttcaagtacgggcggggcgcgcacaacgtggtggcggtgaacgcggcggggtacaggtcctgcagcgcgtccaggggcgccaggacctacagctccggcaacgaccgcgtcacgctcgcccgcggcgcaaactacttcatctgcaccgtcccaggacactgcggcgcaggcatgaagatgcaggtcaacgccgcatgatcctgctgcctcccgctcctccatccggaattactaatcaggatttgatccagatgagacacgtccgcctgccgtggctacttgctgccggttaactttattattttccttcaagtagagtaactcaaattacttacatgtgtgtttggctatgtgattgcgcgtgaataaaaggctacggcccgcgttggttcggtttgtatcttgtatgcatgtactacaccctctgtcctcgtaagagtctatttctagagatttacgcataaaaa

SEQ ID NO: 1451 - DNA, 774 bp, Avena sativa
atggaaacaagtgatttctactctagatggaagaaaggacaatataaagaagcacctagcaaattggggggtaccgtcccaacagttctaattgagaaggctgaagattatctccctcctgatatgacctccctaatcaagttcgtaaaggtaacttttcaattcttctttatatgcatcttttgtggaactttgtgtttaatggtctgattgaactatcagaatgttgatggtgaatcggtctacacattgccttcttggatacattcagatattatggacgataacattcttactgagaggatcccgaaaatgggttccttcactgatgccagcagcactggtgacagagagctggaggagaatgcaatccatatcattgatttcagtgatctgtccattggggatcctttattcgacttaattccgctgcacttggacgtttttcgtggtgatattgatcttctcagggagtacctacgaagctatcagcttcctttcctgagaggaaattcaaatgctgatatttctaagtcagtgcaaaattctaagttcagcaaggcatcatatcgcgcaatgtgctactgcatactacacgacgacaacgtcttggcagctatatttggcctgtggaaggagctgaggaccgcaacttcgtgggaggatgtcgagcacctggtctgggatgagctgaaccgatatcagcagtcatcacctacgctctctagctgactccccacactacggcaacacgacactgagataccagctcct

SEQ ID NO: 1452 - DNA, 651 bp, Avena sativa
tagccaaacatgactttatttccttccaaattcttgaaagaaactttgtacatcacagctcttttagttcaaacatgacattagtttccttccaaatcttgaaatgaactttgacatctagaactcatgatagttgtcacttagactaataagaggcagaggcttcaagaatcaagagcaggtagacagtcccttataacctctgcggcctgctccagctccttttccgagatgataagcggcggcacaagcctaacgacattgcctttcccagccgtcagcaagaagacaccagcgtccaagcacgcatcaactaaaggaccagccggtacgtcgagctcgatgccgacaatgagaccaatcccccggatctctttgacatgaggatttccgctcagctttgtcttgagcagctgcctgaagttctctcctttcttggtcacctctgccaggaagccaggtttctggatcttgtccagtacggctaatgcagtctgacacacaaaagggtttccgccaaatgtggtaccatggtcgccatagtttattgctgcagcaatcttttcgttgaccaatactacaccaataggaaggccgttggccaggggctttgcaacggtcatcatgtcaggctctactccataaatctcg

SEQ ID NO: 1453 - DNA, 852 bp, Avena sativa
tgtaggagaaaaaccagcaggtgttttgacaggtcacttagatgggattacgtgtattgatagccgtggcgatgggcgttatttgatctccaactgcaaggatcagactatcaaactttgggatgtcaggaaaatgtctgccaccgtaaaaggacgaccaccaagattatatgactgggactacagatggatggcgttcccaactaacgctagatactgtaaacatccgaatgatcagagtctggcaacatacagaggtcattcagttctgcggacgcttatccgctgctacttctccccaatgcacagcacgggtcagaggtacatctacactggctcaagcgatgatagtgtatatatctacgacgtggtaacgggggcgattgtcaaaaagctttcgtggcaccgatcgatcatccgagactgcacctggcacccttaccgcccaacgcttgtcagctcatcctgggacgggtatgtggcccggtgggaggcatcaggagacaagaaggacccctcgatgctctcgttcgatgagcagaggactagcccttaccaccagacatatgggttgtcctttgctatgtagtgaagttcctgaagccctcgacaccgatgatgtacggagccaaggcaccaagcgctggcgatgaacctcgcgtagggtttgtggtataaagcgttcatgtcaggcaacttggttgctcttggctctctgatagaaaatgtgaaagggttggaaacatgatgtggccctagcttgttaaattcttgtgcagttgatgaggtgatgtcagtgacaagtgaataatatataatcaataatgtatatgtagtattaggtttaaaaag

SEQ ID NO: 1454 - DNA, 888 bp, Avena sativa
cgacaaccgtacactgaaggcgcaggcctgggctgagttgaagcactacaatgcgcctaggccaatgccttgtggtgattactgtggtgtgagcatcaattggcacatatcgtccgacttcagcaaaggctggagttcccgggtgacattgttcaattggggggacgtcgacatggcgaactggtttgctgcaatggtcatggacaaggcatacgacggggttcgaggaaggcatactctttcaacgcaacggcagtgggcaatgacaccatattcatgcagggccttgaggggctcaattaccttgtgaagcagaccaacatgagtgggacggactacctcgtgccaggaaagcagcagtcggtcatctcgttcgacaagaagctgaccccttcgctcaatgtcatcgctggagaagggttcccatcaaaggtcttcttcaatggcgaggagtgtgctatgccacagaggtttccaatgagcagtggattcaggaccgcactcagcagcgccctttctttggtcttgctcctggctgcatcatcaaccttcctattgcttcagcaatgatcttggtgccacctccccattctttgattctttcaggtggttccatggatgccatttgtaagaagaaacctttttgtttctggtgaagtacttagtagatcttggggtagctgctatgtagcagaatcaggcagtgatcttgagatgaaccacaaaagagaggctggccagggtgctgttgttgcaggctcgcaacatagtcataggttccctttctgatgaaagagtagtagttatgtttactttacaccaatgtgggtgtaattgtgagaattcttcatgtttagtttgtgtaatatacagaatataccatgttaa

SEQ ID NO: 1455 - DNA, 798 bp, Avena sativa
gccgccgctctcgaagcaccagaggtggcggcgctctcctttaaccttcttcaacctcctttctctacctggtgaatcgctgctaatatttcgctttgtttgctccaggctttagatctctctctcccctcgcagttgcctcggtctttcggagcgcacgagatggcggaagaaccccaggtaccagccgtggcccctgtcgtggatgcacctgccccaattcttggagagccaatggacttgatgactgctctccagctcgtcatgaagaagtcaagtgcccatgatggtcttgtgaaggggctccgtgaggctgctaagtccattgagaagcatgtggctcagctttgtgtgctggctgaggactgtgaccagcctgattacgtgaagctggttaaggcactgtgtgctgagcacaatgttcaccttgttactgtgccaagtgctaaaactcttggcgagtgggcagggctttgcaagatagactctgagggcaaagcaaggaaggttgtaggctgctcctgcgttgttgtcaaggactatggtgaagagtctgagggccttaacattgtgcaggagtacgtcaagtcacactagatgagaatgtttgatcattcaaggaacttgtgttaggcattttggtcctgggtttaaatttatcctttgttcttggttttctgggacatcgttacaattttcaagtgtgagcctagcagatatcagtgattttgacttttgaacctttgtttatcaggcagcagctgctttttactgcgtaaatgttttgagtgctagaaa

SEQ ID NO: 1456 - DNA, 397 bp, Avena sativa
cgacacgagctcggtgacaatgctgtgggcaatgtcggagctgatacggaagccgcgggtactccgcaaggtgcaagacgagatcagagcaatggtgggcaacaacaaccagttagggaggagggtgcaagaagacgacgtccccaagctcacctacctcaagatggtggtcaaggagacactgcgactgcaccctccggccaccctgcttgtgccccagggagaccatgcagtcctgccagatcggcggctacgacgtgccggccaagacgcgggtccttgtcaatgcatgggccatcggccgcgacccggcgagctggagcgccgactccgaggagttcaacccgggacaggttccaagggcagtgacatcgacttcaacggtgcacacttccag

SEQ ID NO: 1457 - DNA, 710 bp, Avena sativa
tttctttttttttaaaagaagtctagatatattttcttcataaacctaaaacatcttatatttggttacatcccaccactccgctcaacctacaaagctcaacctacaaagtagtggcaaatctctaccgatcagaggtgacagcattttaatactacaataatcataggttatattacatgatactcaacggagttgcagctcataaaacatcaaaccatcacctacaacaggtgtaacagcaaaggacagaggcataagttaattcacaagcgacgaagctggaacgtatatgtcgatctcatccaaggacaggcggtcgcacagcttcaagttgtgttcatttgccagatgcaagagacatatgaaataaagatgtggcgagatctcggtcgttggaagatcagggttactgcatggaagattgtgcagtaccttcgtcaggcacaaggatggttccgtgccctctctttccagatcatcagtctcagcagatgtatgaatgtgattccagagcacctcctttagggcatgaacatccacttgttttgataccttgtcatattgtatatctatcttattgacctgtcttggtttagctataagatttactggctcttgtacacccgcattttcttcatcaaaattatcattatcatgatcccaaggtccagatggcacaaagtcatcgttattgtccattgaatcat

SEQ ID NO: 1458 - DNA, 694 bp, Avena sativa
gatgacgagggctagggttttgattccagcgaaaccccagcacgccgcctccgctgctccccccctccccctccgaactccgaagtctgccctcctccgtccccggaagcgcccccgcctcgtccctcccccctcgcactgcagcaactcctaagcgtctgtcgcgcgcggaccacctgaacgccgcaagagttgtcattgtattgttggagacttgcgttatctgctgtagactgaaacaacttgagatgtcattttatgcaagaaggggtggagataggggcagtgaccgttttcaaggaggtgggcgaggtggacatgtcatgcgtggaagatcagggcttcctcctcgaggaccacttggggattaatgcccgaccatctgcacgcattattgctaagtcttttagccgaaccaaagacatgacctggagacctgatctgtttagtgacagtatggcggctagtggaatagaaactggtacaaaattgtacatttcgaacttggattatcgtgtttccaatgaggatataaaggagctgttttcagaagttggtcacttgaaacgatttgctgttcactttttatggttatggtcgccaaaaatggtacagcagaggtggtgtttacaaggaggagtgatgcagttgctgcattgaaacgttataacaatgttctacttgatggaaaagc

SEQ ID NO: 1459 - DNA, 619 bp, Avena sativa
ggagcaaagaactgtcagttggtgttgatgtttcatttgacacggcaactagcaatttcaccaagtacaatgctgcattaagcctcacaaatccagatcttattgcttccctccatctaaacaatcacggtgacaccctgactgcatcttactaccacttggtaaagccacattcagccactgctattggagctgagctgtcccacagcttctcaaggaacgagagcacattaatatttggatcgcagcacttgttggatccccacaccactgtgaaggcacgcttcaacaactatggcatggccagtgccctcgtccagcatgaatggcgccccaagtcactcatcaccatctccggtgaggttgacacaaaggcaatcgagaagagcacgaaatttggtttgtcattggtgctcaagccttgagatacatattttggatcctgcggatctttttaattcagttcaggtggatcagaataacaggggaatgcggcccaggtcatctttctggcaccattttggtcttgaattcgtcctttgtccacataatctgttttctaggcaaatgttaactttgaccttattattttgatcatcagccgcctgttaataattga

SEQ ID NO: 1460 - DNA, 995 bp, Avena sativa
ggagcagcagccgtcgtccgcgatgctcggggcgtcatgggctcgctccgcgtcatcgagctccagctcgtcgccttcatcatggtcttctcgatgtccggcctggtcccgctcatcgacctcgccttcccggcttcaccacgctctacctcctcgcccctctcccgcctcgccttcccctcgctccaccacaagctcgacgacgagaacgccgccgcccactccgccgcatcccaggaaatcttccgcggcagcaagctgttccaggtgtacgtggtgttgggcaccacggtgggtctgttcctgccgctggcgcacgtcctgggcgggttcgcgcgcggggacgacgccgcggtgcggtccgccacgccgcacctgttcctgctgtcgtgccagatcctgacggagaacatcatcggctcgctcggcgtcttctcgccgccgctgagggcgctggtgccgctgctctacaccgtgcgccgcgtcttcgtcatcgtagactgggtctacgacgtgtggaccaataagctcatcacccgcaccgcccccgtccaggacaaggcgtggatctggttcgggaggtacctggccgtggcgaacctggtctacttctccatcaacctcttcgtcttcctcatccccaagttcctgccccgcgcgttcgagaggtacttccacacacgcgacgaggtctacgccaagacggcggaggacaagcgggcgagggacatgtcctccgtggacgacgcggcgaaatcgaacgtctccaagaaggccgactgagatggtggtgaccgtgctcactaattgttgttcggtgtcgagctccgcgttattggtagtgtgctgcttgctctgtagtagctgcaagttctgcttatctgtgtggacgtgtgtactcgcgtgcggctgcgtgttatggccaatcgaggaggcacgaaccggggttgttgtacattttaggtctctacttctgaacttccacggagtatcgc

SEQ ID NO: 1461 - DNA, 900 bp, Avena sativa
gtggatgatatgttccttgagtctgtgaggactgcattcgcagcgcgtcttggaggcggatcttgctctggctgatagtttagatatcagccgctctctggaaccacagcactcgcggcattagtcttgggaggcgattgttgattgcgaacaccggcgactgccgcgctgtcctctgccgaagaggcatagcaatggagatgtcccgagaccacagagcgaaccacgcggaggagtgcgagagggtggcggcgtccggcgggtacatcgaggacgggtacctgaacggggtgctgtcggtgacgcgtgctctgggcgactgggacatgaagacgcccgactgctccacctcgcccctcatcgcggagccggagttccagcaggccatgctgacggaggacgacgagttcctcatcatgggctgcgacgggatctgggacgtgatgaccagcgagcacgcggtgagcgtggtgcggcggggcctccggcagcacgacgaccccgagcggtgcgcgcgggagctcgtcatggaggcgaagcggctcgagaccgccgacaacctcaccgtcatcgtggtctgctttggctcggagctcgggtctgccgcgccgcggcagcaggagcaggcggcagcgaggcccaggagctgcaagggcctgtcggtggaggccctgtgtaacctgcggagctggctggagaccgatcgctagctgagagaccgaccgctagctgaggtatacctagtgtctgttggtactgtaaatatgctgacatcgaccgaggaatcgtaactgctccctcttttagtttcttctatttgttgttcaggcagcagcagccaggcagttttgtaggggcattttctcgttttttcttctcttattatgttgttgctcacgc

SEQ ID NO: 1462 - DNA, 432 bp, Avena sativa
catctgatttgactatctgattctgcatctggttctgcatctggtttgacatctgattctgcatttggttctgcatctgattcgacatctgattctgcatctggttctgcatttggctctgctggttctgaaggcccaccatgccctgctgctgttgcaagttctggccacctccttgcatgttcccatatagcccctgctgctgctgctgctgctgttgttgctgctgctgctgctgctgcattcccatcatgctgctggcgtttgtgcctcccaaaccatacatttggtcggttatcatttgggatggatgactcctttgaggatgcccaccagacaaaccaaactgctgcatctgtggcaagattgactgtgattgcattgacccaggtaggttgccatcatttgtgagtttgaagatgcctgggcagc

SEQ ID NO: 1463 - DNA, 768 bp, Avena sativa
aggcgtacgtggcgtggtcctgcacggtgtccgggtcatagcacggctgcccctgcgtgagcacggagcagtccaccttgcccgggccgcacgcccagtcgagcgcggcctgcagcatcttctcgtcggcgccctcccgcgccacgcagaaggtctggttcgtggtgtcgttggcgagcagcacgccggagcccgtgaggtgcagcgcgtacgccgggacgccgttcatgtcgaagaggccccagtacttctcggacgccgtcccggggcgggtgtcctcgtcgtagagctcgtagatgtacgtggggacggccaccccagggtgcttcggcgttcccgtgacgttcatgacgtgccggatgaggttgctgttgtatgtgtcggcgttgtcggcgttggcgtccggctccgcggacgcgtcgcccttgtgcggccacccggtctccgtcaccatgaccggcacgttggtgacgttgaggtacgccatggcgaagtatgcggcgtccacgacggcgtcgaagacgttggtgtagtgcagcagcgtgttggcgtccacggcctccttgttgggcggcagcgggcggaacagcgcgtagtcgagcgggatgaccccgttggagcgcatgtagtcgtagtaagggtacacgttgagcatgagcggcgcgcccgtggactgcaggaacttgagcagcggcaccaggaccgggtccagcgagcggttgaagaaggcctgcgacggcgggaaggagtcgaggatgatggagaagg

SEQ ID NO: 1464 - DNA, 858 bp, Avena sativa
tttcgaggcctcctacggcgccggcaacgccgcggggtccatcggcaccgagctcttcaccttccaaaacggctcggcgaagctcacgttcggctgcgtcaacaagctgtccatcactccggggtccctcgacggggcgtccggcctcatcgggcttggccgcggccccctgtcgctcgtctcgcagaccggcgccaccaagttctcctactgccacaccccctacctccgcagcaacgctactaccggcgccagcagccgccttttcgtcggcacctcggcgagccttactaccggcagcagccctgtgatgtctatgtctttcgtggaaggccctaaagggtacccattctactatgtcccgctcgtcgggataaccgtgggaagcacaaggctgtccatctcgccaaccgtgttcgctctcaaagaaggcggcggcgagggtggcgtcattgtcgactccggcatctccgctacgcttctggtcgatggggcgtaccagcccctcagagaggagctcgggaggcagctgaacgggagcctcgtgccgccaccagctgacagtgggatggacctatgtgtggaggtggtgcaggagaaggcagtgccgtccatggtgttccacttcagtgggggagcggacatggtgttgccaccggagaactactgggccccgctcgacaattccacctcatgcatggtgatggataattcgagcggtttcagcatcatcggcaacttccaattacagaacaaacacatgctctacgaccttgccaagaatcagctctcttccaaacagccgactgcagctcactgtgatgagagatcacccatgtttagtgtcaccatatatat

SEQ ID NO: 1465 - DNA, 669 bp, Avena sativa
catcgccaaccgcatgcagaacatggtatgtgtggaaacaatgatgcatttgacatgcaccaacatgccagtagagaagatcgatagtgccttggatgccattaagaccaatgggattcaaaatgttttggcacttagaggagaccctccacatggtcaggacaagtttgttcaagttgccgggggattttcttgcgcactagatctggtgcagcacattaaagccaagtatggtgattactttggcataactgtcgctggctatccagaggcacaccctgaggtaatactaggcgaggaaggggctaccgaggaggcatatagcaacgatcttgcttatttgaagagaaaggttgatgctggtgctgaccttatagttacacagcttttctatgacactgatatctttctcaagtttgtgaacgactgccgtcagattggcataacatgccccattgttcctggcataatgccaataaataactacaaaggtttcatccgaatgactggattctgcaaaactaagataccagctgagattactgctgccttggatcctattaaagacaacgaagaggctgttaaagcatatggaatccacctcggtactgagatgtgcaagaaaattttttagctagtgggttaacactttgcacctttacacactaa

SEQ ID NO: 1466 - DNA, 844 bp, Avena sativa
catcacatcacatcacaagtcagaaactgagaaaatccacccgtgtatttttctcctgccaactcctacatgctcatatgtacaaacaaaaagaatacatgctgcctatatcgacaacaacaaaaactggcgatcgtgtcaatccgtatatacaaccacctaccaaaaggcactattcatctatcaggttcgtgtcaatccgtatatacaaccacctaccaaaaggcactattcatctatcaggttcgtgcacatcaacacgaccggaatctccagtcaccgccaattcaatctgaaatacaatccaagccaccaccccatggctctgaaagaatgtgtatgttccgaggtatcacaatgctgacagctcgtctggttggtgcaaacactcgtaagggttggcatagaagtagtcctcttccttgggtttgtcaggaatcacctgcctcctggatggcacgcccatgcggctggtatgtgatgccttcatggaggacgagaaatcggtccagctcaatctgccgttcttgtactgatcaaccagctcaactataagcttccggtctagcagcactgtcttcttgaaccccaggtatctgcgatgaccttcaacaacttttgccatgttgccatcataagtggggatgaagacatcactctccaaggacaccatataatccaacgctgccatctgggaagaatggttctggaaatacctcagacccgaaggcagtaaagtctctttccttaccacattgggataagctgaggtcagtgcagccattcttctttgtccaccatatatttcaccagcagcaatatatatttgataactgggatcaat

SEQ ID NO: 1467 - DNA, 936 bp, Avena sativa
acaccattaaccctttattgatttttttatgtttatgaatttttatctcccaatgcaacgcacgggcatgattcctagtccaaataagaaaaatttgcaacatctattttagaacggaggaagtaatttcatatcgatgtagacacacatactaccccctccgttcagaatcactccgaacctatacctaaaataggtcaaaaatacatttgattcacaaagctaaaacatcttatatttctaaacgagagagtatatatcagcacatattaatagccacacattatttatactgtatatcacaaatgacgacatggccggtatttggttgataactgaaaatggcatgatgaggatggtcgctccatcgctgcatcgatcaatcatgcatgacaaattcattctacgagatggacttacggtccttcctgaaatgcgcgatctggacgttgtccacggcgagcttcttgaagttgctgttcttcctggtggtgaaaaactggccccagttgtagggctcgtacctaggcgggttgtcgtcgctgaccagctcctccagcggctcgatcatggcgccgctgccggggttgaagaagtagggcatggagaacctctccttatcggagttgaccgacaccctgtgctcggcgctctcgtacctgtcgttgctccacacctggacgacgtcgccgacgttgatgacgaaggagtccgggacgggcctgacccgtacccactcgccgtcggagcggcgccggacgtcgagcccgccgacgtcgtcctggtagaggacggtgagcgcgccggcgtccttgtggcggccgacgccgagggcgaggtctgggctcgggcagggcgggtagtggttgaggcggatgaacgtggtctggtcgtccttgaagaagccgtgcaggcggtccggtgtcagccccaggc

SEQ ID NO: 1468 - DNA, 622 bp, Avena sativa
gcaaagcagcaggagtaaatcattgacataagaactagagggaaacaatccaacagtgaaccagaagataccaaatcaacagtaaatcgagcacaggcagattacaccgaagttcacttattcattactacaaactgctgtaacagcaattgttttcacgataccaacacataggggggactctgttccattactgaagacacaacttgacacaaacgagacagacttcacttcaagggcgacatgcgacagggcagcccaaccgacgaccaaggaccaccagcagctgcaataccaagacacttactgaccaccacgaagacggagcaccaggtggagggtggactccttctggatgttgtagtcggcgagggtacggccatcctccagctgcttgccagcaaagatgaggcgctgctggtccggggggatcccctccttgtcctggatcttggccttgacattgtcgatggtgtccgagctctcaacctccagagtgatggtcttcccagtcagggtcttcacgaagatctgcataccaccacgcaggcggagcaccaggtggagggtggactccttctggatgttgtagtcagcaagggtacggccatcctccagctgc

SEQ ID NO: 1469 - DNA, 632 bp, Avena sativa
tttttttgaacaggaaaggtcccgaaggaccaggagcttctattccaatcggcggtgggtgaacattacatagaggttcagaaagaaaaaagaaaatataacaaggacctgctcatttacatcgaacaccctagaagagatcgcagaaacgcaatcaagtactaccacatcgacgacgagcgaccagaagacgctgctgccaccgcagcctaggccggggacgaaaccacttggctgagcggcggcatggaaaggcacgttgaggtcggagaagagcctcccaaggaggttgaagcaccgacagacaacgctgacgggcgaggcggggtcagccttctgaccgaagatagcagcgggcgacgtccgttgcttgggaaccgccacggggcgcagaagctccaagagcttcccagaacatccccaaacaagaagcagcaactggaagctcccatcctctccctcgccaccatggccggccaagagaatggagcccagacgcatactgtccgcccgaggaagcagacgacccttccagagaccacacagtaacgacactgtaagaaccttccccttgcctccacggccgacggaacgagtagcaacgcgttgaacctgcagattagagatcccgg

SEQ ID NO: 1470 - DNA, 781 bp, Avena sativa
cgccgccgccgccgctctccgtgccgccgtccgcgccgccgcagcgaagggaagatgtacaccgccaggaggaagatccagaaaggccaagggcgtcgaccccaccgagttcgaggacaccgtcgcgcaggctttctttgatctggagaatggcaaccaggagttcaagagcgacctcaaggacctctacatcaacaccgcgatccagatggatgtggtcgggaacaggaaggccgtggtgatccacgtgccgtaccgcctccgcaaggccttccggaagatccacgtcaggctcgtcagggagctcgagaagaagttcagcggcaaggatgttgtcgtcgttgcgacaaggaagattgtgaggccacccaagaaggggtcagctgtccagcgccctcgcaccagaactctgacatctgttcatgatggtatcttggaggatgtcgcctaccctgctgaaatcgtggggaaacgcatcagataccgtttggatggtgccaaggtcatcaagatctacttggacccaaaggagcgcaacaacacggaatacaagctggagaccttctctgctgtctaccgcaggctttgcgggaaggaggtcgtcttcgagtaccctgttgctgaaaacgcgtaaaggaggatgctgcctgggatacctctattttaatatctttgcaatccagatgtattggttgaggtctcagttacctgctgattagggagtttgctggagatgtcaatgaacgtgtgaacaatgttaaaatttttgagcattcaactt

SEQ ID NO: 1471 - DNA, 1012 bp, Avena sativa
gcttgcaaggcgatgttccagctggtgaagagggaagaccatacgttggtggaagtagaaagttgccgcgtgcgcaaagcactatgttggtgatggtggtacgtatatggggatcaacgagaacaacacaatcattgacgtccatgggctcatgagcatccatatgcctgcttactataattctatcatcagaggtgtatccactgttatggtttcgtactctagttggaatggaaagaagatgcatgccaaccatttcctaatcactgatattctcaagaagaagctcaaatttaggggttttgtgattacagactggcaaggcattgataggcttactactcccccaggcctgaactattcgtattcagttgaggcaggagttggtgctggtattgacatgatcatgattccttatgcctacacagaattcattgatgatctgacagcccaagttaagagcggtgttatccccatgagcagaatcgacgatgctgtttacaggattcttcgggtcaagttcaccatgggtctatttgagagcccttatgctgatcccagtcttgctggtgaactcggaaagcaagaacaccgagaactcgctcgggaagccgtcaggaaatcattggtgttgctgaaaaatgggaaatctgcctccgctccgttgttgcctctcccaaagaaggccggtaagatcctcgtcgccggaagccacgccgacaacttgggcaaccagtgtggaggatggacaatcgcatggcaaggattgaccggcaacaacaacactgtcggaacgacggtcctttcggcgatcaagtccaccgtggaccccagcacacaggtggtcttctcagagaacccggacagcaccaccttaagcgacaagtacgactacgcgatcgtggtggtcggcgagccaccctacgccgagacgttcggagacagcctgaacctgacgatcccagcccccggcccctccgtgatccagaccgtctgcaagagcatcaagtgc

SEQ ID NO: 1472 - DNA, 657 bp, Avena sativa
cagcggagcggcggcggatcgaagagagcagacgagaagatgggtggcggcatggaggtgaacaagaaccggtggatcgaggagtggaacgcaggccgtgagaacctggagctcaacttccgcttcacccgccgcagcctcgccatcatcggcctctttggcatcgccgtccccgtcctcgtctacaagggcatcgtccgcgaattccatatgcaggacgaggacgccggacggccgcacaggaagttcctgtgagcgtcgcctccggtggggtttcgagaaccgggccgtctgccgggcttcgatctgggagatgtggaatcaccgttcggtttgttcccgtgctgttgtaatcagaccggagtattttggaattctcaagtcgtgtcgtatctgttcaataagctgtaatgaaatgctgtcctttcgactcctggaacctgaccagttcgatttggttaatttgaggtgaatatttgtgttatgagatgctatttgtgctctgaatcgagcggggatcagttcgaggtaatatgtagatgtagattagtctgtgttctgctgacgatagcaagcatgttttttaagtgttagctgaacacaaaactaagattgattctgagttttagagcattgaatagttttaactaaggaaaa

SEQ ID NO: 1473 - DNA, 511 bp, Avena sativa
ttcttgctccttttccagagaaaatccccaaatccattcttcttcctcgagagcgagacagcagagcagcggcgcggagatgtccgggagaggcaagggcggcaaggggctcggcaagggcggggccaagcgccacaggaaggtgctgcgcgacaacatccagggcatcaccaagccggcgatctgtcgtcttgcgcggaggggcggcgtcaagcgcatctcagggctcatctacgaggagacccgcggcgtgctcaagatcttcctcgaaaacgtcatccgcgacgctgtcacctacaccgagcacgcccgccggaagactgtcaccgccatggacgtcgtgtacgcgctcaagcgccagggacgcaccctgtacggcttcggcggctaggaaatcggcttctgtatctattaggccgtggctccgagagtgtctgtgctcgtggtttaatgtaatgctggcagctctatgaagaaattgcatcgagattgacttctgtttatcgtacaa

SEQ ID NO: 1474 - DNA, 766 bp, Avena sativa
agcagcacaaacagatatattatatagaatattgtctttattcatctctttgcaaagacacaggggaacacatcacaagttctcaggactccagcaagctggtttacaaaacccaccgccatcagtattacatatcagtgttttacatttttattcatcaactacacccagacagactgcaccacgcttcagttcatgctggaccctccttggctccattgacaccagctggggcgtgtctgcgtatgtttcccccttcttgtccgtctacatgttcggcttcatcttgaggcgcgacgccagcttctgtccgagggaagcatcacactgcgaccagtatgagacccagatgccctggatctcatgggtaacgcgagcatccgtgagggcatcaacccaccgctggatgaaacggtcttgcctggcagggtcaaaggaccggaatctctcgccagcctgcttgaagttgttctccttttcgataatacacttttcccggcatccatttagaacacgagaaggaatagggtacttctcagcatggcgaacaggatcaaaccttgaagggaagtagttcacctcctcatccctgtgcatgaaattcatgaagccttcatgatggttgttgtggtgagcacattttggcgcattaacgggaagcatcaaatagttaggaccaagacggtgcctttgggtatcagcataggagaaaattctggtctggagcagcttatcatcagagtagtggattccagggcagtgattg

SEQ ID NO: 1475 - DNA, 551 bp, Avena sativa
ctggctgactataacattcagaaggagtcgaccctccaccttgtgctcaggctcaggggtggtatgcagatctttgttaagactctcactggcaagaccattaccctagaggtggagtcatccgacacaatagacaatgtgaaggcgaagatccaggataaggagggcattcccccagaccagcagcggttgatctttgcaggcaagcagcttgaggatgggcgtactcttgcagattacaacatccagaaagaatccacactccacctggttctgcgtctccgcggtggcatgcagatctttgtcaagaccttgactggcaagaccattaccctggaggtcgagtcctctgatacaattgacaatgtgaaggcgaagattcaggataaggagggcatcccgccggaccagcagcgcctgatcttcgctggtaagcagcttgaggatggccgcacccttgcagattacaacatccaaaaggagtccaccctgcacctggtgctccgcctccgtggtggccagtgagttcttggagattgttggcaagtcca

SEQ ID NO: 1476 - DNA, 757 bp, Avena sativa
ctctggcccgagatgggaggctttggtgaagaaaggtgccaagaagcagaggttgttgtgggcatccaccagcgtgaagaacccggcttactctgacacactttacgttgaccctctcatcggacctgatacagtctctaccatgcccgaccaagctttgggggcattccttgaccacggcactgttgctaggacaattgacgcaaacgtgtcagaagccgaaggcatatacagtgccctggagaagctgggcatcagttgggaagaggtggggaagcagctggagcatgagggcgtgacctcctttaagaagagcttcgacagcctgctcacgagcttgacggagaagggcaacgccctgaagaccactgtctaaaattatcggatagagtggttcctaccagcactggccagcaaacgattactgaataaatgctagcttgctggctctccttttccatttggaaatgaaatgctcccagttttctgggtcagctattgtattctaggcgtgcctggccatctttgtgtaactgaggcttgttgcttgcaactgctatgacctttctggcaagttgtttttgagcaagtgagccaagtaaggatctttgggaatgcatttttcttcacattggttattcatatgttcaagattatggaagattcatattggttattgaggttcagcagcaaccaaatgaataactgttggtggggtctactgtatgaaatatatatgctcaaaattattgaataa

SEQ ID NO: 1477 - DNA, 878 bp, Avena sativa
aacagtacttcataaggcattaaacagactcctaaagctaagttccagctaagtcaagacacaaaaggaaaacgatacacgaaaagggtcacatgacttcagccttcagacggccacggcctacacaaactgcagacaacaggatcacggatccaactaaggggctcagttctcctcatcctcatcctcttcagcctcgtcgtcggatggctcttcatcctcatcatctccttcaaactcttcaacctcattgttgaaatatttcaaagggttgggccacaaatcttctttgatgatctctgcaacctcatcttgcaccccatcagcaagactcttgtgctcagtatcagtaaaccaggtgaagaaactttcttcaaccaacgggcgcttgttccctttctttttaagtggatttccgttaacctccattccttccttccacttaatggaagtagcatttattgtggttgttccgtcatcagcaaaggcatatgacttgataagctttttgtcttcaaaatacggattctcggagaagttaagagtgatggagtagcctgacttgacatctttagaatcgtccacatcaacagattccaagtacttgaacatcttttgatcctcttcagtcaaaagctcgctgagaagtggatgccttagaaacgctgtcagccaaaagtctgggattgtcttgatgatgtcacaccttctaagatagacaggtctgcgaatctcactgtacttctgctcgacctccaaaaccttatcacttgcttcctcattaaccttctcgagctcatcctggatctcctggagcctctcgatggagaggacgagggcgccgtcgatctgctcgttctcctcgccggcgtcggcgt

SEQ ID NO: 1478 - DNA, 708 bp, Avena sativa
ccgggatgccgagcatcgcaaagcagcaatcccgtcaccacctcctccggcacagcggtctcggcaactccggcgaagatggtagcgttcaggttccaccagtaccaggtggtcgggaggggcctgccgacgccgaccgaggagcagcccaagatctaccgcatgaagctctgggcgaccaacgaggtccgcgccaagtccaagttctggtacttcctccgaaagctgaagaaggttaagaagagcaacggtcagatgctcgccttcaacgagatttttgagaagaaccccaccacaatcaagaactttggtatctggttgcgttaccaaagcaggactgggtaccacaacatgtacaaggagtaccgtgacaccaccctcaatggtgcggttgagcagatgtacacagagatggcttctcgccaccgtgtcagatctccatgcatccagatcatcaagacggccactgtccacttcagcatctgcaagcgtgataacactaagcagttccacaagtcagacatcaagttcccgctagtctaccagaaggtccggccaccaacccgaaagttgaagacgaccttcaaggctacaaagccaaacttatttatgtgatctcagtcaacccgtccataatcygtaagagtgtccagtatgaagtattgctagttaagattaatattatttatctataagaaacaaaaaaca

SEQ ID NO: 1479 - DNA, 762 bp, Avena sativa
gtcgtctcggaggccgacatctttgtgaccaccacgggaaacaaggacatcatcatggttgaccacatgaggaagatgaagaacaacgccatcgtctgcaacattggccatttcgacaatgagattgacatgaacggcctggagacctaccccggcgtcaagcgcatcaccatcaagccccagaccgaccgctgggtattccccgagaccaagaccggcatcattgtccttgctgagggtcgcctgatgaacctcgggtgcgccactggccaccccagcttcgtcatgtcctgctctttcaccaaccaggttattgcccagcttgagttgtggaacgagaggaagtctggcaagtatgagaagaaggtgtacgttctccccaagcacctcgacgagaaggtcgcggcactccacctgggcaagctcggcgccaggctgaccaagctcaccaagtcccagtccgagtacatcagcatccctgtcgagggtccttacaagcctgctgcctaccggtactagagagggtagggtgcccagcacagactcctggctggcttgccttagcagcctcagatgcagcagcagctacatgtggatgtgaactccgctcaatcgatttaccaactactgtatctttttgtatcatcttgcattttttaggcggaggatttattatggttatgttttgagccctgtgagggttggaagaggaggtgtgtttgcttctgctgagaaataatggcaatttwcaatgctttatat

SEQ ID NO: 1480 - DNA, 561 bp, Avena sativa
gtgggctggcttctccttcccccttctacttagttccttcgttcccggttccggttcgttagggttttagtgggaggaatggcggaagtcgagtaccgttgcttcgtgggcggcctcgcctgggccactgacgaccgctccctcgagcaggccttctcccagtacggccagatcaccgactccaagatcatcaacgacagggagactggccgttcccgtgggtttggcttcgtcaccttctcctctgagcagtccatgcgcgacgccatcgagggcatgaacggcaaggacctcgacggccgcaacatcaccgtcaacgaggcccagtcccgccaccgccaagcccaagaaggctgctgccaccgccaagcccaagaaggccgctgccaagcccaaggcccctgccgccgcgggcaccaagcgcaaggcgcccgagaagaagctggttgccaaggccaagaagtcgcccgcgggcaaggccaaggcgaatccgaagaccgtcaagtccccggccgccaagaaggcccgcaaggtcgccgccgcttgagccgatctgatagg

SEQ ID NO: 1481 - DNA, 615 bp, Avena sativa
tcatgaaccaccctggccagatcggcaatggctacgccccagtgctggactgccacacgtcccacatcgctgtcaagttctctgagatccagaccaaggtcgacaggcgttctggcaaggagatcgaggccttccccaagttcctcaagaacggcgacgctggcttcgtgaagatgattcccaccaagcccatggtggtggagaccttctcccagtaccctccccttggccgctttgctgtgcgtgacatgaggcagaccgtcgctgttggtgtgatcaagagcgtggagaagaaggaacccaccggtgccaaggtgaccaaggctgccgccaagaagaaatgagatgatgcccggtggttgtccactgctacacccatagtagtggcggtagtttatggtgacggtcgtgttaggcgtttcgggaactgttttgagttttgttgtgtgcgtcgagcagccttcgtgctgctcattattctgtctttcagttgtgttggtgaactattggcatgctatgttcggttaaagttgctacttctatatatagtatgtcagagatttcagagtcaaaaaaaaaagtttaaatttaattcgtcgtattcttagttaactt

SEQ ID NO: 1482 - DNA, 728 bp, Avena sativa
cgctgaccctgagaccttcgccaagaaccgcgagttggaggtgatccactcccgatgggctatgctcggcgcgctcggttgtgtctttcccgagctactcgcccgcaatggcgtcaagtttggtgaggccgtatggttcaaggcgggctcccaaatcttcagcgagggcggacttgattacctcggcaaccccagcctcgtccatgcccagagcatcctcgctatttgggcatgccaggttgtgctcatgggcgccgttgaggggtatcgcgttgccggtggcccgctcggcgagattgtcgaccctctctatcccggtggtagctttgacccactcggcttagcagacgacccagaggcgttcgcagagcttaaggttaaggagctcaagaacggtcgtcttgccatgttctccatgttcggcttcttcgtgcaggccattgtcaccggcaagggccccctcgagaacctcgctgaccatcttgccgacccggtcaacaacaacgcatgggcgttcgccaccaactttgctccgggcaagtgatgagccgttgacggctcgagctgtacagttgcatcaaacatactcgtggttctgtccgcggagtttcgtttgatctgtactaccgtgatgtaaattatgaggattccttgcaaaagaatgtagttttgtgaagtcctttgtaccatttggtgtctcaagaaagcaacatttctgcaaacaaaaa

SEQ ID NO: 1483 - DNA, 781 bp, Avena sativa
ttcacaataaggcaaaagattcaaaacttcatacacaaaaattcaaaagcattaagattatcccagaacaactggcagttaatttagaagctcgacaatatcacattgtaccacaaactggatgcatgctaactcaaattctttcataacaaacatagttcaaaactgtagccagttctactaccgaacatgattccatcaaaggggattccaactgctcagaactcagcagggacggttccagcaacttggtcaagatcacgccttccctgggaggtgatgagccttccacccttggggtcgacatccacaatgcccatcttctgcaactcctggaggatgttgcgggaaacagcaccactgctcttgcagaaatgtgggggtcgtgacccattcctttggcgtccaccatagatcttctggaagccaccgatcccaattccctgcctcaggtagatcttccttgccatcgaggcagccctgatgtagtaccagtcagcatcatagggtgggagctccttaaaccttgcagtcttgacaatgtcaacccactccggaagttccatcttgccggagcgcttgaggtgggcggagtaggccttgacgaactcgtgggggttcacatccttcaccgtgcgcgccgtggacgcgcgcggcgagagctgggaggcggagcgggctctacgtgtgcgacggcagcgtgctgccgagcgcggtgggcgtcgaaccccatgatcaccatacagtccgtggcctactgcctcgccgccggcatcgccga

SEQ ID NO: 1484 - DNA, 690 bp, Avena sativa
tgaagtatgtatttttggtagtgggtgcatctacacctaagagccaaagtatttccgctttgaaagctgctatcaagagatgatgaataacaaaaaacaggcagtactgcttaattacatactctaccttagaaatgttaaaaagaaagttcagagtgagcaaaaatgcaggagaaaccatgacagtgaatggtttttgaatggacggaagtaacaatagaattgggatacaagtgggttgaataacaacaagagaatgttgttggagaaggaagacaaaccaaaggcaaatgaaataacctcggagtcccaagcttctcgattggtaggtggaagcaggatcagcaatcacacgggaactccaagagaccacatttgaggcatgctgctgctggtagtcatatctgccatatgctctttttgatggataatcttgaatctcttgcctttggatttgaccactgttttgctcagtgtcatgcaaccgtgtcacaaagttctcttcacttggcgaaaaacatactagatcaagtaccatatcatgtacacaataagatttttccatgccttcattatcatcgttaatgtctattggttagatcatactttggcttatgagctcattaaataactcttacgtagctcagatagtctaatttcttgttttgaatgataaacaaaacattcaac

SEQ ID NO: 1485 - DNA, 938 bp, Avena sativa
ctttacaattagaatagcattgccgccaaaagaggccaggcctgtgccagccgatttgcgctcgaaccctacataaaaggtcaaggcaagttttgatttgttccgcctcagaactctctcttctggctccactggtaactctgtgggtgacttcaccctggagctcgagtacggctgactgctgtcagcacgcggttcgcccatagcagattgaggcaatgtacaggttcttagcccatttttccttcacatggttgctggggaaggcagaagttcgaagggtttcctgggtctcatccatcggcttcctctttggtatgctcaggataaaagcagcttggtcaggcgtgcctgcagatgaagttattctataaccagtctcccatcgcctgtggagtccttcacttggatacagaaaatccaactctacaacctggtcagagtagcctgcgttccttgacatcacaactccccaacgattaccagcagtacccatagatgttacatggaaaccttctttccactttttattaatccacttataaggaaaagactcgctgactttgtatgactgctgtgtatatggagttcctttggacatgacaaccaatgagcttccattagttgctccagctattgctgttatgtaaaaattcttctcccactgctccataatccaatccttgtgcaagaaaatttgtgaaagctcataaacttgagcaccaaagccagtcccagcatccatgatgagagcccaaaaatttgctgaagaagctacacagctaatgtacaagccatcttcattgcctttttctatatgctgatgcagccttgaatcagccacattgtagtggtatcgctgcttcatgggccgtctagcattataaaccgaaatccattgagttgctgggctccccaaccgaactttcttcttaggc

SEQ ID NO: 1486 - DNA, 742 bp, Avena sativa
  modified_base (685)..(685): a, c, t, g, unknown or other
tcactctgtctttcttatgagttgtctaccgttttgtttgttacccggcactccatcaatatacatgccggtaaacatagaattttcttgcgctgcaaaaatgctattgttgtgaagtgtctgcatctttcttctgccactgttccctagcaggttgacctctctgccactgttccctagcaggttgacctctctcccagtgttgcccagcagcttgaccctaaggagcaggttgacctctctgccactgttgcccagcagcttgaccctgaggatgtcttctgggagcgtaagctcggtttctccttcgagggcctgaactgctttgcttcttgctgccaccagtgttgtttgccatgctgcttggatctgtttctgaagttgatgttgtggttgcttcacaagaattggcgctgtctcctgcacttatggttggctcactaggaggaagagtaacatacattccaggctgtatggcaaggtctttcttcggttcaattaaaccattccgttcttgttgcagattaaacaatgacccgaatttttctctcctcttcttctctgcctcagaatggagcaactctttatcatcttctcccaggtcaactgttaaagacgccatcagctgagtagtgtttgcatccaagagattgcgaacatgctcgatatccttctcatcaaaacnctttacggcaaaactgggcaaaaatcctttgtgatgatttagcttgctgagctggac

SEQ ID NO: 1487 - DNA, 882 bp, Avena sativa
ggatatggaagtcaacggagtgcctttgaaggcctttgttgacagtggagctcagtcaaccatcatatcaaaagactgcgctgaacgttgtgggttactcaggctacttgatcagcgttacagaggtgttgctattggggttggtcagtcggaaatacttggaagaatacatgtagcgccgataaagattggcgacattttctatccttgttccttcacagtattggatgctcagaacatggaattccttttcgggcttgatatgctgcggaagcatcagtgcataattgacctaaaggacaatgttcttagagtaggaggtggtgaagtctcggtgcccttcttacatgaaaaagacatcccttcacatatacgcgatgaagagaaagcatccaagctagcatctcctagccaaggagcagccggagaatcatcaagggcacgggagaagactcctgatgtgccatcacgatcctctcctgcaggagctccagctgtggttcctccacagggaggagattttgaagcgaaagtcagaaagctcgtggaacttggattcgaccgggcatctgttatacaggcactcaagttgtgtaacgggaacgaggatcaggcagctgggttcttgtttggtggttagagttgttagagcacaaacttttgctcaatattttcttgatttaaacatttacacacactggccaaggcccaaggagatgtcatgtcctttttgatgaactacaacttttgtgtgtcaaatacaggctctggtagggatgaatatcttgtgtgagggaaaaaagctactccagcgatagattcaggmccaaggagtatttctttcagtacccgatacatagattgtagacagcgagtgcagac

SEQ ID NO: 1488 - DNA, 398 bp, Avena sativa
aattaccaaggaatactgggaggaaagcttcccacagacgaacgttgcctggttaatttaccttgtggatattgtgctacggaagaaatacgagacgtgcaccaccaaagaagagaaggagctccggtcgttcaagaggcggctttcctcgtgtggttctgctagagattgccttggtgatcccattttcagcgatatgctgtcggaagaggaggacgacatgtggccctctgcgatgcctctcctgtagctgcatccgtcagctgaataaacatcccctttgtttgggattttagattttatattatttgctttttattagttttgcccgtcgagaagcgtgattggcagatgggatcgaacacacaagtttgttctgtctccccgcatgatgttgc

SEQ ID NO: 1489 - DNA, 448 bp, Avena sativa
atgctgatcagttgatgcttctgttcctccgtgtctttgcgtgccacagtgctactgtacatgaagaagctatgcttgccattggtgctcttgcttatgccactggtccagatttttgtgaaatatatgcctgagtttttcaagtaccttgaggcaggattgcagaattatgaggagtaccaagtatgctccatctctgtaggggtggttggtgatatttgtcgtgccttggaagataaaattttgcccttctgtgatggaattatgaccgttcttctcaaggacctctcaaacccacagctaaaccggtctgtcaaacctccaattttctcatgctttggagacattgctcttgccattggtgagaattttgagaaatacctggcgtatgctatgccaatgcttcaaggagcggctgagcttcttgttgttttggatcaaaatgacg

SEQ ID NO: 1490 - DNA, 789 bp, Avena sativa
cgactcggtgcactctcctggcggcatttcctcgcctgagaaggcttcagcgaactcgcgagctattgttccagttacacctgtagattccagtgcaggggcgatagtcccagtaaataaggcaaagaggtcttcagaacaggggcagcgtcgaatcagacgtccattctctgttgctgaagtagaagcacttgtgcttgcagtggagaagctcggaactggaagatggcgggatgttaaacttcgtgcttttgacaatgcgaagcatcggacttatgtcgatcttaaggacaaatggaagacgctggttcacacggcgagcatctcgccccagcagcggcgcggcgagccagtgccccaggatctgctggaccgggtcctggctgcccagtcgtattggtcccagcagcaagccaagctccagcctaagacaccacccccactggctgaggctcggttgctcaccatcacctaacaacttgatctctctctcagctaatggtggtggtggtctcataggggttaccattccagcttttgtataaagtcagtaagtcaggccattggaaaggaaggaggttaaggaagacagtagaaaaaatatatactacataagaaaaaaggtacaagaagtattgaccgaattgttgtaatatctactcaccaaacaactattcttttaagccagggttctctctccttgtgaatttaaccaaaggaaagggtaatttctttggcaaattgtacatgatgatggaaggagatgatgatcaatccatgaactgagat

SEQ ID NO: 1491 - DNA, 863 bp, Avena sativa
accgcggacctccacgagcgcttcgtcgacgccgtcgcccagctcggcggggaccgagaaagcaacaccaaaaacaatcttaaggacaatgggtgtgaagggactcacgcttttccacttgaagagtcatcttcagaaatacagaatggggaagcaacctggcaaggagacgccggagcaatctaaagatgggtcctatcttctagatgctcaaggtggaatgagcctgtctcccagagtttctactcaagatgcgaaagaaagtcaagaagttaaagaagcactgagagcgcagatggaaatgcaacgaagcctgcatgaacaagtggaggtccagaagcatgtcgatataaggatggacgcgtacacgacgtacatcaacactctactagataaggcatgcaagatcgtcaccgagcagttctcgagtagcttcagcgtctccgacaacaatctcccagagctatcctccggtggtttcatgtgtggcactgccaccgatgcgctgagctcctctgtcttccaccagctctcggtcagctcgaccaacctgcacagcccaggaggcaaaccgtctctatcgggcatcgaaggccagatgcttcaccagagaccaactgagttcaaacgcaagtcctcctgctgagtcatgcctgtcgacaggatcttggtcagaacgctggctgcctcctccatggtagagccatgtcgaaccccggaaccgacgacgaggggaatggtctgccaatctgtgaccgacttgtttctcttgctagtgcatgccaagaagcaaggttgtatcaatcagaatcagcaacctatgtttatatgtaaaacgcctaatgtgctggtcgggtgacttc

SEQ ID NO: 1492 - DNA, 754 bp, Avena sativa
ttgccatctgtgattgccaaactccatgatgcaaaggagaagtatttatcaccaccggcgtcactctcaccatcttcacaagctgagaataaacagtggaatttctcttttgcatttatctggaacacggtagtatggctcgtgctcatgaacttcttcattaagatcgtcacgtcaacagctcaggattatcggaaaaagcagcaggatgtagagatggagctcattacagattcctcgtccctgagccattctaaaactaactaacgaagaatgttgttgtatttattcagccgcaagttgcggatgtttctcctcagtagccttgacgcctggctaagccctatgcagatggtaccagcgctggtagaagttgtattcttctgtacagtgaacagatacatgggcctcgctaacctaccccaagagatggccggaaccttttgccattgcgcctctctagtggcagttcctcgaggagaatcagtcctgttattctttcagacaccaacttggatgaaactttagggattgtttgttttagcacgattgcattactaaacttgtattactggcacttccttttaccttcctattctggaaatacgatagccaatagggcgcctgagaatattccagtgatatgttttgttgtcaatatgcaaatgcatattcgcagttgggagtgagctagatcaaatggaacattatgactaattttgacctggcaaataaagctgctgatattgaaaaa

SEQ ID NO: 1493 - DNA, 836 bp, Avena sativa
gcgcggcgacgagtgcctggcgtggctggacacgcagcccaaggcgagcgtggtgttcctctgcttcggcagcctcggacggttcagcgccaagcagaccagggcggtggccgccggactggaggcgagcggtcagaggttcctgtgggtggtgcggagcccgcccagcgaagatgactcggcgaagacgaagttcgagaagccagcggagccggacctggacgcgctcctccccgagggtttcctggatcggaccaagggaaggggcctcgtcgtcaagtcgtgggcgccgcagcgcgacgtgctggcgcacgacgcggtggggtgcttcgtgacacactgcggctggaactcggtgctcgagtcggtcatggcgagcgtgccgatgctggcgtggccattgtacgccgagcagaagatgaacgtggtgttcctggaacaggagatgaggctggccgttgcgatggaagggtacgacaaggagctggtggaggccgaggagattgccaagaaggtgaggtgggtgatggattcggagggcgggaggctgctccgggagcgcactctcacggcgatgcggcaggcgaacgacgctctgctcgagggagtggagtcggaggcgacgttggcggggctggtggatgcttgggttcatgcttgagttgacatgggaatgtgcaggctcatttgtgcagagggacggtgtggtgagcgggatgtggtcacgtgccgcagcgtctccaattgatcgtgataataaggaatgttctgtccttaacgtctgatttttttagaaaaaacaacctttattaatttattattattactacaaaaaa

SEQ ID NO: 1494 - DNA, 861 bp, Avena sativa
caagaaccacctccgccatggccatggccacgcaagcctcggcggccacccgccacctcatcaccgcggtctggtcgcccctcctccaagccgcgcgccgtctccctcgcgctcccctccacccgcggcccggccccgctctgcgccgccgcctcggactcgccggcgccggccaccaaagaacccgaggccgcccccgcccccgccggcttcgtgccaccgcagctcgacccatccacgccctccccgatcttcggcggcagcacgggcggcctcctccgcaaggcgcaggtggaggagttctacgtcatcacctggacctcccccaaggagcaggtcttcgagatgcccacgggcggcgccgccatcatgcgcgagggccccaacctcctcaagctggcgcgcaaggagcagtgcctagccctcggcaacaggctccgctccaagtacaagatcgcgtaccagttctaccgcgtcttccccaacggcgaggtgcagtacctccaccccaaggacggcgtctacccggagaaggtcaacgcgggaaggcagggcgtgggccagaacttccgcagcatcggaaagaacgtcagccccatcgaggtcaagttcaccggcaagaacacattcgacgtctaatttctacctgctgcgtgccatgcgtacgtgcgtgtgttaattagctcgtcgaccgatcgtagttgttggtgggtggcgatggatgatggacatcctgtaattttaattatcgagtttcagtgatggattcggtgatcatggtgcatcagattatatgtgtacatgttaatttggtgatgatatatgccgctgtgtatgttaacaatgttcacgtaccaaaaa

SEQ ID NO: 1495 - DNA, 526 bp, Avena sativa
agcacctggctctgaccctgtcgtgatgctggactctgacgagtcctgcatacttgctgagtgtggaagaaagcagattatcttggacgccttcagtgacggaagcagcttcatttgtctgaaatgcggtgggctcttcagcacgtcgcgtaaagacgagcacctggcctactggtgtggcgctgcgtaactcctttgctactgcatatcggtggttgccccagacgctgatcatgatgcgtgggatgttctgtgaaacctgctctcttttgtggttgccgcttctttgctacagggatgacagagatacacctttgttcaccgaaacaaatacatagctgaggtagagcgttatgaaccaagcccgatgcctccttctgttgtactgtgttcttatatcaccttatggcgcttttttgctggtcctttgttaatctctcggcggttgtcagatcctcatagtcggtgtcttgtgaggaaaattttctgtttgtcattgaacggtggcatactctatgggaatgta

SEQ ID NO: 1496 - DNA, 770 bp, Avena sativa
cgtccttccgcgccgcaccgcacggcggcgtcccaccaccgccatctctcccgcgccgaaggcggcagcaatggccgacggcgacgcgcgggtcctggaggagcaggcggcggcggcggccgaggcggcgcgggagctgcgggacgaggcggcggccatcgccgtgcgccgcgccgccgacgaggacgcgctgcggcgccgagcggtgtccctggacggggacctccgacgcctccaggtatccctcgccgccctcgaccccgccgcgctcgacaaggtggaggaagacctggagcgagccaagctggcaatcttagatagtgacgtggctgcatttctccccaacaaaggaaatgggaagttccttaagaagtttgttggtcctgtaaatgtgcgggtcgcaaggaaggaagataagctcaaagtgaaggacgagtacaacaattacagggatagggctgcatatatgttcctgttgtttccatccactctcctcctattgagatggtgggtgtgggatgggtgccttccagcattagcagttcagatgtaccaggcttggttattattcctatacacaagtttttgctttgcgggagaatgtgttacttgtaaatggaagcgatattcgtccttggtggatatatcaccactatttagcaatgctaatggactcttgttagcctcacatgggagataaagggacagccagattgttcaaacaagcagaaaggggtacaacttttcttagccgttgggcaatcatgcaa

SEQ ID NO: 1497 - DNA, 863 bp, Avena sativa
ccttgatcacatggattttacattattcttgccatgtcttatttctgtttacaagtctgggctatttacagaatataccgtatgggattggatatccaacgagatacaaacactgagactaatatatatcacacaatatgaaagggtgtgaggtggtcaaactttacaactttgaagattcagagcacaaagagaaaaaggtcaatgatacgagcactcacgttgagctgcgactcgcttcatcattcatcatcccttgaaaacttctggccaaccagatagccgtttctctaggagacaccttagccttcccaaacggctttagaacaactgccagctcctccaatctattgttttccagaagatcagcagaaagctccaagagcccttcaagggcctcagaccgttgcctgaaggacttgacatctagtatttcctttgttgaggttgtctcctccttaaacctaatgttggtctcaggagaagtagaattcacttctgagatagcaggcaattttaccacatctgaattcgctagtttggaactggtagtattagcttctgaaatgttgagtttggcagtggcagaaccagcaagtccggaaggtataaggctcggtgtgatgcttctcacatccacttcttctttgaccacggcagaaagctcgtcaacatctgtgctctggactcccatttcagcattccctgttaccgcatgctcaccactgacgcggaaactgctgtgccttatgacatgtataacgtcctcaactggagggctcaactgaggaactggtgatttctctgatgacggatggatagaggtggatcctttgtctatggcaatgttttttgctgttgaa

SEQ ID NO: 1498 - DNA, 646 bp, Avena sativa
aactgctgtttatcagatctgtccctattcagctcctgcatgagagaagcggcctttgcagagagttctttcctggcagcaaggagcttgtcgatttcaccacgaagatgcgcaacttcatctctcaaaggctcatttgctctaagttcagcttcaagcttccttctcttgtccacaagctcgttgacaaaagcttctttcttgccattaatctctgcaatgatcatgttcaagtgacggacctcctcttttccggcttgcaactccctctgtaactccatccgctcctcggctagagcgtgacggtcagccatgagcctccggaactcaatttcttcctccagagcagccgggtgagggcgaggagcctccctcatgagtggcctttcgtgaattgcaggataacctctacgatcctcgagcacgcggactgcaggatagcctctgcgatcatcgaccacacggataccgggatggtgacccctacgatcctcaaccacacgggcgtcaacatagcccctaccatcctcgataaaacggcggggcaggcgatcccttcctgacatgatgatgcttgtggccttgagaaatcaatgtcgaggaattcggagggggagttgaagatagcaggacgcggcgaggtaga

SEQ ID NO: 1499 - DNA, 934 bp, Avena sativa
cccgggataagacgacagcaattaagactgctggctttaaaacttttcctgattacctggtgctgcagatgcgtaagtttgtaatggaagcaggatgggtgccaaagaaacttgatgtttatatcgatgtgcccgatataatcgatatatcgcatatgcgcagcaaaggtgtacagcctggggaagagctactacctgaagcagcttcttgtggcaacaaagctgaacctgctcgtcctgttgcaagtgaagacattgtgtcccagcttgcaagcatgggattcaattactttcattgtcagaaagctgccattaatacatcgaatacaggtgttgaggaggcgatgaattggctcctctcacacatggatgatccagatattgatgatccgatatctcaagatccaatgtctgctgaagacactattgatgaagcaagtgttcaaactcttgtttcctttggatttcaagaagatgttgcccgaatggccttgaaagcttccggtggaaatattgagagagccacggactgggttttcagccaccctgaagcatctagctccgcatctgctgattcttcaacaagcaatgtaaaagatgatgaccaacacataccagatggcagtggcagatacaagctgatggcatttgtgagccatatgggtacatctacccactgtgggcactatgtggcacatgtcctcaaagacgggaggtgggtaatcttcaacgacagtaaggttgctgcctctgttgacctgcccaaggatatgggatacctctatttctttcagaggataagcagttaaagaagacatcacaggcaaatcatgatgaagtcatagttcacacacacacttatcatcagaagcatggccggtggtcgcagcgctcttctgcaaattgactaaacgccgccacatccttgcgtgct

SEQ ID NO: 1500 - DNA, 668 bp, Avena sativa
ggatcacttcaatttcacatctctttctctgttcttcctcgtactctcatgcttcattgccattggtgttaatctgagccaattcatctgcatcggccggttctccgctgtatcttttcaagtcctaggccacatgaagaccgtgctggtcctgttcctcgggtttctcttctttggcaaggaaggcctgaaccttcatgttgtcctcgggatgcttcttgctgttcttggaatgatgtggtatggaaacgcatcggcgaaaccaggtggtaaggagcgtcgggccgttctcccggtgaggtctgagaggcacaatggagcttctgaagagaaggatggtagcgagaaatgatttttgcgatctgcaactgcagggcgtgctttctttttttcccttgaggtttctggtgacacagatacaacggaagaagaaactctggcattgttcttgatagaggttactacagcagctgaaccttaccccaccaaggaactcggcaatcggcattattcttataggtttacacacattatctgtcatatttttcggttggtctctgatacatttgtagtcactagatgttttacaaggtttgggtatagtataatcctttagaagtcagtcatatgtgaagttgtggaattgtggtgacgttgttttggccttg

SEQ ID NO: 1501 - DNA, 826 bp, Avena sativa
gctatcttccgacatcttaggagcctgtttggggtatgccatcagattctggtgctgcagaaacaaccgttactcttgccaagacagtgtcctcttgcgtgcatcacatggaactaagtgccctcagcgcctgccttgccgctgtcgtctgctcgcagcaacacccacctctccgccctcttggtagctctgctggcgatggggcttctctgatcatcaaatcagtactggacagagcaacggagctactggcggatcctcactctgcagccaactacagcagatcaacccgttctctttggcaggcatcgttcgattctttctttggccttctgacaaaatactgtgacagcaagtacggaagcattctgcagatgttcgccatgcaggaatccacttccatggttggacctgaagcctcgaaggctgtcagcagggagatgcctgtcgagctgctccgtgcaagccttccgcataccagcgagcagcaacgccagatgcttcttgattttgctcggaaatccatgcccgtgattggttctagtcattcaggtgcgagcatgtcttcaggtggtaatatcacttcggagtcggttcccggttaaactgcatgtgcagcttgtcttcagatggtaattttaatgtttggagacgtgcttcctgtctggcaagatgtgagcttggagaagttccattggctccgatgaagtcgtcattcctctagacagtgtctaggattgagattaatttgtagaaccgacaatccccctcatgtggggtaatttcatataatacccactggacctggtggctatatatatatatg

SEQ ID NO: 1502 - DNA, 580 bp, Avena sativa
ttgtacacagacatcaaaacatctaagatgaatgaaacagaacatggctagttgatccttgacacagacaatacatttacaagcttcactcgtcatagaacaaacgattcatggaacattgcaaagtaggaaggatttagagtgctcaatcatagtagcagcacacggatgtaccaaaccatttacacaattagaatagcacacttacaaagactcgggcataattagatagagcttatgtcccgtaggagatttgtcgaccctaacataatacaatacgatgttttacgtgttggacatcaaacagtgtagtgcagataatagggcggaatctgtcttaaaactataagacagttctgccctgaggctaattgtctccatcttgctttttgactgaagggagcgaccattttagttgcggttcttggatttctccactgcccttggagcaagtccaattgcatctgaacctttcatgatcctgagcctacgacaggagtcagcgaacatctcccatggaacatcaccaacgagcatccagtcaccatccttgtcttcaaagtcagcacatattcgccat

SEQ ID NO: 1503 - DNA, 942 bp, Avena sativa
ttgttacaatttgaagtacctcttaatcttgacatacaaaacattcaatgcctagctaaacagtgaacgacccggaaaaaatgtggatcgctagaagttttactatgttccatacacataaggtacatcttcctctagaaagaacatatatattgttgtgtgcagtctgcacagacaaagagttccatcttgtggactttgctataacttatataaacaaaaacataacatgacctgtaacaacaccagtttccgcaccaaattctgttgcttcgggtcaatgataggtaaactgaagcttaaaaaatctgatgttggtgggcggtgaagctttcttgttacaagaggacggcatgtgatgcaagaactcttgagcccaggtaaaactaacttgatccatgtctttgaatcgcaacgacgacctcattacagcgtgcacatctgtaagaacttgtagccgcgcaacgagttcgtaggcaataataacaatacctgtgttgacatgggagagctacaaagggaatgctaggactagagacacatatagggcagtttgtttcatcaccagaagaaattgctgatttgtctttagaaaaaggtaggagaaacttctttactgaggatgaatttaagaggggaagaagcaaaagcaacatttccgagaactcattccaaaccagctgccgattcatgtactcaaagcttactgctctattcatgttggggctcccataaacaagtcttgctttcagaatcctttccacaatagttttataccttccaccataaagaaatgacaataggttaaagaatgaaacagctctgtataatccttcagcatgctgcaccaaaccccatgcacgacgcgctagtggtctctgttcagaatcaccccatcgacggaaagcagaaaaagactgcaagcgggacaataagtattgg

SEQ ID NO: 1504 - DNA, 861 bp, Avena sativa
tataacactatataaaagggtaaatacacaacactatatactataacatgagagtgttatagaaagataaaatttctttgataataaaataatacaaataaaaggtttgttcgcatgatcacaaaatagtgatcatgccaagccttgattaccagtaacccaagtttcaagttaatgaaacttggacaaatgtgtccgtagcaattattttacattattttctgctcgcagtaagtttgcgccgaagctctccaagagccataatagggtagatgttgcgatagttggagtagttaaagaaaaaagctgagttagcagttccagtatattcctgctgaggaaactctcctgtgtctagctgcatgttgatcagcactcttgctccacgatacagtggtaccggatcaatttcagcctgtccagcataaattagagctaacattgcccatgcagtgttgaccgcatgaggactaccggtgtcaacataatcctcggtttccacggaaaggtagctttctccccatccacccgttatttgttgctttgacaagaggaagttgcatgctttcctaatataagaactattctcgtatgttcttccagcggcaactaatccttttaccgcaaataaagtcccataagtaaaacaaattgcccaagatccataccaagaaccatcatcgcgctgttcactctcaatatacatagcagaactttctgtatgttgtcttatctctttttcgtgatactgtggatatagctctctgaatgacacaagggcgtcaagtacagatgcagtaacttcaaccgttggatgatcgacgacaatgttcttaaaactctctgtcggattgagaatct

SEQ ID NO: 1505 - DNA, 843 bp, Avena sativa
aacgcagtcaccaaatcaggtttctttttgaacagttgcaatgtatccccatagtatggcggagactcgctttctgctaatagaacatgcgaatcacatgtcacaggtacacaactcacaggccgtatggcagtaaacatgcaaaatgctgattgctacacctaaagccgcagctctgtccttttcagtcctttttactctttcctttttacattgtgaaggacagtatgcagaacagctacactcgtttcggaatttagactctcagggacagttctcccttgcagagccccaggttctggcttttctacaaaacaagtggtctggggagagcgggaaatgcattttgcgcctataattacatgatgatgcatggctgtggcttgccgttgtccgctgtccttcgtaaaacaccatcactagcctctaaggaagttgtccactctgacattgtctgatcttgtcaagaacttcatgcaaatgggaggattcaccttggcaagggcaagaatggactgcggcagagtccagatcccgtccccgcagatcaaccctgaagcgacggcaggtccaaaggcgtccgctttggccttgttcaccctctcccacacgaagagtatcaagctgcccaggaacatgtcgattgcgaagtatgatccgatgtagaaaggtatagccattgccatcgggagcgggatgaacctcgagtacttgtgtggtgtcaagtctcttatcaagttgatcacaatagctgcggcaaagaagatgtagcagagagtcaggcagttctctgggagcgacgagaagccatcgacacccaatattgccatgtttcgatcccgg

SEQ ID NO: 1506 - DNA, 580 bp, Avena sativa
cgaagagatccctttccagcttggattgtcaaaaactgatctaaggagggtgctgaaatcaagtttatctgggattgacaagtcaattggtgccatgtataggagattgcaaaagacattgacttctgatgaattgtttccctcgctatgggacaaatgcaagaaagagtttttggacaagtacgagagctttgtccagatggtaacacgaatctatggaaacgagcctgtaatgcctgttgccgaaatgagggacgtccttgccaccttttagatacaacgagtacagtgccatgtatcatttcacagtgcaatagctaatctatattcaattcattctattaatttagcatatccactttttttaggccttgttagtgttttatatgtatgtttccttgtcaaattgtatgtgtgtggctcttgtatagaagtggatgtgagctgttgtttcatccttaaattaggcaccatagcctcagatcagcttctgttggtgcaaaggagtatgagtgtaacaagtctggagaacttgtgcatgtttatcatgcttattgaaacgccgtaaaggtttcttaag

SEQ ID NO: 1507 - DNA, 585 bp, Avena sativa
aaagatgcaactgagcttgttgcaaagcttagggcatatcatcatactgcccaaacaaaggctgataagcaacactattcaagcatgggtcttgacctgtcgaaaggtatcatccgcaacaacctggaatacggcgtgatcgagccagccatgagcaaagtgaagatcatccagttcgccacggaagcggccattaccattgtgaggatcgacgacatgatcaagcttgacaaggaggagtctgggcaagaagagtaacggtgctgttttatgatctctggccactgtttgtcatgtgatgcttgtctggttgctgctatagactcttagatttgtctggtttggtttttcttttcttccttttgcacaatgttattggacattgctgtagaatggaatgttgtacgggaggtgtatcggtgtgcgttactgtatgcaggtagtagaacgacacttgaatgtaagcaaatttttgcgtagagcaccagagcctgggatcatagagtgtatctgaattgtgtgttctcttggatttctatctaatggaccttccggttgctcataacttaaaaaattaaaaagtaa

SEQ ID NO: 1508 - DNA, 877 bp, Avena sativa
gtaccgcatggttgttctgtgacaaacaggagcttaacccagaatctgccgtatcgtcttatcaagttcatcggttgagatgttgcatggaaaacaccctaggtcatctactcctcttggtcgtcggtctggtctggcattggcttcacctagcaactctactggtagtagtgcgttgaataccgctggcaaagcattggctgaggatattacaactgatcagagcgattcttatgctgctatcacggatgcttctacgattagacctgggactattatcctgcaaacaccgccgtcggtttcaaaacctcctcagactaggggggaccatttcaactatccagagggctctattcactgagatactagttgttcaagaactaggaagtaaaatggagttggttcctcctattcagcttaaagaggttgtcttacccatagttaacactccagattcattacctccatcatctgcctcagctccaatggataataagaataacaggcacaggcagcagaaacctccggtggatacatccgccaaaaggaacaagtcttgaaccagaggcaggagcattgctactaagtggtgcggcaaaacaggccgttgttacctacactttctacctacctacttatctacttaccttgggatgtgaggactggttcctcccttttatagttgctgtgtacatatagaccaagtaccgatacttattatctaattaccgtgggatgtgaggcatgattcctcacttttgtagtagctttgtacatatggatcaaccgccgatgcaacagtcctgctgaggctcatctcttgctggtggttctaccgtgtcccagcacctgttctatgtaggtgcttcgactcatg

SEQ ID NO: 1509 - DNA, 728 bp, Avena sativa
  modified_base (136)..(136): a, c, t, g, unknown or other
ttcacacaggaaacagctatgaccattaggcctatttaggtgacactatagaacaagtcggtccggaattcccgggatctcccctttcccctctcgcaggcgattcctcaaatccgcaacaccatctccccccttntaccctctcttcctctctcgatcgtatcctaccactcgccgcgccccggtagatcgacgatgacgctgggaagctccggcgccggatcgagtgtcgtcgttcctcgtaacttcaggctgctagaagaacttgagcgcggggagaagggcattggagatggaactgtcagctatggaatggatgatgcagatgacatatacatgcggtcatggactggcaccattattggccctcacaatactgtccatgagggtcgcatctaccagctgaagctgttctgtgacaaggactaccctgagaaggcaccgtctgttagatttcattcaagaatcaacatgggatgtgttaatcacgagactggagcggttgacccgaagaagttcagtgtgctagctaactggcagcgtgagtacacgatggaaactgtcttaacccagctgaagaaagatatggcagccgcccagaaccgcaagttagtccagcctccagaagggacattcttctagcggagtgtttgctggcccatctccagtttcaacagcagcgatctatatatcaccccatgggatttgaattgtagattcagcatctg

SEQ ID NO: 1510 - DNA, 863 bp, Avena sativa
cgtgttgctcatgtgtccagacagtccacacgtcttgcataccggcgaagcaacaggggctcattcctgatcattctgagggcacttcggagcatagtgaccaacatctccgcatatcttgcaacgccgtggtgctgatggtggttttgccttaccacctcttggcttggctgacgaactgtcccttctggatgttgtcttgggtgtgtgtctgactgttggggtatcatccaatccggctgcctggttggactcgatttcatcagcctcggcagctccatcaggtctcctagacaaattatcattgccactgaattccgtgtagggttcaacctccatagcagggcagttagtcatttcatgttcttcggaaccacatatggcacatacagccttctctttgccttttcccttggccctctcgctgcaagactgcatacgccttgttacagggcgctcgcgggacgggcgattctctggagccttgtacacgtcccggacagcaggctgtacatcagtgttctcttctatttcatcgtgcaactctttcccatccatgtcaacagtgtaaccctgacggtgtcagcaaaaccgcgaggctgtgtgctgccattgtcttgaacattgctctctgcctcagtacaatggcctgtgcttggtgcacctttctcaccggaaatgattttctcagatgcctctatcagctgcttcttggtgttgtctaagttcctcatcgcgactgcaaatgtctcaagtgacacgtcgcccagcttcactatctccagggccttcatgtagagtacattgtgtctgtaagttttcgagacgccagtctcactgtccctttggtagcatctgatgtc

SEQ ID NO: 1511 - DNA, 984 bp, Avena sativa
atgaagaagtcagaatcctccttggtgaagcacaacgaggtgttaccctgaacacgttgccatagaaaccacccttccccaccagcacacccatatctttcatgtggttcatgacctgcgtgatctcagctttcgccggggttttcttctggtgatcagtcactagctcgactccgagaagaaggcctctccccctaacatcgccaatgatgttatgcttctctttcagcatgttaagttgttccttcaggtaggagccaacgacaaacgcattctcctggagcttctccttctccagtactttgagaacagcgtggccggcagcggtgctgacagggttaccaccgaaggtgttgaaatagcttctgcgggttagcacctgagcaatctcaggcgtcgtaaccacggctcctatcggcatgccattccctataccctttgccatggtaactatatctgggatgacaccttgcccttcaaatccccagaagtggcttccagtccgtgcaactcccgcctgaacttcgtcagcgatacagaggccaccagcatctctaaccattttgtaggctgcaggcaagtatcctggtgccaattccactattccaccaactccctgtatggcttctgaaataaaaccagcgactctccctgtagtcccatattcgatggtttcctgaatatccttggcatatttaggtccatcggaaccaaaagcacctctatatgggtctggattaagagcatggtgcactcccgtctgaacaatgttaaatttccagttgcattgagcagtagcccccattgttgcagctgcatttccgtggtatccattcctaagagaaataatgtcatggctgccggtgtaaagcctggcaatcatcagcgcaagctcatttgcctccgtgccagaatttgtgaagaaaacaaccttcagatcaccgggcattttggacgccaaagcctcagcgaagtctgcaatcg

SEQ ID NO: 1512 - DNA, 689 bp, Avena sativa
  modified_base (571)..(571): a, c, t, g, unknown or other
tgtcgtcaatgatgtctatggaaaggtgaagtgtacacattcagagctgacaatgtccattgttgggtcatcagagctgccaaaaagtatgtacggtgattcattttactctcagcacctgccgcggtatatggtgggttaccaggcagcaacggactgttggagtgcagttggctaggatattggtggatcatctgggacttgttcttttgcatcaactccatcctacatgtcggtcagcggacagatacttgggacaggggtttacttttctgctccttgttgcccctagcaaagaggatctggagagtccagggtattctcttatgagcttgcagatgtagtaagatcatgaaactaagctggttctgttctgatggttgcgcaagtgcatatgtagtaccggtcagtgtattggcatagcttctcgcagtgaacagcataccctacagcagtagcatgtaaaaataagttcacattgcgcatagcagcaagtgtacatttccttttcggaaggcgggtggaaatgttactgggaagccatagaagatgggtaggccaaaaaaaaacnggtaatctcttcaccaattgtgggtttctgctgtcgattcttatgcatgctgggtgaaaatcatccaaagtgcaatgtatagtgatctcattagcatgcatgtgctgttaactcttgt

SEQ ID NO: 1513 - DNA, 605 bp, Avena sativa
ctagacaagacatgtaaactaatggagaaatcagattttggtatgcctagttttcccccacctgacggcaacagtttgcatagaatgttaatgtgacaatagtgtaaaaatgtaacatactttctgtattttagtgatggagcatgagtaatttgctcagcaattgccgtggtgtctgctcagttatttgattggccttctacagttgccccctgttgcgtttacctttactttgatatggaatcttgagtctagggcgacatgccacacttagagtttaggacggagtaatatgtactatggcttcactgaacatgcaaaacatatttctacctttttgttcccgtcctctcttcaatctcttgtgcaggtcaaaatcagcccattagtttgctggtaacttgcaaataaactggaagaatcatcaaagaagaccaaagaactagaggcattcaacaccagcattcctctgctgtgtatccaaggagctagatttcacagttgttattttctttagctcatctttcttctttgtatggctgtgtattgtaacagtattctggcaataagttcttggccactttataattccaccttcctcgaat

SEQ ID NO: 1514 - DNA, 738 bp, Avena sativa
cgccggcgctgtctctcgaagaagcaaaatttgcaacagaaactgcaatccaatacatggcaactgaccagagaaaagtaattaaagactacaactttgatgcgttagaggaacaagaggaaataaacaagcatctccggtgcaagatagaagaaaaaacaaacagctggttgaagccatagttgcatgtgatcttctcattgatcaggtaacttattcaaacaaacgaatccaggacatagtttctgaaaacttgcatctaggttgtgctgctatgcatggtgaacacaatgctggcttccttcgtatccaacacgtcactactgagatcaaatatcatgaggatgaggcaatggccaagatcaaagatacaggggcatatccgcttcgtgaagatagcttgggaacacaggacgctaacggcgatctccgctataactctgatggagaagagtataacgaggaagaagtgctccgctatcgacgagattagctatattctctgatgttccgtgtcgcactggccataataattgccgtgcttttctacctacttatttacgttggactatatgtactgattaccagttagctttgttgcaattagtaaattatgtgctttatctatgcttgtgaaaacctctaaggttctttgtaaactggtggttctgttataaccaagatgctacctcttaagtatttcctgatatgtgatcaggacatccagttcatgcctac

SEQ ID NO: 1515 - DNA, 574 bp, Avena sativa
ttgcttatgcgatgaacgatgagttctccagggttctcagtcaacaaatggattactattcaaatgacccgagttccgacagaataaatcgcatgagaactgaaatcagtcaggttagaagtgttatgattgataatatttgataaagtccttgaaaggggtgatcgtttggacctattggtcgacaagacttcaaccatgcaaggaaatacagttcggtttaagcgacaagcacgtcgctacagaagcactgtttggtggagaaacgtcaagctcacggctgcgttgatactactactcctggtaatcatatacatcgtcctcttcttcgtgtgcaatggcttcaccttgccgacctgcatccggtaattaccgtcttgtggtgtacacggcttgtctcccttgccctcaggacagcgactgtggcaacaccacattgcaatgcaagaattatttttttgtgtgtagagaaggagacctgctatttattctgtaattgtgacagcttggattatgaagactatattgacaaaaatgwrawmaagtgctttgttgtgcccttagcactggagtg

SEQ ID NO: 1516 - DNA, 388 bp, Avena sativa
tttttttcttttttttttttttctttgaaccattagagactgcggggttcaaatcctgaaaactgtgtcatagaacaatagctcaattacacattgtctgctaaaattcattcagacaacacacacaacgcccaaaaattgctggataggtcatactgatctcatcgtgatctacctagtaggttcgtcgacctttcgaatggttcgaggctcaattaagttgtctgcaccactgatgcatcattgatctacccagtacaaccagacatcctatcaattaagctgtctgcatcattgatgcgtcaagttacgataccaggagaagagrtgagctgaagaccctgtcgtttgccttttctgcctcctttccaatctatgcaccacgcga

SEQ ID NO: 1517 - DNA, 777 bp, Avena sativa
gttcactctaccctgattgctccaacaaatggcctgacctcccaagttccccaaaggattccaacagctagaccaggaagagtgattgcctcaccggtcgagaatggaagtgtcgctgatcgacacattggacgaagagtggtgagggatccagtggttcctgcagcagctcccagctaccaactgaagtcatacttcgctgagagacagcatcaacaggagcttgagaaggaccgcatgcgctacaggccatcgcatcatttcagagatgccaaggtcgcccccgagatggctccagacatccgaccttcgccttactacattcctccgttcaatggcatcacagcggtcgaaggtggttacagcaaggttaccgcagctacaaggatgtactagagtaatggccaggcaagcttgccgtgcttgccacattggtgagtgtgagaagggagccagagaatggttataatggttgccattccaggcagaaattctgatcgctgaccggatggtgcaagccatggatgccagggaagaacttgcatctgcgaaaatggctagcgttgccacagtccattgctgtagttattgctgtcttgtggtctttacaagggaagaagggtggtagagcagagtgatttttctcctcttttttaatttaggagttaggacacaatggctctttttgtatatatcacaacacttgattttctgttctgctgcttgaagctgatgcttcttgtgttaatagattcaaagaataacccccaaaaaaga

SEQ ID NO: 1518 - DNA, 503 bp, Avena sativa
ttttcttttttttttctatcaactcatcatctcatatataaatgtcattgagatctagctgacaacaaacacactgccacgtttagggaattcagcgctgcaaatagctagagaagattttacaggtaccagttgtcaaccagcccaaaccatgggtttacatccatcacacagccctcagactggactaataatgaattgtaccacaggtcactactactaggaatctgataggaagtctaggcggtagagaacaacaggtcactacttactactagtacaaggcgcagcaggtcgatgtttgcacgacaaagcagaacaacacgatgacagacataacgacacgagactgctgacatgctcagctatgaataacacgagtttctggcttctcaggtcgagcctggtcctcttggtggcgcgccttcgttcgggcccatctgcggcccaaacatctgcatcatggctctcagagtctcagcagtgtgctcctcttctgacag

SEQ ID NO: 1519 - DNA, 898 bp, Avena sativa
tctactagctgacaacaaacacaccgacaaatttagggaattcagcgctgtaaatagctagagaatattttacagggtaccagttgtcaaccagcccaaaccagcgcagaccatgggcttacatccatcacacagccctcagcatggactaataataatgaattgtaccacaggtcactactactcggaatcggagaggaagtcgaggcggtagagaacaacaggtcactacttactactagtacaaggcgcagcaggtccatgtttgcacgacaaaggaaaatggtactaccagaacaacacgatgacagacatgacaacacgagactgccgacatgctcggctatgaacaacgcattacccgatttttttgggcttctcatcaggtcgagcctggtcctcttggtggcgcgccttcgttcgggcccatctgcggcccaaacatctgcatcatggctctcagagtctcggcagtgtgctcctcttctgacagatgcacataaacgcccgcatccgtctgggcgcctggtccaccgtgttctccaggagggaatactgtgaaaggaccaccactgctcgcctggccaccaaaccatgattgcgactcttggccttggcgtgcgtgtgaattctgtcctggtggagctcgctgttcagccagcttctttctggtagcctcaatattctgccaaacattttcattactaggctcgagctcagaggctttcaggtaacccttatataaagcatcatgaaaattccccatggcaaaataagcagatccaagtcggctatatgctttgctgtattttggatcaatttcaatcgacttcatgcagtccataacagcttcattgcacatattaagaagggtatatgcagcagccctgttacaata

SEQ ID NO: 1520 - DNA, 967 bp, Avena sativa
acggatcgcctaatagagaaagtggagtaaaacattcaatcagtacatcccagtgctccctcgtctctagggtgtcatgtagtgttacgaatctcagagaaggaggcaggcgcaaagcattgccaatgcgacaaggaccggggcacgagtctgcatcctgcatgtggacgaaggcgctggagctgtactgccattgatcaacctggcagcaggtaggggtggctccgacacatcagcctccgtcagaagcggcgccggggccaatgctggtggctgcgctggtttactgatgatctgcagtagatctccgggatgagcaggggccatgaagttcggcgttttcttccccatgttcatgcaactgttcgatttgtatctccgtgctgttgcagggaaatcagtaattagcccattcactcctatgccccgagcatatgcattgatctgtgcagtcgcatctgagaagaagtcgtacggctgagaaataaactcgttcatgagagtataggcgtagaccgagagaccagctttctgcagggactggacaagattcgtggcgtttgtcgtgaactggtggtttgcagggaaaacagagctggtatcaacagagacggcaacggcaaactttttgatgtcgtcaagggaagaagctgcaacatccctcacatcttcattgaccatgtagacaagatcgtactttgtttgctgcttaaacttctccagaactgagctgttggttgactgaatcataactttctgggcagtttgattgtggtaaccagaaatgtcaagcgctttgataaccgcatcaaccacatcaaatccgagctcctctgccataaaagcagcatgctctacgctaatcatgattcctgataaatccttatctttagagaagtccagaaaatctgacaatctcatgaaatttcctgaattcctgtatctcggatttctgtccaacccgaag

SEQ ID NO: 1521 - DNA, 829 bp, Avena sativa
tacacagcacaacaacacgttgtaccactccacaaaacacatcactgggtagaaatatgggtaccagatctcccattcatgtctacagcccataccctttttagtgcccttactgctgatgtgacagcaaactcataccactatcaggtcgtaaaaaacttgggtagcgaaatttcttgacaaaggttagtcgttgtccgtccatacagccgttacagggagaagcgggaggggagaacaaaaacatagcactagaagcaaaatcgtcaccccgaggggctgaaaggtttgcgggaggttctccatggcgatcgatccagcttaaccctccttggttttgttcaccccgtgctgcaaaaacttggagcggtactgctccaccagagatttatccacgcctccttgcaccccgggttctttcctcgccctctttgtagacttccctctcttctgctccaactggccatcgtttgcgtttcttctcttcctccgcgcatctgcctgctcatgcgctgcggaaggtttggtcgccacagctttcggggctgcatctgcttgatttccctctgccaccacggcgcccttatttgactgccgtgctcgttttgcaggcctttgaggctgcggctttttgtctccgttcggggctgcatctgcttgattcccctctgacaacacggcgccgttatttgactgccgcggtcgttttgcaggcctttgagactgcggcctttttgtctccctgtgtacttcccgtcgatttaggatctgcaggagctaacaggtcatctgaaggctctttgccggagtcagatgatttagagggtac

SEQ ID NO: 1522 - DNA, 654 bp, Avena sativa
cctccaccagagaacgctgctgggggcgccctaaattcgtgggggtgaggacgatgaccgtgcggagcttgtggagaatgcttccctcccattccagccgctaatatctgttccccgtgattatctcgcacgcttgctattctggtgcatgttgctgggtcactacatccgaggtctggagtatcggttagagctgacacaccttctcagaatatctagcgatgttgggtctttctccattgacgatgatctttttatttgagaaagtttcgctggtttattgagattcttcaccgaagagaatgaaaatgctctggccgagaggttgcagaggtggctgtttcgctgcattcactgccaagagaaggtgctctaaagcaagagggagttgtggggcaaagttcctgttgtagttgtaaagtcagaaacagatgttggggtgtaaagctagtagtattacatatcggaacaattgattttactttcttcctaatatttattgtgtggtacaaaaatgaacatgttgttcttgcttctaatgttttatagtagcattgtagatagacatcctttgtaatttgtactcaatagtttgtatgtatgttatatgtatttaccagcttaataatgttatattgttagaaatactaaaaa

SEQ ID NO: 1523 - DNA, 790 bp, Avena sativa
gcgtgtggctgacgcagaccacatcctcttctccaaccagcccagcccatcccccacccaaccctccacctcactcgcagcacgaacacctaccacgccctcccacaaagagagaggagaccgtcagatcgagatggcgactgagctgacggcggcgcagctgcgggcgtacgacggcagcgacccgtccaagccgatctacgtcgccatccgcggcaaggtctacgacgtctccgcggggcgcggcttctacgggccgggaggcgactacgcgctcttcgcggggcgcgaggccagccgcgcgctcgccaagatgtccaaggagagcggcgacgtctccggcgacctctcgggcctgaccgagaaggagctcggcgtgctcgccgactgggagaccaagttccaggccaagtaccccgtcgtcgcccgcctcgccgcctgaaagtgaattcgcccaatcgtagccactgtgccggcacccctcttccgtcctcaattagtaactgtatcctcctgtggtcagctctgtctgtgtctcccctgacactcggtttgtatgccggtgtcagggtgtgtgcttgcttactggctgcttagtagttgttgtccaataatctgagggcgtgtttggcaataattggtgaatgggaattctacgatcagcttgtaagattattgaagcgaattggtctttataagtgtcaattgttcctgctccaatttgtttttcttatagttggtttatgtactgtaactgaaattgagcaatatgctgaatgcccaggactcc

SEQ ID NO: 1524 - DNA, 700 bp, Avena sativa
  modified_base (174)..(174): a, c, t, g, unknown or other
gcaggctgaaaatgatggtcatttggagtcccctagttccatcaatgtggcaagtatgacacgttgaggatgttgagggcaatagtgcagatatctcaaaaactaagaagatccaggataacatggaaacagacaattcgattaccgatggaagctcgatcctggaatccagtntaaaagaaccacttgtccaaaaagtagtggagagtctgtgcaatcaaatgtatcacctcaaccaaaaatcttcaaagaaatctgctgtaagggcaaaggttcctttcgagaagggctatagtccaatggactggcttaagctaactcgtacacatcctgatctaccagggcttaaggggcagacaaaccggaggttaataactttagaagaagttaagcagcataaaactggagattgtatttggacagttctgaaaggtcgtgtgtacaatattggtccctacatgaaatttcatcctggaggagttgatatgctcatgaagggcgctggaaaggactgcactgctttgttcaataaataccatgcctgggtaaatgcagagttcctcttggagaagtgcctcgttggataccttgatcccaatgagtagattgtgatccatctagttcttagttacagtttgatcgtgtggagaagatctgaagaatgtaaacagtgtttgctgagttatagttgagatagatt

SEQ ID NO: 1525 - DNA, 824 bp, Avena sativa
aacggatagttaccctaatttcaattttattggccgtcttcttgggccaaggggcaactcgttgaagaggattgaagcctctacgggttgtcgtgtttttatcagagggaagggctcaattaaagatcctgggaaggaggaacagctgaagggaagacctggttacgaacacttggatgaccccctgcatatcttgattgaagctgagttacctgccaatgttgttgattcaagacttgcaaaagcgcaagagatcctagaagagttgttgaaaccagtggatgaatcgcaagactactacaagagacagcaactccgcgagcttgccatgttgaattcacccctccgagaggaaagtccgcggctaagtccacacccaagttctcatccaagcccgcgtccaggaggtgcttctcccttcagtaacggtgggatgaagcgaaccaaacaatgactgcagaggcctgatcctcccaacttgaccctccagaaactcctctcaatcgatgccctcacaacttaatttttcatgagcaagctttcatgatggtgttggcatcgtgcgatacctgttactactagaattttgatctcccgtgtgacattagcttatgatgactgactgagaatgatccatgagtagcgacgaatcctcctcctttataattagaacatttgatttatttgttgcttggtaatgctgagatatgggactgtgcagaattctaagtttgcgtgatctagagtaccatgattttatcttacttcgccgacttttgtccaacgttgagagctgttataaccaagattttgaaatatccaaa

SEQ ID NO: 1526 - DNA, 632 bp, Avena sativa
gatctggcagcgtctacttggcaagaactggaacaacttccatgaaagcaaggctggaggcagagagaaaagctgaggagttggaagcacaacttgaccctgaattcccatccttcgtgaaacggatgttacattcgcacgtggtgcgagggttctggctgggtctgcctagccatttctgtgacatgtacctgccaaaacaagattgcactatcaatttggtggatgacaaagatgaagagtttgggaccaattacctagcctacaagaaggggctgagtggtggctgggctggttttgctttggatcatgtgattcaggatggagacgcgacggtttttcagctgatcaagcctacaaccttcaaggtgcatatcatccgagcaactgttgaggatgatgataacgaggaagtggagtgagcacaccgtgcagcatcagtactatgaactaacctttggtagatggcgtgtagggtttaggtatgttttaggctttatgtgccaggaatgcggtaatgcattttgctagtatggccaccagtggcttagatggcaagtagtattttggggcgtggtgtaagctttgtctatcaggattgcccgtgcggttatgcattttgttagtatgtc

SEQ ID NO: 1527 - DNA, 963 bp, Avena sativa
ggcttcctcctcgaggaccacttgggattaatgcccgaccatctgcacgcattattgctaagtcttttagccgaaccaaagacatgacctggagacctgatctgtttagtgacagtatggcggctagtggaatagaaactggtacaaaattgtacatttcaaacttggattatcgtgtttccaatgaggatataaaggagctgttttcagaagttggtcacttgaaacgatttgctgttcactttgatggttatggtcgccaaaatggtacagcagaggtggtgtttacaaggaggagtgatgcagttgctgcattgaaacgttataacaatgttctacttgatggaaaagctatgaagattgaagttattggaagtgacttaggtttgcctatgacacctcgtataaatgttgtcggggcttctaatggcagacctacgagaacagttgttatgacgcctgaaacggttcaacgtggtggaggttccagcaacaggcctttgagtaatcccaccaacagatttaatcgtggtgctatccaaactggccgaggtcgaggcagaggtcgtactttgttccagaccccgttccaggcccagttccagggccggggcagtggccgtggtcaattccgtggccgtggtcagggaaggaagcaggcagagaagagtgcagatgaactggacaaagacctggaatcctatcatgcggaggcgatgaagaccgaatgattgctgcaagttttcgttatggcagtggctttgccatgggtgctgcactttgcatctgctgcaagattttcttatgatcggctgtaccagtttgcgttatggtctttatggtcgcagataaaccatctttctactctggtttctgaaaccaactccgcctctggttgtttatctgcagttggcaaccttagattttagttttgtgtatggttgccctagatattatcgtgtt

SEQ ID NO: 1528 - DNA, 718 bp, Avena sativa
cagggatacgccaagaggttgagccggatgtgcgctgagttcaagatgagtttaaggcatcaagttgccgctggagctcctcaagatcatcatcgatagcaccagagctagctggtgcaggtggctctacatacgaatcttcatgtggaagttcacggacaaggccttccggaaggctgtctgctgcagtctttagaatgattgacggcgctgtgtcgttatcatcaacaacactaatgttccactcgttgtctatgtgaaccgggtattcgattgctgcagatgcttcagcttccatcttagcctttgcttctgcatctctagcaggttttgatagcatatattctttctgtctctcaagacatgctggatttgaacattgtggatttggtctcatttccattgttgggaaataatccttaagtgaattatatcccaagtaaggagaaacttgtccaaacttcaacagatatttcagagaattctggaccaggaggccagcaacaacacccattgtagttggcaatgaggcagcacaaacaccgtctcgcttaagtgtacgctcgtccacccctgatgctacaaccaatggaggagcacatgcaaagcatgcagtttcaccaggaatcagtagctgtatatgaccagaaacagcatcttcagaaacaccagattccatccatgtctggtgaagctcattgcaagcctggttcacaac

SEQ ID NO: 1529 - DNA, 952 bp, Avena sativa
accaagtcatgttgtgtccaaaaagtctaaaatggaaattccctagtagatcaacattgaaacgatgaaatttgctgctaagttcaggaacaagtactcggtcaaagaaaatgaaaataactaagtaaatcactattcaccatggccaactttccactgatcgtcgtcaagaatcttccacaagttccatcatctcaacgggctgctatgatcaaaccaggtcccatgcagaattgctcaaaaagtgagcatatgccatcagaacaggtcaagaatcttccacaactttcttcacaagctttgtatagataatgcggccatcccttgcagaattgctttcagcaagagcaatttgaaccatgtccttcacatccctattggataaaaacttccccaagttgtgaaggatacaccttaaatcatccacctttatataaccaactctgttttggtcaaagtacctaaaagcctgcaacaggtccttgtcaaccacctcatgttttgctgaatctcctttttgtgatacagatgcctttccctccttaccaaccgacttttctccatctttcaaatctcctttccctgctaccgactgcttgtcctctcctgacgcagttttttcatcgacgccttccaatttaatattctccgttgccttgtttccatcattttttgccgttacttcttctggctttggttcttgttcatttgagttgtccttattctgtgcttctaccagctcttcggcagtatcatcatccatgtcctcatcgccttcatacatttctacttcttcagggtcttcttcatattcaggatcctcgtcctccattttctcatcagcttcaggttcctcaggggcagctgctgaatggtcagtcccaatcttttcctcgccctgttttatcagttcgtcatgggcagcctctgggtgatctgtactcatcttgtc

SEQ ID NO: 1530 - DNA, 798 bp, Avena sativa
aaaaggttgatccattacagatgagatgttcacctttgggtactcacatgaacctccttattgtacataccgggtcatcaccaaggagggagttatgcttgatcctgtgccaataacaataccagaatctgtaatgatgcatgactttgccatcacagagaattattccatattcatggacctgcctttgttgtttcgaccaaaggaaatggtgaagaatggtgaatttatctacaagtttgatcctacaaagaaagctcgtttcggtatactccaacggtatgagaaggacgaaaaaagtatcagatggtttgaactccccaattgcttcatattccacaatgctaatgcttgggaagaaggcgacgaagttgttctcatcacctgccgcctcgagaacccagatttggacaaggtgaacggtcaccagaacgagaagctcgagaacttcgggaacgagctgtacgagatgagattcaacatgaaaacgggtgctgcctcgcagaagcaactctctgtttccgccgtagactttcctcgaattaacgagagctataccggcaggaagcagcggtatgtgtactgcacgatcctcgacagcatagcgaaggtgacgggcatcataaagttcgacctgcacgcggagccagagagcgacaagaagcagctcgaagccggggcaacgtgtgcggcatatatgacctgggcctggcaggtacggttcggaggctgtttcgtgcccaaggagccgggtgtgaccggagaagaggatgatggctacctcatcttcttcgtgca

SEQ ID NO: 1531 - DNA, 483 bp, Avena sativa
ggacggtcatcctgcacgatggggaagccactgtcggggcaggcggggctatcgtggcactgtcggatcccgaggcggagtacgccgagatgatgctcaaagcgagaactcccacaaaggttgttgaagaatgtagccagcaaacagctcactgcaatccggattcggtgcggacgactataagttagaagaaaggaggacgacatgagcctgtttctcactgaagctccggcagcatcactgagtttcagcatacagtgactatagcagggttttgtctctgctgctagtggcctttggcggaagaatggctggatggaagtcaagatgatgcagaaagtgaggacttgctgttggcactggcatctggtatactgcgtagcactacattaactagaatttagaagaaaaaaaagaatcatccatatcagcagaattgctcacaagttagaaacaaaaggaaaggattcatccatattggct

SEQ ID NO: 1532 - DNA, 673 bp, Avena sativa
ttggaactttctgtttgtttattaaacacacatgtattaatgtttccgtattaatacaattatagcatgcaaaataaacatttatcataaacaaggaatacgataataaccactttattattgcctctcgggcatattcccttcattcccccacgagcatgcagtgcatctccgatgggttagagcggagcagtgccgccaacgcctgcttgtccttcctgcgaggtacggtctcgtcctcgatcgcttcccagagcgacgccgcctggaggttcacctccatcaccatcgcccagttggtgtagttggagcgtgtcaacatcgggaaggagaggttggtgctgctgccgcctccggtctcgcgcaccacttgttgcacgacaatctcaccaccattgcatcgcaccctgctgcgcccacggcttggcgatcgtcgccgctgctcgggcgaaggtgtcacggattggcgtggtggtggtgtgtcgttgttgcctcttaaccattgccttgtaacatggctactaacttggctctgataccaattgttagcccctagccctactccagctacacacgcttaatcacttgggcacaacccaaactcaaaagagattggacaagagcacacgcacacactctagagaggatgaagaactctctcacgagggacaca

SEQ ID NO: 1533 - DNA, 672 bp, Avena sativa
ttttagagcagcaggtatttttttttccaacgaactacaggagtacatgatacacacctgaaatctagaaaacattaaatcccgaacatgtgcaccgagaaggctcagacaaatacaagctgttacaattagttgctaatactaatggaaaatctagaatgtcagacatacaccacataacaacacatataaagacccctaaagctggtactaatctcaaagcaactgaatgcgcacccattgggcattccatcccatgtgggtctttacagtaagtcaaatttcttggttcttcatgcatatgagccatgttggaatccaataatcatgctctggctctcttgctactgctgctgcaattcgggcatttgtagtgcttgatgtgctcagctttggcaggtgtaatcttcacacacttaccatggaaccatgtctcacaagcatcacagcagatccagaattcatcctgtccatagttgtcattgcacgcaccacataatgcgttttcgtgttcttctccctcttcttcctcacctccactgtcgtcctcatcctttggaggtggcatcttcggaaccctcgagttgggctctagcaggcgtgatggctttgggccagatttgttgatcttgctgctgcttttcggggtttttctttgacctgcttctttgc

SEQ ID NO: 1534 - DNA, 666 bp, Avena sativa
atcggaagcacaggaagaggaaggaccgcaagaggcacaggaagcatggtcactctgactccgatggtgccaggagacgcaagcacaggtcaaagaggaggaggagctcagactccagtgacgagagtgacagtgatgaatacgagagtgaatctgaggaagagcgtcacaggaagaagcactcgcacaagagaaagcatcgccgtcactcttcaaggtcagactccgatgcttcagactacagcagcgatgaagaagagcggagatcaagcaagaaggaccgccattctaggagccgcaggcgccgccacaggtcttcagatgatgactctgaggagaagaccaggtcgaggcacaggaagaggcataggtcaagtgatgaggacatgccttcagattctgacaaacataagcgacataggagccactccatgggggcatcttcagatgatggagctgctggtgaaccagacaaggcgaatggcaaagggtctcacaaaagcaaacaccatcgtggtcaccgccatcaccacaatcgcgaggatcatcaccgtagcaactctgttggacgacttgatgacatgaagccagccagcaactctgytggaggattggatgacatgaagcaactcggtgagagctgatgccccaggagtcgtgagagtt

SEQ ID NO: 1535 - DNA, 486 bp, Avena sativa
tgctcaggtcctgtgacatcaacaacatatacatcacggcagaccaggacttgatcatctcatactgtacagtttcaagaggccccacaaacgacgctgccggtgaaggcgaggaaggtaatagcaattccacctgtgcattggttttacatgctacctgccgtacccgtgtccataacttgacctgaacctcctcctcagctgccccggcgggatcgatcaacatgagcaacatcttcacggggaagtgcgtggccaagatctccgccctggaccccaccctcacggttgctcctcggaggagaggcgacagcagcaggtccgtcgtccggagcaccgtcgcggacgccctggaggacgtcaccgcgctcttctacgacgaggaccgcaacgagatctacacggggaacaccaagggcctggtccacgtgtggtctaattgatcgattagcctcccacacccccaaaaatccttgtacatacggt

SEQ ID NO: 1536 - DNA, 482 bp, Avena sativa
gcgctctaatggcgctacaagaagggcttctccgcctccgctaccaccgccaccgcggtcgccaccgccgtcgccgtctcctcccccgtctgcccgccctgcgcctgcgactgcccgccgccccctctccctccagtccatcgccccccgggctcatgaacttctcgatttcagcttgtggcacaaatgaccctgagcgtatcaaggaggcggagaagcagtttgttgatctccttaatgaggaactcaagctgcagcaggttgtagctgaggagcacatccatcacatgaacactacccttgtcgaggcaaagaggcaggccacccagtaccagcgagaggcagagaagtgtaacgcggctacagagacttgtgaggaagctagggagaagtccgagggggcaagtctcaaaagagaagaaactgaaccacactgtgggaacggcgagctcgtgaattgggctggcaggatcctcgagccg

SEQ ID NO: 1537 - DNA, 476 bp, Avena sativa
ttttttttgacaggatggcgaagacgtagtattatgtttattgtatccccatcacttgtttcacaagcgaaaatcaaatttgaacatgaaatgaataaaaatacaaataagataaaaattgcaagttgcttctttcgacagattaaaaccccacacctgtctatcctggaaaatcatcgctccggatgcaggttattcttcttcttcttctatatcttctatcaaacaaagcaatcaagaaggcaatgtacatagcaagcgagcaggcaggtgttgatcacagcgcgaggccttccttccgaaataagaccctgtttgatctgtgcactgcggcgctcttcagaggcacgtcaaacgttttcgcgggtttcttggcgtcgttctgtgcaatgccattaggcttggagtcgattgccttcacttccttggtgctctccagaaatagcttcgtaggtccctttctacttggtctttct

SEQ ID NO: 1538 - DNA, 674 bp, Avena sativa
gcggcatggcgacggtgccgccccagagcgtgttgtcgtagatgatggtgcccccgacgcgcaccaggcggagcagctgctcgtggtacttgacgtagttgggcttgtcggcgtcgacgaaggcgaagtcgtagggctcggcgccggcgtcctgctcggcgaggagctcctcgaggcggtccaggccgaggccctcgcggaagtccaccttgtgcgccacgccggccttctcgatgaaggggcggccgatctcgtagcactcgcggtccgggtcgatggccaccaccttgccgtcggcggggagggccagcgcggtggcgaggagcgagtagcccgtgaagactcccacctcgatggtcctcttggcgcccgccatcttcagcagcatccccagcagctgcgcctcgtccgccgacgactgcatgtagccccaggggtgcttgtcggtgacgaggcggaggtcgcgcatgcactcgggctcgcgggggaagacggtggtgtcgaggatgtaggtgtacagggcgtcgctcttgagcagcgtcttgttgctgctgtcgatggagctgtggacgttgggcacggtgttgccgctgggcgccatggctatcctccgcgagctgcttgctctgctctcctcgctgctagctctctttcttgggttggttatcccggga

SEQ ID NO: 1539 - DNA, 623 bp, Avena sativa
gccgcagttcgtgccgctcgaatctggggcgcacaaggtggctaaggaggggttcgtgctgctccacgttcgcccccgccgtggcggctcggcagtatgattggactcgcaagcaggtgttctcattatctgtgtgggagatgggaaccttgcttactcttggtccaacagattcgtgcgagttctttcatgaccctttcaaggggaggagcgacgaaggtaaagtgcggaaggttctaaaggttgagccaacaccggatggcaatggtcgctttttcaacctcagtgttcaaaaccgccttttgaacgttgatgagagcatttacatccctataaccagaggagaatatgcggtcattgtatcgactttcaattacatcataccgcacatcatgggatggagcacgtttacaaattctataaagcccgaggattcacagcaatacagcaggcctcagtcgtcgcctgaacttgagtggcggaggtgacaaacgacaatgcctttgacaaaaatggcaacaaggctgaaaccttccgtggagctcctttgagaaaagaaattcttggtggcattgtttgcaagtttttggttgttgggctgctgggtaaccgttgtgtagtta

SEQ ID NO: 1540 - DNA, 759 bp, Avena sativa
tttacagtacaagagcatcaattaatcagataaggtttcagaacaccacaagaggaaacgggacatttcctgaattgcttccgaccaatccctcaagcaaagttcgtagtacatccagatcataacaacagtggtggcaaatcgccaccccatctcatctcgcaacagctaaagcaaattctaacataagattttcgtgcttgattctgaaactacatcctagtagctgtatcatatgctcgatctcaagaagaagggtgcgacgtacgtagcaaaaattccatggcggattagattcgattcgagcggcgaggtgatcgaaggaaggcaatgttgttcttgaaggcgaatgcgagaatgatgatcagtagaggctgactccgaaggactcgctgacgatgatggcgatccccatggagatggcgacgagggaggcggcccaggtgagcttctccgtgatccgcggcaccctctccctgagcgcctccgtgcaggtcccgatgagcacggtgtagctcgccatggacatcacggtgccgacgaggaacatgccgaggaacgccgcccccgcggcgcgcgacggcatcgccagcgccggcaggatgatcatgagcgcgtccggctgcagcccgtgcacgattcccgtggcgaaggttgcgaagttgatctcctttttcttgccgccgccgctcatcagcgccttctccarcgagttgccgccgtgctggtgtgcaccgcctgcggctccgccttccagcg

SEQ ID NO: 1541 - DNA, 671 bp, Avena sativa
  modified_base (71)..(71): a, c, t, g, unknown or other
atgttgtcatagtgaattatggacaactgcagtataagttgaaggttcttgagttgaagcctgcatcaagngtttctgtgctggagacagatgttgaagttgatattgaggggaccagattcagtttcggacaatgaagagaaccaacacgtgcttgtgccacttcagactgggaaggttgactctggagttgtggaagaaggaaagtttaggtactacaagttttcagttgaagaaggtacaagtgagaaagtagcttctggccttgcaaacattgaggttaagatagatgctgatacaagcagcggtgacactgatatttacgtatcaaggcatcctttagtattccctactcagcaccgtcatgagtggtcttcccatgaaatgggatccaaggttcttatactcaaaccaaagggtgctactttagttggtggcatttacagtattggagtttatggcttcaagggcacaacgaagttccaactatctgtagctatcaatgatgttactaatagccaaaggattggtgagcaggctagtgtgtcatctaacgtcagtagtgagtcagtggtctgtaacaactgcaaacgccatatatctggccgaacctcactacttcatgaggcatattgcctgaggcacaatgttgtttgcgtgcaatgatgggt

SEQ ID NO: 1542 - DNA, 739 bp, Avena sativa
ggaggaggtttatcctacggtgttgctttttccggcagaaaacaaaagcgcaatatcatttgaaggaggaatttccgtgggcaatttaattgaatttttggagtctcatgcgagcaattctcgccatatattcgaatataaaggatatctgcggaagaagaggatggtaatgcaatatgatgcaccgcaaacaatccagtttcacataaatgataagagcagcagcagcagcagcagcagcgttgattcccatctgccaagccatccagaaaagcgtgaggtgcatatcgtcacagggtccatcctcagtgccaccgaaaagctcggcggcacagtcccattcgataaagcccgagtgctcatcgtatcggctgattctcacgagggcttttatggactaatcatcaacaaaaggttaagctgggatgccttcaagaatctggacagctccatggagcatatcaagcttgcccctgtcttctacggtggacccgttgtggtgcagggttaccaccttgtgagtctgtccagagtcgccttggaggggtacacacaagtcatacccaatctctattatggaaacataattgccacgagctgggtaatcacggggatcaaagcaggcggacggtctgcagaggacctgtggtttttcgtcggctacgctggttggggrtacagccagctgtttgacgaactatctgaaggagcatggcatgtaagtgaggagccgatggag

SEQ ID NO: 1543 - DNA, 681 bp, Avena sativa
gatggatgatattttatatattaacatgctatgttcgtacaatattgtgaagttaattttatttgttctctgatgaattgaacaggagagcaaggattaagataatggatttgtgataggcgaagaactcccaacaatccaaggcagaaaaagcccgacaccatcagtctttcgtagtttctccgctctgcagactgaccaacaatggcagctccctaatctgattgaatctgccggtgatgcacatctttgtccacttacatcatccatattggatagcagtgtgatcggaacatgagttgtaacctgccatctctccggaagactgtaaagaggattgacagtgacaaggatggaaaattgggctttctaagttcgttagtaaagttccatggttttgggaatgtactaagaaccattatgagcttaaagaatgacagtgtaaatgataaggctgatcgggttcctctgtatcaccaagaatgaggccatgttttgcaatgaacatttgggctttgttacattttataaaagcttttcaatgtgtgattcaccatatatctcatccatcttttagtaacccacgaccaaattgatgcaagagaattttgaaacataaggtgccctatttagatcacatgttttagttaaatacgaataggaaaacgtgatgtgatgtca

SEQ ID NO: 1544 - DNA, 838 bp, Avena sativa
  modified_base (819)..(819): a, c, t, g, unknown or other
ctggccgccgtgctgagatgcgcagaatccgtgatgacaaccaacatttggtggatgaaattgttggtctccggcaagcaatgtctcgtttgaaagaagatctccagtcctcgagtcaggctatacctaagctccgtgcggagaaagaacttgaatcgagggagctgactcagaggaatctgaagctggaagctgagctacgctctttagaaccccttaggcaagaggccctgcagctacggtctgaagcaggtacactgcagtctttgaggcaagagttgactgcaaaggtgcaaggtctaacaaaggagcttgaacatcagaactctgaaagccagcgcatacctgccatgatagccgaacgtgatagtctgcgggaggaactaaaccgtgctaggacggctcttgactatgggaagaacgcaaatccagacctgatggcccaggtgcaggcagtggagaaggatcttgtaactatggctcaggagtctgagaagcttagggctgagcttgagaagagaagggcacctagtttcagcagccatggagcttatggacaacctatggcgactcgtgggatgggcttgcaaggcatatacgacggtggctatacctacacggagaaccgctacggtgctggaccatgggaccccctggttatccgcacccatgatttgggcttcgaatccttgccccctagacagtgtccatcgctcagtgcttaaaatgtgacaaagttcctatcttggcactaaaccttgtcgtgtttgttatttgaaggcacattttttagtgttttttagctttcctggcaacttntagcagctctgcttgtatt

SEQ ID NO: 1545 - DNA, 619 bp, Avena sativa
ggccgtcgtcatcggcggcaccttcgaccggctgcaccgcggccaccacctcttcctcaaggcggcggcggagctggcgagggggaggatcgtggtgggcgtctgcgacggcccgatgctcgccaagaaacagtatgccaacctcatacaacctatcgagatgcgtatggaaaatgtcaagggttatatcaagtccatcaagcctgatctcgaggttaatgttgagccaatcgtcgacccttttggcccatccattgttgatgaagctttggaggcaatcattgtcagcaaggagacgttgccaggagggcatgctgtcaacaggaagagggcagagagaggcctaacgcagctggagattgaagtggtggaactggtgccagagaaatctacaggcaacaagataagctctacagcattcaggaagatggaggccgacaaggaactggaggagaaaaaactgaatcagcaggaacaccaaatagttcagctggagtgcaagacgtagccaatcctctcatgtgcatctcaaccaaaatctgcagaatgtgtctcggtacattttatacactacatacaagcataaagtatagcagaagaactctgcttcatctcctgt

SEQ ID NO: 1546 - DNA, 585 bp, Avena sativa
tgatcttggttggattattcattcctcagtggagctgaagttgatcaagctgatagttccctttttcctatttttggttcaagattggttataactgttgatgccatcaatgatgccaggcgcaaaaggagatcaagggagggcagtgtcgtatatcaacgctttcccgacttcaaacattcccagttacctcactaggtgggctattcgtcaagctggcactgaccaactcgggaaaccaattgctatcacacctcaagcttttctgaagtggcttgtagatcttgaagataaggggctcaaagtgtttggagagaactgttcaaggattagggagaggctgatgcatgatgagggcaagaatgatcaccagagcaggatgagtcattcagatgccgacctattcttcattgataagcagagtcaccgggacggtatggacacaaaaggtggtgaggatggagaagccgtggagatggagacagcagataatgctttcatggctgctgcccattctatgaaggcgatggcgaatggcataaggaaaaggaaggattgtggaactgaagactcatcagtgatgaa

SEQ ID NO: 1547 - DNA, 554 bp, Avena sativa
tttaagtagcatactaacttttaacttagttgtttatacatcatgcctaagttgtttacttgagaataattaagtttctttttgtgctggatttttttattatggttcaacatgcttttttacacccttgttctaatggtatcagcagggagctttttgttagagatggtcttttggttgggatgtcaagggcagaagaatttgtatcataaaagtcactaaggaatttcccaggacaatgagaaatctgcacatgacaaagtcgcatgcttcatctgcctgaagcaatcagcaacaacttttttggaagatagacagggtgggatgcttcacagcaataactagtcaacaagttgtaccccgattcattttttgtgtcatggatattttgaagaatgcaaaggccagttattgaatggtagttttctaaatttctggttggttttaggtattagacaatatttgtagctagttttgctgaagagacaaatgtgtgcatggacactcttttgtgatggtgggcaatacatggttgctttccggggtgcaaaaaa

SEQ ID NO: 1548 - DNA, 359 bp, Avena sativa
ggatcactagaaaagataggtgtcgacacacgagtccagactgcactgatgatgcaagaggttgcagaaccatacataaggaggcgagccatgcgccatcttgaaaaagcaagggttgttatctttggtggaattggtgctggcataggaaacccacttttttacaacagatacagctgctgcactgagagcttctgaaatcaatgcagatgttgtccttaaaggtgtcgctggagatgatgaatacggttgtcctcccaggaacaaccttaacacaccatttgagcacatctcatttagggagttagcagcaaggggaaccagcaaaatggatatgacagcaatcacatgctgtgagg

SEQ ID NO: 1549 - DNA, 935 bp, Avena sativa
tttacaactactgggaccaaaagtgaaaaggcaggggggtaggcaaccccaggtacacccgactactgcaaacaacaagtttatgaatgacaaaaattgagattaactgtattatgccaaaaatgttgtagtctaacaagtgctcaggtggcactctgacaaaaagaaccaaccaggcaacaattcaagataggcttcgacaaaagaatcgatgctgccagggaacaaaccgtggcaaagcctcatattaactgggataaaaggtttgacctttcacccaatgcaagatgacagcaaaaaggtacaagctggaactgagaaaatcaccagggattgaagagatctcagctcccaaccgataatttacccttcaaacgaatgcatcgagaagttgatccctgccctcgaaaaaccttctcatttagatatcctggtgtgcactttggttaattggacactggctccagttctaaaatttgttctattccagctgtaaccaggcttcgacttgttggcgcatttacctcatgctaaggttgctcaggtcatccacaatatgcacagtcccattcaagctgcctgcatctccctctttgatttttgcttccgggttaagcacattgccattttctgttgaactctcgaaactactgtcagcaatatatgacgtagcactccttgcaccttcaaagtaggttgagcatggaaagtattcagcacagcgtatcttccacctatttgcaacatcctgttcagcaaaaacagtatccagcaatttatgaacattaatacaatcttgaatgccccattccttaatgggaccaagcacaccgtttcctgacgctgtgctatttgttgagtcttcgattaatttaatagcctgcagcttcttatctggctccaagaggtacatcatttcagctgctgctgctctg

SEQ ID NO: 1550 - DNA, 1000 bp, Avena sativa
tgtgtcagaagtgccttggcagaccctacattacagccatactgaagaacctctacacatacatgtcgatatcagggcctcacttaggttactggtacagttcaaatctttgttcaattctggtctctggcttctgaaaaagctcaagggaacgcaatgcatccatcagctaacttcagtgacgatcaagaccccagaatacgtttttctataggctttgcaagtcaaagacattggagaacttcaaaaacatcatattgttatcatcaccacaggatgggtatgtaccatatcattcggcaagaatcgagctctgtccagctgcatcaaccgataattcaaggaaaggccaagtcttcacggaaatgctgaataattgcttggatcagatccgtgcaccatcttctgaaaccagggtattcatgaggtgcgatgttaattttgaccaatctgcccaagggcggaacctcaataccatgattggcagagcagcccacatagaattcctggagactgacatctacgccaagttcatcatgtggtcctttcctgaactcttccgatgacaatgatgctcttatttgggggacggcatcgcacattccaaaccaaaactggatactgcaattactgaccaccaggaaaagaaaggttgctcttgctcttacacaaaggtttatctgcatttcgtcgccaagatgagtagcactgtaaagttccctagctgtagcattttgccagctttgttaggtttgatttgtataaatagtcgatttgttcattccgatttatagccatgtagatgttcgcctgtgctgccaaagtcttcataatccaaattccatctggtgtattttagcgctgccagtttaggagggctcaacagccaaatgagcttatgtcaaaataagcgtgatatgtgttcgttttcttaatcatagtgcatctgtgaactcaggcacagatcagtatctgcttcttgtcatgtaatgtcattgtt

SEQ ID NO: 1551 - DNA, 543 bp, Avena sativa
ttctttctaaaaaaggcaaaattccatatcattgaacgcattcatcatcatattctcatatacacagacaatgatatgacccgtccagtggcggagttccacataataatacaactcctgtaaacaacaaataagactctgacagctcttggcccgaacaaaaccagtccaagacctataattgttcttttttttccgccagcacaagctgaaatggaacagcagcacaggtaacaaaaaagagcactgctccaacaacaccttgaaatacaccgacgcgacggcacgccgtctcagtttgtaccaagaggaacccttacaaaacagtccagaatgaatgcaggacaatgcaagtgtgaaacaaaaaaaaaaggaattaaacaaactaccagctcaggaggaacatgtccaacataatgaacttggagcccctgaggagtacaaaataatcctgtgacaatgcatgcaagccccattttgcataatggatccagacgcaatggggccttatagagactgacaatacgaccaaagttcgatgca

SEQ ID NO: 1552 - DNA, 670 bp, Avena sativa
cactagtatcgcgcatcagaaatgtcaatggcaagccattcagtttctcatttgcctatcacacatacctctctgtttctgacatcagcgaggtgaggatagaaggtttggagacccttgattatctcgacaaccttagccagcgagaacgtcatacagaacaaggggacgccataacatttgaatcagaggttgaccgagtgtatgttagctcaccaaacgtaatagcagttctcgaccatgagaagaagcgcacatttgtcataagaaaggatggacttcctgacaccgtggtgtggaatccatgggagaagaagtcgaagatgatcgccgactttggcgacgaggagtacaagcagacgctgtgcgtcgacgctgctgcggcggagagatcgatcactctgaaaccaggggaggagtggacagggaagctcgaggtttccgcggtgccgtcgacgaactgcagcgatcatcttgatcagccgggcatcatgtaatgtaatctagcgtgtagtgtggtgataggttaacagtgctatatatatagcaatctgtcagggaaaaaacaaaggggtgcctctctcatttgacattttgtacatgagataagtaggcttcctacttgtgtgatgtgccatgaatttgaaccatcagtttatgcttggccgct

SEQ ID NO: 1553 - DNA, 915 bp, Avena sativa
tccggccatctcttactcaggctgctccaatcggccagctaggtgcccaaacccacaattaatagtggagtaggcagcatggcgggggcgagagtggccaatggcaagggcctgatggcactggtggttgcggtgcttgttatgtgcggcggccggatgtcatcggcgtcgaacctggtgccggcggtgtacgttttcggcgactcgacggtggacgtcgggatgaacgggccgctgccgctaccctacggcaccgacttgccgcaagagtacctgccgaccgggagggtcagcaatggttacaacgtcgccgactacatctcgaagctgttgggtttcaagatgagcccaccggcctacatgtcgttaacgccagaaacgaggcatgagatcctcagaggctttggtggggtcaactacgcttccactggctgcggcattctcaacacaacccggttgggggagtgcttttcaatggacgagcaagtggagttcttcgcggccaccaagtcaaagatgactgatgagtacaacggcggcgggggctccatcgccatcagcacactgctctccaagtccctcttcctcatcagtgccggggggaacgaccttttcaattacccccttaacccgaccctgtttccgatcttgtacgcccgcctcctggaaagttacacgaagcatgtacaaaccctatatgacctcggcgcccgccgcttcgggatcatcgatgtgccacccatcggttgcctgccggtgatacgcgccctgttcccaaccggcaggtgcgtgcgcgtcgccaacgggctcgccttggggttcaacaacttgctgggcgagaggatggcgcagctcgccgccgaccccaaacggcccgggatgacgtactccatggggagctcctacaacctggtg

SEQ ID NO: 1554 - DNA, 872 bp, Avena sativa
tttctggtttaacgcaatgaagaaccatgaaatccttgctgaggagatccaagagagggatgaggaggctctcaagtacctgaaggacatcaaatggtacaggattagtgatccaaagggtttcaagcttgaatttcacttcaatactaatccattcttcaagaatgaagtgcttacaaaaacatatcacatgatcgatgaagatgagccaatcctagagaaagccattggtactgaaattgaatggtatcctgggaagtgcttgacacaaaaggtgcttaaaaagaagccaaagaaggggtcaaagaatgcaaaacctatcaccaaaattgaaaattgcgagagcttctttaatttcttcagtccaccacaagttcctgatgatgatgaggaaattgacgaggatacagctgagcagttgcaaaaccaaatggagcaagattatgatatcggatctaccatcagggacaagattatcccacacgctgtttcgtggttcactggagaggctgttcaggatgaggaatttgatggcatgatggatgatgatgaagacgaggatgaagatggcgacgaggatgaagatgaggacgaggatgacgaggaagacgaagacgacgatgacgatgatgctgctcctaagaagaagggcggtcgtgttcctgcaggggaagggcagggggagcggcctgcggagtgcaagcaacagtgaggtgcatcatacatgaccatttccgaagacctgttgttctctgttgaagaatgtttggttctacttgatgcgctatgtcgttgagttggttctgtggagccagtgggggattgagttggtttgtggaaccggtggggatttctttcttggtgacatggtc

SEQ ID NO: 1555 - DNA, 674 bp, Avena sativa
gaaaatctctgtgttgaattcactcaagtcggttaatcttgacaatcgcctgataactgatgttggcttagcagcacttacgggtcttactgggttgactcatcttgaccttttcggagctcggataacggactatgggacaaactgcctcagatactttaagaatcttgagtcccttgaagtatgcggtgggtcaatcacagatgctggagtgaataatatcaaggacctcaaagctctgacgctcctcaatctttctcaaaatgctaacctgacagacaaaactctggagctgatttctggcttgactgctttaatctccttgaatgtttccaactctcgggtatccaacgccggtctccgtcacctgaaggcgctgcagaaccttcgttcgttgacgctggattcctgcagggtaacagcaaatgagatgaagaagctgaaggtgacggcgcttcccaatctgataagcattcggccggagtagcttggcacccaagacataagtagttatgtactgaagcgctagcttgcaaggacctggagtgaatataatttatattttacatagcttgttggctactatttctcattctgttccgagcaacctccaaggcacaagaaggaacaagatgtaatatcatgcttcctcgccatgtgaggttattatgtct

SEQ ID NO: 1556 - DNA, 829 bp, Avena sativa
aataagcgtccgcatcttcccccgctgatgatccacggtggttctatcagcgccccggtgactcctccactgagttcaccaactgcgcgcacccctcgtatgaagacagactgggatgaatcggttatccagcctccgtggcacggttcaaacagcccttgtgttgtcaactccaccccaccgagccctggacggcaaatggttcctgacccagcatggcttgctggtatccagatctcttcaacaagcccttcatcacctacattcagtctcatgtcctctaatccattcagcgtcttcaaagaagcaatcccggctggcaattcgtcgcggatgtgcacgccgggccagagcggcacgtgctcccctgtaatccccggcatgatggcgatggcgcggcacccggacgttcacatgatggatgtggtttctgacgagttcgcgtttggaagcagcaccaacggcggggctcagcaggcccctggtttggtgcgggcgtgggaaggggagaggatccatgaggactctggttccgacgacctggagctcactctgggaagctccaggaagaggagctgctgatgctaacagacacctaactcaggcgggcgggattcttgttgtagttcatttttcttcttcgtgttgattagtttctgaaagagagaccaaaccgtgtggttccttcagatagcttcacctgcttgtgatgatgataatcgtgttatttatttgtgcggattttacaagagctagacagggagaagggctcttgttcggccgaaattcagctgatatatatgtagcctccctccacagctgatggcta

SEQ ID NO: 1557 - DNA, 918 bp, Avena sativa
gccacgcacgcactaaacattatccctccttgtgctttactcctcaccagcatcacacacacacacaccaactcacagagaaaaacctgtcggtaaacagttaagagtcgtctcaaattaacccggacacatcatacatttcacggagggctcaaccttgagagaaagcaatctaaactactagtagaaaataccaaaatgaaaaaagaaggccatccaacaatcacaagtgacaacgcctgatgttcctttgatcatatcagggaacatggacgtccttcagcgaggcaggatccaccttcggaggttctgaatggcgcctcgctctttcatttggcttatcagcggtagcagcatttggtttgtccgccactgggaaggataagcgcttctttatcgacgatgaatggaccagagatgctctctcaggaaccctcaaaacttgttggcgaataccatgtggtaccgggactttgcccttgcagactttgtggactgcatgtagctggggagagccggtgtgcttgttaggcttgcatcatcctggaccgaggctccacccgtgctctgcctccttgggcgctccgagcgtatgcttgtgatgctcctcatgtcatcatccctgtagagccagctatcccttggacttgatggtctgaactttcctgcagaccaggggtcctttgatggaggtgttgatggcgattgccggctcggtggacggctcgacttgcttggtgttgccggtctctggattgagagagcacggggcacaaaagttcgagcagcgttagtgctgggattttttgtcagagcagagtctttaggatccttgtttgacaccacttggttctcgcacgatctcgctgacatccagcgttccatccagctccagccccaattaggatttccttggtc

SEQ ID NO: 1558 - DNA, 921 bp, Avena sativa
ataggcctcgttttgggcaagcagtagtttctcaaattgaccatgggactatacatttgactaatgaagaagatccaagaattacagttttgctggattgccatgggatttctccattcagatttccgatgcaaatgatgaggtcatttgtcaccatagttcaggagaactatccaaatcgtcttggagtattatttgttgtccgtcttcctccagttgtcagagttattgcacagacttttatccagctcctgaaccaatcgacaaagcagaagctgcgtttcgagggagaatcatacaagaagacactagccgagttcttgcaggtcgtgccggctttccttggtggtaaatgcaactgctcacgatgcaagaagccctacagtggttcactgatccaggcaggggaggggagcaggagcaataccagcaccggctctggatcaccagtcgcagggatggactttgatgaggaggtggagcttccatccccttacacctgcgagaacgcgataagggctgcaataatcggcctgctgatggtttggatcttcgttgcgttcctcgccgggatgaacgaccctacgcctgtttcttagcctcctgaagcacgtgacggttcactggactgcctgtcggtaccatagcattagcatatgtttgttgctaggtgttgttttccgcgtcagttattcttccgcgtttcctctgcaagccggcgtgtagtggcgctgcttcggctgccaagatttatatagtgaagatgaataaagttggtgtgtggtgcgtgttcagcagtattatggtcgctccagtgtgattattaggttctctttgtataagtgtactactgctactactgctctactgttgtcgttaggtgttgtttgacaatgttttgtagtattgatcgtggctgtg

SEQ ID NO: 1559 - DNA, 994 bp, Avena sativa
gtcgctggcgcgggccaactacccgccctacggcatcgacttcgccgccggagccaccggccgcttcagcaacggcctcaccaccgtcgacgccatttctcggcttctgggggttcgaggactacatcccggcgtacgcgggcgcgaacaacgaccagctcctctccggcgtgaacttcgcctcagccgcagccgggatcagagacgagaccggccagcaactgggccagcgcatcagcttcggcggtcagctccagaactaccagtcggcggtgcagcagctggtgagcatcctgggcgacgaggactcggcggcgagccacctgagccagtgcatcttcacggtgggcatgggcagcaacgactacctcaacaactacttcatgcccgccgtctacggcaccagccggcagtacacccccgagcagtacgccgacgtgctcgtcaaccagtacgcgcagcagctcagggtcctgtacgacaacggggcgaggaaggtggcgctgatgggcgtggggcaggtcgggtgcagcccgaacgagctggcgcagcacagccccaacggcgtcagctgcgtggaccagatcaacggcgccatcgagatcttcaaccggaagctggtggagctggtggaccagttcaacacgctgccgggggcgcacttcacctacatcaacgcctacgggatcttccaggacatcctcagagcgccggggtctcatggtctgacggtgacgaacaaggggtgctgcggggtggggaggaacaacgggcaggtgacgtgcctgcccttccagacgccgtgcgccaacagggacgagtacctcttctgggacgccttccacccgtccgaggcggccaacatcctcgtcggacggagggcatacagcgccgcgctgccctccgacgtacaccccgtcgacctgcaaacgcttgctcagctctagtacacttatacatgatgatcgagattcaagagcaggaaggagtcaac

SEQ ID NO: 1560 - DNA, 398 bp, Avena sativa
tcatgattgcaattgggctatcaaagtaggtaaatgaagccgttcaaagtattatttttgtgacccagcctattaatttgaatcagaaactagcactagtgagcattaaggtataacaaagtagaaatcagccatagatagatatatccttgctaacctacatatggattaacttgtataagctgttgtacaactgagttagaacttgaagctaatactagtatctcgaattctatctatatctggctaacacaacacattatatcttgttttaagtagtagtagtcggtagcttctccggtagttatatacttatgtatagcagttcatatacacaatcatatgtatgtacaacagctgatatgtgtatgtagagcwgaggcrgaagctaggtrgag

SEQ ID NO: 1561 - DNA, 637 bp, Avena sativa
ttggccataaaatctgtgagacagatattccgatgacatatactactccctcccgtcccataattcttgtcatagttgtagttcaaatttgaactaaaataaaataaaataaaattgaatacagcctcgctagcaacaatctctgggccgattatacagtagtagcattaggttgatccatgcatcaagcggagaagatgttagaactgcacccaggtagtgtaggtgccaccgaaccaccagtttgacggggcaacgttgctggccgtgacgacccgcccgtcgtcggtctgtaccatgaatgacaggctctgtcctcttaggtacgcgttgctctgccagtaggcaccccagttcctgctcatcaccatccagtcagtgctggaccccctgatccacgtctgcgtgacgacgccgctgccgccgacgttcgccaccagcacgaggtcgaagtagtcgttcccgttgacggtgaacctcatgccgccgctcctctggcagggaaccctcctgtagttgacgggcacgatgccggcctggtagacggcgatggttgtccacgccggctgcgacatgtcgaagtgctgccgcggcgggttgcaccatccgccgttgtcgctggccagggcgtagttgg

SEQ ID NO: 1562 - DNA, 680 bp, Avena sativa
ggacgacaaggagtagcagcacagcagcggctaccccgatcaacggttcatgttgcgggcacatttcccgtacttttcttgtcccatattcccatctcggtagctgaagaaatcttgcagacaaaattttgacgttgtagacgatgaagctagctgcataaacatggacaaccggaaaaatttacctctgaggagcaggacgacgagagagattgcagtatgcgtgccgacagagcaggtggccaggaagagcgctgccaatgatgccgtaggaaagggcatcaggatggaggcggctttcgttacagcggcaccgtcaagccccaccttcatcatgatgttgcaatctatctctgttcaatgcgttcactctttagcacgctgtcagtggcaccactggcagaagatcgcaggcaagagatccgtctaggcaagcgtccggtctgtcaggctgcatattttgtggatggtcatttagtaaactcgcaaatcattcataactcaattcttggatgccaatcccatttcccttcttgatatgtcaaccacctacatggcattttttatcagcaatacaaacacaatcaaatttaagaaagataagtctgttttgtcgtttattcgattcaaagatagtctaatactttggagcatcgcttggttggtcatcgctccatgtc

SEQ ID NO: 1563 - DNA, 410 bp, Avena sativa
ctaatagcccgctggaacttcttagcatatttgatcctgtcttgcgtaaaacaagctgcacgcctatttggttgaagctgcaagatggctaggaattgcatgagcctgttgactctttcagatctccgacttcaagtaggttgaactgggcaatgatggttacccatggcttctgtctgttaccctggtcttgtgccagaataaggctttctgtgttggcgcctttttgctctcattgcgatgatcagtttgataagtggtaagctactagtgtggagctttttcgcaacccatcagtgttttgactatctcgaaggcttcaattttgttatttgcttaaataagttcctagtttgtggtagaaaaattgatggatgcagttggtggtataacattccattagacaaaaa

SEQ ID NO: 1564 - DNA, 637 bp, Avena sativa
gcgaagttgaagtccgggtgaggtttaatggatttggggctgaagaggatgagtggataaatgtcaagaaggctatccgccagcaatccattccgctggagtcgtcagaatgccgaaccattgccaaaggagatcttgtcctgtgcttcaaggagagcaatgacgacgcattgcattttgatgcacatgttgtggatatccagcggaagcagcatgatataaggggatgcagatgtgtcttccatgttgaatatgttcacgatcagagtcaggaggtggtgaacctgaagagactgtcccgtcgcccgaaatacctctgatggcttctgctatcgtggatcttgctcctgctatttgcgcttatcgaactaatagggagcctaaaatctagtactagttggaagagaacttagactggactctagttgtttgtttcttattgatgtggtgtgtatagtaaccaccaggaagagtatttaaagccctctggcacgtagctgttgtaacggctatgagtaggctccttgatagccaaattttgcacacttgagaaagtcgatgccaaactgggcagagtccgattttaaacgatgtgctggagcaaaataccatgtcatcgttcttctgaaaaaaaaaa

SEQ ID NO: 1565 - DNA, 886 bp, Avena sativa
cgctgtttcaactgtggttcgtatagtcatgctctgaaggactgctcaaagcctcgtgatcatgttgcaattagcaacgcccgcaagcagcacaacttgaaaaagaacctgtccaatgttaatcgacaaaatcgctactaccagaaaacgccaggcaaatttgatgatctgaaagccggggtcttgggatctgagactagagaatgcttggggctcaggaatgcgcgaattgggctatcctccaggttacctagatgaggtggaagatgaagataaaccttctgggatcacgatattcgggggatgggggaggcgaaagcagatgatgaggagggtgagcttggagagaaaggagaagcatctccacctcgcaagaagatgacggtcgagttcccagggataaatgcgcctgttccagagaatggcgacccctggctgtggggcagcactccgcctcctcaatcctcctctggccgtcaccaccatccaacagcatcagattcaagggacagaggactactcgtcaatcctggcgctgagcactactcgtcgtcgaggtaccattcctacgactacggcggaccagcgaccccaggtctggtgaggtctcactcggacagagaacggagaagctcctccagttactacgagaacccaccgccaccgcctggtgaggcgggcgcctggacccctcactcgtactcgagcaggcatcacagctcgagctcggagcgtcactcgagagacagggagagagaacgagagagggacaggcactactacagcagctcaagtcgaaggtgactgtgaatgaagctaacttttgttgaccagaatcaccgtcgaaggaaactggtatctgtgacatgtatgttgttgctgacgt

SEQ ID NO: 1566 - DNA, 811 bp, Avena sativa
tcgtccagcgatcagtactcccagagctccgagctaggcaacaatggcgacctctcctgtgatgatcgcggcgctcctccttgtgtcgtgttccgtggccgtctccggccagaagttcaacgccctcttcagcttcggcgactccatgtccgacaccggcaacctctgcgtcaacgggcctcccgccggcctcaccctcacccagcccccctacggcgagaccttcttcggccgcgccacctgccgctgctccgacgggcgcctcgtcgtcgacttcctcgccgagaagcttgggctaccgctgctgccgccgtcgaagcagggcggcgcagacttccggcgcggcgcgaacatggccatcatcggcgccaccgccatggggtccaacttcttcacttcgctgggcgtgggcgacaagatctggaacaacgggcccctggacacccagatccagtggttccagaacctcctcccctccgtctgcggctccagctgcagctcctacctgtccaactccctgttcgtgctgggcgagctgggcgggaacgactacaacgcgcagatcttcggcgggtacacgccggagcaggccgccgggcagagcccgaccatcgtgaacggcatcggcgccggcgccgagaagctgctcagcatgggcgccaagtacatcgtggtgccgggcgtgctccccgtgggctgcttcccgatctacctgacgctgtaccagacctccaacgccggcgactacgaccagtacggctgcctgaagcggttcaacgcgctctcctcccgccacaactcgctgctccag

SEQ ID NO: 1567 - DNA, 655 bp, Avena sativa
tagggtcagttacaaaagaacaactctgacattttgtttgtaaacaagaccaagtacaatgctggtacttgctatcttttcaattctgtgcattgcaaatattaccttgttcccgggttggtatatgctgctggagcattatttggtcaaggaattgttgtatgcataacaagaggcatgtctaattgctagagtttagcaataaggcaattccgcagatggttcttcgataatattatcacctgaagcatctgctagtggcttcagagttctctctggcttcagttcaaacctcatcatattgctgctggagctgcattccttgctggaaagttcctgcgctatgacattaccattcaccaaaatttctggcatgagttcaaaacggcaccacccatcgttcaagatgttgtccagcagttgaaggagctactttaggatagtagattccatatgtttgtttttataccaacacatggttttgtggccactgttacaaatatgtatacctggacatgtgggcaatacgtcttaacaagtggacgtcattggtagtttgagaatgtattcattcttcttttttattttatattctacaaccacagagtgttgccatgtacaaaaggataaaagttgtatcaaaagttttcctaca

SEQ ID NO: 1568 - DNA, 683 bp, Avena sativa
ctgtcgaagctatttgtgttgaacaagacttaattagttctctatcctgcttcctgtgttgaaagacgtcaaattatgagaattttgcagtatgtggttccagaactaaaaaaaaaaaaagttattaatcgcgatctagattattgtctttagatagcatagcacagtcgaatactaattatataggtttgcatccccatcaattaagccatgatgtcccagcagagcaccacaaacaaaactctcggttgacaaaaccgcacatggtaattgttcataataacctaacgagttccagaactaaagacgattttagataaggctaacagcatctgaaaacatctggacactggaaggctgtccctagtgcgacttgacgtattcctgcactatgttgaggccctccgactcttcaccgtagtccttgacaacgacacatgagcagcccaccacctttcttgccttgcccctcagagtcgatccttgcagagcccagcccactcgccaagagttttggcactaggaacagtgaccaagtgaacgttgtgctcggcgcagagtgccttgacaagcttcacataatcaggctggtcacaatcctcagcaagaacacaaatctgggcagcgtgcttctcaattgccttggcagcttcacggagccccttgacaaggccatcatgagc

SEQ ID NO: 1569 - DNA, 906 bp, Avena sativa
agcccattgtgttggttatcacgggaggtggtcccgttgatgtttctttgcaaagcaagatcgaagaatcgcaagcatcctgtggatcggatatccaggggaagttggcggacaagttctcccggaaatcctcttcggagagtacaatccaggtggaaaattgcccatcacatggtaccctgaatccttcaccgccgtttcgatgaacgacatgaacatgagagctgaccccttcgcgcggctacccgggaagaacataccggttttacacgggagacgtggtgtatggttttggacacggattgagctactcgaaatactcatacagcatcttacaggctccaagcacaattagcctgtcaggttcgtcatccccgagcctcatcagtaggaagcctgcatacacacggagggacgggctagactacgtccaggttgaagacatcgcgtcatgtgagtccctaatatttccagtccacatctcggccaccaacgacggtgccatggatgggagccatgctgttctgctctttgtgacatcgaaatcaggcgctccagggttccctctgaagcagttgcttgcctttgagcgcgtgtatacaggcgctggcagatcaaccaatctggagatcacggtggatccctgcaagcttatgagtgcagccaacactgaaggaagaagggtgctgctcctgggaactcatcatctgatggtgggagacgaggagcacgagttgctcatcgaagcataacaggctactagtactagtacatgcctacacgaatacaccatgtaccacaccacgtgtcattttatagctgccaggtttgggatagtcagatttacacctgtacaactgtacgaatatcatgtttgtaaagattcattggatgcgccatgtatga

SEQ ID NO: 1570 - DNA, 787 bp, Avena sativa
tagctatcgcagttgatccttgctacagtgggtaagaccttcgggcaacctgcaacagggcacttgggagctttgttccttcttatgtagtctatgattgcatccttgtcatatatgtgcctgcagtcctgacaccgaactggatttgacaactcaattacaggcttcatagttatggggcatttgatatttagaatgatgctctgggtgctagtcataacaacatcctcttgttcgtcaccaggcatcggttgaccagcatggtgaacatcccaaacagcctccctgaactgccttaggagccgctggctgtcacccgacacccgtgaggtccccttgaccttattaacctccgcctcgattagcttcttgaaatcagtcgtctgatcagacagctggtacgccccaggcacatcctttaccgcctcagcgaggtgcgcgcagtcctcgtacgaggccatgagctccagcacctcttcctcgagctgcttcaccttgtcgggcttgccggccctctcgaagtcgacggcgagggacttcatggagttgagcgccttgcgcatgtccatgacgagggattgagcctctgacgaggcgttgtcagcggcggtgggcgaacctcgtggctgccgacgacatctccggcgaactcctgcgatttttgtttttactggcgagaaatgcagtctgctggcggctggagaaagcaccgggcggcgggaggagataaggaaggaggcggaagattggggactcgctatcgccgaatagcgggacgggaatctcc

SEQ ID NO: 1571 - DNA, 877 bp, Avena sativa
aacagcacatagctaagcaatgccacgtttgggtacaatcactacaaaatctctaaaccaccaactttgttacaaacagacttccaacaacggcagttaaacataacatgggcagactgaaatactgatagtcaaacagaactctagtatcaagattttaggcatggcaggtgaaaaatgcttccacatagtgtaaaaaagctatccgcttctcttccagcttgtacaagatctattactctccagctgcgtgtgcggaaaatacacgtttttgacggtttttatttgcttttgcgccatactaagagagagatttggttttctctgggtttatgtgtaatgatgcagctagtaacatcaccaaagacatgttccaacttggattagttcgaggactgtgtctgtgcgttctggctaaatctccttggtccaaaccggagctgaaggttgtccaaaacacgggaaacgttcagaagccgtggatcatccgaaggaatttctcgttccttcaatcccctgtggtatgcttcaacagcaggaagtgctggaactatattacgggtttgcaggagatcccagacataatttgcagttgtatatccaccagtcttttcaccagaggctgcaagtagaagatcagttcccatcttgggattcaagaagaaatttcttgaagtcattttctccaaggtttcttgagcaacttgcattcctcttggagtatgcccaatcatagctccctcagcaagggtcacatacaactccgcgggtatgggttttgagcttgagaactcttcaaacatcttaacagcggaatcaatatctccacatcgaagataacaccttacagcatgcatcacaaygaagggatcataag

SEQ ID NO: 1572 - DNA, 793 bp, Avena sativa
cgggatgttgcggcagtcacacggttgctgaggtcttaccttgcaaggtatgtggtggcgccggattttgatgagcttgatgttgagcactggctgctgccccaggaggatgtggtggatagctaccttgtggagagccctgaaacgcacgaggtcacagatttctgcagcttttacacattgccctcatcagtgctgaacaatgccacctactcaacgctcaaggccgcatactcctactacaatgttgctgtcaagaccccattgcagcagctgatgaatgatgcactgattgtggccaagcagaagaactatgatgtgttcaacgccctcgatgtcatggagaacgagggcttcctcaaggagctcaagtttggacctggagacgggcagctccactattatctctacaattaccgtattcgcaatggaatcaagccatctgagcttggccttgtgcttctataggttggtcaaaggctcaagatggtgcttgggttatactcttttcagcaggtactccttgtgtggctggtttagcatgtgtctttcttggttactacaggtgatggtctgatttccatcatgctgtatgttgcccagttcgtcattgctcattttgtttattgtggtagcaaatcttccatgccttttcatgggaatccacaatgatttgcaaatgaggagactggaattagaagttcctttttcttaattttaaagtaacttgttttctagttagtgatgttcggttgtgtatggttctaaatacagtttacgatgtcactgagtt

SEQ ID NO: 1573 - DNA, 741 bp, Avena sativa
tagatgtgcgccgttaattgtattcttgtggtgcagtcttctggaccgatcagacggcaactcaggggtagaatcctcgggcaatgataatcccggctgcaccaactcgagcagtgctgtgccgcctgccaacattagcgagtttgtcaactctacagccgatgctgcagatggtaaccttgtcgataaacacgacacaagaaaggattcggagaaaccggcggatgttgaagagttgaaaacggtggtgcaatgcattcagaggaaccagtgaaggttgccccaagacctcttcggcgaggccggaaaagggctgttcggagggactagctagagcagaagcacctgcggcgtgccatattgcctagtactaatattaacggcccaaaagggcggtatgatacctaggttaactagagctagttgcccattgatgtatctgtgtcagataacgcgtcgcgcacccacgcattgtatcaatgttgtatccttattgtaggcttcacagtggctgaccacgtatcacggtctagatggtgtgattactaggatcagtcagtagctgagtttcctttctgtttcgtgtaggtgtgattttgtattattggtagatcgtgagagtagagaagaacagctgtttgattattacttgattgtattatgcttgcattgatgacacaagcatggctaccgaccattatattctgcattgattgtattatgcttgcattgatcaaaaaa

SEQ ID NO: 1574 - DNA, 525 bp, Avena sativa
cgtacctgctggtgggatgctgcaacgacgacctcacgcggcgctacaagggcaagaccgtcatgaaccaggacgagcgctacgagtcgctgcgccactgcaagtgggtcgatgaggtcattcctgatgctccgtgggttctcactccagagtttctcgacaagcatcagatcgattttgtcgcgcatgatgctctaccttatgccgataccagtggcgctgcaaatgatgtctatgagtttgttaagaagattggaaaattcaaggaaacaaaaaggactgacggagtatcgacatcagacctcataatgaggatagtgaaggattataaccagtatgtcatgaggaatttagcacgaggatactcaaggaaagaaatgggtgtgagctatgttaaggagaaacaactgcaagtgaatatgaagataaacaaacttcgtgagacagtgaaggcacaacaaggaaaagttggcaaacggtggcgaagacggctgggataaaccacgaagagtggctagtaaacgc

SEQ ID NO: 1575 - DNA, 824 bp, Avena sativa
caacacttggatgagataaaaaacttgccccgtcctaccgatgtgcctgatacaggtctactatgcgaccttctttggtctgatccaggaaaagatgtcaacggatggggcatgaatgataggggtgtctcgtacacatttggccatgacaaagttacagaattccttgtaaagcatgatcttgatcttatttgccgtgcccaccaggttgtcgaggatgggtatgaattctttgctgacagacaactggtcaccatattctcggctcccaactattgtggtgaatttgataatgctggtgcaatgatgagtgttgatgaaacattgatgtgttcttttcaaattctgaaaccagctgagagaaaacccaaatttatagggtcaaacaaaatgtgaaatgatgaagctctttcctcttccagaggctactgaggctctcatgtggacacaatcacatcaagacatcaactcgcaggcgctaggcttgaaggcagcatcgggctggtcctactggagaaaccaaataatatcatatctaacagttggtctgaaagttactcttcatagcaagtgccagaattttttccttttctgttaccgccgtgtgtgaaactctcttgtagctgtagatatattgattatggagggctgaagttgccagttgacccgatgaagtgatttccttctccagcaaggaaaaattctgaatgtgagagtttctgtttggaagttctgctatttaaaaagcacttgtatcacttactgaggtgagaacaaaaaaagcaaagtctgtttcctgttgcttgtaagaaaatattggatga

SEQ ID NO: 1576 - DNA, 343 bp, Avena sativa
ttttttctaaataataagctgatgaatcactgaaaataacacaaatttacagggacggtttacaaaacacgatgcaaactcaaacccccctagtcgaaatataaaacaaagatcacaaaataccccccaaaaggtagtagaaactaagaacaagaatagaacgtgtgtagcctccaatgatattcgtagtatggtaactctgctggtgattacgtactcattagcacattggaagatcaactggaggcgcctccagtgactcgagctcgccgtacccatcctccaccaggaaggccattgccaggccccaggtgatgtgcacgtcgagatggcaatgcatgag

SEQ ID NO: 1577 - DNA, 813 bp, Avena sativa
ggatcaagccgtctcaatattcacggtgtcgtcacctatcgccacacagctccctcaagctgttggagctgcctactctctgaagatggacaggaaggatgcatgtgcaatcgcttattttggtgatggtgccactagcgagggggacttccacgctgctctcaattttgcagccgtcacccaagccccagtcatcttcttctgccgcaataatggctgggcaataagcaccccgactgtcgagcaattcagaagtgacggagttgttgtccgaggtcaggcttacgggatccgcagtatccgggtagatggcaatgatactcttgctgtgtataatgcggtacacaccgcgcgggaaatggcgattagtgaagggattcctattttggtggaggcgatgacttaccgagttagccatcactcgacatcagacgattcaacaaagtacaggtcggctgatgagattgagcattggcgaacagcgaggagtcccatctccaggtatagaagatggattgagggtagcggctggtggtgtaatgcccaagagactgaacttaggaacaatgtgaaacaagagctgctgcaggccattcaggtggctgagaggatgccgaaacatgagctttcggaggtgttcactgatgtttatgatcaaattccttccaatcttagcgaccaacatcgatcactgctggagaccatcaggaagcacccctcagactacccaacttatgtgcctgttttagtcatcctattgaccataggtctgcaatgctcttctgcaagtgtgttgaatcataatttgkccgc

SEQ ID NO: 1578 - DNA, 959 bp, Avena sativa
ttcctataaatctgcatttgatttccatgagccttcggtaggacaatcagtcaatgaggaaataatccgtactccctttaatccataataacaagtgtcactcatctagtacaaagtttatactagcttagtacaaaataagcgacacttattatggatcaaatggagtaccattttcaacccaagtgggaacgcgcgtcatgttgcaagacacaaactactaataatggccttttgatcaatctgactcgactatataccggagtatcatacaaccacaaaattacagataaccaaacttcacaaataacaaaagggtcacagaggggatcactactgatcaacagtccaaactaccagaacatatgcacagcacgaggaagcgaaagaaataacaccaggaaacttcacatgtgctacctgccagtccgcaggcagctcagctgtttcgaggtagtatgtggcaatagcgaacaggagctcacatacccaggttcgcagaccttctctttcctgtgccacagatgacacggatcagccattacattcccgttctctcaggagaaccaaccatcagaagcttcataattccaagcatggccgtcatcaccaggaagtcacgacctcacgtctctagacactgccaggagctgcgaaagctctgaccggcgctcgaggcctcggatgtagtggcccatcagcatacaccaaaaaagtagacgtgcaagatgatcccgtggaatagatatgaggggctgaaatgggagcgacacgtcctccacgagctcagcacggtcatcatccccatttccataatttagggttccaccagccatgttctctgatggtggagggggctttgcatgcatcttgggggagagagttgctagaagaccatgtaccacggaatgaatagcttcttgcacaccggggcaggaaggttccgagagttccataac

SEQ ID NO: 1579 - DNA, 679 bp, Avena sativa
aattgatccgacagtcttggtgcagacgttggattatgtgaagcaatgcgaggcggatattgtcaacatgtcagtggcgcaacgcccatcccttggttatgaaccaacagcggataagctttatgacctgccacagttaggatttgtgcgggctaaaaatgagcctagagagaagcagcaagaacaaccgacacaagaaacaccagaagaacccttggacctgaagaataagtgttcattggagaacaaggaggaagatgaatcagacgacagtgaatcttgctctggttctgacgaagacggttcgtggcaggagtccacgaagctggggcccgaggaaaggaaggctgctcggaaggagaacaagaagaaggtgaaggaggaaaagagggaaacccgcaagacgaagatccccaaggctgataagaagaagaggaagaagatggcgaaagctaagtgcaagcggtagtgaaccactgcaggcaatccacatggttgcaccagcaattcaagttacagttgttatacgaatctacttccagctagtacttgtgtttgatgaaatgcgtgatgttcgcagcttttatgtgtttcaattttgtatggtcttcagtcctttatgaatgtattacctagcaaaccagtgctgtaaaagaaccatctttccgactaaaaaaaa

SEQ ID NO: 1580 - DNA, 514 bp, Avena sativa
agaaactcttgtctcagtatgacatgcttcagagtcgtcttaaggatctgaaacaacttactgaaaaagaggtgtggatgcttgcaagaatgtgtcagttggagaacaagatattagcagtaggcgaaccatcctatcgtgctcgacgtggtagactgaagaaggtacgaaaaagcttggaaagtacgctgttggcaaagattgagctgatggaaagttacgcaaaattatgttcaatgattgaaattgaagttgaaatggactctgatgttctcgttgctgaagcagctactggtgcagaaagaatatcagaacagattcaacagttaatggaaattgatagtcttgaagagcaatggcgtatacaagctgaggctaatgatgaagcggaaaggcttcttaggtcagattcttcggaagcattgtccgctgagcatgtataatgagattttacttccaaactaagaagccatactgggctgggtatagtgacttgtgaagagatgattccgat

SEQ ID NO: 1581 - DNA, 435 bp, Avena sativa
cgatattatcaaagaccccattgtatttgaagacgatgttaagaagagttgagtcagagcagtactatgtgaccttagagatgtttgtagccgacttgaagagaatgtttctcaatgcaagaacctacaactctcctgatacaatctattataaatgctccactcggttagaagcctacttcacaaacagaatccaagctcaccttgcccaggctgcctcaaccaagaactaggctgatgaccggcgaactggatatggttgttgtaaagtgtgatagctgcagacatgctagttatgccttttagcaattatactggaaacaagttcaaattatcgctctcattatttggggaacacttgttctcaattctcagatgccttccttgcaaaaacagtaacttaaaaaagctctgaagttctccttggatctattt

SEQ ID NO: 1582 - DNA, 695 bp, Avena sativa
ctttcctcaagcccttccaaacgcttctgcaaatgctgctggtgagggaaatctggatgttttgcgtaataacgcacagttccgaagcttactttctttagtgcaggctaatcctcaaatcttacagccattgcttcaagagctgggaaaacaaaatcctcagattttgcagctcattcaggacaatcaagctgagttccttcgtttgatcaatgaaccagctgagggtgatgaggacgagaacctcctagaccagtttgcagagggggtagagggggtgcctcagaccatagccgttactcctgaggagaatgaagctatccttcgccttgaaggaatgggctttgaccggacgcttgttctggaagtgtactttgcctgcaacaaagatgagaccttggccgcaaactacctcttagaccacatgaatgagtttgatgatggagcgccgcagtaagatgaagcggcttgtttctgaattacatgcagatgccacaagcccaatggaagcaagggtgtggggaggctgatacacccgcactcgcagggcaagcccttagatctttctttttgagatctgtctccgcgtttagtttgtaattcttttctgccttactattagtacatactctagttttatcttcatgaatgttaatcacagatttgataacagcttataaaagttgtctgtcagt

SEQ ID NO: 1583 - DNA, 779 bp, Avena sativa
agtacacgagtatttcacaaattacatagtcaatgagagtctgggaatcattgcaaatgcacatgtagtctttgcagacagggaatctcgcaaggctgaaagtgcgccgtgcattaagctggccgagctcttctccattgctgttgattacccgaagacaggagtgccggctcaaattccatccgaactctatgtgagggagtatcctgatttcatggagaagctcgacagagctacctatgattctaagggtgttatagggaagctgtatagagaaataaagaagcagaaccctcgtgtagggcacttcaccaaggatgtggcaaggcggtcttacgacaccgatttgattgttgatggctacaaagactacattgcagaagctgcggagtgcaaggaagagtatgactttaagttgtgtaatctgatggagcactacgggataaaaaccgaggctgagatcattagtggatgcattcttaagatggcaaagaatttcaccaagagcagcgacgccgatgccatcaggctggcggttaaatctttgaggaaagaagcaaggtcatggttcatcgatgagaaaggagatggagacggtcaagatgcctcgtacgccaaggcatccgcttggtaccatgtcacctatcacccggagtactggggcctctacaatgaaggatatgatcaccgcaccaaccacctcatcagctttccctggtgtgtctatgacaagctgctgcgcatcaagcagaggagaatcttctcaggaagctgcagcc

SEQ ID NO: 1584 - DNA, 957 bp, Avena sativa
ccaagcaagatggaggtttgtgaacgcggatgagtgcttgatgacaaggatgcaggagatgtccctggactaccacttcaaagtggagcaagaagtgagctcctccgtctgcgcattcttcggattcaacgggaccgccggcgtgtggcgcatctctgcagtgaacgaagcaggaggctggaacgaccggaccactgtcgaagacatggatctggctatccgggccagcctcaaagggtggaagtttgtctatcttggcgatgtccaggttaagagcgaactccccagcacattcaaagcctttcggtttcagcagcacagatggtcgtgtggtccggcaaacctgttcaggaagatgctgttggagattgttacaaataagaaagtgacgatctggaagaaattccatgtcatctacaacttcttcttggtgcgcaagatcgtcgcgcatatcgtgactttcaccttctactgcattgtcatcccggcaaccatctttgtccctgaggttcatatcccaaaatggggttgcatctacattccctcaatcatcacacttctcaattctgttggaactcccaggtcttttcacttgcttttcttctggatcctcttcgaaaatgtcatgtcgctgcatagaacaaaggccacattgattggcttgttagaggcaggcagggtgaacgagtgggttgtcacggagaagcttggcaacgttctgaagatgaaatcgtctaacaaaggatctgccaagaaatcattcatgaggatgtgggagaggttaaatgttccggaacttggcgtgtcagccttcctcttctcctgtggatggtatgatctcgcgtttggtgggaaggacaatttcttcatataccttttcttccagtcgatagcatttttcgtcgtcggtattggctatgttggcacaatcgttccccagtcataaccgaaagcatg

SEQ ID NO: 1585 - DNA, 781 bp, Avena sativa
cccgggaatttccagagagtcgagagggaagagagagaaaggaaggggatcgagtagttagagagagcgagcgagcgaggggagagagtctctctagggtttctcgcggcgaggggagatgtcgatggcggcggcgaggtcggcggcgtcccggaccccggcgagggcggcggcgaggttcgtgcagagcaggttccggtcctccggcgggaagatgctcaacgaggaggagaaggccgccgagaacgtctacatcaagaaaatggagcaagagaagctggcacgcaagggtcccggcgcaggagagcaagctccgtctgccccaagctctgcagcgagcgacgtgaaggctggaggtggtggcccaacagcgtccacatccgctggcgtgtcgtctgacaagaacaggaactacgccgtcgtggctggcaccatcgccggcctgagcgccctgggctggtacctcctgtcgaaggagcccaagaagaaggaagaggtcgtcgattaagcggatccgcgggtgcttttggtttcgccctgcttttacttagtgcgcatggacctctgtctctgttgcgacgatgacaagaataaatcctgttggtgatgtcgctgaaactgccttctgtagctttgaataccgcacttgagaacccgagactgagatgatctgtagttcttggtttgctctctctcactctctttgggagttgaaacctgtagcttgcactgttgctgcttaaagaaagaggcattttggatgcggccgttttgaatagaa

SEQ ID NO: 1586 - DNA, 553 bp, Avena sativa
ggtgcgtaggcacaattctcctatacaaaagaccaggcattttaggtgccctctgatgataatgatgtcatgcgattctgacaatttcgaaatagttccatatccactgaatgtacaccaaactgacttctacagtgaaaccaatttacactgaatttcttctacctttcctactgatatttggtgggcttcgacttcttcctcgatgatgttcttgtaacaccacgttctgataccctgtgcaccgctgcagtaggtttgtccaatccaggctcatcgttgctagtggcatcagctttgttcggctccatagtctcgacatcatctttgcagccatgttcaatgcttggtttcttcttgccaccaacagctttccctgtttttctggaaggagcacttgtggcgttcttgttttgctttcccctggatgttgccactctctttctgggcttcagatcatcatcatctcctccatctgccacgacttccttggtgccaccatcctcgctcacttgcacaggattagtttttctggagggtggttttcccctag

SEQ ID NO: 1587 - DNA, 689 bp, Avena sativa
gtggtctcaaagcctccaactgaactacaaaacgcgtatctgagatacaccaatgagtttgacaaccttctcttggagcaagctgtatgcgaggtatatggtcctagggacaattttggttgcgaggagtttcgtcttaacccacagtgcgacgcggaacggaatctatggtatatggagtgccccatgatatgcatgtgggttgttgagcattatatgccgcaacgggttatgagacagtttggtatctatcaggctacccgtccggattaccaggacaccgacgaagctcttcatcggttggacaggctcaagagcaagaagactgaatggggcaagattcaccagaaacatgtagctagatttcttttatctgtgagagaagctaagaaatcgaaaagaatggctgcaaaaccccattgtgaggacgctttcagcaagtgcctccattggtttctagagaacactcgtgtgaagcttctaccaaatgcatatccggaagatatattggaagagccgctgcctgcgtgagacgagctgaggaaccttgagtacaaccaagatgttagagaagggcggcaaacctcctttgcccccgtgatgaactttgtgcgcacggaggtccagaagcaggcagatgagttggagggcgctttggagttcccgagggatgaaggaagggcaatagt

SEQ ID NO: 1588 - DNA, 799 bp, Avena sativa
aattagtagtaggtaggtttactttaaccaaacttactttaaacgttaaaggttcggttcgggtttaggtttactaccttacccttttaacctttaacttcgtagtagtagtacctttaacctttaactaacgaaaggaaagtttaagttttggttggtagtagttcgggtacgggtacgtacgtacggtacgtactacccaaaccttaagttcgtccttttactttttaagtttacgttaaaacgggttaaaaggggtcgaaacgggaaaagggtaccttccgtcgaaacaaaaaaaaaatctcgggaaggtgatgtcgcgacgggggaggtgatcgatgccttcttcgccacccagtttggtgtgcccgttctcgatgatgaggataggtgcatctaggtcttctccaagaaagaccggccatggcctccaacaggatacaaattcagatagttcgtccgcagatggctttgatgttgcacgtccacccaaattgtaacatatataggccagaaaacgcatgactcttgagaacgtatggatgtattctccatcaaactactccggtgtcacagtactaaaagtgttctgtaaatttagcaagagaaaccatatgattaactagcccttagtattactccatcaatatctgaattcatttgctgctaaagatgtactgcagtctttgttccttccgagattatagtgcactgctgaatatttcactataatccaccagggtgcactgccaataatcagtcaacattattgctgtatgttctatattaatatagcgag

SEQ ID NO: 1589 - DNA, 937 bp, Avena sativa
tatccatctgatgcaacatatttgtgtgcgtccgtgctgacatataaacactgttttcctgtttaaaggtaatgatttcggcaaaggatgaaccagatgcactggttcctccagctgttgatggtttgctgagagtacataatagaataacagatggtttagatgctgaagctgaccagcctcagcgaggtgctggtcctgtagggccaacacggctgcttgtgccagcttcccaagctggcagcctgattggcaagcaaggggcaaccattaaatccatacaggatgcttcaaaatgtgctctccgcattcttgagaacgtgccacccgtggcattaaatgatgacagagttgtcgagatacaaggtgaaccccatgatgttcacaaagcagtggaactgattgcaactcatttgagaaaatttcttgttgaccgtagtgttctccctttgttcgaaatgcagatgaaagtgcacaatgtgcccagagagcaacctatggctgcgcctcaacagtggggtcctcctcctccctggagtcatccaccaaacattcctcccagcggccctacttatggtgggaatcaacattttatgcctccacggccacaagacaactattatcctcctcctgatgtgcaccctgttgaaaagcaacaacactatgggatttcttcatatggccgtgatgcacatccaactggcgctcctccttcctctgggaatcaacacctaccacatgggtcttctcaaatttcccaaaagatgcaagttcctctttcatatgttgatgccgtgattgggtctgctggtgccaatattagctacatccgcaagcatagtggtgcaacagtaagtattcaagaaggtgttcctggagagatgacggtcgagattggagggagtgcttcacaagttcaaactgctcagcagctgat

SEQ ID NO: 1590 - DNA, 814 bp, Avena sativa
ctaccattgctaactcctgtgcaaaggttggagctgttggaataaactgcacgcctccaagatttattcatagcctgatactcaccattcggaaggtcactgacaagccaattctgatatatcccaacagtggagaaagatatgatggcgagaaaaaggagtgggtggaatctactggcgtgtcagatggtgattttgtttcttatgtaagcgagtggtgcaaagatggagctgtgcttattgggggctgctgcaggacaactccaaacaccatcagggccataactagaacccttaaccaatccttccctgcgccataattatccgtggcatacagctgtgccctccttgagaggtggtttgtctggtgttgtcctatgaactatgtcctggagatttagtgatagcgctgcgatgttctcctagaaacgagacggtttcttttaacttggagatgctaccggtcaacgattaacaagaagtaatagggaagtaagttccactgaggagcgagtgaaatgatctgcggcgaagtttgtgaccccttatatagctattattaagagtgtgcaagactatgtatgttatacagactgttgggtcagttcgagagatgttatcctggaataataaggtcttatgttgtgtactagtactgccttgaactgtatatgtagagatgtatctccagctgaaaatgagtacttccttcggggttacctctgcagctgtgctaccaaattacccttgtggactatgtcttctcgacaagtcaagctccttctgggttcaaaatatgaaccacccttcaaaa

SEQ ID NO: 1591 - DNA, 567 bp, Avena sativa
ctcgaggcttctcgcgcctattggtgcgccgacagatcggccccgcagagtacatcatccatgatccgctccggagattttgtggaccagctccttcacgctcggtttctgggagagcaatatgagccagcagtgtatatggcatatcgttggcaggttggtatcacagagtttggcaatgatgatctgcttgatatccttggagaagtttcatctgatgggctctcacaagatagcttgaagaagttgccgtaccatgtggtgattgatcagaagcaagagccaacgggtgaaaacttgtcttgccctatttgcctgcaggatcttctgacgggagagacagcgaggaggttaccattgtgttctcacacctttcaccagccttgtgtggacaaatggctcattggccatagttcatgccctgtatgtaggcgagatgtgtaaatacatgccatttcggttgtgttctcttaagagtgtagttggcatacccgtgtaaatagtttgttctcatggtgtatagaaaggtaaatagcagtgtaaaccaataccatccatgtgcctgta

SEQ ID NO: 1592 - DNA, 483 bp, Avena sativa
aaattatatgttagattatcaagattagagtttccacttttcatacatttgctttgtaaatatgtgtactgcttgcatgcgtgtgtaaataagttgtaatgaggagaaaaaattgaatcatgttatcttaggatgataaataagcctacaaattattgcccataaagtaatgtctattttttattgcttcagaaatccttggtaaaggactctggttcaagctttctactccctccgatccaaattaatgttctcatatttgtctaaattcagatgtatgtagagatacattcgaatatagacaaatctaagaacattattatggatgtgaggaagtaataaagttgggtccgatgaccttatttctaaaagaaaatattctcagctggattcctgaaggagaagatctgtcagtgttgtgaataatggcacttgattttctcatagttatactttattttcttattttttacttaaaaatga

SEQ ID NO: 1593 - DNA, 870 bp, Avena sativa
ccgggatcttgggatccctcctttccttccttcccggacgcccgcctcccggatcgcaattccgcatccgcccgccgccgcagtcgcaaccccagccaagttcgggccccatggcgcggcgatccgcacctctcctccgccgcctcgtcgcctcctccccgcctcccctccccggccatggcggcggcgcgcgccgcaccgtgacctacatgccccgcccgggcgacggcaccccgcgccccgtcacgctcatcccgggcgacggaatcgggcccctcgtcaccggcgccgtgcagcaggtcatggaggccatgcacgcgccgctctacttcgagtcctacgacgtccacggcaacatgcccgccgtgccccccgccgtcatcgactccatccgccgcaacaaggtctgcctcaagggagggctcgccacccccgtcggaggaggggtatcctccctcaacatgcagctccgcaaggagctcgacctctacgcatcgctcgtcaactgcgccaacgtcccaggcctgcccaccaggcacaagaacgtcgacatcgtcgtcatcagggagaacaccgagggcgagtactcgggactcgagcatgaggtcgtcccaggggtcgtcgagagcctcaaggtgatcacaaagttttgctctgagaggattgccaaatatgcttttgagtatgcctatcttaacaaccggaagaaagtcacagcagtgcataaagcaaacatcatgaagcttgctgatggtttgttcttggagtcttgccgtgagattgctgcaaaatatcctagtattgagtacaatgagatcattgttgataactgctgtatgcaacttgtttcaaggcctgacagtttgatgt

SEQ ID NO: 1594 - DNA, 744 bp, Avena sativa
  modified_base (174)..(174): a, c, t, g, unknown or other
gtgaatgatgtggaacagagatctagagatgagcctctttctgtcgaaagccttaaaagtggcattaggaggtcttcattctcagctaagccagaatatccagaaaatgggtccaaaaactctccagcagtgcccagctacatggctgcaacaaaatctgcaaaggcgaaactncggggacagatatcaccttagactcagtgctgattcagcagaaaaaactgtctacgacccgccgccattccctcccttcccctgccaatggcaagcagaactcgcactcgccgcgtacacaaaggccaactcatctgaattctggtaacaaggagggagtgaaaggcgacaagtctctgctgtcatcaagagacgcggctgagggaccgatgaaagccgagtggagacgctgaagacggagaccagttgaccatcactgaacaccagatcctctgttctgttctagtagcgcgttgaagtttggtttgcacggaaggcggtttgctagaatttgtgttttgttgcctctgatgtaaaaaatgttctctcgtccgtctgccgtgacaactggaccagctgctgaattcgttgcggagttcgaattatttatagggttttgcgacatgtcttgcctagtgtcttgtatagctttgaagtttgttctacacctggtttgtttggtctgttcaccgccccaaccgagacaccatgctttgttaagtgagagtgagaatgatgagagatgctgat

SEQ ID NO: 1595 - DNA, 864 bp, Avena sativa
cgatggatgcttgagacagccaaaggaactctcaattaataaagttgggcacgcattacatgaacatgatcctgtgttcaaaaagtttgctttcgcggagaatgtttccagcctgttctcttctttagggtacaggaggcctgcagttattcaatctatgtacatctttaagcaaccgggcattggtggcgaggtggtgccacaccaggataatacattcctttatacagagcctctatcctgcacaggattgtggcttgcacttgaagatgcaacgataaccaatggttgcctatgggcaattcctggctcacataaaaatggtctgcaaagacgaatgatcagagatgaaaatggtactcattttgatcgtccctccccaccttatgatcaaaaagagtttgtaccactggaagtaaaatcaggtgactttgttgttattcacggcgatcttgtacatcagagctttgagaacctttctccagtgtcaagacatgcactgagcttacatgtagttgatatggaaggatgtaaatggtccaaggacaactggatacagaggacaactgcacctgaaccgctctatgtgtcttagttcagccaattactaataaagcgagagatctccagcaagcaattcccatcaatagcgccaatttcttatcctcgctgcaatataagttgggaatcctgctggacaatgcttgggtttcttcatttgtctttcacatgcaaacgttgtaaatacttgctaccgttgtgtcatgatatatatcaactgtgttccagatgaaggtagccatacgttacttgatcacacagttgactgtttgttggagcctgaaagtgtactagtatttcagt

SEQ ID NO: 1596 - DNA, 935 bp, Avena sativa
tggaatgtgaaagcgtcggcgaaggagtaactgacgtgcagcctggggatcacgtcattccctgctaccaagcggaatgcaaagactgcaagatgtgcaagagtgggaagaccaacctctgtggcaaagttcgtgctgccacaggggtaggggtcatgatgactgatcgcaagagccgattctcggtaaatggaaaacccatttaccatttcatggggacgtcgacattcagtcagtacactgttgtgcatgatgtcagtgttgcaaagatcgacccacaggcaccactagataaagtctgcctgcttggctgtggtgtttctactggccttggagcagtatggaatactgcaaaggttgaggcaggttcggtcgttgctatttttggccttggcacagttggacttgcagttgccgagggcgcgaaaacagctggtgcttctcggattattggcattgacattgacccaaaaaagtttgatgttgctaagaacttcggcgttacagaatttgtgaacccaaaggaccatgacaaaccaatccagcaggtcatagttgaccttacggatggtggtgtggactacagttttgaatgcattggaaatgtttctatcatgagggctgcacttgaatgctgccacaagggctggggtacctctgttgtcgttggtgtagctgcatctggacaggagatttcgacacggccattccagctcgtcacgggccgtgtttggaagggaacagctttcggcggcttcaagagccgaacccaggttccgtggcttgttgagaagtacatgaaaaaggagatcaaggtggacgagtacatcactcacaacatgaacctgaccgatatcaacaaggcgtttgacctgctgcacgagggcggctgcctgcgttgtgtgctggcgatggagcagtgaggattctgctat

SEQ ID NO: 1597 - DNA, 753 bp, Avena sativa
caaggactccaaggccttcgccaagcgggagaagcagtccgtcaagaagctcacctcctcgctcaagaagtacgcgcccgactccgcgcccgcgctcgccatccaggccaccatcgacaagaccaagcgccgcttcgaaaactacggcaagttcggcctcctctgcggctccgacggcctgccgcacctcatcgtcagcggggaccagcggcactggggagagttcatcaccccaggcgtcctcttcctctacatcgcgggatggatcgggtgggtcggcaggagctacctcatcgccgtcagctgcgagaagaagcccgccatgagggagatcatcatcgacgtcgagctcgcctccaagatcatccccaggggcttcatctggcctgttgcagcataccgcgagtggatcaacggcgacctcgtcgtcgacgacgccgatatcggatactaagcatgtcgtgcttgcctggctagtcggtcccaagtcagatgggcggcggaggatgagggcctgtggtgtctctgcaggcttggtgtaggagctgataggatcatggagaatggaacctctgttgtacttaaagaaactcaaaccttgtataactctacctctctcttgtgtgtatttttaccatgttcagactattcagaacgatttcattgatgcagagcatatactatgagtgcagaatgacaagaacatatataactaggaaaacaactgagacaaaagactaattcataggaaag

SEQ ID NO: 1598 - DNA, 741 bp, Avena sativa
caagcccaagacggtggcgccgcccgcgcaggcgcaggcacaggcggcgccggcagcggtgtacctgtccgttgccgaccggccgtcggccggccccgcggacccgaaggcgtccaggtcgtcgtcggtgaaccgatgccacagctgccggaagcgcgtggggctgacggggttccggtgccggtgcggcgagatgttctgcggctcgcaccgctactcggaccggcacgactgcagcttcgactacaagtccgcggccagggacaccatcgccaaggagaaccccgtcgttcgcgccgccaagatcgttaggttctgaacttgtgatgatcagacagagagaggatctcgacgtactatacaacacggagaaaaatccgatctttttctctttctttcctttgaaaaatttaaaaggcgcgcatacctgttatcgtgctgttcttgctgctagtggaaaaaagggtggggtgaaaaaggtgaaagatggctggcgatgggggctggctggcaggaagacgaagtaaaagaagaagaagaaacagtgcgatgataatgttgttgttgttgtagtggtgttggttggctcgcggtggaggaggaggaggaggaagatggggttggtgtgtacctgttgttccacaatctctatttaaaaaattcaatttccctacgtactatttgtataaattatctatctatcccattggtttgggtggggcatcatttcgctgacaaaaa

SEQ ID NO: 1599 - DNA, 952 bp, Avena sativa
cgtcagatccggagagagacatgatccaggccggcgtcgaagcgaccctgaacgtgatgaggtcgtgtgcgaaatcagggacggtgaagcgcgtgatcctgacttcctcggacgccgctgcggtgtaccaccggaagccggtggaaggcgacggccgcgtggtggtggacgagagctcctggtccgacgtgccatacctgcgcgccgagaagccgccggcatgggactacgcggtgtcgaaggtgctcctggaagaggcggccggcaagttcgcggaggagagcggcatcagcctagtgaccctgctgcccgcgttcaccctgggcgcggcgccggtctcgctggccaaaaccagcgtccccgccatcctctccttgttgactggtgaccaggcacagctggacatcctgaacgccctgcagtcggtcacggactccgtggcgataatccacgtcgacgacctctgccgcgccgaggttttcctcgccgagaacgagccgtcgtcggggaggtacatctgctgcagccacaacaccaccgtgccccagatcgcccgtctcctggcggagatgtacccacaatacaacatgaaacccgaacgttttgatgggtaccccgagaagccaagggtgtctgtttcttccaagaagctcatcggggaagggttcgagtacaagtacaatgacctgggtgagatctttcaggacgtcgtcgagtacggcagggccactgggattcttccctgctgatgatatgctcatgtgctgccgctcgtatgtgctttctactactagtaataagcaggaaaagcccacgcttgtacgtgcttcattcgggtgatggagtttccgtggttgcaagtcgttttggagtacttcgtcgtagatgattttgacaatgatagcctatttctgaaagtttggcaccaaatgaagaacttctctaccaattt

SEQ ID NO: 1600 - DNA, 961 bp, Avena sativa
ttctgacggagtcacattacaaactaactggggttataacagtatgctgcttgtgatatattacacagtgtgaacaccaacaacaaaaggaaaatacacatagtgcacctataggcgttgtgcaacactatctcagcagatacgacatcaaggaatagatagttgataagcaccaataacgattgtcattaccaaaagctgtctctctattccctgcgagaacaagctatctctctattccctgcgagaacacaccagccaaataaccgtgtagtatgaaacaattcaaagagctgacaaagagtagaaggtcagtcgatatgcatacctcgtttgcacatctaggagaagcgagtccttctcattttttctaaatgtttttccagaacaacccctgcatgtttaagcctagagccgagctctttaaagttagaaagcggattatcccagggcgcctcaatgtgaccctcttcaccagagtaaaagagagatgtaatattgaggatttgttctgagaaagaagacatatgtgcctgacagcaagaaaccagcctctggcaagaaaccacgccgccaaggacgaaaccatccctgtccacctcacataggtaagaatggtaggacagccgacaccgggttgcaaccatctcgagcaaatgaatggaggaatagcagacatcaaacattctggagcagcactcgcacaaacaacactgaaacagaggaagaggatactgcccttctaagaaaagccttcagcaaaacccgcagcacaaaccaaccctggaacaaagaaagagcaccaccgctgggaaagagagacggcagaaggaagccacagcagcagacaacctgaagcaaagagagagagcaccagcagtccagggaaggccacagtaagtccgcagcaggaggcaaccagcaacacccgatgcagggccggacaagcacaacagaggtg

SEQ ID NO: 1601 - DNA, 664 bp, Avena sativa
cagcatcggtctgggacctcttgagactgtacagtatgagatgatcaagtcctggtcggccgtgatgtatatgttgttggtgttgcagttagggtgccacaactcgtgatcgtcaaatgatgtcactagctcgccgcggaaattccaagcagccactgttctgttgcagaatgtcaggaacagattgttttcatagaggaagatgaacgccgatggggtcatgaactctgttctgttcacctcaatcagttcagaatttctgacatcgatgatctgtaggttctccttgtcctgcttcaccaaaagtttttcgttgaactgctcgatgaagtcaacctttctgtttcgatgcagcaactgagtgaaggttttcagcggtttcccatcctctattgacaatatcattagtggaacatgattagttgccttctggtatatcacgagcatgattccagggcttatcttaatctcctggatgtccttatcacagatagaatacagaaagttgtagttctttagatcaaaaactttgtaggtactatcatgcgctgaaaaagtcaatacttttccattaacatcatcaaactcaacaaagccaggatatttcagtgattcagattcgaataaaggaaatccatcatgtagctggcctctccggatgtat

SEQ ID NO: 1602 - DNA, 396 bp, Avena sativa
tgaatcaacatgagtttttttgctttggatggcaaaaggaggctttcttttccgaaacttcatatctcagtaacttgatcacaaagaagacagataatggcatgggccagagttacacatttacacatttctaatccaagtctcaggagcttattgccacttcacgatagaattttgcagaattttagaaggaggattgacactataacacggggaaaccataggagccccctacactgcgagaagccagaacctggcaatataattggagcacaggtattgagctaggattagatgaacgttttgatcttcctgtcaagctcatccttcttagcccccaaaccacgcggctcacctcctgtccacccttcactagtacaaaggtcggcatcgcct

SEQ ID NO: 1603 - DNA, 658 bp, Avena sativa
gttgccagcttgggtaagattctaggaccaagaggattgatgcctaaccccaaagctggtactgtttctccaaacattactcaggctatcgatgagttcaagaaaggtaaagttgaattcagagttgacaagacagggatcgcgcacattcctttcggcaaggttaacttccctgaagaagacctcattgcaaacttcatggctgttgttcgctctattgagaggaacaagccatctggtgcaaaaggggatatactggaaaacggcatatgtatgctcgtcaatgggaccttcaatcaagctaaacataaaagaaatgcttgactatggcacggattcatctaactagatgtcaccatgagcaccgggatttgctaccaacttcacaaacttgaccatccatcccttgtgataaaaaatactgaggaacactatcttggggcagactgggaggtgcttaggtacaggtttttagttcacgggcatccaacatcagcagttaaagaatgccctgatcaacgaacaggcggtactgttggttggttgtatttatgagcgaattatgcatgcacttataggtttctttgtctyggagatgtttgttgtaatgttcattattttgtcaatagtcatctttgagcttcagaacaaaaaaaaa

SEQ ID NO: 1604 - DNA, 545 bp, Avena sativa
gagattcgagtgggacaagataatggaagaaggccatgttattggtctcaagcagggaaagcaaaacatttcactggaacctggtggccagtttgaactcagtggtgctcctcttgaaacgctgcatcaaacttgtgcagaggtcaattcacatctttatcaggtcaaagcagttggagaggaaatgggagttggatttcttggacttggttttcaaccaaaatggccactgagtgatataccaataatgcccaaggggaggtacgaaattatgagaaattacatgcctaaagttggttctcttggccttgatatgatgttccgcacatgcaccgtacaggttaatctcgacttcagttcagagcaagatatgattaataaattccgtgctagcctcgcattgcagcctatcgcgacagcgatatttgcaaattctcccttcaaagaaggaaaaccaaatgggtttctcagtttaagaagccatatttggactgatactgataacaaccgctcagggatgcttccttttgtttttgatgactcgt

SEQ ID NO: 1605 - DNA, 612 bp, Avena sativa
atcgaatgttcggataaggaagaactttgcgtttgtgcaatttgaaacacaggaagaggcaacaaaagcgctggatgctactcatttgaccaagttgttggacagagtgatttctgttgagtatgccttcagggatgatagtgaacccggtgacaggtatgacaagccaggtaggggtggcggctatggaaggcaggatgatagttcatatcgccgttctgttagcccagtgtaccgaaggtcacggcctagtcctgactatggctgtccagtgagtcctgcgtacggctcatatgacagaagcaggagccctgtccgtgatcgttatcgaagccgatctcctgtccagcgctcaagatctccggttaccaacagaagagcttatgactgatagagaattatctaggttatggcagtgaggactgaggcggcttctgtttgccattctagctcgagcacttggtaaagaagaacttgtgtatctgtactgaagtgtatcgtttagcttacatgaactgccatattataagcggaacctgtacttgtcgtgttataagtgtgacatgtacttatcgtgttataagtgagacctgtacttgaagatacaaaaaa

SEQ ID NO: 1606 - DNA, 949 bp, Avena sativa
tctacctggaggcgtgcgagtccgggagcatcttcgagggcctcctcccgggcaacatcagcgtgtacgcgacgacggcatcgaacgcggaggagagcagctggggcacctactgtcccggcgacgacgagggcgcccctccggcggagtacgacacctgcctcggcgacctctacagcgtcgcctggatggaggacagcgacgcccacaacctccacaccgagtctctcaggcagcagtacgacgtcgtcaaggaccgcacgtccgcgcacgagacctacagcctcggctcccacgtgatgcagtacggcgacctcggcctcaacgaccagagcctctacctgttcatgggcaccaatccggccaacgacaacaccagcttcgtcgtcggcaactcgttatcctcctcctcctcctcgaggcctggtgccgccgttaaccagcgtgacgccgatctcctccacttctggcacaagtaccggaggtccgaagaggggtcggcacggaaaggagaggcgcgaaggcagttggtggagatgatggcacggcgatcccgcgtcgataaaagcgtggagatgatcggcaacctcctcttcggctccgaggaaggtcccaaggtcctcaacgccgtccgacctgcgggacggcctctggtcgacgactgggactgcctcaagtccatggtgcggagctttgaggagcgatgcgggccgctaacgcagtacgggatgaagcacatgcgttcggtggccaacatctgcaacgccggtgtcagcgagggggccatggacaaggttgcatctcaggcgtgcactattaatcctcctgcttccttattctgatcaagttgtttaatcgatccatgtcgtcgcataaatcactcggtatttggtgtgttatcaacatgtgtatacatatataataatgataactgtaaatatagtttaac

SEQ ID NO: 1607 - DNA, 678 bp, Avena sativa
tcatttctgttgagtctaaaatacgaattattttatctgaaaatctacatactgatagaacatatggttggattcatcgccatatttttgaccgaattattttggaaactttagactcaaattttagaagtttgaaagagagaaaaacaaagagctacctagagcctgggttccaacaggcttattcggtgaccaccaagcacattatgttgtggagggaggtccacactccacacaacgaagaagtaaagaaagccgatgcgagcacggaggaatgcatgtgatgagcactaagtggtccttggcacgatgcgagcacggaggcggttcttgaggacgatgacgctcgctagctccggtgtcatgtcgacgccgtcctgccctggttccggcggcagccactggaactccttgacgaggctgcccacgaagtactcggcgtgcagcgtggcaagcatgtggcccgggcacatcctgcggccggcaccgaagggcgccatcttgagctccctggtccccgtgatgtccaggtcgctgccgtcgccgccctccaagaaccgctccggccggaactccgacgcctccgaccacaccttctcgtcgcggcccaggtcggcgatgaggacgttgatgacggcgcccttgggcaccctgtagccgcccacctcggcgtcgctc

SEQ ID NO: 1608 - DNA, 677 bp, Avena sativa
atcaaccagagggacaacaatttgttgtcccgctgttttgtgctgggaggaaaaacccggcatggctgatgctagttccaggacagacacctctatagttgtggacactgacgataagaatcaaaggatggaaaacggacaaaatggagctatcgtaccttctaattcatctgatccatctgacaggtccgacaggcctatggaccaaaaggtgttacggcgacttgcccaaaatcgtgaggcggcacgaaagagtcgtctgcgaaaaaaggcatatgtgcaacagctagagagcagtaagctgaaactcgcaagcctagagcaggagctccagaaagctcgacaacagggaatcttcatttctagctctggagatcaaactcatgctatgagtggaaatggagcaatgacatttgatttagaatatacgcgatggctagaagagcaaaacaagcagataaatgagctcaggactgcagtaaatgctcatgcaagtgatagtgacctccgtctcattgtagatgggataatggcacattatgacgaaatattcaagctcaagggtggtgctgcaaaggctgatgtgtttcatatgctttcaggcatgtggaaaacacctgccgaaaggtgctttttgtggctcgggggtttccgttcgtctgagcttctgaagcttc

SEQ ID NO: 1609 - DNA, 297 bp, Avena sativa
tcagaatgggttataaagtggatctttggaacccattagaaagcacatggtgaagttttcgggcgtcaaatttatgaagtgctctgtttttctgtatgatatggtgccctgtttccagtttgcacatagcactgagaatttcaaacggtccacggttcctccacatttagcatcctaacctgttaatcatcttcagactagtagctttttgcttcttgctggtggcattaccttgtgcatgtgattatatgatggcagctgctgtttggcatcttgcgcggttatgcaagtctccct

SEQ ID NO: 1610 - DNA, 369 bp, Avena sativa
tttttttggtaagtgaataaagggaactagctatccaaaactgttcaatccctggacaacaagagtctattacaacaacttcagtttttaactgtaccaccagaattaccagcagcaccacgtgctaaatatgtacagcattgacaacacgtgagtttttgcagcgttacacataatcgaacaacaaaaaatggtaactgtaaccgaacacagtaaagctgctaaatgctacctagcaacaggactagcttaacaacaggtgaaactgactttcatggaacaagaacttgtacattacccattgaaaaaaaaaggttaagaatgacgacttgtgtatcaaccggaacttccacaggaactaccaatgtg

SEQ ID NO: 1611 - DNA, 291 bp, Avena sativa
atgcagatgagggaggcgacgtctgagatagccgacgagcgcttgtcgaggtttgtgatcaaagagtgccatactgacatacacgatcaggccgaatgcagagaacacgcccaccagcagcagggacaccttcagcctgttcttggtgtcggcgtaggcgatgaacaccgcggtgtaggcgagctggaaggcggcgccggatgggtgttgacggtggcgactagggaagacgccgtaggagacggaaggggagggcgtaccacacgcagacgaggcagctgaggagcgagt

SEQ ID NO: 1612 - DNA, 849 bp, Avena sativa
gcacgtccttgtgctgcaatcatgccttcatctcctcatcctcttcaatcttgggcgctagatagaatctaatgtaacccatctcaccaatcttgtactcaaccaccactggcagttcagatgagagactgatggtgacttggtccgacagtgggcttgccttggtgaaggagttcatgtacctcagagcaaaggtcagtgaaactggctcttgcatctctataatggtagaatcctcgggcttgtcaacggtcttgttctgcctgcagacgatgtttgcggttccaatgtctcctgcagtggagaacttgacaccctccttggtgacagagataataacggtgtcaccgatgctgctaaggtccttgcagatcctggagaactcggaggagggcatgcggacgatggcctggtactcggagtcggggatcccgaggtgctcgctgtcgatgtccatgagcttcatctcgaaatcggcaatcttatcctgattgggggactcgaacatgaaggtgacggtgtcggagccgtcgtcggccttgatggtgatgatgtcgtcgttgcccgcgcagcggagcatcttggacatgttgccgaggttcatccccatggagaggttgcggtcgcagcggtagtgctcgaagccctcggagcggaggaggagggcgacgagggcgacgtgggaggagtccatggcctggagcgagaacccggtgccggagcagtcgaagttggcgtcgttcaccagatccttgatcgcctccagcaccttcttgaggaggctcccctgcaccaaccggagttccagcatctcggcggcggagggcggggcttgcggtgttgggggag

SEQ ID NO: 1613 - DNA, 681 bp, Avena sativa
gccctgaatttgactgtgaatatcacgagcatgtcttagagagcggtaattgatgaagttctcccagcaccatctgttcaaagccttctccattgttttttctttggcatttgcatttttgctcttctccaaacattctgcagcagctcggtatacattcaccaaggttatatggtctccttctgtgctttcaaaactcttccgagcagctcttgcctcttctaacttctcgcgtggggtgaagaaaattgattccactgaaagcatagacacaacaatcaacatttcttccaagcacttgaattcgcttgatactatcaacgccttggagtacattggatccaaaggcagcctagccatctgtttaccaactggatctgacagcttataatcatcggtcaaagatccaagtaaaatcaattgctccaatgatttcaaaatagaagccctcgatggtttctccataaaatcaaaacctatgatatcatcaattccaagagctttgagctgtagtacaacattcgagaggttacatcgtttaatctcaggaacggtagattccgccagtttatcaaactcgcattcttggaacaatcggaagcacttccctggcccctccgtccagcacggcctctcctttgaacgagcctgtgctttagagactggaatgatgattagaga

SEQ ID NO: 1614 - DNA, 743 bp, Avena sativa
tacgttcaacaagatcctatgtaaatttgcaaattacatacacatacatagtttccttttaaacttctcaaagagaacatatggatatgctgccattattctgccttgtcacgcattggtaatgcatctacttcattttgcgtgcacaaggagagtcaaggagctatagatacatcaattttgccattacaactacaccaaagatacaacatgacttgtgtctaaaacttacataattaatagatatcaatatcttgaacaacagtatatgaaaatggaatggaggatatagacacaaatggagcagcaagcccaggcaaagcactccgaaaccggtacccggactgttgaattagttttgggctgaggctgcttggttccccgcaggaaatgccgacattgtcgtattattctcttgacctgtgacgtccgcactcgcgtgtcgaataaactcctcaggtgtcatgtgggtgccatggcaagcacatacaatcttcacttcgtttttgccaaaattgtatgttacacccgatatggttctgccatttggtccactcccggtggtagaaacccagggaagatcagggtatgatccggaccctccaaatttgacatttggggcgatgcccggccttatagcagaacccataagaggtaataccctatccgtcctcttatcacccaccacatgaacagaggaggatgtgccagcctcttgaggtttcttgccatcatcaggttcc

SEQ ID NO: 1615 - DNA, 927 bp, Avena sativa
agtcgtctgttggagtcacagataattgtatagaagctcagtcatttggtggcgctaatgacatgacagttgacacaaccattgcctctgcagaccaaaatggaaaggactcgacagctccccctgaagtagatttgcaacctgaaacatctaagcaaggacgacgccaaccaaatcggaagggtagagcaagaggtgtgaaaaggacaaattctgttcttgcggtagttgaagatgctaaagtaatacttggtgaggattttgatgagaagaatgacgaccaggaagattcagttactgttggtggcacaacggaagcggcgccttgctggagtagcaattagtgagcaagacgaagaaggcagcgaagcacagtctgaaagtatttcagttggtgggcagcgtcgcaagaggcggcaagcagctggcccatcgacacaagccccaggtgaaaaacgctacaacttgagacgcactacagttgcaaaagcagctccaaccgacaaaaagaaagctgcgaagacaggaagaaagcagacggtagaagctattgctgatgatacagaaggaacctctaaagtcgaggaacctgctgctagcaagagggcctctgaatcagctgatggtgcatcgcaattgcaagagttctcccaggctgaaactgttgatacccatgctcctgctggtgaggagtatggtgatgttgttgatggtcaagatgggatgcctacgacaccgtcagggagtgagcttgctgttgaagatgatgacgaggacgacgatgattcagcgaggcggaacagatcaatcgggaaaacgctatggtctttcttcacgacatgacaagagttgcagaaggtttagggttgtttctagtgttcttctgttttggtattggtgtatatgccattcttgggactcactcta

SEQ ID NO: 1616 - DNA, 838 bp, Avena sativa
ggcgacggagaccgcgcccgtgacggcggagaagtcgtcttacaggtactgggtgcgtgaggccaccggcgacgcggcgccgctccctgtcccccgcaagctcgacgccgccgccgccgctgccgccaacggcgccggcaacggtaacgggcagacggccctcggctctgtctggaatcaggccggaacatgggaggaaaagaacctcaattcatgggctagtagtaggataaaggaattggtgggttctttaggttcattggatttctccacagggaaggcatccattgacgaagtgtccaaatgctcaggcgatgcatatctagtaacggtccgtaataagaagagagtagggtataattatgagttgagcttgagattcaaaggtgaatggaaaatcaaggaagagcagaagaaggtcacaggccatatagacatccctgagttttcactcggtgagcttgatgacctagaggcagaagtaaggtttaccgacagcctcgaatgggacgacaagtcacggatctccaaggatgtgaagtctttcctttcgcccatcagggagaagctgcgcacattcgaacaagagctgaaagataggtagaactggctatgctagcaaagttacaggccctgtttccccagtgtttgctgtcattcttgtagctgagacgatctgtgttggattaatcagttgtctaagactcgaggtcatagtcttgtttctccagtccagtgtaactgttatacagtcaccagtgtgtttcctggtggactgagactttaattatgtgaaccagtgctacgaacttaaacacaaccagatgaatagaaaaaa

SEQ ID NO: 1617 - DNA, 395 bp, Avena sativa
tggttatatattattcacttgtcaaaagctttcgtggcaccgatcgatcatccgagactgcacctggcacccttaccgcccaacccttgtcagctcatcctgggacgggtatgtggcccggtgggaggcatcgggagacaaggaggacccctcgatgctctcgttcgatgagcagaggactagcccttaccaccagacatatgggttgtcatttgctatgtagtgaagttcctgaagccctcggcaccgatgatgtacggagacaaggcaccaagcggctgggcgatgaacctcgtgtagggtttgtggtataaagcgttcatgtcaggcaacttggttgctcttggctctctgatagaaatgtgaaagggttggaacatgatgtggccctagct

SEQ ID NO: 1618 - DNA, 320 bp, Avena sativa
taccatcagacaatccataaaatactactccctccgtccagaaataactgacttgagtttgtctaaattcgaatgtatctatatactaaaatgcgactagatacatttgaatctagacaaacccaaatcaattatttctggacggaaggagcactatatcaggtctaacagcggggcgcacaaaaatctacataacaatgatgaaaaattaatccaaagataaacatcagccgccatcggcttattgcttgtttcgaaaacgaatcgcttctttgctatttttttcttcctaggcagaaccctcttctcacatcatcatg

SEQ ID NO: 1619 - DNA, 476 bp, Avena sativa
cattgagagagtagatatatctgttgatggaggtaaaacatgggttgaggctcatagataccagaaaagcagtatgcaatacatctctgatggacctcaaagtgacaagtgggcatgggttctctttgaggctacgttggacataccagcaaatgccgagatagtagctaaggcggtggactcagccgcgaatattcaaccggaaaaagtggaggacatatggaacctcagaggaatcctcaatacatcttggcaccggatcaagatacaaagttcaagatccaaaatgtgaaagaagtatgttgctgtgtctagagcacgcaacatgctgttccacgcctccatgatagtctaagaaataataagccactggagtttactttctccaattttcatttagactgtgccacggaactatgtttgagttcttttttctgttaaccatcagtgttacaatactcctgcttgtgccagat

SEQ ID NO: 1620 - DNA, 625 bp, Avena sativa
aatacaacaaggttactgatcttacggataggaagcaggctgttaagatcactattgataaagtacaggctttttagagagtactacccctcgagcaatgatccccagtactatcctggagtgtgtatgggtgaaagataaatttgttttgcatgaaaggaccaaagctagctgtcagaaaacccaagatgaggatcacaaactgtattctccagatttatccatccagtatgagacccttggacctgttagtgaagagatggagaagcttgatggatcaaactccccagccaagcaacaacatgcttctttggcagaccaaccagataaagccatccatcacggccatgctggagattctcatagtgggaggcaatcaccagatgaaaacactatgggtactctttctgacgggcttcctgtgcctgtgcctgtgcgtttggctccacgcacagaggtgaagcctgatacgaagaagagagtggcattcatcgcagtggggaaaccaaaagttaccgtgacacgacctgaaacgatatcatcggtagtaacgaagaaacaaagagtggatattattccacatgcccactgaatatcgtgctttgtaactttgaagacaactgat

SEQ ID NO: 1621 - DNA, 964 bp, Avena sativa
agttgcaatccatgaagccatggagcagcagaccatatctatcgccaaagctggcatcacaacagtactgaattcaaggacctctgttcttgcagctgcaaatccaatttcagggcgatatgatgatcttaagactgcacaagataacattgatctgcagacgacaatcctttctcgttttgatcttatctttatcgttaaagatgtcagaatgtatgagcaagataagcgaattgcaaaccatattattaaggtgcatgccagtggtgctcaaactaataataatttgaacaagaacacagaggtcaatgaaggagagaattggctgaaaaggtacgttgagtactgccgcaatacatgtagaccacgcctctcggaaaaggcagcagagatgctgcagaacaaatatgtcgagatcagacagaaaatgagacaacaatcaaatgagacaggcagagctgcagccattcccatcaccgtgaggcagcttgaagctattatacggctgagcgaatctctcgcaaagatgagattgactagtgtggctacaccagagcatatcgaggaggcattccgactgttcaacgtctccacggtcgatgccgcgagatccggaatcaacgagcatctgaacctgtcaccggagattgctaacgagatcaagcaagctgaggcgcaaataaagagacggatggggatcgggagccacatctctgagcggcggctgctggacgagctgagccggatgggcatgaacgaatccatcgttagaagagcccttgtgatcatgcaccagagggacgaggtggagtacaagcgggagcgccatgtgattgtccggaaggcttaggctggactgaaccgatgggacagaggaaatttgctctgagcatgtgattgtgtataagtagtgctgacaatgcaaacccgttttggaggaatttgctgcatcgttgagatgggt

SEQ ID NO: 1622 - DNA, 613 bp, Avena sativa
tgcagatttatattcctggtgcaaatgatcatggaataccctccccgttgaatataccattgtcatctccatctccccgggctccaagggacaatattcgtggcaatggttttattcacacacaagacaataaacttgaattcgggactttgggggcattgcctttggaagctaagagtacctcacatgaccaagctaacagatcaaattctgctgccaacggtcaaccttctatacctgtaagccctgtgtctccagcaccaaatcctggaaagggttctaatcgtataaggaacgctgggccatatcatctcaaggacaacggcgacttcccgccactctctagctgacaggaccaaggacgtgtgaatccaagagaaagataccgatacaccgcgcacacccagcgcagcaatagcagaggggttactctacaaaataatcgccatcatgtacatcctgagtttatacctggcctgtgctgcttgctgtgactaaaatctcaccatgtccccccatttccctcaaaaaagagagaagaggaaaagaaagaataagcacattgtagatactttgtctgggggagaaaagaagctagcttagcttgtgtatg

SEQ ID NO: 1623 - DNA, 522 bp, Avena sativa
ggcaaggtgatcgccatcagcgacgtcacaggagccgtcaagaacatcaatggcctcgacatcgccaagctaatgaagcactcggcagagaaccgcgggatcaacggcttcgagggaggcgacgcggtggactcgaactctcttctcaccgaggagtgcgacgtccttatcccggcagcgctgggtggagtcataaacaaggacaatgctaatgacatcaaagcaaagtacatcatcgaggctgccaatcaccccacggacccggaggcagacgagatcttggcgaagaagggcgtgctgatcctgcctgacatcctggccaactcgggcggcgtgacggtgagctacttcgagtgggttcagaacatccaggggttcatgtgggacgaggagaaggtgaaccgggagctgaagacgtacatgacccgcgccttcagggacaccaaggagatgtgcagcagccaccactgcgacctccgcatgggcgccttcaccctcggcgtcaaccgcgtcgcccgcgcc

SEQ ID NO: 1624 - DNA, 707 bp, Avena sativa
ttttttttaacgaaatcttccaacatctgaaaagataaatgtttaacgtattaaattattaacgcatgtcgagatcacagcccaactatggatattttccaagttctaactcacacattttgtaaatatcttatctccagatatttttctactcatgaaacgaataataaccctaagatctacctcggaaaaaaatttgaatgcagatatttatgctggattcaggtcttgaatgacggacgaagtatacaaatgaagtagtactggtacgaagcgtcacctgcttcaagctataaccaactctctttctgttgctacgtatttgaaaaatagcatatgtcttgactcttgacttaattatatgtactccctctgtccagaaaaatttctagacaaagagagtacattcttctttccgaaaatcactcacaagtcacaaagttcatgcccacttgctctgatgtctcaccagcattcattgtgcagttcccatcttggcgtccttgtacaactgatcgacccgatccttgtaatatttaagcagctggggcctcttgagcttaaaggttggagtgatcaggtccttgtctatgctgaatggcactggctccaggtgaattgccttcagcatctcaaatcctcttaacccgagcttcttgccggttttgttcagctcatcctggatgtatctcttcgccttcgggtca

SEQ ID NO: 1625 - DNA, 891 bp, Avena sativa
caccacctacaacgatccggatggctgccctgggcgccaagggcaagagcttcgaggccgaggagcttctcaacgccatggccgccaacggcgtcccgcccaaccgggacagcttcaacaccgtcatctgggggatgtgcaagcagggcgaggcgggcgctgcagtggccctgctcaaaaggatgcccgaggtgccgaggcccaacggcgggaaaggtgtgtcgcccaactttgacacctacaagatgcttcttgaggtgctggtcgagaagcgcatgtttgcttctgcactggaggtgtgcaaggaatgcttggccaacaagtggacgccgccgttccaggccgtcaaaggtctcatcgtgggactggtgaagaggaggaaggtgaagcatgccaaggagatcggcatggtgatgaagaaggtcgcaaagggcgacgccaaggaggagtgggagaaggtcgaggctgctgcattccaactggcgctcgctgagaacaaagcgcaggctgcgtaaccagatgagtcgttgtttatgtttttcacttgaagtctgttagacacccgacgtctcttcatgtgccagctctagtatttccactggttcagcacacaaaatgtattttttctcatataaggcatttccattggttggttcagcactgtttcctcctcctgtgggttgccatgtaactctagttaccagtttatcatgttggatgatgccattcttcctactagttcttttctgctgtccagatttatatgttgtactattgaccttgtgaaactagctgggacacatttcgatcaaggtctacatgaacctcatagatgctgcctctgcagttattggccatctgaatgcgatgtaatctgcaggcttaatacat

SEQ ID NO: 1626 - DNA, 636 bp, Avena sativa
aagcaccatcaatccagaatttaagcaaatcattcgagctgaaggagaaccccaaagagaaaaaagacccgtacgcaggagagattggcttatactggtctggacgataaagctaaaaagccagaagatccttctgcagagaaggctaaggcgatagacggtcaagctaagtcagaagacccttatgctctggctacggcggtagaagctatgtttccttcagcagagaaggttgggaagatcggagatgtaaaccctgttcaagattttgaaactatgctggcagagagatctagctcggcatgggttctgaaggcaattgaagagatgaagaattacacaacggcattgatacaaaattcccctaaaggagactattaccaaaaggcactggagtgctttgttgctctgcggaaagcttgtataatcgaacaggagccgaatgaattcaaccagtttgtgacgacactttacaaaagattgaagaatgtggatgatgttgcaaagttctttcagcttcttgcatccaagaatgtttgcttataagcaaagaagaagcatccgacagcgatgtgaccgaagagatggcgagaagcttcttcttgaaaaccgaagcatcctctcagtagcatctgt

SEQ ID NO: 1627 - DNA, 655 bp, Avena sativa
gagatctatacagctcccaggcagaggagttgaggagggaaacaccgacagtgaacaagctattaacccaaccgaaaagaatcaactgattgcgagccaataatagtacctgccctgcactgcactgcagaaatggatcgagctcgtcgtgggagaggggatcattgggccacggcggcggcccgggactgcaaggtgatgctcctctggctgggcatggcgagcatggcggtgtgatccaggaagtccttgagctccaccacgttctgcagtatcctccggaggtcctccgcgcgcacgaagcccgccgcgcccagccggcgcacggcgtagacgtagatggtgaggcatcctttcctgaacttgaaccgggccatctcgctgcccgtgaggccccggatgagcttcttgttgacgtcccccagcgggatcatggccggccacagctggtccacggcgcacttcatggcctccgactcgaagacgaagagcaccacctttgacttcttggtgcccagccccagcgtcagcgtgtgccacgcctggtgcgccaggatggtgaagctggtgggcatgtaggcggtggtggacgggaaggggaggctcgacagctcgctcaggtacgacggcgggatgtccagcagccgcagcagct

SEQ ID NO: 1628 - DNA, 791 bp, Avena sativa
ttttttaaactacaaaacatcctatagtatcaccaaatgatttgaaagactgcgacatccaggctcacttggcacaagtaccattcagggcaatattcagcctaaacattcttagggtaacccactccatccaagtcttaccaggtgtttgtctaggtaataacagtgtgaaattcacagcttaagaacgtagttcatgcacgtagataaatcactagcgatgttgcctaacattgttcgcgtaatatatttctaggataacgacgaagaacctccgaaactattgcagaagggaaggcatcctattccagggccctcctagatggtattggcctgtaggagaccatccctgatctgtgcagcgacatctttgacggctccaggaccatgggggatgaacactgaagaggacttggacgaggccccaatctccttcatggtgtcaaagtactgggtcaccagaaccatgtccatgatgtcctttgcagtggtaccagggacattctctgagaaggcgaggacgctgtccctcagcccatccactatggcctgacgctgccttgcgatacccacaccagccaagtacttggactcagcttctccttcagctctcttgatctgaagaatcttctcagcttcagctttgtcattggctgctgacctcatcctagaagctgcattgatctcattcattgccttcttgacatgcacatcaggctcaatatcaactatcagagtttgcacaatctcatacccatacatagacattgccttttcaagctcatcttcaa

SEQ ID NO: 1629 - DNA, 696 bp, Avena sativa
ctgtggctgatgttcgaattactgatcagaagttgcgcctctgtgatatatgtggagcatttctgagtgtctatgacaacgatcgacgtcttgctgaccattttggagggaagctacacttgggctacatgctgattcgtgagaaactgaaagaactccaggaggagaggaacaaaagaaggcccgacaaatctgaagatgacggacgatcaagagaacacagcaaggaccgcaatgggcgggcatccagggatagagatgcagaaagaaaggacagagttgaacctcgagaaagcagaagagaccacgatagggatcgtgacaggcgccatgatagggaccgtcgccatgaccgtgacagggatagagactatgaccgctcccgtggccacgattcgagaagaagggaacgctctcgatccagggagcgtagcaggcgccctgatagatactgaatcggttgctccatggctggctgattccagggtgggtactctggtcttactacatggtagttactgtgtttaagatatggttgagtttcgctttgtactggggaaaggaggaatcgttatgtctttgttgctgtactgagtcaaaaccttgtgctttctgtatctttttgtctgtctgacctaatgtggtgtagcagaatataccgttttatatgttacatacaatttgctagaaaaaaaa

SEQ ID NO: 1630 - DNA, 749 bp, Avena sativa
  modified_base (306)..(306): a, c, t, g, unknown or other
caacaatcgagttctattgggctcctttcctagttgagtcgaactcagatgatccagacattcacagcatccccaaccgcatgatcatgccaacatcgatcaccaagcatgcagcaaactggattggggtggactacttgattttcaacacttacatttggtggatgaacactccgaagatgaaaattgtgcgtgacttttcaaggaagccggtcaagtatgatgaattggatcgtgtggttgcataccgacagatcctgaagacatggtctggatgggtagaagagcatgtagatcccaaaaaanagatggtcttaattcatgagcgtgtcacccgtacatatgcagagtgaaggctggggtaagcctaaccgcataaaatgcttctccgagacacagccagcgctgaattacaacaaaacattggagctcggcactgactgggatctgttctcagcatctaatgaagtgacgaaggcgatgaagaaagtgcctgtgcacttcatcaacataactgcattatcagagatccgcaaggacgctcacacatctgtgcacaccctgcgacagggcaagctcctgacaaaggagcagcaggccaacccacgcaagttcgcagactgcatccattggtgcctccctggggtgccagacacatggaatgagtttatttatggccacattttgtcgagccctcaacagcggcagaccgaggttcagtctcaaagataacagtgtatgatctgctt

SEQ ID NO: 1631 - DNA, 935 bp, Avena sativa
acacctggttatacaagtggtagaaaacactctgtgcagcaatccaccagagaacattggggccaacttctttaagtgccgtttgccaaccagcagcccacagtttgggggccttccatagcgatagcaaatggtgtgagtatgaccagggacataattgaaaggcaagcgtagtaattcatgccactgacagacttccccttcatgcctctcttcgagaagatgttgcggaaaacaaatgcaaggtttgatatcatggcacccataaatccaatcatattaaagttcagctctgtggcagcagctaaaccacaaccaccaatgatcgggagaagagaaaggtatacaggcatcggaaatgactctccaagaatgaaccttgacacgagaacactgaatgcaggctcagcactcttgataatgtgtgtgaatgacactgccacctttgacatgctcactgttgcagcaacatgcccaattgtatgagctacggcgaccgggaaaagcgctttccagaaatcttcgtcagtattgggggcctcaactaggcgggtggcccatgagaagagcatcatcgctgagccgcatgcgagggatagtgtggaggtgagccagggataggggaaagcattgagaaccttcttgttatagatgttaaagatgacattaagcgcccaccacgttgcaaaatatattgagatcttcagctttgctgctgcttccgagggggctggcaccacctcagccttggactccttgtcatcagccgcagaagctgcacattggaattcaagctgctgcctccgaggcttgagctcagaaccgtgtggccattgagcggtgcaaggtagagcggtctgagggagcaggctacagatttgttcagtttgagactggaaacagatggaaccagagctgatttagaccgtagactg

SEQ ID NO: 1632 - DNA, 633 bp, Avena sativa
tcaggtgtgtttaacacactgctagtatatatttacccattttgaaatttgaaaaccttcactcactattgaaatttcatgcatggtcaaacagttctaaaattgtcatcgagaaccaattctgagatcaattgcagtttctaataatactagttcaaacttgcagtggaaagaaaaggagtttcttcaaattaggtactgcagagtttgctggaagatcttatcaaccacaatgctgtaggctttttctgtaggatgaaagctgtcccagaaaatataatcgtacacatttggacatgcatgctgatattgaatgaatattgctgcatttagcactgtgcttccacaacatccctctgttacctccctgaaaccataaaggcgaggtcgttgaatgatatcaagcatattgtagtatatatcgccgtaagcgaaccttgtgtcttgcacatttctttctgcattaagtcgatctatttcctttgctattttagaattgaacaattctgctgcttgattccgcaatgaatcacattctctcgatccttgttttctttgtgaaggaacacatccaattggtggaattccaatgaatccaatcctctttgcacccatctcatacattacacatta

SEQ ID NO: 1633 - DNA, 800 bp, Avena sativa
cagcaccacaacatggagctcaacctggaggtcagcctggcactggtacttcaacttcaggaggagaaccgagcgagaacgtgaacatgcgccaagcaaaaacttgaggctgccgcttcagctgcttccttatatgggagatcgtttgcttatcctccagcgagcactttgaataggcattcaggacctctgcatgctacaccaagtacttcacaatcaggagaagcaagtacttccactgaccatcctttagaacctcagcctttttattcacatggtccagttggttcagtaacaagcaacaaggatgctgaaaatgcactacaaaaggcatatgaaaaggctatcaggagccagatagaggtgttgcaaatccaattgcaaatgttgcagcaagggggtaccacatcggtagctaacaatgacagtgctgagcatgccgggaaataaattaactggtaaaaaggtatctgcctgaatcagaaactcagtagctgcatccgaaagcagttccggtagaagtttgtgatctttaccaactgaaggttgggaggcctctattccccactagcttcgaagattccttccttcacgacatatttggtaggtcaacgagttgtgtacaaactttcaaaatccagctgccttatcaaacaatgtttgctcagtcggagatagtcttgctacttgttgatatccgatgtgaggctctagctcaagcgggagaacatgtttattccacaatgtctccaattcccactgcagttgacatagttatgtgaatttgtcaaccttaaaaa

SEQ ID NO: 1634 - DNA, 827 bp, Avena sativa
tcaggcaggtaagtaggcatctgtgatgacctcctcgtctaacagtcactcagccttgtgttggtgtgtgatccaacaactgagtggtcgcatattttctaaatttccttaactttccaagtttcaaataacaagacatcaatttgtgtagtccatcggcatgagaagtagtcactttcatccagatccttagtagtgtccagagcagccagcaggcaatagcgtaacaccttcggttgtccgccgcgatgtgcttggacctctcagtcgttcgaccgccgccttcatttcctggaccgtgcaagaggccatgtagtggcatgagaaggcgttgcccgtgcccggggtcgaagtgaactatccttggccgagcgatgagagacaatgcgaaacttcttggcattcttcctcgacatgccataattaaggcattgttgctatcatgcgatcgtgcgacactcctctataatatctgctgaagcatagtctgttgcacgaggttctcaaggtgaggaatgagaatcgatgatgatggtgagctgctattgcagagttcctttagatgacgactgtaagggtaagcaggagcagaagaaataacagggcaacaaacagcataaggtgcagatcagacatgtgtaagcatgccgagaagcaagtgcagacctcagaagaaacaggtagcgcaacattggtcatagcaaacaccgacagatcctgaggcagtgaggtctgataaaataagatgctcaatagttttagggcatctcatctcgtaagcacctaggcaatcagccaagcattcataccgtagcctgttatttctc

SEQ ID NO: 1635 - DNA, 870 bp, Avena sativa
cagctgagtctgatcctcctcccacacctacgcaagacaaggaagatgtgaagccagctgagactgaggcccctcccgcacctgtggaaagcaaggaagatgtgaaaccagccgagtccgaggcccctcctgcacctgtggaaaacaaggaagatgtaaagccagccgagtctgaggcccctcctgcacctgtggaaaacaatgaagatgtaacgccagccgagcttgaggccccttctgcaccagtggatgacaagaaggttgatggaaaggcagctgaggccatcgtcgctcctcctgcaagtttggaggagtggaagactgaggaagtagctcctcctgcaagtttggaggagtcgaagactgaggaagtagcccctccagcgagcaacccaactgaaaactcagttgctgctcccagcgagcctgctgttccccctcctgctccagaatctgaagcgaaagcagatgctgccacagtagccagccagcagcctgaggcggccaccaaggagtcgtcttctcctgtcaacaatgggcagctctctcccggggtgaagtgcacctgatcctgaagcagctcctcccccttctccgtgccgctgtctcctaggaccattctcattgtaatcagtctccgtcgggtaagcatgttaatttagccagtctgacgttactgggtgatgagcaccggtaagtacgtaggctctgcatttagttacattttgtatggccggcgtgggtggccgccctatgcggccctccgccattgccccgccggcgagacatacatgtaccccccaatccatttctgtctgtttatctaacttgtaagctcattattaatcttagggacatatataccgctgt

SEQ ID NO: 1636 - DNA, 620 bp, Avena sativa
agtatgttaagttatcatccattttaaatgtaccagccaactgacataataaaacgaaaaggtgaaagccacagaaattactctggtggcaggttttttctaacgatagttccatccatcacagatttgtctgcgagatgcctgactctcaagtttcgcgaaagggattgaaaggaagaaaccgctcttcggttgtaaggaaaagcatcatagtttcactggatcgcggaagccataggtgatggtcaagcagccttcccgggaacaatccagtgtagtagctgaagcggtcagttatacaccactcggtttacgcgtggcttcaccggggtcttggaagggcttaccctgactggcagtgtgcctaaaatcatcccactgcaattcagagccaggatagcactttcagcattgacaaactcaacaaaagcaatccttgttgaatgtacattgtcgcctagaagtctcaaacgagagacctcaccgcaaagttcttcaaagaaaatctttacatctaattgagtaaccttcttatctatatttgtacagtaaaccgtccgcatgaccatttccttctcgtcctccgttgttggaagaaatcttggattcacaggtaagat

SEQ ID NO: 1637 - DNA, 646 bp, Avena sativa
ctagatcaggtcaggttaaatcaggaaaatctcgtaaatggggcgtcaggaaagcaaaagatttgcaggtggaggggtcaaagaacagatttcctttgtatgctgctgcatttatgctcccggttatgcaaggatatgacaagagaagccatggggtggacttgctcaatcgggactttgttgtcctggtaaattgatatacatgcttggtgtctgtatgaagtgcatggccatgcatccggaagcatcagctcttgccccggctcttctagatatgataagatctagggaggtttcgcagcatgctgaagcatatgtgagaaggtctgtgctgtttgcagcttcttgtatattggaagctttgcacccgtcatatgtggcatcagttcttatagaaggcaaccaggacatctctactggtttagaatggatacgcacatgggccttgcgtactgccgaagctgatcctgatacagagtgcacatcgatggccatgacctgcctgcgactccattctgagatggtccttcagacatcacgctctctggaatctgcgcaacattccaatgctggcaccagggccctatcttctaagctcgataacattataattccatttgcaaacatgatgtgaacttgatatagt

SEQ ID NO: 1638 - DNA, 867 bp, Avena sativa
ttgagtggactcagtgcttgtcttgcagctattgcgtgttcgttacagcaaccaccccttcgacctctgggatatgctgctggtgatggcgcttctgtcatcataaagtccgtactggacagagctacagagcttttcactgatcagcatgtggcctctgcctacagcatgcagaaccgagctctatggcaggcatcatttgatgccttcttcaggctgcttatggattattgcatgagtaaatttgatactgtgattcatacagtgcaacctgcagcagcagctgtgattagaagggaaactccagtggagctgctgcgtgccagccttcctcacacaaatgagtatcagcgcaagcagttgctcagttttgctcagcgcaatgtgcctgtcaatagctctagttcttctgggtctggtaatgtaccgatgacatctgaatatgtccagagctgaatagaagaccaaagctgcttttcgtaatctatacacttggttcttgcgagtggtgggaagaaaggctgctctcggtcaaaatacaaaatatggtcttggaccacttgaggaagctgaaattgatgcattatatttctgagattgaggtagagatggctgcgaagaatggcgctcgagtaaaaccctgatcactgaatgtgctattccttcattctgtcagccaaaaacttttagtcctttacctgttgcatcccgtagcatgatgtaaacttgctttagacgtggaagttattcgtatatgaattttgtttcttgatggctttgtgagctgctgttcttttgttcttccagcgcttgaatcggctcaaattattagtttgttactataagccttgcatattaacaagatat

SEQ ID NO: 1639 - DNA, 619 bp, Avena sativa
atccactgctcatcagtacacgttttgccgagacagaaaaaagttggagacaaccaccagaaactcctctttgctaagaatcctcactggcatccggaatgcgggatacaggggtacatgctatatatctttcatgaagatactcgtgggatttaagtacaaacctgttcctattagcaagcatagaaatggagtggaagatacagatttggtgctatgccaagctctactgtgccgtatgtagctcaatacatgctgacgcgaaacgtctctccgctgacaaaactgaatactgcgagcacctaacaaagcaaactacgcagggtattgttccaaccttctgatcccatcttattcagcatcacagtgaagagccgagatgaagttggagacagtttcaatgtccggtacatgtccatgctcctgggtgtattctaagggttaagcggctcatcttctgctgtcatctctgtggctttagttgatctctgaaggtcagacacaaccatgagccgcctctgcaaaattgctgcgatgaaaaggaaaatagaacacatgccaaacatgacagtgattgggaaggcattcacattgtaaagcaccacacatacaaacaggt

SEQ ID NO: 1640 - DNA, 518 bp, Avena sativa
cgtcgcctatggcgggtacgacaacccgaagctgacgtacagcaaggccgtgaagatgtggcagggcagcaacaagatctccatcctcagctccgcagtcggcctcgctaacatggggacgcactatgagacctggaacgtgggcgttctcgggccggtgacgctgtcagggctgaatcaggggaagagggacctcagcaatcagaaatggacataccagatcggcctgaaaggcgagtcgctgggcgtgaactccatcgccgggagctcctccgtcgagtggagcagcgccagcggcgcgcagccgctcacatggcacaaggcctacttcgcggcgccggccgggagcgcgccggtggcgctggacatggggagcatggggaagggccagatctgggtgaacgggcacaacgccggccggtactggtcgtacaaagcctcctccggcagctgcggcggctgcagctacgccggcacctacagcgagaccaagtgaccaagacaaactgcggcgacat

SEQ ID NO: 1641 - DNA, 674 bp, Avena sativa
tggcctctgccccgcggaatcaagtgggctcgggccagcgccgtccgcagctgattcgggatgggcagcagcaccagcaccttcgtcatcaggtggatcaacttcttcaccatgatactggcaatactggtggtgggttttgggtttttggatgagcacccacaacgatgaatgcagacggtcgctcaccatccctgtcatggctctcggaggagtaatttttctcatgtcgcttgcgggattcatgggtgcttggaagaacatatcttgcttgctttggacatatctaataatgctattcgtgctcctggtggcaatcatggtgttcacagtgcttgcgtttatcattacaaatactggaactggccacgctgttcctggggccagatataaagagtatcgtcttcaggactatagctcttggttcgtcaaaacagcccaatgacactgaaaaataggaaccaatctgagaagttgcattgtgaaatacggatgattgcagtagcctatcaaaaagaatacaagactctaaaacaaatacaaacttgctgatctgactcctgttgaatctggctgttgccgcccaccaactgagtgtggatatccagctctgaatgcttccaactttgatctgagcttccatccggtgagcacgaacatcgactgcaaactgt

SEQ ID NO: 1642 - DNA, 563 bp, Avena sativa
cttgttgcactgttacattttccttgtttccaagagagattgcttcgtcaaatgcaaatatcagctcaaatgctgttttacagataccctcctcatccagagcagagtattcaggcacaagcttggatagtagcctcaatgtgtccagatcttcaagaatattactctgcttgttgtgataaggagcagatagaggccttcaataggttgataaacataacgaacactttcagtctcgagataagtgtgttgtttcccagttccaacaagtttagggaatgctgcaagtaatccttctatccttattcgagacatgtcaacatattgccttgaaacaagtgcttttccagacttcgagatgatggaagcagcaagaaccaccattttgaacagctttgttcaccgctcgaactattcaaaacaattaagcaaattatgcacctccacgagcagcgagatgcgccggaccgccgtccgccggatctaccactaccagcgtcgtccgggacgatggcgatggagaaaatgccgggagcgcgcttgttccggtaagagttttggcg

SEQ ID NO: 1643 - DNA, 804 bp, Avena sativa
agtcttctagaaatatgcttagatataataaatgatgtgaaggtagatcatagaaaaaacaacaccatctgcagtaggctagtgtttcagcacaaataggggtcacacatacatgatatcgtaagtactctagatatagtaaaggtggttctgacttttaggttatgtgggagatattatctacaagtcaagcttcttttactagttttgattcaccttctcatctataggattagttattattgctaactatgtttcgagaagattataggattaggtaaggtcacttgatgtgtaagtggatagctgaatgttttgtttatcattaaaaacaagatattagactattcgatctaggaaaaggttactcaatgagcttctaagcagaagtatgattaaaccaatagacattaatgttgatgatggaggcttggaaaatcttatcgtgtacatgatatggtgattgatctagttaattgtttgccaagtgaagaaaactttgtgacaatttaatggcaccaagcgcaagtggtcaaaacccaaagacaagatttgaagattatccatgcaaaagaccatatggctgatataactaccagcagcagcatgcctcaagggtgatttcttgcactttccagatgtccttttgttgatccagtgttgctgatgtcaagagcgtttgcattgcctccattctgaccaatcaatattgctgatactcaagaacattgcatcttggtgttattattctgcaatgrcgtgaagttctacctagtgatctacccattgtatctgaaatctgtt

SEQ ID NO: 1644 - DNA, 968 bp, Avena sativa
gctgagaaatttagtatgggctacatccaagcatgacgtcttcctaatgtcacattactcagtacgtcactggtcagcattgagtggtgtggatactgaactcatgaatgtccaaggtcacgtggcaccaagggagaagcaccctggaagtctattagagggtttttctcagactcaagttagtaccttggcagtcaaggacaatttgctggtagctggcggttttcaaggagagctaatatgcaagcaccttgaccgagaaggaataagcttttgctgtcggacaacatatgatgataatgctattactaatgcagttgagatattcaatacttctagtggtgctgttcatttcatggcatcgaataatgactctggtgtaagagactatgacatggagaggttccagctatgcaagcactttcagtttgattggccagtgaatcatacgtcactgagtcccgacagaaagcttgttgttattgtgggggatgatcctaatggtttacttattgatgccaattcaggaaagacacttcattccatgaaaggccaccatgattactcatttgcatcagcctggagccctgatggcctaacatttgctactgggaaccaagacaagacatgccgaatttgggacgccagaaacttatcagaagccgtccatgtattgaagggtaaccttggagccattagatcaatccgctttactgcagacgggcagttcctgtcaatggcagaaccagcagactttgtccacatctttgacgtgaagagcgactacaagagaagacaagagctggacttctttggcgagatatctgggatgtctttcagcccagacacagaggctctttttgtcggcgtgtgggatagaacatatggtagcctcctccagtttcgccgtttgtataacaacaactcatatcttgactcgatgctttgaggtgaaagcggagcagatt

SEQ ID NO: 1645 - DNA, 745 bp, Avena sativa
tgatgaggatgacgatgacgacgatgacgaggatgatgacaacgatgatgtggagggacaagatggtgatgctagtggcaaatcaaagcaaagcagaagtgagaagaagagccgcaaagcaatgctgaaacttggcatgaaatccatcaccggcgtaagccgtgtcaccgtgaagaaaagcaagaacatattgttcgtcatctcaaagccagatgtcttcaagagcccaaactccgaaacatatgttatattcggcgaggccaagatcgaggatctcagctcccagctgcagagccaggctgctgaacagttcaaggctcctgacctgagccaaatgatttcaagtcctgaggcatcgggtgcagggcatgacgacaacgaggatgtcgatgaggagggagtcgagccaaaggacatcgagttggttatgacgcaggcggctgtctctagggccaaggccgtcagggctctcaaggctgccaatggagacattgtcaccgccattatggaggtgacaacctagaggttttttactttttccccatagttagactgtttctcttataagccgtttgcagcttgagtgttatctgcgaaccatatgcttggataagtttgtcgcgattgcctctcctataaggccttctcaaacgtgattctgcttgcaactaagttcatatcgtgttctttagcattgtcatcagttgtgcatgttttcgctttccgtctgaaactttgattctgt

SEQ ID NO: 1646 - DNA, 845 bp, Avena sativa
  modified_base (830)..(830): a, c, t, g, unknown or other
ccctctcttcgtgcgcggcggctgctcgcccgctgaaccacgttccggccagccggtggcggcggtggggaggtggttttggtgcggggctgtagctgcgagaagaaagggccttggattctgtctcctgacgttctggcgcagcggcaggaggccgcggtgggtgactcccggtgtgcttcggaggttgaagacaccggctaagcaactccaagcgaatccatcaaataagcgctttggttcttcggcagcgtgttcgtcgtcgagtctcctctccttctttcggcatgccgtggtggcgagggataggaggttaggcgcctcgatgcgaaagacaatgcttaagactgtggaagctgcgtcctcaagatcttcctcgcagtggtcctttggcagcaggagagctgtcggactactgcccgttctggccgaaaggcggtctcgggatccaacctccatgggaggcccatatctgaagcgcggcgctagtgctcgacctcgtgttcttggcaagtggttcgtccctgccgggtacgggagggctggcggtttcgtttcctcttcggttcgatgggcatcacgagcaagagatcctgacctcgccgttggctggaggtcgccggagtttggtggtggaggctctctgggactcgattgctttttaccttttagtcctagggtgccttttgcattttggaggcctttttctgttttgtctagcctggctagggtgctcgatgtaaaagggctcttgcttccttgtacctgccacgtgtttctttttgcagcttctgggtcttctagaccccttcatcgttaaaaaaaaaccntggctcgtgtgcctc

SEQ ID NO: 1647 - DNA, 939 bp, Avena sativa
tgctgttgttgtcctgccacacatggcgcaccggatggacaacgagtacgactacctcttcaagatcgtactcatcggcgactctggcgtcggcaagtccaacatcctctcccgcttcacccgcaacgagttctgcctcgagtccaagtccaccatcggcgtcgagttcgccacccgcaccctcgagatcgagggaaagacgattaaagctcagatatgggatactgctggtcaagagaggtaccgcgcaatcacaagtgcttactacaggggagctgttggagcacttcttgtctatgacataacaaagaagcagacatttgaaaacataactaggtggcttcgtgaacttcgtgaccatgctgactccaacatcgtcatcatgatggttggtaacaaatctgacctgaaccacctgaggtcagtccaggaggaagagggtcagtcattagcagagaaggaagggctatccttccttgagacctcagcactggaagccttgaatgtcgagaaggcatttcagaccattctttctgacattcatcagatcataagcaagaaggcacttgctgcccaagaggctgcgggcagtggacctccgactcaaggaactaccatcaacgttgctgattcatctggtaacatgaagagagggtgctgttctacctaggcgtgaacaaagagctggtaattctgcaggaggatgttcacatggatcttagcactctaggtgttacttaggtcactttgactccttttgccctgtaattctggtggggttgtaatcacaattcatactgctagaaagattttctccttggtagataccatgtgtagttgcaaatttttggtagagaccattgtttggccgacttacaacagcttcagtgcaatatcatgtttcctttcagtgtattcttgccgtaaaacattctatgc

SEQ ID NO: 1648 - DNA, 509 bp, Avena sativa
taagcgcttcaggacatatttcaacttctctcaccctgttatagatcaaagtcttgacccagatgaatgtgcatgggcatatgggatgaatgtctttgatctggaagcttggaggaagacaaatattcgggatacataccatttctggttgaaggagaatctaaaaatctggtctcactctctggaaattcggcactttgccacctgcgcttatagcattcaggggtcatgtccatggtatcgacccatcttggcacatgcttggcttaggataccaagaaaacactgacactgaaggtgttaagaaggctgcagtgatccactacaatggtcagtgcaagccatggctagacattgctttttaaaaacctacaaccattttggacgaagcacgtcaattattccaatgacttcattagaaactgccatattttggagccccactatgacagatagggactttggacagatggtgtagacacactgaagggcataatcctgccattgct

SEQ ID NO: 1649 - DNA, 958 bp, Avena sativa
ggctcagtcgaggcgtaccagtacattgaggatattcttctcaaggtgtctgctcaggtccccgacagcggcccctgtgtcacgtacatcgggaagggtgggtctgggaactttgtcaagatggttcacaacggaatcgagtatggtgacatgcaactgatcgctgaggcgtatgatgttctcaagtcggtcggtaagctgaccaacagtgagctgcagcaggttttcgccgagtggaacaagggtgagctcctcagtttcttggtcgagatcaccgccgacatattcggcatcaaggatgaccagggtgaaggctacttggtcgacaaggtcctggacaagactgggatgaaggggaccgggaagtggacagtgcagcaggccgccgagctctctgtggctgctcctaccattgaggcgtccttggattccaggttcctcagcgggctgaaggacgagcgggtcgcggcttccaagatcttccaaggtgactacaccagcggcgaacccgtcgacaaggcgcagctgattgaggatgtgaggaaagccctctacgcctccaagatctgcagctacgcgcagggcatgaacatcatcaaggccaagagcacggagaaaggatggggcctcaacctcggcgagctggccaggatctggaagggcgggtgcatcatccgcgccagcttcctggaccgcatcaagaaggcttacgacaggaacgccgagctcgccaaccttctcatcgaccctgagtttgcgcaggagatcatggacaggcaagccgcgtggaggagggtcgtctgcctcgccatcaacaacggcgtcagcacccccggcatgtccgcgagtctggcctacttcgactcctaccggagggacaggctgcccgcgaacctggtgcaggcgcagagggactactttggggctcacacctacgagagggtggacatgccaggtt

SEQ ID NO: 1650 - DNA, 581 bp, Avena sativa
ctatgattcaacttgaacttcctcatatcaacatcctttcaaagatggacctggtttccaacaaaaaagatgtagaagactatctgaatccagaggcagcagttcttctgtcccagctaaatcgagagatggcgcctcgtttcggcaagttaaacaaggctttggctgatctggtcgatgattacagtatggtgaatttcataccacttgacttgagaaaggagagcagcattcaatatgtgctgtcaaacatcgacaactgcatccagtatggagaagacgctgatgtgaaggttagggactacattcccgaggctgatgaggactaatgatcatgcagaagcaacaaactagttagtatcatgtagtgtgtccatggggagtagggtttcgcagtaagcagaaatggagaacaggcatttatccatttcgatcgtttgtgcaagtcagccttttgtgcctggatggtaggagctatatgttttgcttgtaaaaaatcttcttgtggagctgttgaacgacatcaaacatgagttgtagtactacctaaatatcatgtgcttctttgacaartcaccaaa

SEQ ID NO: 1651 - DNA, 820 bp, Avena sativa
gctcgacaaggtcaatgaagagattgaacagaatatacaaaagaccagggaaatagagtcagaaatagtgaagcattctgaaactgaaaaggactatctcgtgaaggagtctgaactaatgaaaggagtatcagttgctgagtttgaactcgatgggcttatgcaagtcgcagctgctggaacagattcacttaaagtgatggagggcaatgtggtatttcagaaagctactttgaatcaaattaggaaacggttctccgataaaatggaaaagttcattgctgaatctaaaggtttccaagctaacatgcttgaaggttcaaacgaggatttacttctcctacttaaggaaaagggttcactggaggaagagagtgagaacttgaggatgaagatcaacactatacaaagttcatcaaatgaatacattgctgagattcttgaggaggttaatatggaaaattcagttttggaatctgagttacggtatagggtttcagaatatatggaagttctgaaggatataaacaacctgaagatcctatttagttcgaccaattcataagatcagtcatcaccgtttctggtaattgaatattttactttggctcgatgagtctcttgctctcaagtacgcctttgacttgttttcctatcaaggctcataacggacttatcacttacccatcaaggttgacacatgtttcttgtatctgcgttacattattttggcctggctgaggggaaagctgtcaagaatcttcagcacggtcagtggaactagcttgtacatgttccttttcttgtacccagaaggcta

SEQ ID NO: 1652 - DNA, 780 bp, Avena sativa
gtacgccgcctttccattggtgggttcggggcatcggtgtctacggggaggtggaggaggagggggcttgaggtggtgtgcgctgccgagccgcccaagacaggaagacagccggactcggtcaagaagagggagcgccagaacgacgtgcaccgcatccgcaaccatgcccgcaaggccgagatgcgcacccggatgaagaaggttttcagagccctcgaaaagcttaggaagaaagcggacgcccaacctgaagaaatcatcgaaatagaaaaaatgatttccgaggcatacaaagccatcgacaagacagtgaaggttggtgccatgcacaggaacactggagaccatcgcaagtccaggctggcaaggcggaagaaggcgatcgagatactccgtggttggtatgttccaaatgctgaacctgctgctgctgcctagtttctggggaagatcatcgtgacgaatttgcagcagctttcttttcatcacatcttgccagtttttggacaacacggtgttattgaacgaactaagtagctttccaagttttctccatggcaagtattttgtttatatcttttggtactggctactgttttatgcccttgttatgctctagaatccttgactcaaaagttggcccactgcttctcttacattcctgttgtttgacttgttgttcacatcagtgttgtaaaactccaaaattgaaatgtacctgttgcatggcgtgtacaaatatcttgagctagagataatgtgttcaactaagaaaaa

SEQ ID NO: 1653 - DNA, 770 bp, Avena sativa
aacctgaatggccatatccgctggatctctgctcagatgaaccgtgtccataatgctgagctctatcgctacatctgcgacaccaagggtgcttttgtgcagcctgctttctacgaggcctttgggcttacagtcatcgaggccatgacctgtggtcttccaacatttgcaaccgcatatggtggtccagctgagatcatcgtgaacggtgtgtccggctaccacatcgatccttaccagggtgacaaggcctcggctctgctcgtcgagttctttgagaggtgccagggagaccccagccactggaccaagatctcactgggcgggcttcagcgtattgaggagaaatacacctggaagctttactctgagaggctgatgactctgaccggtgtctatggcttctggaagtacgtctccaacctggagaggcgcgagacccgccgctacctggagatgttgtacgcgctcaagtaccgcaccatggccagcactgttccattggctgtggagggggagccctcgagcaagtgatctgatctggccagtggccacctctctctcggccaaaagaagaagcgtggcctggatttctgagagattgagatttgagaatgcattggttttcttcctagctaggcgctgctctttttaagtggtaagtttgatttgagaagaggtgccagactgttggtgcttgtcgtcgtgttctttggatgttacccttgaatgaataatataaatagcggccttggcgccgtttcggaaat

SEQ ID NO: 1654 - DNA, 476 bp, Avena sativa
cgaatttgtgaagaaaaagaatgaatctctttctgcggagacaagtgatggtgctaagagtataagccaacagattatgctgcctggccgaggtgatttgtgggtccctggacctggaggcagccctttaccaaaatctgctctacaatctcttgaatttagacgggcgatgtcttccttcctctcaaagtaggggcaaacatcccatatgcaaccatcactttctgcccatgataagatgtcttgtggaatctgcacggtccatcatctggatctgaaagtaagacctctaactgacgacgaccttttgaatcttgtataatcccgaaatatagggttctatctatattctgtagtgctagcaatgctgtatgatatagtttctaactcagtgtgcctgtatatgatgatcggactacttgttttgtgcccgctacccgttagtagcatcaaaagtattacccatatcctgtctt

SEQ ID NO: 1655 - DNA, 561 bp, Avena sativa
tcttagccacacccaaaattgaggaacaagaatcaacagctaaacatttaatagtttacatcaacttttttgtaacctaaaaaatcttaagggtaagaaatcgtacaaacacctttcacgactccacttgtataatttaccgtcgatgcctacttattctgatacaacagttgtactcctcacagcgaaaaactaatcacaggaacaaaatattaacaataaagtttgcacgccaggtcaaacggctaagctgctaacaggacaggatgatataggacgcagctggctcgcgatttagttccaacagttctatggacgaccaggaccgaacccgaacgggcagcagccgcatctgcagcagtttacacaaagacaaaatttcccggttcgtgcatcgttactagctttgtgtttggcggtggatctggagtatccagtccatgtaactgcttgttccggacatctgatcctcgacaaggttggacagaagcaagaagcctttctctgggctgctcgccctgccgtaccaacgacggggcagctggtaacacgacgaatcct

SEQ ID NO: 1656 - DNA, 524 bp, Avena sativa
cacggcactcatctaacccgaagaactatgagtctgctctcaaaggtattgaaggtcttaattttgatggcgacgagagggttcagtactagcattgaagaattctacttctacatgtgccctgtataaatcataatctgaagataagcacagcatttcctgttgagttttggatcacaggagatgtaaggaggaggatgtgaagtgctattgccagatgatggtcctctggacacagtaaataagtggtcagcccgaggcgcatggaattcagctctcatcataatttattgtggttggtctgtaaatgtctttatagtttgtttgtctggcgcctcttgagttcatgggtcttgtattattttctattccttcgggtgccatcttgtccagttactgtgtctccggacagccaagatcagctggtaaaacttttatttggaaagtgaatcttgatcatgtagaatgtttcatcagttcattgagcaaatttgccacataacaatcctgagaattaatgtgca

SEQ ID NO: 1657 - DNA, 590 bp, Avena sativa
tccgtattaataaatactccctccgtccagaaataagtgacttgagtttatctagattcgcataaatctatatactaaaacatgtctatatacatgcgaatttagacaaatgcaagtcacttgtttctggacgagggaggaaaacatattggtgtggcataattcagcagaatctaattcaaatctagaacaagtcaggcacggtgagaagatggcaaagcaagtctgcactgtaaattcactggaccatagcgtcagggttcccggcggcaagaatatcaagcagagagttctggggctccagctcttcatgccacagtggcagtttgttaccagggtggaagctcctcttaacaccgtcagcatttatagtaacggtgcgaacaacccctccactagcaccatcacgggcaatagcaagggaaaccaccttcaccacaaacttctcagcttcttcctgggtcatcccctctctccattcatgatccatcaatccatacaggtaactggaaccagatcctccaattgcaaatggttgcctaagattcgttccaccaagagggactgagtagatttggcctccctcatat

SEQ ID NO: 1658 - DNA, 593 bp, Avena sativa
gtaccacctggcaaacaggcagcctgcccggggccagatccacggcttccggatggcgctgtggtacgagcacctcggcatgctggacgacgtgttccagcacccggagaaccccgagtgcatccagaaggtgaacaagatcgcggagaagtactgggacatatactccagcgacgacctggagcaggacctccccggccacctgctgagctaccccatcggtgtcaccggcgacggcgtggtgacggagctgccgggcatggagttcttcccagacacccgcgcccgcgtcctcggcgccaagtcagactaccttcccccgatcctcaccacatagactgctgccacgcttctcccgggctgtaatgatcgatttggtggtttcatttggtgattcagaacttatttcagaacatagcaggtcggtatagttgtggtgaagtaataagcgcatactggcgctgtgcagggtttgagaacacacggtagggctaggaggattgctgtgttgccacgaacctatgtaagatgaagacttggatatttgacacggttcctgttatttgtactagtactactgttcaagttaaaaa

SEQ ID NO: 1659 - DNA, 819 bp, Avena sativa
gcgagcgaggaaccctaataacgctaaaggaggaagaagagtccaagatccgcaaggcagcgacgatggcggcgcttcttcggacagggggcgaggagggtcggtggctccgtgctccagcgagcccaggcggcggtcgcatcaccggcggctgcggaggggcgacgccggctcctcgtgccaaggcgcatgtacagcaccgaggagcgtgagcaggttctgcgcgagatccagcagaagaaagaggagctgtacgacgcgatcgcgaagggggagaattgcttttggacccgctcgtaccagaacatgtggctgaagcagcgtctgtccgtccagatcagccctcgcccttggagcttcgactggcgcaatgatcggtatgccaggagggcgaacagctttgcggtatttgtgttcgtggtgctaggtggactggccatacgtgatgtagagcggcgtatggttgcagagagggagcagagggaggcgctccgggcggatgtgatggtggtggccgaagaagcaggggaggcttgctgttgatgaggcaacgactagctactactcccatcttttgcataaactaaacttatgaggcaaggacaagtactcatttcataaactactcccatcttttgcataaactaaacttatgaggcaaggacaagtactcatttcatttggtacttgtgcatggagtagccgatcgaggttatatatactagtgtgcatggagtagtagttgctttatctactgatgatgttgccaatatgtggagtattttcatgttggagtacatttgcagtatcatagacaaa

SEQ ID NO: 1660 - DNA, 820 bp, Avena sativa
taatgcagcatctgatatgcccgtggcagaagaggtaagggaatgggcccgcgaacgaaagaaggaaatacagaaacgcctaagagtagcaaacaggacagcattgaggatagcgatcctcccaagaagagagggcgtccaaagggtgtgcgttccagcatgtcaaatgatgatagccctgtgacttcggccagatcgaaggtgaaaagtgaagaaaaggatgctgaagaaacacctaaagctggcagcaaccttaaaactggaggtgggagatggcctcgatccactggcaaggcaagcaacaaggatgatactggcagcaagaacaagggttcaaaagatgatgtatccaagacaaatggtaattcagccaaaagaaagccaaaggaggaggtggagtcatctgaagaggaagagccggagccagaatctgctaaagcatcagctggaaagaagcgcagaagaaagtgacttgactagtttcccctgaacgtgcagctctcgagggatgaggcaagctgtgtgccctcagtctctaggtgttgttggcatgaggcaagctgtgccatgcgttggctaattcaacatcctgaaccagctagtagtcggtagccggtctctgtcagtattagtatctataatgttagcgttacttttcttgcttgtggtcggcggcttggaaacctttggaatgttagctctacttaatgtagttcatgcttgctgtggttcaagcctttttatctcattgttatgtagttgggctactcgagtctgtgaattgaattttgtagcaagtatctatcatcaagtagcatga

SEQ ID NO: 1661 - DNA, 707 bp, Avena sativa
agccgagaatcctttggaactaatgcgtccgaatcttcatgaatttctggctgctgcatatgcagagtatgatatcatgatatggtcagcaactagtatgaaatgggtgcagttgaagatggagcaacttggtgttctgagcaatcccaactacaaaatcactgctcttatggatcacttggcgatgataactgtccaatctgacaagtactacgagaacaaaattttcgactgcaagcctcttggtatcatctggtccaagttgcccgagttctacaatgaaaagaacacgatcatgtttgatgacctcagaaggaatttcgtcatgaatccacagaatggcctcgtgatcagaccatacagcaaggccagtaagaacagaagcaccgataaagagctggtacatcttacacactacctgctcgccattgcggcgctagaagattttagcaagctggatcacgatgattgggaatccttcctaggagtaaatggcaagaaacgcaggcgtaggtagtttccttgagtgtagtgagtgatgagcaggcagaagtttgtagagcacctagtacattttgtctagtgctattaactacacataccagcgcgcatcggaatgcccatggaaacagcggtatgtactttgaaactcactgcaaaaactcccatgcttgatgatccgctttcaacgttttgaccaaaaaaaa

SEQ ID NO: 1662 - DNA, 593 bp, Avena sativa
agtacatctgcacaatacgacgttatataggtattattgctgtcactactactagaacaagagcatgcaaggttgtaaacctgtcatgtttaagaagcacacgtacattaactaataatactgaaatacataagagccagcaacaaataaataattcccagcgacaagtcgacccatagataatagtactggaagttgagagcgacacacacttcggctcgtcaaaaaatgtattccatctcttctccaagatattgcatcaccagttcaagactactacttctggatcgagcccccactggccatcagtgccatcagctacctttttattcacttgtagtcgaacgatggaatcggagggctgggcgaatcgaagctctccaacatctctgactttcccccactgccactgggcttcttctcctcctccttcttttggaacaggttccggagccagctgccgccaccgctggagttcccgatctcaggagggaccacggctggctggggcatgcctgggaagccgcccatgccctggaatccgcctcctcccgccgcgatggccgcggccaggttggggtcgtcggccgrtc

SEQ ID NO: 1663 - DNA, 668 bp, Avena sativa
gaagagagagaaaagaagaaagataaagaaaaagaaaggaaggataaagatcgcaaagaaaaagaaagagaccgagagaaggaaagagaaaaggaaaaaggaaaggataaggatcggtcaaagagagatgaaatggagattgatggtgatgatgcggagattcatggctcaaaagataagaaacgggaaaaggataaagaaaagaagcataaaagacgccaccatgacaccgcagatgatgtaagctctgaaagggatgagaaggatgactcgaagaagtctcgaaggcatagcagtgatcgcaagaaatctaggaagcatacccatgcttcagactcggatggtgagaaccggcatagaagacataaaagggatcgagatagttcccgcaaaagtggtgtaaatgaggagcttgaagatggtgagcttggagaagatggggagattcattaggcagagttttacctccaagatcgtcagtacttgctgtctcttgtcttgtcaattgctgctatttgcctagcatcaacaaaatttgcttcagaacttaccagtgttataatcattgaaactagcgttacatacatttcctggcacctacctgctcctcattataatattctgcagtagccataagctgtggtctcctctttaagtgaacattgtgt

SEQ ID NO: 1664 - DNA, 534 bp, Avena sativa
agaagggcatgcgtcttggtcctctgcatcataccattcttgcacccggctgcgggtatccgctttgtcatcgatagggaggagtgtttctcgcataacgtggactacgagggggatactctccatgtctccttcgtggtgatcaaggctgacactccgtggcattatagtgaggatggggtggacctcgtggttaaagattctactggagctcaagtccgtgattctcgtgacaagaccagtgataagtttgatttcatagttcagaagagaggtgtccatcgcttctgcttcaccaataaatccccgtatcacgaaaccatagactttgatgtgcatgttggccattattcatatttcgatcaacatgccaaagatgagcattttgcacctttattcgaacaaattgcaaagttagatgaagcactttacaacattcagttcgagcagcactggctagaagcccaaaccgaccggcaagcaatattgaacgagaacatgagcmggaggccatccacaaggcgctattcgagt

SEQ ID NO: 1665 - DNA, 833 bp, Avena sativa
ttgccatcaccaccggcgaagaggacgaggagatcctcctcgatatgaaagcgaagctttacagatttgacaaggatgggggccaatggaaggagcgcggcacgggcgccgtcaagctgctcaagcacaaggagaccgccaaggtccgcctcgtcatgcgacaggccaagaccctcaagatctgcgctaatcacctcgtggtggcgacgacgaagatgcaggagcacgctgggagcgacaagtcgtgtgtgtggcatgctcttgattttgccgacggtgaactcaaggaggagatgttcgccatccgctttggatccgttgagaactgcaagaaatttaaggatcttgtagaccagattgccgaggagcaagggaagagtgaggagaaagaaagtgaggaagcctctgctgctgccgatttggtagagaagttaaccgtggccgaggacaaaaaggaggaacctgtggagaaagaggagactcctgcagcagtagaggagaagaaggatgctaaagagtgaagcgcctgcctgctatttcctcctatactcgaactagtgaactgtcaaatgagtgtcattcgattcattccgctgtcaaagtttcgtctcccttccacaaattttcattgtgtttttctctgggtgaaatgtttgtgttaggcaaaggtttgttttgtgtcggttaatcttgtttcttggttgataaaccgtcatttaaggctttgtgttttctggatggtgttgctggggtcagtgtgtatgtacaactatttggagttgctcttggtatggatggatacgggttgttgagttgtaccaaaaaaaaaaaaa

SEQ ID NO: 1666 - DNA, 893 bp, Avena sativa
gatgtggctgaagggtgaactgaagcgtgtggacagggagaagacgccctggcttattgttctcatgcatgctcccatgtacaacagcaacaatgcacactatatggagggcgagagtatgagggctgctttcgagaagtggtttgtcaagtacaaggtggacttggtgtttgcaggccacgtccatgcttatgagagatcgtatcgtatatccaacgtcaagtacaacataacgtctggaacccggtacccagtgccagacaaatctgctcccgtgtacatcacagttggtgacggaggcaaccaggaaggacttgcctcgaggtttaacgatccgcagccggactactcggcgtacagggaggccagctatgggcattcgaccctgcaactgaagaacaggacccatgccgtctaccagtggaacagaaacgacgacgggaagcacgtgccggcagacaacgtggtgttccataaccagtattgggcgagcaacacgcggcgcaggaggctgaagaagaaccacctccgctacgagagcctggaggacctcatgtccatactctagaggagccgtcgtcctcgcggagcatccgcagcacgaaaactttcagacagacttgcggaatactagctcccttgtttcgtttgtagtgcctggctggttggtgccttctgaagcagccttggtcggccgaggagagacaggttaatcagagttcgcgccaaggagacatacgttaaactgtatactgtatattgaacagagcctgagaagttgatcgtcacacatgtaaattccacttgtatggccacttggattgttcaatttacacttattaaaaatacatattagaataaacaagttaaagggaaaatacaaatcaagtgcg

SEQ ID NO: 1667 - DNA, 859 bp, Avena sativa
ttgctgaaacttgctccctttcacagttttgcctgccctcatgaatgagtaccgtgttccggagctcaatgtccagaatggtgttttgaaatctctctcattcctctttgagtatattggcgagatgggcaaagattacatatatgctgtcactcccttgcttgaagatgctttaatggacagggatctagttcacaggcagactgctgcatctgctgttaaacatatggccctaggagttgctggcttgggctgtgaggatgctcttgtccatttgcttaactttgtctggcccaatatatttgagacgtctcctcatgtcataaatgctgtcatggaggctattgagggaatgagagttgctctgggtgcagctgtggttctgaattattgcctccaaggactcttccatccagcaaggaaagtgcgtgaagtgtattggaagatctacaactcactgtatattggtgcacaagatgcacttgttgcttcttatcctgcactgggtgatgatggagacaatatcttcagccgtccagagctagccatgttcatctgattaacggcgtccggtccaagtatgatgctgaggagtctatctggtctgaagaccggtcagagtagctgagaatgtaacatagtcctgttttgaagaaagacaagcatggcatcgatatcgtcttacgttcatgtaatattggttacagctgttctcaaaactttgtgttagtgatggttttgtaactctgtaaatcgtcgaggtgtgtactgttactgttctgcaacatgattatgcatcgaacattttgcatagctcgtgttatttccatggtgattacttacatctggtgtatgcctg

SEQ ID NO: 1668 - DNA, 756 bp, Avena sativa
gtcaattaccgtgaggcctacggcctcttcgcctgcaacggcgtgctcttcaaccacgagtccccccgccgtggcgagaacttcgtcacccgcaagatcacccgtgctgtcggccgcatcaagatcggcctgcagaccaaggtcttcctcggcaatctctctgccgccagggattggggcttcgccggggactatgtggaggcaatgtggctcatgctgcagcaggacaagcccggtgactatgttgttgccacagaagagtcccacacagtggaggagttcttgcaggctgcctttgggtacgccgggctagattggaaggaccatgtggtcattgacaagaagtactttcgccctgcagaggtggacagcctgcagggggattcatccaagtcgaggagagaacttgggtggaagcctaaggttgggttccagcagctcgtggagatgatggttgataacgacattgagctcgccaagaaggagaaggtcctcgtggatgctgggtaccgtgatgccaagcagcagccatagaatttgtagcactacttgatcaaatggagcttggtctgggtttttctccccttgaagctgatacagtgtggccattgcagtagaggttggctggagttattgttgtttatcccaggatagaaataaggaggtttgcagtttgatcctagaatatctttgattatgttactacattgtgtgcttttatcagatctgaatgaatcagtcgatgctattttaaca

SEQ ID NO: 1669 - DNA, 710 bp, Avena sativa
gaaagatgaatcgacagggaatatattgaacttggtgatggtggaagcagatgagggaagaatgctaaaggttaatttgcttgtagagttcaagggggaggatgtctgccctgggttaaagaaaggtgggttcttgcagaaaataaggacgagcttgatgtatctgtgcccagctgagcacatccctccaaaaatcgaggtggacctgacaaatcttgacattggagatagagtattaatgcaggacatccccgtcatccatccctcaagttactgagtaaaaacgagacgatgccagtctgcaaggtcttgtcctcaaagccagccaagtaggaacccgttcatcaaccgtctagagctgggggcaatgtatgtacctaaccttgggtggtacagcggcctaagtaatttaatccatttcgtggctttgctttttggtctatctctctttgataggttccagtttgccggtagtagattcagacaaagtttattgtatttttacgaatgaagaggctgaagaaaacagccctttgaccagtagtggctgtgatgtcgtaaaataatatatcttggctttctcagttcagggacatacactggagtacattcttttttggcttcttggttgctgtggcctctgtgaaatttacacacctggctgatgatctgggactgctgatgccccctataatatcttgttgccaatc

SEQ ID NO: 1670 - DNA, 793 bp, Avena sativa
acttgaaccatgctgagaagtcagacgttactcttgtggaagctttcaaaaggatgcaggtcattgaagatgaggaaccagtagatgcactggatgaaaatggagaacctgatgaagaggtaatggaagagaataaaacggaggaggacacagatgaagctgtccaagttgatactgatgaacctgaagaaactgttcttgtaaatgggaatgagggtgaggaacagtgggtactaacccaacatgatgagtaggcatcggtgattgtaccaaagctcagttgttgaatctgttcttgcagagggtagcattggcatcccagttttgtcatggagcacttgaattggttgatgcttagtttgtaaccaatgagccacatattgcttcttggtcagaccacacaaatgaagtccaaactcactggaaggatgctagtccaatggcaccgatcctggcaggtttgtgtgcagcatcaacaaatgcaattctttcatcgaaagacacatttttttcatacccaacttcccatgtactgaagtcggtgagttgggggcagagttggttgtgatgaggaggttttgaataattgttatagagatgtgtagcatatatgccatatgacagatagccattataccttgtaagagatggaagttttctttagccactttgctgtaattttgtgttattccagaaggttacatgtagtatatgtcacagaaggctttgtttgtgttattccagaaggttatacctctcagcctgtgtatcaatctgtcaggttttagttaaa

SEQ ID NO: 1671 - DNA, 709 bp, Avena sativa
agggtgatgtgaaatttgctgaggtactagaaatgatgggagcgaaggttacatggaccgacaccagtgtaactgttactggtccaccgcgtcagccctttggaaggaaacacctaaaagctgttgatgtcaacatgaacaaaatgcctgatgttgccatgactcttgccgttgttgccctttttgccgatggtccaactgccattagagatgttgcctcctggagagtgaaggaaactgaaagaatggtggcaatctgtacagagctaacaaagttgggagcaacggtagaggaaggtccagactactgcatcatcacgccaccggagaagctgaacgtgacagcgatcgacacctacgatgaccaccggatggcgatggccttctccctggccgcctgcgccgaggtgcccgtcacaatcagggaccccgggtgcacccgcaagaccttccccaactacttcgatgtgctaagcactttcgtgaagaactagatcgggatgctataaaagaattgcatatgtattttgtagcctgggaggattttttgctcttttcatctttttgcgagatgtttatgagccctgtaatattagttttgtcagcagcgtgtgagcctcgaggtaaaatgagttgtattgcacacttgagtttgttttgaataagaataagttgccatccaaagtttacagagatgcactgttgcatc

SEQ ID NO: 1672 - DNA, 809 bp, Avena sativa
ttctcaatgattatttccactttgttgaccaagaacaagtgcaacctgcacaggcgattcctcaggaagcctatgagaccaacttggtatcgaacatccagactggatcagagtatattcatgaagaagaaagtcaaacacaatatgctcttccaataacatctgaagaaaatgaacccattgacaactacacttactctgagccaccacaacaagtcgtttctcattcggacaactggggagatgaacctcttccagaggaacgagtttcttcctttacgaatggaatggcgttggcacctgaagagccagtgcaaccaccacctgtgcaggctcctcatgtagaggaacctgtcggggagcccgtaaagaagacctatgcttccattctaagaactgcgaaagccccacctccggtccccatggcgcaggcagtacctgtgaacaaacctcgtcctacaacagagtcaaaccaggcaacgccggttatgacttcatcgatggcagtggataagcccaaatctgattttctatgcagaagcccatgaggaagaagagagcaaatctgtttatgttgggaatgtgccatcaaatgtatcggagactgatcttgagaatgagttcaagaagtttggtcagctcattcctgaaggtgttgctatccggagccgcaaggaaactggtggctactatgcttttgtggaatttgaggaactcagtggtgttcacaatgcattaagggctttcaccacttgaaataaaacgggcggcagatatatgtcgaggagcggaaacctaacagtggaata

SEQ ID NO: 1673 - DNA, 573 bp, Avena sativa
cgcatactccatccttgacacctgcttcgtgggccaggcgtcgcaggtgcgcgccccggccgtcagcatggacttcgcgggcggcgcgtccctcaagctgtcggcgcagaacctgctcgtcgacgtggacagctccaccacgtgcctggcgtttgcgcccgccaggagcgccgccatcatcgggaacacgcagcagcagtccttcagcgtcgtctacgacgtcaagagcaacaggatcggcttcgcggcaggcggttgcaagtaatttaacgagggtgcacacgtatgcacagacaaccttggataaatttgggcaaggcattatttgctgctactcgtcggtcagttcgaccacaggaatgtggcatatgcttaattaccagaacttcataaggtagatagaaagggaactgattaagtgttgctctagcgcctaggtgtacacgtacatgttcgtcaaaactttgttgcctaaaaggaagtgcacagaagatactacttataggagtgaagaccattccaaaaatgagacttatgaatgggagtgaagctatttacatacaaaaaaaaaaa

SEQ ID NO: 1674 - DNA, 692 bp, Avena sativa
  modified_base (319)..(319): a, c, t, g, unknown or other
aaatataggtcagaaggcgaaactacaaattatgataaaataagcaaggggagtgacggaacaaaatctatatatttgaagaagagactgtgggaagatgaaaagaataagcttggcaatgttgtctcctctgcagaccaggtaaaagaatctccagtcaaacatgctttgccatccactggcatggctgctcgtgccttgtatgatcttaacgaggctgttgaactggacgatagacatgaacagatagacgcattgctagatgatgcgttggaaaacgatgccgatgacaggagtagatcacctttgatgcccccanaacctccaccagtggtccaaagtacttatagcctgtatgaggaccttgacgaggaagtggacgtggaataagcggagctggatgacgtagtagccagctgcaggccattggagtggagaccattattaattagcatttcagtgtacaaagtgcatatcgacaatatatattgggactttagcttatattatgcagcagaaatcctccttctgtagtggcaccagccatggtgtttagttgtgaccgagccttgctgggggcctatttggatctaacttatatatttggtaaaatggcaactgcttctcttttacagtgatagtgttgatgttcccttcgtacgttcgtccggaataatgaaatttgcccaagt

SEQ ID NO: 1675 - DNA, 569 bp, Avena sativa
atcaccagcagctgtttgctgctcctatgtagaacaaatggaatcttataactcgttcttgttatttattgtaggctgcatttaagtatcggcttccaattgatgatgagatagacccggtgttggaatcggcttataattgtgttgtggcaagtactttgctggggagtgtttttgttatgattccactcacaagtgaggagcatcatctgttgcaggatgtccaagaaagactttcagttcacccgttgactgctccaatcttgggaaatgatcatgcagagtttcgccgacgtggtatcccgtcgggagtaccttcaattctggatggcgacatgctcgtgcaattcctggagctcaccagtgaacaacagcaaactgttcttgatgctgctccttcaggaaagggacctctcaggactatttcaattttccaggtcatgagaacgttagaacgagtccattatgcgctcaactgaggttttatgaaatcaaattggttgactcggacaatctttgtacataaaatgtggacaaaagaacatgcatatatcctcagcattgatgaa

SEQ ID NO: 1676 - DNA, 891 bp, Avena sativa
taggcatgcaattactgtgatcaaatctctgaacagggacttaaaacagtgtcaggcctctcaaacttgacatcgcttagccttaagaaatgtgctgctgttactgctgaaggagcaaaagcctttgcaaacttagttaatttggtaaatttggacctcgagcgatgtctgaatattcatggtggccttgttcatttaaaaggcttgagaaaactggaaacactgaacatgagatattgtaactgcatcacagattcagatatgaagtatttatcagattttacgaatttgagagagctacaactgtcttgctgcaaaataagcgatctcggtgtctcttatctgagaggtctatccaagctatctcacttaaatctggagggctgtgcagtgacttctgcttgtttggaggctatttcaggattggcttcattggtattgttaaatctgaataggtgtggcatatatgatgaaggctgtgagaacttggaaggtcttgtcaaattgaaggttcttaatttagggttcaaccgcattacagatgcctgcttagttcatctaaaagaattgatcaatttggagtgtttaaacttggactcgtgcaagattcgtgatgaggggctactacacctgaaaggccttttgcagttaagaagtttggaactttcagacactgaagtcgggagcaatggacttcgtcatctctctggtcttagaaatttgcatcgcatgaatctctctttttacattggttacggatattggtttgaaaagaattgctggcttgaactcactgaagtcactcaatcttgataatcgccaagtcacagaccatggcttagcagctcttacaagtctcaactgggttaacacacctcgatctgtttggag

SEQ ID NO: 1677 - DNA, 566 bp, Avena sativa
gcttgataggctcgatccagagaagacgttattctctaggcgttttttccgcgagtcatgcgtatttacagaaagtggctacacaaaagatctgacagttattggagttgacctcgcaaaggttgccattattgacaacactccgcaggttttccaattgcaagtgaataatggtatacctatagagagctggtataacaaccccttggacgatgggttacctcagctgatcccattcctagagactcttgctgttgcggatgatgttcgacccataattgccaagaagtttggcaactgaaaggataattgctgaggttttccggcaagcgataggagcagattggtggttactcacatagaggaacaagaacttacatgacacgttgactgagctagtcgagacttgcgttttcttcttttatttacatcgattccataggatcaagaattttggtgccagagctatccctcgtgaattgtacatatatcatcaaactcttctatagaactttgtacatagaatgctgttagaaatgaaaatgaacttaccccaaaaaaaaaaa

SEQ ID NO: 1678 - DNA, 935 bp, Avena sativa
gtgctgagcataccgctgcagtaactgaagatggcgacatctatggatggggctggggtcgatatggaaacttgggtcttggtgatcgtaatgaccgatatgttcctgagaaagtatctttggtagagggagagaaaatggtgcttgttgcatgtggatggcgccatacaattactgtttcctcctctggtagtttgtacacttatggttggagcaaatatggtcaactagggcatggcgattttgaagatcatttagttccacataaagtagaagccttgaaagatagctctacatcccagatttcaggtggatggaggcatacaatggcacttacatcagatggaaagctttatggatggggatggaacaagtttggacaagttggtgctggcgatactgaagatcactgttccccagtggagatcaattttccagaggaacagaaagtggcccaagttgcttgtggatggaggcatactcttgcttttacagaaaagaaaaatgttttcgcatggggaaggggtactagtggacaactcggtcatggtgaaatagttgacaggaacacacccaagctgattgatgccctaagcccggatggttctggctgcaagaagttagagtcttcaacatctgttccatttgcagccaaagtttgggtctcgccctcagaaagatatgcccttgttcctgatgagaaggttgcaaaagcgggcgaaaacgcagcaagcggcaatggtgctgatgcaagcgtaccagagaacgatgtaaagagaatgcgtgtgtcatcctagtttcgacgacctatcatctatatgcgtacctcattaaccctagtaccactatcgaaaagccttgtgcattggttcaccagttcccatctagcggtgtccaatttttgtgcattccagtctgctgaagttgctcttccg

SEQ ID NO: 1679 - DNA, 562 bp, Avena sativa
gtccttcctcagtatacttgtctttactcccttcatagtttaagaacttagcaagacatgattggctgcgtatgaatgccttaatagagcttgtagaattgttacatcgccgctacaggtgcaattgggtaggttttctatttgtcctttaaatgtgattgttctgtgttgacaggtacatacagagcacttgtgccacatctggtgagggtttgtatgagggtttggactggctatccagcaacattgccagcaaggcttgatgcttggaattatcgaggccctcaaatcaacttggagctgtggatgtacttgtgatcctcagggtccttgttcgctgctattttcagtctcttagacattgcatacgctaagatattttttgagctcgttataacccaggatttgaatgttccctgtagttcccaaatgttgcacatttcccacttttacttctaggcctttccagtaccatgtctgctctgctattcttgtagtctgttgaacttgtcttgatgttttctcgccaacttggtccgaaaattgatcaaagtatagmgtt

SEQ ID NO: 1680 - DNA, 894 bp, Avena sativa
aaagatctttctttaccactttctctcattatgatctacaagatcttgatacatgcagggtgaagatataaaccttggagctgtaagagaagtaaaagaagagacaggggtatgtatcagcagatcgagaattactttttgttcaatgaaccgatgctgacaaagaactgctataactactaatactcctattttccttccatggtcatgtatcagattgatacagaattcattgaagtacttgccttcaggcagagccacaaagcttattttgaaaaatcagatctattttttgtgtgcatcttgcggccactttccttcaacattactaagcaagaatcagaaatcgaggatgctcagtggataccggtggaggaatttgcggcacagccatttgtacagaaacatgaactcgtgaagtacattcttgaagttggtctggctaaggtcgacgtggaatatgctgggttttcgccaatccgcataaaatcggcattcacggacaaacagtccttattttacatgaacaggagggaccttgacaaagcctcggggtccggcaataaaatttcacctgggttgtgaaagggttgaagcattcatacatgattactttattggtctggctggtagtttgtacacctgattttgaccgtatgccacctgcttataccattctatgattaagagacatagcttagcagaagtacagctaaaattgttgtacatatcttatcaattgtatcgatgagcttacaaataacaggaatgttggtcggactggaacctgtcattttctgtttaatccaagatgtgtatttactcgctggcctctgtttagtagatatattagttacatcatccaacttgaactgtaagggctcttttgattcg

SEQ ID NO: 1681 - DNA, 522 bp, Avena sativa
aagttctctattctggaactacatctcaaaacaaaggggcatgtttttggagcactcgtctttcatctccttgggatgaatcgagtttttactaggacgaggagacttaaggtcttcttacatagatcaatgttgaaacaagagtgcccactagattgtgcttgtgaccaaccagactggagatcccaaactacctctttgaccgctctcgaagaagtggagattgatggctttgaaggatacgatcatgagatcgatttcttgaagctgatattcaaatgtgcgccgatgctgaaaagaatggttgtgggcctgtcacatgaggtctcatcacgtgatgatggatgcacacaaatacacaacgtctttcgggattattcttctgtggaatgctatcttaatcttcgctctgggttagtgcatggtggcgacgattgcccatcaacatgattctcatccttgcatattcagattcatggagtgaatggtacacagagctgatcttaagggcaagagtggata

SEQ ID NO: 1682 - DNA, 642 bp, Avena sativa
ttttttttggttttctagaaacaatttttctatagcaaaaaacaataggtggacaaacagagaaggtgcaacagaacacgatcttgtaaatattttgtaccagaacacggttcttgagcacacacacagcctaactcacctggttactacatcacacaaatttctggcacacaggaacattgtttattcagcttcacgacagagcatatggaaatttaaagtcttataagaaaaaaattaggtgctcctgatgatggctagtcactacgcgctctgagctccatgagatttccacagcttggtccattcctccatggcgtcagcagctttggcgaagatcggattcttgggtgccagcttctccctcacgatgccggccagctccttaacgcagccatcaacagtaactccattcctcgacagcttgacagactggaagaaggggaggacgtcgtccatcaacttcaccccttcccagtctttcaggctctccaaggccttgcctgcctcagcatcacttctcatcacataaggcagtccggtcttcatgccgtagcccaagctgtcgcagacaaccttggcacacaggccattccatatgtcctcaagggtatcccacctgtgactcccttccttgcgtat

SEQ ID NO: 1683 - DNA, 757 bp, Avena sativa
accagtcagattcacatcgcccaccaccaccacccctctcggattctcaggtcgggatctgcgcggcgcccctctcgaatcccagacccgacccggcgaagaagcagaggagaagacgatggcgaaggaggcgctgaccctggcggaggtctccaagcacaacaccaaggacgactgctggctcatcatcgccggcaaggtatacgacgtgactaagtttttggaggaccaccctggaggtgacgacgttctcttgtcctcaactgccaaggatgcgactgatgactttgaggatgtcggccacagcacgactgcccgcgcgatgctggatgagtactatattggtgatgtggatgcgtcgacgatacctacccagacgaagtacaccccgccgaagcagccgcactacaaccaggacaagacccctgagttcatcatcaagatcctccagttccttgtccccctggccatccttggcctggccgtagccgttaggatgtacaccaagtcggagtcggcttaattatcatgtgccatttgttcttgagaggctgattgaaggtgtcggaataagttagcagtttgctgcgtgataaattcattgagatgtagcctgtgttctgagttgttcgaacattgccgaggattttgtagtgaaaactgaagtcgacgggattccaaggtttttctaaatattaaaaaacatcatcatcatcctctcgcagctctcagctcgaatttcttgcgtcgtccgaac

SEQ ID NO: 1684 - DNA, 643 bp, Avena sativa
caggaacgttttcgaactataactactgcctactacagaggcgcaatgggcattttacttgtgtatgatgtcactgacgagtcatcattcaataacataagaaattggatcaggaacatcgaacaacatgcttcggataatgtgaacaaaattttgatagggaacaaggctgatatggatgaaagcaaaagggccgttcccacttcaaaggggcaagcccttgccgacgaatatgggatccagttttttgaaacgagtgcgaagacgaacctgaatgtcgaacaggttttcttttctatagcaagggatatcaaacagagactctcggaggctgattccaagcctgagggagggactatcaggatcaaccaggagggtggagccaatgcagaggcggcacagaagtcggcgtgctgtggatcttgaacccttgtcagtcactacaaggataagatagttggtgatacagtgcctgtaatttttatcgtttgattctttgccggctgctttctttgagcgttttttaagttgttgctgctgttaggatttggacaagtgtgtgtgttaagtcagaacaattgcttgcagtattggtggagactgactctgatgttgataagtgatcatagaattaagcaaaaaa

SEQ ID NO: 1685 - DNA, 777 bp, Avena sativa
attcccgggactcctccgccgccgcctcaaccctagcaccatggcgtggcgcggcgctgcctcccgcaccgtcctcgccgccgtccgccggccggcaccctccgccgcgatcggcgtcctccgtgcccctcctcccctcgccgctccgcgccgccgtctcccttcagccttcgccaacgccaacgccacctccacctccccgctcggggccgcacggcccctggcggcgttgatggggtcgccactgacgacaccggtgatcctggcgcgattgacggcccacccgggggccagcgcccgggcctgctgcgagctctcccaggggaatggggacgatggttgaagttggaggccgcacagcatgacgaggactttgtcctaggatgatgtacttgaagaggccatgtagtattcactttccttttcataaaggatacaactcttggatttgtcgtttggaaagctaaagctatcctggtgtaaattcttctaacttgagtgttaagaagaatcttctccaacaaaatagctcgtttctccaaattcctagcctagactgaaaataattttccttttatatgtcatggtctgtgacatggatttagcatctacgtttgtgtgaaatatcttagtatggtccgctgagaggatttggtcgcacactttatacaatgtcttcgtttcaaagatctctttgttgcatgagcagcaaatgtagataccttgtcacttcaggtttgatttcaaatgaatttgttactcgggtggcagacacaa

SEQ ID NO: 1686 - DNA, 772 bp, Avena sativa
gccttcggcagccacggatccacctcccacctccgcttccgccacttcacctccctcgccaccgcatgtgcctacctcaaggacgagagggggtgtgacatttgcggcgtggagatcaccgacgatgcgatgccggtgacggcccacccgttccgcaggagcacagcgttcctcttcggcaatgagggtacaggactatcacaaaaggagtgcgaggtctgtgacttcttcgtctatatccctcagtatggtggcggaactgcatcactgaatgttacagttgcagcatcgattgttctccaccactttgcggtctgggctggctttcctgaacgaggccgagaaggcaacaaatttgtcgtagccgacaaaccacaggggcagtcgagggggctctactgctcagactcaattgaagacgtgattgaagagcgcaagtcgcgaagagaaaatgcctgcgatatatttgaggagaatggaagtagcctcacccaagaatcaaatggtctagacacaatgtttactgactagagtactccatttcccctccgtttctagacaaagccccgggatgatgaggggctgacaagttaaaatcgcaacaccgcaatttctcacctgcatctttttcatcaagggagagcacgggtatcttttgttgtttcaacaagcatgcaagtgccactgcaacacatcccttcgaagttgacgtgagaagtcctggacggtgattagaaaacagtgccttcaatgtagctctaaaggcatagat

SEQ ID NO: 1687 - DNA, 479 bp, Avena sativa
tacagttgcagcatcaattgttctccaccactttgcggtctgggctggctttcctgaacgaggccgagaaggcaacaaatttgtcgtagctgacaaaccacaggggcagtcgagggggctctactgctcagactcaattgaagacgtgattgaagagcgcaagacgcgaagagaaaatgcttgtgatatattcgaggagaatggaagtagcctcacccaagaatcaaatggtctagacacaatgtttactgactagagtactccatttcccttccgtttctagacaagccccgggatgacaaggggctgacaaggtaaaatcgcaacaccgcaatttctcacctctggatcctttttcatcaagggagagcacgggtatcttttgttgtttcaacaagcatgcaagtgccactgcaacacatccccttcgaagttgacgtgagaagtcatggacggtgattagaaaaacagtgccttca

SEQ ID NO: 1688 - DNA, 723 bp, Avena sativa
ctcaaggaaacggtatcaagtttgaggatcttgtgcaaagtaatatggcaaagcttggttttacggggccttttaaaacttggatgatgtccataagctacaggtgtatgagaacattattgcggacgcgggacaaggaaaatccgtggtgacttacacatttgaagctttggggaaaaagccgggggttgcgttttctggttttttacagcagccgcgatggtgtgggacatatacacagcagaggataagctgcaggcggcggttagggattcagtgaacgcgttaaccgaagtagttggccttgagatcggagaagtcgtcgatgctgctatagaggccggattcatagcgctcgacatcgaaatcgcttccgcagctatcactgtaattggggcagtcgccgggttcggaattggtgccctcattgggatagctgcagattcgttgcttgacttgattttcagctctggaactagcaaggtgcatataacagacgggcttaaggtttgtcgtgtggctccgatgcccgatggtctccaactcgctcgtctagtgaagcataattaccccgacctgtaaactgattatgctactatgtctgttgctatcttctgctgctactagctactaatgtacatttcaagcctgtaggtgttcctgtcagttagctattactgtcgggtcgtttgtattccttgttcggtatcgaacacagcagca

SEQ ID NO: 1689 - DNA, 899 bp, Avena sativa
gtgttcagtgtccacaaacaattggaatccagacatattacaacacatacatgacttaaacagtgaaacatgactcaaattatacacatcaaaatcttccaagaagtgcaggaatgcctaattacatacagtaatatccgcaactaaaacttcagagtggaatgcccctcaaacttcctaatgggttcacattggcaccgtggaaagctgctaccggcagcagattctccaggtagatcagaacacaccgaaaagtgtagcggcggcaaacagcaaaaacagtactcctccaagcagaccaaccagtttctcagacaggtagttagctaagaatgctcctccaataatagcaagcaaagttgcaatcaagtgcccagctatggccccgctagcaacgcccaaaggagactgtgcggcacctaaagcaattgtagccagcatagagcgatcccccactccgcaaagaaaacaaggctgaaagatttccagataattgcaagaggactggtgatcttcagtgaagccttttctttgacaagctcctccgcttcagctagttctccagattcagagtttttctgaagatccccatttgcattatctggaagtgcccacgcatctttaattgacttgaaaccaaaaaacgcaaggagcgcaactgctgcatattcacctatgggcaatgttgtttgaaattgtgcgggtacagactgaaagatccgtccaatcacgacactcacgatagtcatcagggaaagagcagccattgatccaattaaaaccaatgccttttgatactgcatagcgagtagcgcagcaatgaaaaaatgtcttatctccgatctccgatacaaaaatcaatgtaaatgctgccgtgaaacctgacttcgccagagccg

SEQ ID NO: 1690 - DNA, 712 bp, Avena sativa
ggctgactaagacagatgaacttgtttttgttcttgcggccacaaatttaccatgggaactggacgcagcaatgttacgccgattggaaaaacgtattcttgtgcccttaccagaatcagaagctagacaagctatgtttgaagagttcctaccatcttctcctaacacaatggaggttccgtatgatattcttgtggagaacactgaaggatattcaggctctgatatacgccttgtgtgcaaggaggctgcaatgcaaccccttagacggataatggcagctctagaaggcgcacaagaattagtgcctgaggatgatttgcctgaagttggcccagtaacggcagaagatattgaacttgctttgaggaatacacggccatctgctcatctccatgcacatagatacgagaaattcaatcaagattatggcagccacgtcctcagctaaaggtagcaaaggcgagtatatacccgccttagatatttctaaggtgctctttggactgttccctaagcatgtctagaagcctgttgatacgatttcaattgcaccgtatatggaacctaagtgttagttgggtactgtacttaccatccatgtatttccagctcataagcattcactgtgtacgatgtttgctccatcatgtacattaccatttgtttgagaagtaataagctctccgggtatttaaatagacaaaaaaa

SEQ ID NO: 1691 - DNA, 842 bp, Avena sativa
actaatgcacatgatgtcctttctccaacaagagtcaacagtctaacggtttacagtggttcagtttattagatggaggcacttagttgtgttttgtccatcgatagctttctttcctgctacaatagttgtacaccattcagagtcgttccatgccttttctttcttctgcagattctgtacttagtgcattaagcttgttatttttatacacctcaacttgttcacgaattgaggtggtaggaaccattaccatattttcaagttgttgaacacagtcatttgcttcctggaacaatgaaacccatctgctatctggttaacccctttgtttattgttcttgtcgctttgttgtttgacaatttcccctttcctttccaaaacagcttggattcaaaatgttccttggtgtgactgcaactgtaaccaattgggatgctgagggtacaacttgcagctttgtattggaagacaacccacttgtagattttgttgagcttcctgatacttgccaaggccttcattactgcaatgttttgagtggagttattaggggagcactggaaatggtttccatgaaaacggaggtcacatgggtccgagatatgcttcgtggggatgacgcctatgagatgcgagtgaaactcaccaagcaagtcccagaggaatacccctacaaggatgacgactagtttgttctcaggaatagttcgtgacacgttgttgttgctcatttgcatttccatgttaagctccttcgtggttgtaattctggtacaacatgatgtttacatgaggtgcctgtgcattatattttgcagttgcgctgtagtaaaaaaaa

SEQ ID NO: 1692 - DNA, 1013 bp, Avena sativa
tgtaggatacatttacagttttatacaagaacttagtttcttgaacttgcatgctacacgttaaaatctccatgttcccttcagaaggatctgacatgtaaatatcttacctttagttatatacagaaccaaatacatgtaaaaagaataactggttagggtaggaataaacaaaggcacaatgatgtggcaaaaaaatcttgtctctacctctacattggctcgaatcctttccctatctaatgctaccagaaaccagaaggtgctacttggcattctttgttggcaacactaccccagaaggtttccaacaaaaaaacactagcaattgcatatgcataaccagaattcatattgtgaggttttcttggatgaccgtaaaggagccacaaatgtttccgcccatgtcagggaatgtcgtgcatccttccaagggtttcaccttgcctttacggtcaacacttacagggtacttcatgaggtggcctctcatctcattcacctcgttggaaaggaactgatcccagttatgttccccgagacgacgaacccgcctcatgcattctaggctctctggatggttaaagtcttcctcgattattccaatgtgctcagcccagagggacattctgtagccgtaaatctgtccacggggggcagaaatcttatttgcccatgtatattgtggttgatatgctcccattgcaatctcagtatctctgatcccttccatggacctctggttgatattagctgatccaatgatcacgtattcatcgtctacaatcatgccttttgaatgtacataaaccatgaatctcctatttttcctagcttgttcctgaggattatttccagtagttggagtgctagggttttcatcaacttcacgatttccaagacaaaagaagttcaaataatcttgaggctcgtatatatcatccagacctacttctttcaaggccctatatattgtctcatacatcatttgcattgttttgttctgccagtat

SEQ ID NO: 1693 - DNA, 936 bp, Avena sativa
tagcacatggttaccccagcttttctgtatccattggggttctgttccgaggaaagcctgctgctgccactgtggtggaattttgtggcgggcctatgtgctggagcactcgtacaatttctgcatcttctggcaatggtgcttattgtaatgggcaaaagattcatgtcagtccagcagacaaggtggaacaatctcttctggtaactgggtttggatatgaacatgatgatccatggctgaccaatataaatttgttcaaggaatttactgatgttagtaggggagtacgaaggctaggatctgctgctgctgacatgtcccatgttggtcttggcattacagaagcttactgggaatatcgccttaagccgtgggacatggctgctggagttctgatagttgaagaagctggtggggtagtgtcgcgcatggatggtggagagtataccgtctttgatcgttctgttcttgtttccaatggtgctgttcacgaacagcttttgaatcggatccggcctgctactgaagatcttaagaaaaaaggaattgacttctccttgtggtttaagcccgacgagtaccctaccgacttctgagatatgcagcccttcagccacttatctttaaagcaagcaaagataccatgtacgtagaccgacaattcatttcaaagccatttgactgaagcgactgatacaaaagtcaaactttacagaaaaaggtgtagagctttaacgagctttcgatcaatttcattttgcttagatcaaaatgtatccgacattaatgtctgcaaaagagtgatggcctgtgcctgttgtatttggaaaaatatcactgtcagttttgccaatcatggatagtaacaagatttctcaagaatacgattttgccactactgaagaacttgctggcatggtgatgttaaaaaga

SEQ ID NO: 1694 - DNA, 709 bp, Avena sativa
tggccagcaaccaaacatggccaactctggtggcaagcagcagtcgcaaatgaaacagcagccgttcccacaaggtggtcacttcttcatctccaatgcatacgcaccgcaaggtcctggtggcctctaccaaaagcgtccagctgacaagacgcagcagcaggttccccatcagcagacatctggttcatcggcgatgctttctctcagctctggttccatgtcgatttcgacagctgcgattccagctgatgcagggaaggctcttgccgcggcggctgccagcaataacatgaagggtcttcatccaacgcctggtggttttatgcaccttacgacagcaggccaatctgcgggtggttcgcctcactctcacatgtcagcagcacaactgacgtttggagctatgccaatgcccgtaaagcctacaagtgaccagaagcctgctgctggcaagtaaaatgatgcagatgcctggagatgggagtggtaatctgagctaattgctaattttgaagaaggcgtggaaggctgctcaaccttattgcgaggaagaagcaattgggagaacagccacagggtgcagcatgagccggcccgttgttgaagaagaggaatgacagcgcccattccatccatgcgggaggctggcaaacatgagtaatcaggaatggctgatgggagtgatacttctgtgtagtaggttatc

SEQ ID NO: 1695 - DNA, 922 bp, Avena sativa
gataacaaaagcgaaggaagaagcattgagcagaaaagatatattagataaagttgaaaaatggatgtctgcatgtgaagaagaaagctggcttgaagattataaccgggatgacaacagatataactcaagccgaggtgcccatctgaatctcaaacgtgccgaaaaagctcgtattcttgtcagcaagattccagcacttgttgaaactctggtggccaagactagggcgtgggaagagagtcgtggtttgtcctttatgtatgatggtgtaccgctgctagctatgttggacgagtatgttatgctaagagaggaaagagaagaagacaagaagagaatgaaggaacaaaagcgctatgtcgagcagaagctgaccactgatcatgaagggccattcggatcacgagtgagccccaacagaccggtaactgcaaagaagttgcctggcccaaaatccaacggcacctccataaacggcacacctccaagcagaagactatcaatcaacgggaggtccggagggaaggatagcaagagggactccctgaaggcagctgcgtcctctccggggaacggagccatggctgtcaaagaggacgcgtcctcgcacatctctggcactgatctggctccgaccacaccgtgatctctgacttgatgtggtatattagataagagaggacacttttctgatgtttattccatttgttttgtggtaatatattgtaatgtgtttgtagcgaggaggaagtatatgatgacgtccatcggccctttgagtagctcagatatttggccagggtttgtttgcctacctggtgcaagtggtgttccacttttgatttagtttcacccaggtgtaactgtttctacttctgatcagacgttctagaatagtctttgctggtctgtgttatta

SEQ ID NO: 1696 - DNA, 901 bp, Avena sativa
  modified_base (7)..(7): a, c, t, g, unknown or other
gtatcgnattatattttttttttggtatggcaataatgtaaagtaactgttctcttaagaagttccaccaatatatcaatgtcggacagcagggttacacgttttgaagttccttccatttagccgtctatgtctgattgctggagcaaagaatgttcctggatttactctgttcagcctcagcgctttcaggagcagcaacagtcagcaaatgttagctaaaccgtatgtcgtcgcttcaagttacaggtagcaacaatagcaaaagaatttcaaggtttaagtttcttcagattccaaacagattattgccactgaggtacggcaatggatcatcacctgttatcttttagaggcaaagcatatccttttctgaaacagattctagtatatctcctgagaaactgaagcagttgtaatctcctgagaaactgcagcagttgtaatcacagatcataaataatctctcctaaatgtttccattcgatgtatacgaccaatactcgttgaccagctcacggaacagagatccttcagtctccatgagcttcttgggtttgtcatactccactaatttcccatcgctcattgcaagcaccatatcgcattccataactgtcggtatccggtgggcgactgtaataacggtgcaatgtttgaattctgtccggatcgttttctgaaggatagcatctgttgcgttgtctatagaggccgttgcttcgtcaaggactaagatacggcaccttctcagaagtgcgcgacccaaacaaaagagctgtctttggcccatgctccagttcgaaccgtcttccgcaacaagtgaatccagtccatgttctttctcatggacagcttcaagaagttgacatttgtcaagaacctgcaacataatagaata

SEQ ID NO: 1697 - DNA, 656 bp, Avena sativa
gagtatgttgccatcggaccacgtttttcaaatttgatctcacaaactcttatggtactcctcaagagggttcctcctaagggcaagaacttgcttgtcattggaacaacaagtgaggtgggatttctagaatccgttggtatgtgtgatgtgttctcggtgacctaccatgtccccaaactcaaaaaggaggatgccgcaaaggtgttgcgacatctcaacgtgttcaaagaaggagacattgattcagcagcagaagcgctggacgatatgccgatcaagaagctgtacacgcttgtggagatggctgcgcaggggccatcagggggaagcgcggaagccatttattccggggaggagaagatagacctcaaccatttcttcagcatcttgagcgacatcatccgctactgatcacacatacatctgagaaaaagaccctaggctccactataggaatttgtttactccattttgcccagcttgctattttcacagggtagagtagagtggtttaaccgtgagtagcctttttcgtttgccacatttcagcgggagttgtctctttgtcttctgtcgatataagcatctgaaatcccgaggccgagggcttgtttggtttgagatctggacgcctggaaatagctcgggaattt

SEQ ID NO: 1698 - DNA, 540 bp, Avena sativa
aactgtgcctgacaagtgcacatctcaaaaaggatgctgcaaaagtgcagcgcttccattcatttctagccaagcattattagggtcataggcaaaatattgacattgtatccatatcaggaaatgctgctggggttgtggctgccttgctcttgttataacaatgacaaggtgcaggaggccaaagcagtggttgtggttccaccctcagaatgcacccccctggaataatcatctggccgtttggaaagatagacatggtaaatagagcaaagcaaaacatggttttggtcacctcagtcagcattaggccgtgccaaaaagatgtgtgtttgtatatatgtactggcagaatgttgtttgttctgttaaccttgttgtctctagtgcttttttggtcgtagaaggattctgttaaactgatcaccatttgttgatgccggtataggtctcttgtcatttcgacaattgtttttctgatcaagatatgtagcctttgattaatcaatgaacatgtcaacagtcatagttcgttgatca

SEQ ID NO: 1699 - DNA, 709 bp, Avena sativa
ggcctgcagaacaatgctttataaagttccctcacattaaaaatccatttaatgcatccgaattatccaacagtataaatattgaaagacatgtttcagaccaactaaattacgcccgagccatccagtcaacagaaatgctaggctcctgcttcagcaattgtatcagcagccagactcttcacaaaagaagttacacaaatgctaacgaagaacatactcagccgtatggcaatccaaatagtcacagtacaaaaaacatttaggggaaacaaacagagggccaccaaacgcttccagcatctgtggaaccaagtgctcacgcgttattagcatatggggactcttcacgctggggtggctgtgcaggggacctgctatagctccgttcacgagcacgcgctggagacctgctgatactccgggcgcgaggaggcggtggtgacctgctgatacttcgcgcgcggggaggcggtggagacctgctgatgcttcgggcgcggggaggtggtggagacctgctgacgctacgcgcgcggggagggggtggagacctgctgatgcttcgcgcacggggaggcggtggtgatctgctgtaatttcgcttcctcggagaacgatcccgtgggctgtagctccttctaccatagcttgggctcctacgatatcttgggctacggctacggctgcgcctcgggcttcggctgcg

SEQ ID NO: 1700 - DNA, 613 bp, Avena sativa
gtaatattgccagaaagaaacttcaaggacttggctgagattccagcgcccatcctctctggcatagagattctgctcgtgaagcgcatcgaggaagtacttggccacgctttcgagaacggattccctttaagactacagtccagtctctagcacggacaataccaactggaacctgatgtggtgttttcacactggttatgtaactgttccgaagattgactgatcacttgttcttggctgatgtatctgcaacgagcagtcgagagctatcgagcaattgttccatcggagcgaatctaatgatgcagtccttgcgtgccaaactcggttaaagctaatattcggaatgtatatatggatatccatgaaaacggcaaggagatatgctccgacctttgtgcttatatttatagagatgctgatctatactcagtttggtattggagcaaggaggtccacttgttgttttgtgctgctgtcgggtttgggtgtatatgtaacctattacagggaaaattcagtgttgcaatgtaataagatgggtccttacaaagaataatcctataagattatttgccaatacaagttactttccccttaacaactaaaa

SEQ ID NO: 1701 - DNA, 986 bp, Avena sativa
gccacttcatgcaaatttgccaccgggacctgaagctggagaacactctgctggacggaagcccggcgccacgcctcaagatctgcgacttcggttactcaaagtcgtcgttgctgcactcgaagcccaagtccacggtcggcacgccggcgtacatcgccccggaggtgctttcccgccgggaatacgacggcaagacagccgacgtgtggtcttgtggagtgaccctttatgtgatgctagttggcggttacccttttgaggatcctgatgaccccaagaatttcaggaagaccattgggagaattatgtcaatccaatacaaaataccagagtacgtgcatgtatcccaagactgcaagaacctccttgccggtattttcgttgcaaaccctgcaaagagaataacaatgagggagatcaagaatcacccctggttcttgaagaacttacctagagagctaacagaagctgcccaagcaatgtactacaagagagacaacagcgccccaacctactctgtccaaaccgtcgaggagatcatgaagatcgtccaggaagcacagaaaccacctccttccagcacccctgttgcaggtttcggttgggtggaggaggacgagcaggaggatggcaagaagccagaggaagaaccggaggaggacgacgaagaagacgagtatgagaagcagttgaacgaagtccgtgccagcggcgagttccacatcagctgattggccttcgctatctggcgtgagaagaccacaaaccggagataattgtcataaatgtgataacagatgatcttaccctcatccctttagtttgtggtccagttctctaagtttttctcttcattcttgtctctgatgctgcaacagtgtaaattaccaaactagttccgtctctgtctttataatgactgattaagttagcatccggaaacataatttatggaataaatcatcctattgagcatgttgtta

SEQ ID NO: 1702 - DNA, 654 bp, Avena sativa
tatattaatacagatgtacgaatcatccttggctgcccttatgtatgattcgtatatctatattaatacagatgtacgaatcatccttggctgccttatgttatgattcgtacatctgtattaatatagatatacgaatcatacataagggcagccaaaggatgatggccgaagaagaaaccctgttgtgtccccatgtgtctccaaagctagaaaacactcgataagaaaagcccatgtacaaagcatatccaatgtatgcgaaacgaatggagcatttctactgcaaacgtccaaaacatgtttcccgccttgacttttctagcccatcatttccatgcgaccgagtcgatctcgttcctcgcagacttgtacagctcaagcttcttcacgagagaatccctcttctccatcaaaccggggtcctcatccaacatcgcgctcagctgtttcttctctttgcttcccacatgagcatagaaacggttcagcaagtttctttttgcctccttcacttgacaatgtacaacggctttcggaatcgtgttcctcaatgtatcgcaaaccatgttaatgtaagatgatacatttgacccgattcttctgagatggttgtcctgatatctgtcgttagctggagtgttattgttagcc

SEQ ID NO: 1703 - DNA, 619 bp, Avena sativa
tgtaaacattggaagcgatgaaatggtgagcatgaacgagatggctgagatagtacttggtttcgagaacaagcagctgcccatccaccacatccctggccctgagggtgtccgtggccggaactcggacaacacgctcatcaaagagaagcttggctgggctccaaccatgaggctgaaggatgggctgaggatcacatactcgtggatcaaggagcagctggagaaggaaaagtccacgggcgccaacgtgtcagactatggatcatccaaggtgtgcaccacgatggcgcctgtccagctcggctccctccgcgccgcagatggcaaggagtgacacactcaacctgggaaagaagatgatggcatcatctgctgtttgttgctagtcgccgcaccatatcttgattcagtttggacttcacgtgagatctactatacgttttgttagcttgcatttcacctgctttgtgtttgtttttttgtaaacgggaaaactgcttggtacgagaagatgtgaatgcttgctatagacaacaatatcaaattatacatgtaaaatgatgtgggttcgtcttcacgagaacaatgaaataaggggctggttattatttttaac

SEQ ID NO: 1704 - DNA, 716 bp, Avena sativa
  modified_base (680)..(680): a, c, t, g, unknown or other
caggacgtcagtaaaatcgaaacctttacagagatggaaaccttatgaccttatacagtgatgaaacccaaggcaaaaagatctacaggtgtccttgcttcccatcatcatctaccctcctaaatattccagctaattgattcgccttctttcatatatatatgtatcttacttgaagaggaaacaaaggtacaaatatacaacttctctccttttagaacaagcaaaatctcttctcttttttattcctcctttatttacatcaaaggcttcccgagcttaaccttcctccgaagacggcactggacaggactactggtaaggctagcctcgctatctgtctgtacaggtgttattctgtcaagctaaacattcatcaatctctgagagactgagacgagactccaatacgcctttctcctgcttgaataagcttctcgacccgggcaacaatatgtttcccgtaggtgtatctcttcagtgcattcaggtggaccttgatacgcgaaagaatcagctcacggttatggtcatcacaggtctccaaaaccttttgcacaacatagttagcaaactggtctttcatcattgcctgtaatggctcattctcatcggtagtgccaagcatctcatcaattagaatctggcgctcctcacgagaaccaaaagaaggcacttcncaacaacgttggaagcaaatttctgttggctcatct

SEQ ID NO: 1705 - DNA, 635 bp, Avena sativa
atatttagtgcacctaattattgttctaccgctgtggaaacatggcctcaatcttggaagttgatgattgcagggagcatacttttatccagtttgagccggccccaagaaggggagagccagatgtaacccgtagaacaccagactatttcctgtgatgtgaaactggtgttggcagcaaaggtttgatagttagctgaagtttcctggttgcagataatctttttgccccgtgtgttattcttctttatttttatccatgatgcctttggctaccgcgagcatgctttgctgcatcgtgattcaagtgtatacgtacagcctggaagggattcattgtgttctcacctctctaactgatttgatgctctgctcgggggcctgcagctagtgacttttaagcgtcagagcagcatttgtattatgacaggagactatttcattcccctttgtaattcatttttcccctttggacattccacctaattttcttcttatgattcttgtgtagagatgaacaatgtagttgtgtatggttctgtgttgagcccttaggtcttctgaacccgtcttgatttgtcgtatagaaaatacttgaagaagaaaactagacaccgagtgcaacctagtgtgat

SEQ ID NO: 1706 - DNA, 695 bp, Avena sativa
ggaggctttggcactgttgcatgggtagatgtgaaacagtatgaagttatgcaacctgacaagatagcagttgacggtggagaacaaagcttaaaggagttgaacgcaattttctctaaaccacttcgagagttcatgtccgccgaaggggaggttgatgatgccgctcttatatcagtagacagcaaagggatagacatacgggttcgccagggtgcacagttcaacattcagaggcttgcatttgatgtaccttacaaggtggagaccctagaagaggccaagagagcactgcataagataatcaagacaagcaacaaataaaatgaggttcacacacaccgtcatttacccagtttctccagcactaaaaacttgtgccgtgacccgacaaaaataacaaaggatcttgtaatgtagcctgcataagtgcaaaataagatgggtatctccttaataacgataatctctgtgggaaggaaatcgccaagtagtgtacttatatgcttgtatccttgaagtgtagagtagcgcgtgctgcttgtggaaactgaaagcttttgacggctgagctagtcgtttgatttcagcatgtcagcattttagtttgactatgaaaatctgggttcccaagtttgtgtgcttattctgatgatattcttacagtaaactgtggttgtttatcttggcaaaaa

SEQ ID NO: 1707 - DNA, 793 bp, Avena sativa
tggagcaggtagatactctgagcatatgttgcctgaaatcgtcaagagagattggagaaaggtgcacagtggttcacggtgaaacggcagcatgcagtccttattcttactgacactctttactatgggaagttcaaacgctactgtaagcctggaaatgaatttcacaactgctactctgatgagcactatttgccaacactattcaatatggttgatccaactggcattgcgaattggtcagtgtcacatgtcgattggtcagaagggaaatggcatcctaaagtttatagggctgtcgacacaagctttgagctgcttaagagtatagcggccattgacgagagcgttcatgtgaacagcaacgcgaagcatgaagcgcagagaagaccgtgcgtgtggaacggcatgaagaggccctgctacctcttcgcgcgcaagttctatcccgaggcgctcgacactctgatgaacattttctcgaacttcaccatcatatgagggacggaggaggcctctctcgtataggttttcccctgattgttgctgcgccagggcgctacagtctagctaggcgttgttgtgtattagccggcgttagaattcagggctggtcagaggattgcgcgtctcagatgtcatctgacctgacacggtgctgctctctgaatccaaatctctcgatgattaggctcttttagtactggagtattagctattggaatggcaatcatttttgctggtgtaaaacagcgacaaatttctttgcgcaaaagaaaatggaactgacaaa

SEQ ID NO: 1708 - DNA, 522 bp, Avena sativa
tcgtcagtcacaacacctttccgacgaaagtagcgccatgcgctgataggatatcctccattacagccttgaccacacagaaaaccacagcaagccactaggtcattgactgaaagtgagatgcttatgttgagatgaatgcagaaacgatcctggagacattccacagcaccaaaggcccaacaagaaccacagtgaccttgatcaagtatggtcccgattgtgctgcaaccagaccattgagatctagcgtcgaactccttagggagatcaattgaccttgaatatgttttggttggaacaccagctagtaaagccggaggtgtggacttcacccccaggatatgcttaaactgctcaatagtatagttctcaaagtaagggttgtgtccagcagtccacccggcattaggatgcttgttgatcgtctgtatgatgtctttctggatgattcttagagaattgtctccgtggctgctccaactagctgggcgcagcagcggcggagaagacgacgagcag

SEQ ID NO: 1709 - DNA, 651 bp, Avena sativa
gctgaaatttatgagaaagattatgcacaaaaagctggccttgcacctgccacactttctatttcagatgaactgaagaaagaggcaaatgatatattcaagaggatatgcctctttcttcagttcatctgaaatagaaagtgtggcaaatgatatattcaagaggatatgcttgaagttggattgcgctctctcatttccactttgccccgaagccggtcattgaggatatgtctatacaagcaaacgtacctgctctagcaatggaagaggttgcacctgtagctgtttcagatgctgcaatgcttgctccggaagaagtttttgaaggaaaaggcgatattaaagaagacgtggaactcacacaagctgaacgcaaaagaagaagagctaacaagaaaaggagatacgcagaaacacacaaggacaggccagccaaggtgcagaaaaactcagatatgtaggaagctgctttgcctgctgttgcatagctttggagttaacagtgctgagaatatgcttttgtcagcgtagtacctttctattgcagcttggtggggctctgttgtagccatttttcgagctttcatgcagtgtaaaagcagtatatgttctactcgtaacagtcaaaaaatttgtaactagtaacag

SEQ ID NO: 1710 - DNA, 826 bp, Avena sativa
gaagactatcaagaagcttgctaaccctaatgctcctcttggctacgcactgtgcttcctcaatttagcttttgatggttacactaattcgacccaagatctaataaaatccaggtaccccaagactaacccttgggatataatgcttggtatgaacctctggggaaccatatacaataccgtaattatgtttgtggcgccattactgctcagcaattggccatacgcaaacggttttgaggcggtgaaattttgccaggagaatccagaggtggcctgggacattctcatgttctgcctatgcggtgctgtggggcaaaatttcatcttcctaaccatcagccgattcggctctcttactaacactaccatcactactacccgtaagttcatgagcatcgtcatctcatcagttatcagtggcaacccactatccttggagcaatggggaagtgtcgtgatggtcttctctggcctctctctccaaatatatctcaaatggaagagaaagaagggcagagaacacaaggaatgaactcaaatattttaaggacattttgatttgtagctttgattgcacacatttgttgtctgagatatttgagatatcatttatgcagcctgttgaaattataggaaataggtttacattaacaaaatatgtgcaacatgtatggtaattgttatagtgttagctatttaaaaacgcctgggtggtctctgatctactgggaaagattcagtgaatagcttcaagaggaagagttgcatggtgcccaatactggagaaaatggagtcaaactttctgatctttaattttgctat

SEQ ID NO: 1711 - DNA, 528 bp, Avena sativa
tttgaatcagaaaacatttattttcatcagtaattaccatgaaggatgcaagacatatttgttcaccagacatacatataacatacacacaatgaaattatggaacaataaaattgttattcatcaacagattgtggctacactcttgaaaagttcaagcgaaacaaacataaataaccgaacagacaataaaagaaagaccaaagcaggacctataaaaccttcaatgcgaacaaacattggctgcagaatacggcaccacataacaagtcttgcagtgttatattgttttctgttcaatgctatagccatcccatggcacccagacggaaaatattttggtctgatcactaaagcttgcctcggatggtcatgcaacttacttggccatcatgactttaacaaattcgtcgtagttgatctggccatcaccatcaacatcagcctcacggaccatctcatcaacctcctcatcagtcaacttctcacccaggttggtccatgacatggcgcagttcagcagcagag

SEQ ID NO: 1712 - DNA, 579 bp, Avena sativa
  modified_base (549)..(549): a, c, t, g, unknown or other
tacactggagagacaacttcattgcgaacaaggagtaagtatatatatattgcttttcattcactttagaagagtaatactgttgttacagttgagtaaaagacgtactagtgcatatatgttcattgagcaaatgaattttgttgtgacacgctagtgcatatatatgttcattgcgcaagtgaatttttgttgtgacagacgatcatctacacaatattactcagttagtattaattcgcttttcttttttgttgcagtcaagttttggccctgggctttgatgaaggttcatgcgtatatgggagtactatctcgtgttctctgcgtctggtttcaagtcacgagcagttggagattaccaggttgtcttctctcgtccaggcaacaggcgaattagccatgtgcctgcttgatggctaaaggcaacatatccttcttcgttcagctctcgaactgctacttctcgatagcctacggaccattgaataagcgtatcctggactggaatggtccttgtttgatcatgaaatgttctagtttttttgngacagtgtttcttttgcgtgttgttgtgtg

SEQ ID NO: 1713 - DNA, 687 bp, Avena sativa
ccgtatcacagaaaaggatgaatttattgtgttggcgaccgatggggtgtgggatgttctttcaaacaccgaagttgttagcatcatcagcagagccacttctcgggcttctgcagcacgcttcctagttgaatcagctaatcgtgcctggcgtactaggtaccctacttctaaaattgatgactgcgctgttgtctgtctcttcctgaatacacaggaagcaaataaaacatccagttcggcagccaacaatttggcaaatgttgtagaagttagtggcggtaagcactcgacaattgtccagcttagccctggagtatctgctgaggtggttactgcagtggtgaaagatagagatgaggtctctgttgttgatactgttgcaaagccagttactatctcagatctgaggaacgatgatccaggtacaaagcaaagcatcatgtgagcttgcttgttgcctgatattggacatctgttggaagatttgtgctgtgtccactgtgcgctccggatcatcattcttagactgatgcctgtttttatgagtgcgttggaattcgctgcttgctattttctacatgcaagtctgagtaggattttaagttttccctttgtaaagtaccacgtcagttttagtgtaacctgccgtatttccttgtaataataattttattcttgtacatt

SEQ ID NO: 1714 - DNA, 827 bp, Avena sativa
  modified_base (807)..(807): a, c, t, g, unknown or other
  modified_base (816)..(816): a, c, t, g, unknown or other
cttcagctttctttcacacagcaatgacaaaggtggttgtaccactaccagtgactccgtgtatctacataacacaggataaggacagtctacaaccttatccttcatagttgatcagaatatgaccacagagaggcatacatacaaatccaagagatcatctattagtaatgctacaggtgcctatgtcttcctagcattgcttgagtagctgcgggttagctctcgattccatttattcctgacagtttgcgcgacagaagcttgctttcgacgacgcctgtaggcctctcttttgctgataaaagtaaggcctgctgtaagaaccattccaccgattgcccacgatattctttcacccacaggcatttctttcgcccatctccgaaaatcttcaagatcccaagagcccacatcatgtaatgttggactctcttttggagatgtccatgtatcagatatggaatccaaacttgctttcccaccatagcagaaatcatcgacttcaataggactgctattggaaacttgcacagagaaaccagcaaggcgacatagttctgtgccattagaaacccacttatgtgctttgccacaaaggatgtcgcctaaaccacaaggagataacgcctgcgttttcatatcaatggagaagtatgcttctgaacaagcttcgaaaaccatgtcacagaatgacgcacatattacaggaggtccaggcctgacaccaacccgtggatcacaaatcgagcactcgagcaattcccacaaatgaaggcattctccactgccttcgccagttgaagngagctttcncactgaaagca

SEQ ID NO: 1715 - DNA, 798 bp, Avena sativa
gccgtgcggttgggttcaacgtgctcatgtctgccttcatcgggctgctggtgaacctggtcatgagctatcccaccctgcctggctggctgccgtccccgctgctgccaatttacgtgcacaacatccacaagagcaagcacgggagtgactccgggacctatgacaaagagggcaggttcatgccggtcaatttcgagaacatcttcagcaagtacgcccggacgtacccggacaggctgagcttccgggagatgtggcggatgacagaggggtgccgggaggtgttcgatttcttcggctggtaaattgttcaatcacggagggatcgatggatgagcgtgaattagcgctgctcaatcaggctatgttaataactggatgtgttcatttatcatcatcagggtcgcggcgaagctggagtggtcgatcctgtacgtgctggcgagggacgaggaagggtacctgtccagggaggccatccggcgcatgtacgacgggagcctcttcgagtacatcgagaggcagcgccgagcccagcacgagcacgtcaagatgtcatagatccatcacatcgcctaccgtgaacagcggatcgaagctagcagacttcttcgatggttttccctctgcatgtagaacacaaataatggcaaaagctgttgattgtacacatatgggtctttatacgtgagtatggatatatacgatcaacaaggcctattagctcagctggttagagcgtcgtgctaataacgcgaaggtcacaggttcgagacctgtatgggccattttatc

SEQ ID NO: 1716 - DNA, 770 bp, Avena sativa
  modified_base (749)..(749): a, c, t, g, unknown or other
gcctattcctattggggccctaaggctggtcaagatatctacaagatggccagtgcagatctaatgtttgggggaataacaatagtatgtgggatatttggaacccttgcaggggggttcatccttgacaagatagactctaccatttctaatgctttcaagcttctttctggcgcgactttcctgggggcaatattttgtttcggtgccttttgtttcaagagtctttatggcttcatacccttcttttcaattggagagctcttggtttttgcaactcaggctccagtaaactacatatgccttcattgtgtgaaaccaagtttgcggccattatcgatggctatgtctactgtttccattcatatatttggtgatgtgccttcttcaccccttgttgggcttcttcaggacaaaatccataactggagagcaacagcgcttacattgacatccatcctcttcgttgcagttgtgttttggtttatgggcatatttgtccgcagcgttgatcgtttcaacgaacagagcgagcatggtgttcctgccaccgagagaacgaaccgcagaccattgctcgatgaaaacgacgaggcacacgcatctggatgatctgtggagtcatcaagcatgattctttttctttcttcctttcttcttagccgaattgtttcggtggtgccagcaacatgtgaaatgtaaatttgcgtgtccaatggctgtacctgtatatacaagaaaaaaaaagngaatcctttgcttactaaaaa

SEQ ID NO: 1717 - DNA, 888 bp, Avena sativa
ccgagttcccggacttcgtcgggaggggcagagcaccgagctacggaagcgagaggtggccgcgttccttggccagacgtcccaccgagaccaccggcgggtggccgaccgcgcccgacggccccttcgcatggggctactgctggaagcgggagctcaacccggggtccgactactgcgaccccaaccaggcggagtggccctgcgcgcccggcaagacgtacatcggacgtggccccatgcagctctcctggaactacaactacggccaggcggggcgcgcgctcggcgtggacctgctgaacaacccggacctggtggagacggacccgatgctgtccttcgagacggcgctgtggttctggatgaccccgcaggcaaacaagccgtcgtcgcacgacgtgatcacggaccagtggacgccgacgcccacggacatcgctgccggccgcgttcctgggtacggcgtcatcaccaacatcatcaacggcgggctcgagtgcggcatcggaccggacccccgtgtggccgaccggatcgggttctacctgcgttactgcaccattctcggcgtcagccccgggatcaacctcgactgctacaaccagaggtcgttcaacagctggttgtccgctgggctcgcggcgcagtgaaaaaccggccggccggcactgatcggagtagtactagtactagtactatactgcaagattgtgcctcatgtacgcgtatgatgaccaggaattttgtagtcctgtgtaatggggtgagcgtgttgaatcgatcacgtggaagctccccgtatcagaataaaataaatagctactccatccgatcatattaattgacttggatttatcaaaattcagatgaacctatatactaaat

SEQ ID NO: 1718 - DNA, 610 bp, Avena sativa
catcggcggcggggactccgtccatggaggagggcaacttcctcaccaagtacggatccaaagtgtacatcgtccaccggcgcaacaccttccgcgcctccaagattatgcaggctagggcgctctccaatccaaagatccaggttgtttgggactctgaggtcgtcgaggcctacggtggcgaaggtggtggcccgttggcgggggtcaaggtcaagaacttggtcactggcgaggtctctgaccttcaggtgtccgggctcttcttcgccatcgggcatgagccggccaccaagtttctcaatggccagcttgagctccatgcggatgggtatgtggccaccaagccaggatctacacataccagtgtagatggagtctttgctgctggggacgtgcaggataagaaatatcgtcaggccattactgccgctggatcaggatgcatggctgctttggatgcggagcactatttgcaagaggtcggtgcacaggagggcaagtccgattgactatctcaggatgaagagaccacctccagcccttccaaaagtccgttggcggcgcggaaagctgcattatgagctttctggtttaggttgtctctact

SEQ ID NO: 1719 - DNA, 619 bp, Avena sativa
tgtgaattatgaagtacttactccttactgttacaaattattactttctgaacatccacacactaacactttcttttgatggtttgatctccatacttgtttatgctgtaatttaatttattaggtgtttgatttgttcgacacgaagcacaatgggattctcgaatttgaagaatttgtgcgggctctgtctgtgttccatccgaatgcaccagttgatgacaaaatcgattttgctttcaaactctatgatctcaaacaacaaggtttcatcgaaaaacaagaggtaaagcaaatggtggtcgccacacttgctgaatcaggaatgaacctttcagatgatgttatagaaggcattatagacaagacatttgaggaagcagatacaaagcatgatggtaagatcgacaaggaggaatggcgcaatcttgtcttgaggcatccatctttgctcaagaatatgactctcccatatctcagggatattaccacaacatttccaagctttgtcttcaactctcaggtcgaggatgcgtgagattccgatttctatgttaccactgatgcttgtggggagcacagcagaccagatcctaggtggtgtgttgtgtgagtgtgt

SEQ ID NO: 1720 - DNA, 825 bp, Avena sativa
gcggtgactgccatgtccttctcagaaaatggttatttcctagcgactgcagccgttgatggcgtcaagctttgggatctacgaaaattgaggaactttaggactctctctccatacgatcccgatacaccaacaagctcagtggaatttgatttcagtggaaattatctagctgttgctggtgctgatataagggtttaccaagtagccaatgtcaagtcggaatggaatcttgtcaagacactaccagggatcgtatcaggaacagggaaagcgacatgtgtgaagtttggaacagacgcaaagtacgttgccgtaggttccatggaccgtaacctacgcatatttgggctccctggagaagagcaaatggaggaggcaccgcaatcaccggccaagtgagcagacgatgcatattctcgatcttgttttcgcaggcccaaccattttgtcattagaaggcggaacctgtgccgtgttctcggagacacacttgtaaggtgggaagcacatcgcgaagtgggaagcagcctgtgtggcgagccacatgttttttgtaatttcaactccagttgtgacgttcgcaccaaaacatgttagatgtcaaagattttccaggacttggacatgcaggcttttggttctagccgtgtcggtggggcggtttcaggtgtatgtaaaacgatcctggcatttttaacgtgagggaggcagatttaggtttacagatctatatggatttgtacgattattcctgatcttggacgcactgtagcttctgatgagtgttatttttcgtttcccccagcttgctgatctaaattt

SEQ ID NO: 1721 - DNA, 713 bp, Avena sativa
ctaaagaagcaactggttgatgattgggagtttgtcacgcagctgggtaagcttgtaaaactacctcgatctcccactgttgatgatattctaaagaagtatttggagcatcggataaagaaggataacaagataagtgattcttatgctgagatcacgagaggattacgctgttactttgacaaagcattgcctgcaatgcttttatataagaaagaacaaaagcagtataaggaagaaattaaaggtgacgtttcaccctcggctgtatatggagctgagcatctactgcgcttgtttgtgaaattgccagagctactcgcttctgtgaatatggaagaagatgcgcttaacaagctacagcagaaaatgttggacattctcaagtttctgcagaagaaccaggtggcgttcttcctttctgcgtacgacggtgatgcgaaaggtgctgatgtggtgaaaggcaaatagaagcagatgatggccatctgtatgttgtatgggccatcttctgctggatttgtactgcatagttgttttaggcttgagtctagctgttgctctgatattttatgtcgtcgaatgtgaactgaccgcctaacatcaatttcgatgtagctgacctgcaaatgaaatcttgtactgtagtagtatttgtgtaaatttatgtaggatcgacaatggttttcttttttaagaatcttcactgaaaa

SEQ ID NO: 1722 - DNA, 587 bp, Avena sativa
tggcaccagcatcacaatacttcaatattccagcgccgccaggagcggagcagcggatgtacccttcgatggacccgcagaggatgggcgctgtagtcaggtcacaagagggtgatggcaaaccagggccacagcaaggtcagccgtcaagcagctccgggcagggttatcctatgcggccaccggcaccttactaccagggtcagtaccctccgttctacccaccatatggcggtggttacatgcccccacctcgcatgccgtacccaccgcagtatccgccataccagccgatgctggcgcccccagcacaaccacaagggagttcatcccagcagccagcagcagcaccagggcagcagcaggctcaagcccctcctgctcagcagccggcagcccagagctgaagtctttgattagaaatgctgaaactgcaggcgattgtaactcctggttggttacaagaaagcttttgtattcctaaattgtgattagcagtaaacgtttgttgtagtattgcttatctgaatctaaaactgacgattatactggatttatccagcccacaagattttgtttgaccaaaa

SEQ ID NO: 1723 - DNA, 997 bp, Avena sativa
gtccagaataaatctatagatattattatgttcactttaacgaatatatcatcaccatccgataagtctagcacaatgcactcccagcacaatctataaggtaaaataagtacagtaacggcatccacagtttaaacagaaaaaataagccatgtctaggtagagcaaccaagttctcctcaaaagcactgtcttgtatcacaaggccacctccacctccccaagggttgttgacgaatatgtgagcagaacgcctcgtcatccatagggagtaattcagaagcgaaaaaaacttgaaccagggaggtctaaggatctccatgcaaggatcaaagctatggcgaccgcaactccgataaaaaagtattgtcgcgttttctttttggacttgttacgcagggttcaggcctgggctcaaacttgttagctgcctcactgctgctgctggtctagagatgatcctccttgggactacatgttgaggaacctcagggtctttaccattttcagatgtattacttgcagtgtctgctgtagctataacagcagagttgccatcgccactaccatttaccaattcctttttatccaacctttgtctcctcttcttttcctttatctcagcttccttctgtgctctgatctcagctctttcctgagccttttgtgcttgccttttctttctctcttcagcctccttagctttggccttttgctccaacacgagtcgttccttttcagccgcagccctctgctgtcttaattcctcctccttccgtgccaactcctccgccttccttgctagctccaactcctccgccatacgacgggccttttccttttcattctcttttacatcttccacttctgacgctggagctgtagttatttctttctgggatgaaccaccagctgtctttggtttggcttgcttatggatctgggttggtggtaaaactgggaaggaatcctcttctacaggaactacaactgcagc

SEQ ID NO: 1724 - DNA, 828 bp, Avena sativa
  modified_base (23)..(23): a, c, t, g, unknown or other
  modified_base (26)..(26): a, c, t, g, unknown or other
acgttcctacgacgtacgtatancgntattaattttattttttttttttgtcaaggttcccactacttggaacaatattattcaagtatcacaatgtcagtgacatataatccgactcatttacagccatttaaacttgttctaggaacacttccctgataagatgtaatttgcacacagattgacaacttagctgccacggtaagtggtaaaggagaaaggagaatacaacagaggaacatggaaatgctcagtcgtctgactcttttttatctcaaatatgatgctcacataagggaagaaccctgatggtgcatacttggaggtgttgaaacttatgcggtagaaaccgggagcgacatcatcgacgatgtccaccagttgaccgctccgtccatcactgtttgtaatcgtagagcctagggttgtccatccgttaaaatctttgttgtcgaatgatgggggacttgacacatccttccacatctccaggtgaacttcaattccagatgctggtgatccaagagcagtgtccagcacatgggttgtgataggaggacgtgtccggttcgaactacctgtagtttcagaagctttattggcagaaggctgggggggagctccaaggtgtgctccaataatccgcatgcggtctgctgctttatccggttggctaatatgaccttcagctgaagtagtaggagcagctgtctctgacgagaaaagctttgcaaggcgcagctcagtgatcttcagttcttcctgtgccgcaccttcaagttcaacaattggcctatttgcataacgcctcttaagctcagctaagac

SEQ ID NO: 1725 - DNA, 769 bp, Avena sativa
cgctaaccctagcgacagccgcgatccccatcgctcggcctcccgccggagctccagatctgcaggtgcctaattcgccgctggtggtgaggttcacggatcggagccaagatgacggaggcgttggtgcggaacaagcccgggatggccagcgtcaaggacatgccgctgctgcaggacgggccgccgccgggcgggttcgcgcccgtgcgctacgcgcgccgcatccccaccacggggcccagcgcctgggccatcttcctcaccaccttcggcgccttctcctggggcatgtaccaggtcggaaaggggaacaaggtccgccgtgcactgaaggaagagaaaatcgctgcacgtagtgctatactgccaatgctccaagctgaagaggatgaaagatttgtgaaagaatggaagaagtacctcgaagaggaagcgaggatcatgaaaaatgtccctggatggaaagttggtgagagcgtgtataactctgggaaatggatgcctcctgcaaccggtgagctgcgtcctgaggtctggtaaggcctgcggttgatattatcatcatgccttgaaggcatgaatgaataaggctcttagacctggacactactatgaggagtccactcccaagcacttgtcgtgtatttcttggtgttgacgaaatttgtctggctaataattggacatacaaagccgactttggtcctatatgaagcatcttttttttgttcaagcatgttggtctttgactctttgtacgatgatt

SEQ ID NO: 1726 - DNA, 569 bp, Avena sativa
tttttagtttaacaagagtttactgaattctttaacaaatactgtttgattttacatatgtgctatggtcaacatgttgctctcagcaatcatttattgacttttcaaagtgaagcttaacctgatacaacagtgcaaacaggtttctaggtaatcaattcccagcacaacccccgaaggccacaacaactcctaacaccagaagaaaaaacactatatcacaagctaacagtacactcatcttccaatagctacaatataacaaatctaaaatttgaactggaggaacaagaaatggagtaaatcaaccggagaatgcaggaacatagaagactgggcagttttctctataactggtgctgtctccagggtgccgtgaacatttgacaggtgaaaatggctcacgctgcctgctttcctttcctaactctatctagttcagcctcggctatttgaagcgatgatttcaaagtagacactctctcttctagctcctccacgctgccccttttcagcgcgggtgtgtatggtgcaaggaagtgcttggagaagttctgtagggcctgaac

SEQ ID NO: 1727 - DNA, 815 bp, Avena sativa
ttgtaacagaattcagccatcgtgcattcagccatgcccacatgaatattttttgatctgctcaaaattccgttcgattcgtcgcaaaaaacactcccccgcaaaaccctagccctctcccgcgacgccgccgccgcccccctcaggtaaggagagatggtgaagcacaacaacgtcatccccaaccacaatgtcaagaaggactggcagaggcatgtcaagacgtggttcaaccagcccgcccgcaagcagcgccgccgcatcgctcgccagaagaaggctgtgaagatcttcccacgcccgacatctggacctcttcgccccattgtgcagtgccagactctcaagtacaacatgaagtccagggcaggcaggggatttacccttgaggagctcaaggctgccggtatcccaaagaagctggctcccaccattggcatctctgtggaccaccgccgcaagaaccgctcacttgagggtctccaggctaatgtcagcaggctgaagacatacaaggccaagcttgttatcttcccaaggcgtgctcgcaaggtcaaggctggtgattctaccccagaggagctcgccaacgccacccaggtccagggcgactacatgcccattgcccgcggcgagcagcgcgtgattgacgtcgtcaaggtgacagacgagatgaaggcgttcaaggcctatggcaagctccgcgtcgagaggatgaaccagcgccagctcggtgcccgtctgaagaaggctgccgaggcagagaaggaggagaagaagtgatgagatgttgtgatcatcatcaagtgctagtt

SEQ ID NO: 1728 - DNA, 561 bp, Avena sativa
gaatgcctacacaaagctggtatcacataccacgagaatggctgcatgggtcagacaatcttgtggtactgtttgaagaaacaggggtgacccttcaaagatatcactggaggtgcactacacaaagacaatctgctcaagaatatcagaaaattattatcctccctttctgcttggtcacgccttaccggtggccatgcctcgttggatactgtagcaccagaactgcgcttacagtgtgatgatgggcatgtgatctctcagattaaatttgcgagttatggaacttcgtctggtggttgccagaacttttccataggaaagtgccatgcttcgagtactcttgacttggtgtcagaggcatgtgtgggcaacaacaaatgtgcaatcagtgtttcgaatgatgtatttggtgatccatgcggaggagtcgtcaaggatttagctgttgaggccgagtgctcgtcaccatcacacaccaaagagcctcgagatgagatgtgatgtggaattctttgcgacgactggtggacggagccattcgctatctctgtgagccac

SEQ ID NO: 1729 - DNA, 471 bp, Avena sativa
acgtccaccggggatcacgagcgcgtcgtagctcgagaagtccacgccgtcaaacgacgcgttcaaagggaagtcgtggccaggcttctcgctgtaagtctggtcgccttcgaagtcgtggatggcggtcgcgcacttgtccccggcgctcttgtgagggcagaccgcgtcgacgtggcagccaagggcttgcagggattggaacgggaccataacctcgtaatcctccatgtaatccccacaaaggaagagtattcttttgtctgaacctgatacagagcctccaagtgctttcacaaacaggctgatgaactcaggatgaccatcgtaagccgctgccgtgacgagattgccgtcaacgacacatcttgccatagtatgagcttcctcccacttggcaccagcagctaccagaactggtttaacggcaggatacgcggtgcatgtgcggttccggactactcctgctgc

SEQ ID NO: 1730 - DNA, 550 bp, Avena sativa
gttagttatgaaatcatgatttttctataactttcagtagttagccaaacatagatattatttcttgttctaggtcacaatcaggttttgcatgtaggtataatcttcttgtactgtatacttatattacccttctgtcctaatacagttcattgatgtaacttttatcagtttgaaatggaaaacaagctggattttcctgtactagaaggtgaagcgcccccagataaggtgcggtaggagtggatggcgtcgccatgtcctctactgcgccggcaacgctttccgaccggtttccctgtgaccaagagctcgccacgtatcttcactactcgtgggcgcccaagaggagcagcagcaccgcccgaggttgaacctcctccatggtgtccgcgtcgagctcacccaccatcataacctccgaccaaggcaagctttcggagctgcaagccatcgccgatgtgcaagggcgtgcccgaccaggaggagggggcgtcgtgcagccctaccccgaaccataaagacgacacccacgcaaccaagaaggtac

SEQ ID NO: 1731 - DNA, 862 bp, Avena sativa
cccacgaacaccttggcaacaagatcaacgccggcatctacctgctgagcccgtccgtcctggaccgcatcgagctgaagccgacgtccatcgagaaggaggtgttcccgcgcatcgcggccgacaagggcctgtacgccatggtgctgccggggttctggatggacatcgggcagccgagggactacatcacggggctgaggctctacctggactccctgaggaagaaggcgccggagaagctcgcgtcgggcacgcacgtcctgggcaacgttctggtccacgagacggccacgatcggcgagggttgcctgatcgggccggacgtggccatcggccccgggtgcgtggtggagtccggggtgaggctgtccaggtgcacggtgatgcgtggcgcccgggtgaagaagcacgcgtgcatctccggcagcatcgtcgggtggcactccaccgtgggcaagtgggcgcgcgtggagaacatgaccatcctcggcgaggacgtgcacgtctgcgacgaggtgtacagcaacggaggcgtcgtgctcccccacaaggagatcaagtccagcatactcaagcccgagatcgtcatgtgatgtgacagagcaagctgccgtgccccgtactacatggtgatcgatcacagccaaagttcatggaaacagggggccggccatatatttcttcatatgtttgttgttttatttatctctgagctgtctgcaagtgtaaccagttatctccacaactcctatatcaggctatgtttagatgatgtatcgctaagttttttttttccgtcttttttgaagtacaaaaatgtgtcttagtgaagcttaaatccgagcttgtagataggtgt

SEQ ID NO: 1732 - DNA, 882 bp, Avena sativa
tggctctaccttgtagttatagactcagccaagcagctagcaaaagaacaacaacaaacaaagaaagaacaaaataaaaatagagcgaaactataataaaaaactatacaagtggtagaagccagatcacgaccttactgtcagtcagaaagcttggccgcccatcgccaaattacatattgacagatcatacatgcacgatagctgttgaaataataacatggcccggatcctgcccacgagataaccgatatagtaggctcgatcgtatcagatatcaagacctgatcctttgaacttgtcctccacaaggcgatccaatttttctgccatgtccttacccatgtggttaacccagtccccaaccttccctttcctgaagaaggaagaatggtcaataaccacgttacttgccgcatgctcaataccacctgttttattgacatctaggttgcggagtgattcaatgctgcagaacctcaccacctgatccacaaccccaccctggacttcatcttcagtgaatggtacaccgaggaagcttgcgagctccctaacaactttgagtggatcagaaaaaatctcttcgtacctgacaaacatgacctcttttggcctcatcaagctttctttccagtactcaagattatggttccagaaaggcccgtaaggcgtgcacccttcatagaacaggttgaaggcatcgttgatacctataggatcagccttacacatacttctctcgaagtgccaccttgagacgaaggtgtcctttggttcccgacagaggtacacgatccggcagccggaagaggagatgccaggtgggaggaccgagaacgggcagtgcgtagagatcagcctcggagagggcattttctc

SEQ ID NO: 1733 - DNA, 648 bp, Avena sativa
gtctcctgacaaatcatctgtgtttggaagctctgcggaagatggtttcttaaacgtgtgggatcacgagaaggttgggaagaagaaaaatcccaattcacctggcggacttttcttccaacatgcaggtcatagggacaagatcgtagacttccactggaactcgtcagatccttggaccattgtgagtgtttctgatgatggtgagagcactggtggaggtggaactttgcagatatggcggatgagcgatctgatctaccgcccggaggaggaggtgctctcagagctggagaacttcaagtctcacttggccagctgcactccaaggggttgaattatgtaatttgtgcaacccagtcatgtggttgctctaggtatcttagttatctgtccatttagaacattggttctgtcatctgatgttaaacctagacttgtacccttaaggtccttgtgagcttatttaactttctgtatgacttaaatctgtatgctctgcaaacacacagtagagctgcatttctctgtagccagactattggtgtatcgggaaacattgtactggtagcttctagtttggacctattgagattgcttgtaatgagtttgcattgatgaattggtcagtttgttctctaaaaaaaa

SEQ ID NO: 1734 - DNA, 653 bp, Avena sativa
agagattcaaagtttttgttgaatccagtttgcctgtaattgagtactatagggcgaaggacaaggtcaaagaggtactactgcacttttgcaacaactaataacttcaaaggaatgcacgtcaacataaaagcagggatattacagataacttggtactctgaagaaatcgtctactggaataatactctttcttttgattgttatatgtgggacttaggacttcaaataattcctgcccttcttttggaatctgttaactgatacttattgaccaacttgctgtttggtcagatcgatgctgcgaaaccgattcctgaggtgttcgaagatgtcaaggccatttttgccccatatgccaaggctgcatagaacagtataaaggaccaaaaggtgataaatgaatgattttatacaaggttttgctcaagtgtgacatatctgtgattacaaacccttaatatagatcagacttatcagtaggcaatttgatttgttaccagcaataattagatccatttgccgctagttcttggttactgctgttggtgaatcccctgtagtgtacttgtaccattggtgtaatttactgcatggaaggttgagaccttgtgcccatgagctatctatctggttgtattacagagaagaca

SEQ ID NO: 1735 - DNA, 624 bp, Avena sativa
gggatacaccacacagcttatcggaaagtgatttcgaggtcttgggccgtcggacagagggattttccgggtctgacgttgcagtttgcgtgaaggacgtgttgtttgagcctgtgcgcaaaacgcaggacgccatgtacttctttaagacggatggtggcatgtggatgccctgtgggtcgaagcagccaggcgctgtgcagaccacgatgcaggagcttgcgtccaagggcctcgctgcacagatcctccctcccccgatctcgaagactgacttcgagaaggtcctcgcgaggcagagaccgacggtcggcaagaaggacctggaggtgcacgagaagttcacgaaggagtttggcgaggagggctgatgtacactctctcttgactcgtgcgcagccgcaccacaaaatgtatattgtttgattccacacatctgtatactctggctgtagctcgtatcgtgcggcggaggggctttgttattctgctgggctatcatcattttgcctctgttgtctaactcatttccatttttacaccctgtcgttatggttggaattttccgcaattgtattaaggaaataataatttaaggtgggagccattgtggtgcagcttgta

SEQ ID NO: 1736 - DNA, 721 bp, Avena sativa
  modified_base (694)..(694): a, c, t, g, unknown or other
  modified_base (697)..(697): a, c, t, g, unknown or other
  modified_base (699)..(699): a, c, t, g, unknown or other
  modified_base (701)..(701): a, c, t, g, unknown or other
  modified_base (703)..(703): a, c, t, g, unknown or other
  modified_base (705)..(705): a, c, t, g, unknown or other
  modified_base (707)..(707): a, c, t, g, unknown or other
  modified_base (709)..(709): a, c, t, g, unknown or other
tcccgggatcgccaagccaactcactctacctcactcttctcttcatcgattgtcatctcgctcgtagatcactgtcaatttctctaactctccgagcaagcatgggcagcaacagcaaggccgcggcggttttcgtgctcgcgctcgccctgtgcggcctgctcgccgcggcagcgccgtgcaacccgagctcgctgagcccgtgcgtgggctccatcatgctcggcgggccggtgacgcaggggtgctgcgtgcggatgcgcgcccagcagggttgcctgtgccagtacgcgcgcgacccgtcctaccgcgcctacgtcaacagccccagggcgcagggcgtcgtcagcgcctgcggcatccccaagcccaggtgctgatgatcgtgccgacgatcccccaccgtggccggcatggagacggtggtctacgtacgatgatgacgtgtaatgtgtatgggtaattatacggtcgacgccatcgagctagtatcgagctagctagtacggctgaccgatggatgtctaaataaacgcgcttgtctgagctgcgcacatgcatacgtaggtacgtgcatgtgtcgtggcggctggttgtgtacgtttttatgtcttactaccgtcatctttcatctattaataaaagatttgctagttctcagattgctgagaaccagttatatctcaaaaaaanaanananananananatatatatatat

SEQ ID NO: 1737 - DNA, 689 bp, Avena sativa
ttctttttttgcttcaaaaatttaacatttcacatgaaaacaagctgaaattgtcttgaccacgccgcgaaacaacaaaatacagtagacatcaagatactatggcagatacagtattgaggattaaatacgatgttccagtcctacaatgcgacacgacaatctaatggatacttgaatataaagattattgcatcgtccttttcacgctttcgcaagttgagctgacgaaccctacaagccatcgtcggagaatcagcgcaaagtgttacgccgcggaggtttgatcgctcgtataacgataggttcggcaaccacctgacccgcaagacttaacgcctaccacgaggcccgccagctgacctcggaccaggaaagcgcgagaattgcagccgtaagtgggctgattcacgatcgtgttcgtcaaacttataaccttgcaatgcttcaagtgcaatagtagcttgggcagggctatcaaaatcaacgaaacacaggacatgaggatctccaccaggatgtcttgactccttgttgacaagcctcacttcacggaaacctacaaaagggcggaatatatgtgaaacctccctacgcgtgcagtttgcaggcaggccttcaatatacaaagtgttggacgcgtctggtgggagaggaggctcaggcctcgcaccaaaccccatgcctct

SEQ ID NO: 1738 - DNA, 872 bp, Avena sativa
gatccaaaggagaagaagtttccgaaaacaagtcatgttgggtttggccttgttcttggggcagatggcaagcgcttcagaactcgtagtactgaagttgttcggttgggagacctacttgatgaggccaagtcacgaagtaaatcagaacttgtccagcgtctcaaggacaatggtaaaattgttgactggactgaagaggaattggagaaaacttcaaaggcagtaggatatggtgctgtcaagtatgcagatctgaagaacaatagactgactaattacacatttagctttgatcagatgctaagtgataagggaaatactgctgtctatcttcagtatgctcatgctcgtatttgctccattatacgaaaatctaacatggatgtagaagagctaaagatgaatggaaacatttctcttggccatccagatgagcgtgtcttgggactgtatcttatccgttttgcagaggttgttgaagacgcgtgcactaatctccttcccaatgttctgtgtgaatacctatacaacttatctgaaatgttcacaaggttctacaccaattgtcaggtggtaggatcaccggaggagccaagccggctgctgctctgcgaagcgactgcggtcgtcatgcgtcagtgcttccaacttctcgggatcacaccggtttacaagctgtgatggaccaatgttttgatctttacatcatacatcagttttcatccttgtgacctcttttctacattatggaacggaggtagtggtttgcatcgctaacacactgaattgattgccccatttgtggactcgagcatattgaaactctgtagggcaaaggatagttgaagcatatttattctagtrtgtta

SEQ ID NO: 1739 - DNA, 795 bp, Avena sativa
aggacgacgatgatgaagatgatggtgaggaagatagtagcctttccatgaaggtggtagtctccaagggaactggcccgaaactcgagttcacctgcacagccttccgcgaggagatcaccatcgacgacatgctgatatcggagaaagcagaatctgatgcagagaagttccccttcgagggcccagagttcaccgagcttcccccgaacgtgcagaagggcctgttcaagttcctggagctgcggggcgtgacgcttcagaccaccaacttcatgcacgactacatggtgacgaagcagaccaaggagtacgtccggtggatgaccaagctcaaggacttggtgagacaatgaaacaccgagtagatggccttgctgcgtggctcgacatcaattttggtagctttagtcttttagcacgcggggcaagggcagcgagaaccatgtgaagctactactactatgcagtgtggctgtagttccgtatcagcaggctagccagggtcagcagctcctcttgtgtttcctggaaatggtcatcgaaaaatcttgtagcatgtgaggttaccagcggcgtggcgagactcatgcttagtttagtgctgctaatagtagctgttatcatgtcttcgttgcttgtgtctgtttagatatgttatcttctcgcggatctaaggtatgtttggagatctctttactagcataagagcagtggaacatggatcaaatcctaagtactactcaagagtatttgctcaaatcatgaattgcagtggaaggtgatgccaatgaa

SEQ ID NO: 1740 - DNA, 499 bp, Avena sativa
  modified_base (460)..(460): a, c, t, g, unknown or other
gaaaggtgatgatagataaagtcctcacacagagaagataaacatatctttattctccatatataatcacttgcacaacaccataaactaaaaaaagcgctgaatttatattttcagagtctcgatgaatctcgtcccttgacggaaatgttcaaatagcccgagcacaaaatccttgaactcaattttcctatatcttggtggtcgtttatcgtctagtaaaccaggtgctggctcgagtaccgtttcaccatccacgccataaaacacggccaaggaagcctctccgttctggatattggtgaccactctatgaactgggctcctaaaaattccattgttcattatctccatgcagtctgctaagttaattaccaatgtgtgaggcttcactagaacattgtaccattttccatctctctgaacttgcaagccaccaacttcttcatccacaaaaggngggtaatgaagaccaccatcagagtgaggcttgaggcct

SEQ ID NO: 1741 - DNA, 991 bp, Avena sativa
tatatctacagattgagcagtctttccaagttcatcgtagctatggaagtatgcttgaaggcgaggctgatgaactcaagagggttttccttgaaggaaatccatatctcctgggattgaccatgattgtatctctgttccactctctgtttgatttcctggctttcaagaatgatattcagttttggaataagaacaagtccatggaaggtctatcagcaaaatctgttgttctgaacttcatttgtcagctgattatatttctgtacttgctcgacaatgatacttcatggatgatccttgctagttctggagttggtgtgtgcattgaattttggaagattgggaaagcaatgcatgttgagatcgacagaagtggaaagattcccatgttgaggttccgggaccgtgaatcatatgcacaaaataagacaaaggagtatgatgcaattgcaatgaagtaccttacatatgtccttctcttccttatggccggctttgctgtctattcactcaagtatgacaaacacaagagctggtactcatgggtactctcttccctcacaagttgtgtttacatgttcggttttatcatgatgtgcccacaattatttatcaactacaagctgcagtccgtcgctcatatgccatggagacaaatgacctacaagttcctcaacactataattgatgaccttttcgcatttgtcattaagatgccatggttgcatcgtctctcagttttcagagatgatgttatcttcttgatatacctctaccagaggtgggtatatccagttgacaagaaacgtgtcaacgagtttggcttcggaggggaagacgaaccggcagcgccccagacattggaaggaacagattcagcatcggcaaccaaacagatcgagggcgaggctaagagcacggaggacaagaagacgaagtgagcctctgtcagctccattcaacacatcttgtggcagcattggccgtt

SEQ ID NO: 1742 - DNA, 792 bp, Avena sativa
agaagaggagttccaggacctctcttccgatgatattggaaagataaaaaagagaatagcagacatgcttgaggctgatgaaacgataactcaagctttgaaacgactgaagagtacatccactgatgaacgtggacgaatgactgaggaggcacatcgtatgtttgatgagctgacagatgctgccatgaagctaatggagaacggggagtacaatgtgtattcagatgaccgggagacatttgtacgtgaggctgagggttatgagcgtctaaagcgtgctcgacttggtataccagaagttgaagaagatatatttgcagacaccacagaggatgacccaagtacctcgtccttactggagatggaccgtggtctgtcagctgccaatacttccacgacaaatgctacgcaaaatgacgatgatagtgactttgacatgtttggagacaatgatgacaccaatgccactcgtgattctgatgtgaaaacttcagattcaggttgcaatcctgatccagtaccacaagatgcttccggaacctcaggtgtagaggaagctggcaatggaactgcagacacagattatgtctatgacccatcgtctgggtactactatagcagcagcacaggctactactatgattctgcgtctgggtgttattgctctgcatctacaggaacctggtactcgtatgacgaacaatcaggcacatacaacgaaatgcagggtgaacaaactggcgtgcaaaacacagagacacagagagatggcatcgcggagtagccaag

SEQ ID NO: 1743 - DNA, 982 bp, Avena sativa
gtctcattggtgtcctaagtactgatcagtctcgcaaagatgaagaattaattgaaatggcaaagaattggaaaattgttggtgttgatttgataagtgatgtttcatgtgatgctccatatgaatggttagacaagactggttcaggatgggagttcaacaacaagcagtcaactgaaacttttcatgttgttgcgtatgattttggagtcaagcacaacattttgagacgcctggcatcatatggatgcaaaataactgttgttccagcaagctggcctgcttcggaggtacttaatttgaagcccgatggggtcctttttagcaatggccccggtgacccatctgcagttccatatgctgtgaaaactgtacaagaaatagtagggaagatcccagtatttggcatctgcatgggtcatcaattgattggacaggcccttggtgggaagacatttaaaatgaaatttggtcatcatggaggaaaccaccctgttcgtgataacaggactggacgtgtggacatcagtgcacagaatcataactatgctgtggaccctgaatcactcccggaaggagtacaagtaacacacatcaatctaaatgaccagagctgtgctggtctcgtgttccccaagatgaagcttatgtctcttcagtaccatccggagtcctccccggggccacatgactcggacttggcgtttggtgaatttgtggagttgatgaagagcaacagattatgagtagtaggaacttgtcatcagtcgggttgttggactgaagcagtatgctccgaggaggaactgttattttctcgttcatttctcttgtcagctgaccaaacctataaagtaactagtggtattgtactatttgttggagattgaagaataagatcctttgagatgttgtatcgagacagttgtaaaacaactatgcttattctggcgctggcgcctgcaagttgtacmtttttgcg

SEQ ID NO: 1744 - DNA, 862 bp, Avena sativa
tacaagatacatagttgatatgcaatcaatggattcaactgtgtcagagattcagcatctccgtgataatcaactttatcaaaaactttttggatcttgctgacaggttggcaaaaatgtgggaagacatgcacatgcatcatgcaaaccagctgaaaactgtgttggatctcaagtcagctgacatttctgattccaatatcgagacaagtgcacatcaccacagccacacgcgccagctgcgtgatattgtagagaagtggaacacaaattttagtgatctcatgagccaccaaaaggagtacataaatgctctctacagctggttgaaattgaatcttatacctatagagagcagcttaaaggagaaagtagcatcacctccaaggatgcagcaacctcctgttaaagctcttctccaagcatggcatgagcaactaaccaagctacctgatgatctttccagacatgccatcattagttttcgggcagtcttggacaccatactgggtgttcaggacgaggagttgaaacagaaggagagctgtgaccaaattcacaaggaatacgtgcgaaaagctcgagcatttgaggaatggtgtcacaagcattcacagcgcaggacatttgatgatccagagagcggcgaggggacaagccacagggatgcaatttcagagaagagattcgctgtagagagcctgaaaagcaagctggacaatgaagttgaagtccataataagttgtcgaagcaagtgagggagaaatctctttcgatcctgaaggcgcacctgccagagctgttccgtgccctgaccgacttctctaatgcttctttcgctatgcactcgaacctaagact

SEQ ID NO: 1745 - DNA, 820 bp, Avena sativa
atcatgcattagcactccctccaaggctcaacccaccggaccagagcgaacatgacacaacacctaagataagataaacatgattacatcacagacatgtagataggacaagctagctagcactactccaccaggaaagcaagcacgcatgcatcaaacaatgctcaattctcacagcgattttacattacaggtggggcacatcgtcatcgatcaaacaataataatccatacagcaataaggaagggggtcgacactactgccagtaactactagtaagtaaatggacaacattaacggtgactgacgataaataactgaagggtgaaaacgacgacgatccacaaatgatgcacctgctggcgtcctgggcccgctccctccctgaggctctcactcacatgcacaaacactgacgacatggcccagcacgaggagggagcagagcctaggccctacctagccacggccacgcgcccactacgctagcggtagcgcgctgggttgggtgaccgttgcaataatttaccggccggccagctcagttgctccggctgctcctgaaggagccgagcgccttgatggccgccgcgcggaggacgtactggtggtacgccgccgccgccagcgctcccacgaacgggcccgcccagaagatccagtggtcgtcccacgccttcttcttgttgtagatgacggcggcgccgaggctcctggcggggttgatgccggtgccggtgatggggatggtggccaggtgcaccatgaagaccgcgaacccgatggggagcggcgccagcacgggcacgtgggagtccc

SEQ ID NO: 1746 - DNA, 666 bp, Avena sativa
ttttttcttacaatggacctctaatcatatcaagcattgtgcataatgcagagcattgcagcaaattggaaccgagcgtagttgttaactcggaatcaacccatcaggttagcaagagctgataccagttcatacatgccaaaatgaatatattcttctgcattagcagagcagctctgacaaacaacacgcggaaaatttacatctaaataggtgggaccatatatcccctttaaaaaggggccatgtagccagctaaaaggttccatcccgtgctgcgggatgaacatctgacttgttgctgctatcaccatttacaagtgatgaggaatcctctgcaagtttcttgagagaagattcagcagcgatctgcttgacattagcttggcctgcagtctcaaggtcggttccagtactaccaggagtctcgattgtagctgttgtagacaaagaattacttggtccagcaatttctgaagtcaaagatgaagctctgggcgcagcatagacagcgttacgcgcaccacttggcttcgaggttgtggttaacatttctttcgtcagttcttcaaacttctccactagtacagtgaatatgctagaaaggagctctatctcgttgtcgagcgaggaaatttctgaaccaacttcagcggcagatgcact

SEQ ID NO: 1747 - DNA, 589 bp, Avena sativa
ttcgctccccgaaccatcctaacctaaaattttcctcgcccagggttttagccgccgccaccgccaccgccaccgccgcagccgcagccgcaccccccgcagagagaagagagagacagcgaggtcgacgccatggtgcagcgcctgacgtaccggaagcggcacagctacgccaccaaatccaaccagaccagggtcgtcaagactccaggagggaagctcgtgtaccagtacaccaagaagagggcgagcgggccgaaatgcccggtcaccggcaagaagatccaggggattcctcacctgaggcctactgagtacaaaagatccagattgtccaggaataggagaaccgtgaaccgcccttacggtggtgttctatctggcccagctgttagggagaggatcatccgcgcattccttgtcgaagagcagaagatcgtgaagaaggttctgaagatccagaagaccaaggagaagcaaccatcaaagtaaaataggccaaagggccctttatactcgtggaatttttggaggtacagatggtgatcggtgctgagtcaagcctgctcagtatgctaagctggtggct

SEQ ID NO: 1748 - DNA, 876 bp, Avena sativa
tcctgttccttgaatattcgcgctatccacatccgggaggcttatgaaccccctgagccagagcttgattcattcttatttcttgggccactaattagtttggggctttattactatcctgtacttatgccatgctttactgctttatttacgattgtgcgtggagcacctgtactgtttaggatcgtgacacgttttcgctgtatcgacaagcccagtcacactttcgggttcccagtcgtttacagccgtccacacaaaccttgagtccgtctcggagccggccaacttcgttgcgggtagcttaatggggtggccccctgaaatatttctgaatcctgtgatcgctttgtcgtgactgcctcgttgggttttgatttggtttttccgaggttgatcgagtgtgtgttgctatttgtgcacccctgcagggtaaatctttctaaaagccgtgtccgcggttatggacgacttggagcacagtttctcgatcatagacaagtataactaaagtgccgcttttaatttgactaaatacgtgactagtaaatagtgtcatactcatggaatggttaataaaaactgccaacggatggcttgttcgtccgctttctcgttggtaagcgagaaggaggatggatctgttactttatactgttataattattgtttctaattaacagacatccgtctatcattggttaggcggatggttagcgagtatctatagacttgataaagatttgctacaattgcgtcaccccagatgaacaggtgtattcgcaagatggatactgggtggaggagacagatgatgttggcaacgatcactcggtgtagagattctgggatgggatcgcgagatctgtgggcagg

SEQ ID NO: 1749 - DNA, 722 bp, Avena sativa
tcttggagctgttggccttgctgccatggaaggagccaagatggctggagcatcaaggatcattggtgtggatttgaaccctgcaaaatatgaacaagctaagaaatttggttgcactgattttgtgaaccccaaggaccacaccaagcctgttcaagaggtgcttgttgagatgaccaatggtggcgttgacagtgccgtcgagtgtaccggcaacattaatgccatgatctccgcctttgaatgtgttcacgatggatggggcgtggccgtgctggtgggcgtcccgcacaaggaggctgtgttcaagacccacccgatgaacttcctcaatgagaagaccctgaaaggcaccttcttcggcaactacaagccgcggactgacctccccgaagtcgtcgaaatgtacatgaggaaggagcttgagctggagaagttcatcacccacagcgtgcctttttcacagatcaacacggcatttgacctcatgctcaatggggaaggactgcgctgtgtcatgaggatgggcgagtagagatcgcctcttcttcgtcatgtcggtcgctgcttttaaggtctgtgtcaacgaggatgtgtcatttgtgtgatcatagagaacgaacagctctgtgtttcgtgttcaaggtttggtctttatattcggtgtgtcgtcggaagctcccagttagcgtgtaaatttccacctattgtgcacagtaata

SEQ ID NO: 1750 - DNA, 827 bp, Avena sativa
  modified_base (820)..(820): a, c, t, g, unknown or other
cagagccgcgactcggcgatttccacgcgataataatggcagaggagggtcacaaggtgtcgctcaacgtgtacgacctcagcaacggcctcgcgcgccagctctccacctccttcctcggcaagcccatcgaggccatctggcacacgggcgtggtggtgtacggcaacgagtacttcttcgggggcgggatccagtcgacggcggcgggcgcgacgcagtacggccgccccgtgcgggtcgtggacctgggcgtcacgcacctgcccagggaggtcttcgaggactacctccgcgacatcgcgcccaggtacaccgccgagacataccgcctcatgagccacaactgcaacaacttcagcaacgaggtggcgcagttcctcgtcggcgccggcatccccgactacatcctcagcctccccaacgaggtcatgtccagccccatgggcccgctcatcatgcccatgatccagaacctcgaggccacgctccggaacaacaccgcaccgcagaccacgcagttcgtgcccacccctgcgtccgtctctgtcacgccacctgccgcagcggcggcggtggccaacaaagcagctactgctagtactactacagctcaagtttctagagcggcagctcctgacactccttccaagcaagacgaagagaagaaagtggagaaggagactcagcagaaagccaaggtcacagccactgccgctgacccactcgggaacatgagggggaagtgcaggaggaggtgatgaaggagttcgctgccatcatggccagcgggacgctgcgggcgagcgaggcggcggcnctggcca

SEQ ID NO: 1751 - DNA, 795 bp, Avena sativa
gacacatacagtttcaatgcttataaaacaaattttattctcaacagattacacagaaacatgattgagtagcctaaaagtacagccgtactaaaccttgagaaaacaccatctcggctaataaggaaaatcaaaagaacgggggaactaatgtagcccctaattgtaaacgtaacatagaacagcaagtaataatgtttctagagtacacgcactcgagatcgtataaggaacaacagcctgaacctgaataactgacgcacgcactgaacctacaaactgacgaatcacgcttgctaccgggtatacgccgcctcaccgcctgccatgccacagcacgctaacgtaagagcttgttgatgggttgtttacttccctttggtgggcttgccgttggcctcggcgccctccttggggttgagcgtgtcccatgcctcgatccaggtgaccatggcgtcggcgagcttggcgaagtaggggtcgatcttgccgagcttctccctgacctggtgcgagagcgcgatgtagcacttctgcacggtgtcgcagtccttggtcagcgtggcggcctggaagaaggggatgatgtcctcctgccagaagatgcccttgtactccttcttgaggttcacgaaggggttgctggccttgctgtgccagatgtagggcagccctgtcttgacgcccagcccaaggtggtcgcagatcaccttgacgcaccatcctgcccacatgtcgtcgtagcgtccgatgggctggccgtcgcccatgaggccgaagtacatggccggcccg

SEQ ID NO: 1752 - DNA, 344 bp, Avena sativa
ttttgaaacaaaggtgatccccgttcatgcaaaaatttcagcattccagacagaaatagacatgtacttctaaacttcaaagcaaaccatgtactaaattcaaacaacaggtaaaatttcactaacagaagatgccgacacaaataaagtctacaccagctgttctattgaaaatttcaggcaacttcactaacagtacactcactaagtacaaacaaccatgcagggatttacagaccccgttatctttgcaccggaccgtcaaacctttctcccgataaaaagagggagcaggtgcaacaggctgtccggtgctcatgacaagggaaatcacagctgggaaa

SEQ ID NO: 1753 - DNA, 649 bp, Avena sativa
tggccgagctgaaaaaggaaggcatttcacgtattacaacagttgttcctggaactgatgaatccatagggaagttagttcagcagctttacaagcttatcgatgtacttgaggttcaggaattaactcacttaccttttgccgaaagagaactgatgcttatcaaggtatctggaaacactgctgctcggagggagatactagatattggtcaaatcttccgggcagaatgtctggatctttctgatcacacggttacactacagcttactggagatcttgagaagatggttgcactacaaagactgttggagccttacggcatatgcgaggtcgccagaacaggtcgggtggcactgacccgtgaatccggtgttgattccaagtacctccgtggttgctcacttccactgtaatatgaaggcatgatgtggtttgtagagctaagcggaatgtgtagacagcttttcggaccgttgtgttcttgtttaggatgaatttctcctttgtttcctctgttgtaatgtgtcgaactgctgctgacttgtctaatgtgtagtaaatcattgtctcggtggatgcaagttgaggtttgcccatgtggtattgcacttgacagcagacagaataaatgcatgtttcatctcca

SEQ ID NO: 1754 - DNA, 701 bp, Avena sativa
ggcgctcgggcttgaggcaagcgggctagcggttcctctgggtcgtaaagagcccgcccaacgacgacccagcgaagaagttcgagaatccttcggagaagccggacctcgacgctctcctcccggagggcttcctggaccggaccaaggacagggggctggtcgtcaagtcgtgggcgccgcagcccgacgtgctgatgcacgaggcggtgggcgggttcgtgacgcactgcgggtggaactcggtgctggagtccgtcatggcgggcgtgccgatgctggcgtggccgctgtacgcggagcagcgcatgaacaaggtgttccttgaggaggagcttgggctggccgtggcagtggaagggtatgacaaggaggtggtggaggcccgggaggtggcagcgaaggtgaagtggatgatggactctgacggaggtagggtgatccgggagcgcacgcaggcggcgatgcggcaggcgaagaaggccatgggcgagggcggggagtcggaggtgacgttggcggggctagtggacgcgtggactgtagttgcttgatgtcgccgggctcggttatgcagagacctggtgagtgacgatggctcacgtgaacatgcatggatgtgcgccagcgcgtgcatggtttaccaaaaatattatgtagcacgataatacatgtttaattcgaaataataataataatgt

SEQ ID NO: 1755 - DNA, 531 bp, Avena sativa
agtttcgtacttattgatccccatgctgcttctcatgtcaaagaacagctcgggcacttctctcctggtcgcctcggtataccatcagatctacatgttcaacaaggagatcatcctggactacgtccaccacgacatcaccaggaagtgggctctgatatacttcaagctgctcttgctagtcatcggcaaggacacgatgttgtacttcggcctgttctaagtcggtgtggtagtttctcgagaaatgcatcaggaccccatctatctgtacgctgaaataatcatcaaggtcgacaaattgcccaactgctagttcttgtgttctccaatgtcaacttgctgcgtttttatctctgtttttgccgtggttgattaatgtcaaaccgaagtgccaagcaatgtgtttcttcaagaaatgttcaggcgtcgctcactaaataccagtttgcactagagttgtaataatggtaaatgttaacctttggtgttttgcttagttattgatattccaaatcattacagccaaaa

SEQ ID NO: 1756 - DNA, 820 bp, Avena sativa
ccagcagcgacagggcgaggaggccgcagaggcgcggggagaggctgcgccaacacatgcacgtatggggatgagcatcggcgtgacaggaagagcccgctgcagcgtgggcgagtatggtgacgagcagcgaggagaggccccggcggcgcggcaaggctacggcggcacgaggcgcgtatgggggacgacggcggcgcggagggaagatcccatggcggcgtgggcgagtatggggacgagcagcggagagaggccccggcagcgcggggcgcgtatttttttttttgaaaaacttcaaagctatgtcatcagtctacaagcacattgccataacagctgcgtaaaaagttgcccaggagcatcatcagcaggtccaaacgagatatctaaaaagataaacaagctcgagttcataaccaagggcgcttccacaagtgcatgggtccaggatacacgagcctggctcagatttcatcaggttgatgcagaaggggcctcggccatttcctgttcaacaacagttttctggaccggatggtagtggtagtgcagctccccgacatcgtctcctgagagcttcttccatccatcagggccaacgtagtagacactaacacagccaccacttgctccatcacgaaatgttgcctcatagatagcctgccgagctaactcagcagcttcctcaattgacatgttgaatttgtaaccattatccaagataccataagcatatagagaaccagaaccaacagagaaccgttgtcccttgagccttgcaccctcactatcaacatagtacaagcccaggagcatc

SEQ ID NO: 1757 - DNA, 963 bp, Avena sativa
ccagccagcacaacacttctaatttcacttccagaagaaacatcttcgtagcactcgtatagtatgtccatgcttgggtaataagctgcactatatgcctcgttaaactgcttctttccttcttctgttaaagagttgtaaacttccagcattcccttctttgaaatagtttttgagacaattccagtaatgcactctacagtgttcttatatgccaagtcctcatccattccttgttctgtgtatcttctgaaaagagcctccacaatgccatgaacagcgccaagcaaaatacctcgctcgccgaagatatcacttcggtactcctgctctagagtagtagcaaatgtgaaaggtgagcctagagcaattgaccaccctagagcaacatccgtagcccttccatcaacatcctggtgaacagcaaagctagagttgataccagcaccgttgatctctttaccctgaacataaagtcttctaactgatgggcccattcccttgggacatacagcgatcacactgatgttttttgggaaatcaaggccaactgattgcagatgtccaaggagaaatccgtgtgacaaaccaaggatactgttgggcttcatgtgtgagaagattttctcatagttgtctgcctgggcagaatctgatatcagcaacaaaagaaggtcactgctcgagacagtctcccatatatctcccaaggtcccagtttcttcagtgaaaccagctgcacgtgcttcttggaaagatttggaacctttccgaagaccaatcttaacaacaatgtccaagttagcctcagcaagtgagtctctcaagttctgagcttgtgctggaccctgcgaaccccatcctagcacgccaatctgcttgatccccttgaacgcctctggaagcagcgggaaaagattcctcccacccctgacaataaactcttcatggccggccaaggac

SEQ ID NO: 1758 - DNA, 615 bp, Avena sativa
cagatcatggctatcaaggctgctattgtgaactctcagacacttgacgaagttgcaaggctcgagaaggcgttgagcactggccaaactagttctagtcgcgattaattaacttttttttttttttttacaggaaaagaggcgcaacgcccttgtttatttctgtacgggtatgcatgccctggtttgggtaactttatacatcatcgtaccgagcccgagccacactttatttatgctactgccgcgaacgtactacacacaagtccaactcttaaaccgctcgggctcccgctcactccacagtgtcaccggtctcgcggcttcagaaagcaccggtcgccatcctcaggaaggtctccacggcctcgtcgccgcgcccgcggtcgccacggcggcgcctctcttcctccccgcgctcctgctgctgctcctctggtccggcgaggaagccttcgtccggctgcgcgcggagcacctcgtcaatcactctctcggggggctcgagcgccagctccttggcgggcctgtccagcttccccagcacgttgttcttcccggcgagccacaccctctcgctcttctcggcgcggatctcgaagcacaccacctgga

SEQ ID NO: 1759 - DNA, 713 bp, Avena sativa
tgacccagctcaggccattttcgcactgattcccaaggcaaagactgcaaagattgtgcgggcatcattgatgctgtttccaagatacctggaacatctgatcttcaaatctcactctgcaaggagatggtggaatggacccgtgcagagaagcgtaccttcctcaggcagcgtgtggaagcaaggctagcggcccttctgttggaaagtcaggagtacactgaagctcttacccttctttctggtcttatcaaggaagtgaggaggctggatgacaaattgcttcttgttgacattgaccttctggaaagcaaactgcatttctccctgaggaacctgccaaaggccaaagcttctctgactgccgcaagaactgcggcgaatgccatttatgttccgccagcgcagcagggcactattgatctgcagagcggaatccttcatgccgaagagaaggattacaagactgcctacagttacttctttgaagcatttgaggattcaatgcactggaggatgctaaggccatcttctgcttgaagtacatgcttctgtgcaagataatggttaaccaagctgatgatgttgcaggaataatctcgtctaaggcaggccttcagtatgttggtcctgatgtggatgctatgaaagctgtggctgatgcctactcaaaaagatctctcaagtactttgaaaccgctctccgtgactac

SEQ ID NO: 1760 - DNA, 723 bp, Avena sativa
gtcttttggaattttgagataggcatctcagctactactatttaaaagacaacaaaactcgacaggctacattaccaccagacggctagctaacacctacagtattgacgacgaaacatgagctgataactttctactaccatgcatgcttgctatgtccaaggggggagagcaggggacctggtacaatgatccttgtaccaagctaccaaatgccagttcaaaacctgacgaaggttaacagtaacacctggtatgtacggtggggaaaactgtgcaccggacacgatcgcttgatcgggtataatcggtgtgcggggttaaatcctcactaagtttctctgatctgccatgggttttcggaagcttgcacgggctaattagtcagtcacctaagctagactggtagtcggtcagttttgctgaaccgaattacacgagacctgacgaacatgttagtgggctaggaggaggagaaggaggaatcgctgcggctgtttctcttctgagttctgacggatggcgccttcgttcagaagggtttctggaggaaggcgagcatgtccccgaacgcggcggcgtcgcggtcgaagccgaaatcgcccggggacggcgggtcgaaggatcaggggattgggtctatgacgaaccgtcgtcctcgatgccgcagccccattcgtcgccggccagcctccggcggcggcgggtgcgtggctctcggcg

SEQ ID NO: 1761 - DNA, 633 bp, Avena sativa
attataatagaaaataaaactttagtcaactaaggaacaggtctggagcaagcacaggtgtgtgacatatgagaaaataacgctcttggccgcgcactttcgtgttggttgtcaaatagttcctttgatacagcctgtagatgggtgcagcaaatctacttggacagacaatcacctggtacccttccctttgggtttgccttttcctttcgctttaccaaaccctttgccattcccttttccgctccctttcccttctggtcttcggttcttctggaatttactgttttcgaatttaccatctcttgcagatccaccaggcctcctgtttttctggaacttgttgggaaatttactgtcttttgcagatttctccttcatgcgcatattttgcattgctttttgctgcctgcccttctgcatctgttggggatttcttatctcagatggcacattggcatttggtatagaccgacacccgcggccagctgcagcatgtcttctgtctcctctttgatagccacctggcatatatgtgcccccttcttcaaagttaccatcttttccaccagaactgattgctctatgtgatttctgctgccaatttacttaataaaatatctttgcttgcct

SEQ ID NO: 1762 - DNA, 632 bp, Avena sativa
ctgcccgtattgcttgcaacaagtacatgaccaagcatgcaggaaaggattgccttccacctcagggtccgggttcacccgttccatgtgctccgcatcaacaagatgctttcgtgcgctggggctgataggctccagaccggtatgaggggtgcttttggtaagcctcagggtgtctgtgcccgtgttgccattggccaggtccttctttctgtgcgctgcaaggccaacaatgccatccatgccactgaggccctccgtcgtgccaagttcaagttccctggtcgccaaaagatcatcgagagcaggaagtggggcttcaccaagttcaaccgcaacgactaccttaagctcaagagcgagggcaggatcttgcctgatggtgtcaatgccaagctgctgggatgccatggtcgcctctccaaccgtcagcctggacaagctttcctgtcggacgacatcgtcgcataatccagcagcagatttctatctgtcttaccaaaccatattttagttttgtggaacttagcttcaaagtgcctgtggttctattgttaagttgcctgaacatcgtcttcaatgacattatctattttgtgttggtaactaaaaaaaaaaaagttaaattaatc

SEQ ID NO: 1763 - DNA, 608 bp, Avena sativa
gcataaggatctttctgctctggcgagtgtacacctcaaaagagtattcccagataaaaagattggcaagatcgttgaaacaaacctatcagcgaatcaagaacgcgctgacatggagaagaagagactgaaatggaaggtggaagggcctaccccccacgaaaatgtggtccgtggaggccctatcgatccttccaagctcgtcgtccagcttgggcccatggagatccgcacatttatcatcagcttcgaccaccaatgaactaaaaaagtccagctgtggaggagcccggctgaattttcattaagaatggtgagacaccggaatcgacatcgacgaggttcgaaccctggtcggtagggtgtgccactgcgtgcacgaccactgggctactgccctgttcccaccgatgaactaaggtccgagcttcgcgagaggaggcatactgtaagctttaatcttcttactgtgactccaatgttgtaatgttaaccctgactcgtcttgtgaaactgagttagaggaccagttcttttgtcggcttctycaagaagctgccctaccctagcttcctgggaaagcctgttccgaaattttgtgtggcttc

SEQ ID NO: 1764 - DNA, 778 bp, Avena sativa
gctagatgagcatcatgggctaaaggaatattgcggcataactgctgctgctactggtggcatggcatgtcacaatagataacagaagaattcgactccaacacacaacataactatctccctaccacatctccgtgtcttacatagttataaaaggaaataaaaggcaactaatcttacacgagcaggttccctacataagccaagtggtaaacatacataatccttaaggattcgacagggcttctccgatacaacattcgtcaactaactgacccaaggcacgatactttgtgccaacctctagccatcggtagtacatatatggccatcatggtctcacattacagaaaaactggctgccgcggacaagagaatcgataagatcatccatgggaagccctgggtacgtgaccttgcagctttcaggtaggagtagtagaagcgtctccattttgagcattctctgacttgactgccagtccatcagacacatggttagtttttgcctcacttgacggagaacgttctgcttttgccttccggactagctccacctctgatccaagcggctcatcggcaccagaagccagtccagtcgtctggccctcatgtgttggaggagcagcccaggctatggggttagcttccactgtttgaagaggcttaggcattgcttcatcactcgctatcttagggcgctttttgacatagttctgccgcagaggtctgggaatttggaacgaaaactgagctaatgctacaccttgtgtagcat

SEQ ID NO: 1765 - DNA, 715 bp, Avena sativa
ggtttctcttctaacaacattgaagtcaatgaagcatcgactagctgcaggtgcaaggttaccgaatgttacaattctattgcccacagaaaagaaacaggttgatcttgatgaaagagagaaaacacttaagcttgctggaagagttggtcaagcagttggctccctgctgaggagattaggaattaaatatcaaggcgaggagtcccacgggaggatgaggatcaacggcctcacactaagaaggtggtttaatccaaaatgcacaagcacaccctccacaggagctccagctgagttgcttccagtatcctcgcgattagcaaaaggaattactgatcagcagcgcgatatcagaagtctttctctatagtacaggttttactatcttttgcatacacagaaagaagttactgtacagcatcagcatatcatgcccaccgtcgaaccttaggcctgggcggcgccacctcggaaccaaagggtaaatgcaggtggcgcgagtgcgtgcaagttaagtgtgggccaggatggtcaggtaaacgtgagggtgtgcgtgtgagtgcgtgcaagttaagtgtgggccaggatggtcaggtaaacttgagggtgtgcgtgtgcgtgtgctgcgcagtgataagcgtaagatgtatcgaatgaaggaaagtaagaagaacgtatatggaagctatttctcctctcagctacagccgaa

SEQ ID NO: 1766 - DNA, 833 bp, Avena sativa
ctcgttcgactggactgtcagctccgagggcccggcgaggcacagcctgatctacagaggcctggtcccactcctcgctgagggctctgccaaggccaccgactcggagtcgaccgaggagatcctgcaggctgcactgaagtctgctgtgaagaagcagctgtgcaaggctggtgacgcggtcgtcgtcctgcaccgtatcggcgtcgcctccgtcatcaagatctgcaccgtgaagtgatcgatcgatcgtccatcaggaggcacttggtcggtcgcttctttactccaatgttctggagacaaattaattattaccatctttccagtttgtttgttgcatagacccgatcgagctggtaaattaggagaggggactcccgttatatagagctcttttactgttgatgattgatgccttgcttgtagtatttgacaggtgatttcccgtttcatgcatgcctcctgcacaattttctattggtagaagcttattcctgttgtatttctgaaagtactcgtcagtgatgtcagtacgtatggtaataagtttttggcatcattcccaggtgcggtatctatctagtcgaaagctgaataaacagcgtctacaggagatttgatggagtagtttagcggtttatttgtttgatttgtcacagcgagtacgggctactccactccaatctgatggacggactctgttgccttattagggtctcaaaggggttcagagctcaaaagtcgaggaatgtatgtgtatgtaatctgtaatggatttgatatttgtagaaactgttggtatttgtaagtcagatcgtgttgtctatcat

SEQ ID NO: 1767 - DNA, 253 bp, Avena sativa
atcatcgcgagttttaacagaaccgtgtcagcattgtttccatggtactactgctgcctgttacctccgcaattcggagcgctgtgcaacggttttgaggtgattttttctgtcatcggattcagttagctaggggctgtgaatgatttggatattggtttgttggcttgttcgttggtattcgcgagagcagtactgttttcatgttatgttgatcattactaatctgtagagttgtcgattgccaaaaaaa

SEQ ID NO: 1768 - DNA, 516 bp, Avena sativa
tttttttgcacgcaaagacacagcttgattatataaaaggcgtacacttgcattttcacagatatccacctgacaaaacatgcatgtaatttcgttgaatgacaaaacatataatacacaccacattatagtaaatgcacggccgcatatcatgccatcattcgcacaaccggctcgtgcgtgcaccacatacatgcagcttatttcaatcacacgttacgccatgtacatatatatagcacacatatattagattatacccaaatcactagtccatgactgggtagacaccgaatacggcgacgccacagagcccttcgcgcccatcggctcccctacgcatgaaaaagaagcccttctggccccattcctggccccacgagttcttcaaaatccagtactcttctccggcgccggtgaccccgtacccaaccagtgtcaccacatggttgtggcttgtgctgcacggccccttgtacacccagacttgtagttctgcaagacagcccactcgcg

SEQ ID NO: 1769 - DNA, 1012 bp, Avena sativa
ccactcgcctcccggcctcgccgacgaacaccgtcgccggaagctagcaccgcgccctcccacgatggccacccccgacctcctcttcaacctgcgcaacctcttctacctcggcgcctaccagtccgccatcaacaacagcgacgtcccgggcctcgacgccgacgccgcggccgagcgcgacgtcatcgtcttccgctcctacatcgccctcggatcctaccagctggtgatcagcgagatcgactcctcggcggcgacgtcgctgcaggccgtgaagctgctcgcgctgtacctcaccggcgacaaggaaggtgcaatcgccagcctcaaggaatggttgagtgactcagctataggtagcaatcctgttctgcgattgattgctggaatcatatttatgcatgagcaagattacaatgaggctctcaagcacacacacactggaggaacactggacctgcatgcattgaacgtccagatcttccttaagatgcaccgctcagactatgctgacaagcaactgaaggtcatgcaacaaactgatgaggaccatacactgacacaactagcaaatgcatggctcgatattgctgttggtggctctaagatccgtgaagcttatctcatattccaggactttgcggaaaaatatcctatgacagggatggttcttaatggcaaggcagtttgctgtatgcacatggggagctttgaggaggctgaaactctattgcttgaagccctgaacaaggatgccaaggatcctgaaactcttgccaatcttattgtatgtaatcttcacctcggcaaagcgtcgtcacgatacttcagccagctgaagctgtcgcaccctgaccacgtgctagttaagtccaccgcatcggcggaggataactttgagagggctctccaagccgtcgcttgagaccctcctgcctgattgcagttagcgcattgagcctccccatgtcccattttgaagtgctttaacacagtgaaattgtattgg

SEQ ID NO: 1770 - DNA, 558 bp, Avena sativa
caagagtaggcatatctttggcaaatttgattatacaagatccatcgtatcatgagaagatcacacactacatcacacagcctgatatgaagcagacatgcctacagtggttcctcgatctgacatatggtttgcactatgtgaacttattccagtctccacattgtttgctgtcatgtagctcctttatttcttggttgcgcgatattgtctacggtttcttatcgaaatcactcttccttgtttgctccagataggcttgctccagattgttttccgcaatctccttgagctttgttaggcttgccttatgaagtttgtaacctttatcggtgccgtacaaataatcgcaaaagagtcagagcaacttctcctccgtcttcaccttctgcgattatttgtacggcacggataaaggttacaaacttcacaaggcaagcctgacaaagctcaaggagatggcggcggaaaacaatctcgagcaagccagtctggagcaagcaaggaagaatgatttcgacaagaaaccatagacaaccagcaaggcacacaggggat

SEQ ID NO: 1771 - DNA, 1098 bp, Avena sativa
agtctgaaacaattaatgcaacagctagtagtagtagtaagaagatcaaaagcgggcgggagagcgtcggcgcgcccttatttcgctgggcgccacacgcgtgcctcctctatttcccacctagtagtagtacgattcagaagaaatttgaaatccccctcccccacacagaaacagcttcaaactcgctcccgccaaatcagacccacacaggcgtcgtcttggtctagctgtactggacgatggagcggtagaaagtgttgggccgccagttcttggggatgacgtcgcgggccaccagggtcttgccggactcgttgcggatgcggacagagaatggcgcctggagcctgtggttggagtcgaggcgccagatggatccccacgactcccgcatccgcgtccaccgcccgccgttcttcttgccggactccctcaggtccacctgcaccacgtcgccgtcgccgttctcgtactccaccaggatcgccatgtacaccgcgttagaaccctcctccacgtggaaacccaccttcagaccagggaactcgcacggcaccctggtgaatgagatgtcgatgatcccggcgtgtcggagctcgtcgttgcggccgggcttggcgagcttgccgaaggcggtgccgctgaggtcgaagtggtagggagccaccgggtagtagttcatgtctgtgatcaccaccgtctccgtccgaccagagcaagccttgtgcttagtgcacttgatcttgtagcatgcgccgcagcccttgccgtccttgaacaacggctggttgccgcaggaggtcatggccatgaacgggtacctgttcacgttcttgaacccgcaagcgccgccgttgtcgtaggggccggcgccgttgggggcgccgtaccaggtggccctggcgacgcccgactggccgaaggacaccgcgctgacgctggcgttgggctgggccgccgcgccgccgccgacgcccgtgtccaggctgatggtctcgtccgctccgggctgctccgcgacgtcgcagcggccgaggaacggaaaggaggagagcagcagcagcattgccgccaggagcgagagctgctgcagct

SEQ ID NO: 1772 - DNA, 332 bp, Avena sativa
  modified_base (316)..(316): a, c, t, g, unknown or other
tttttcttaaggcaaaacaatgggtttcatgaattaaagcaaacaatgattcaacacaccattcttagttaccaacacaaaatagataatctcattgaagacgaggttcaacacgacgttcagacaacttaacatagaaccacaggcacttggcagctaagttccacaaaactaaaatatggtttggtaaaacagatagaaatctgctggattatgcgacgatgtcgtccgacagggaaagcttgtaccaggctgacggttggaagaggcgaccatggcatcccagcagcttggcattgacaccatcaggcaagancctgccctcgctcttg

SEQ ID NO: 1773 - DNA, 613 bp, Avena sativa
gccagtggttcggcaggcaatggcgttgccaatgctgctggtaacggcgggggcggtggtcaaggtgctggtgctaatgggtccagcggaaaaggaggtggagatggcagtggtaaagcatatggtgagagtggcgtagcaatggcaccggctcctggtgctgctggtgtcagctactctgatgctggcggtagtggtaccggtggtggtggcgggaacaatggaaatggaggtggcgatggcaaaggagctggacaggccagcagcgatgacactactggaggaagtgccactggacagggaagcggcggcggtggtggcatcattaaaggtgccgctcaaggtcctagcgtcggagtagggtctggttctggcactggagctggacaaaccggtagctctggcactaatggttcaggttatgccaccggactcggtggtggcgctggtggcggaggaggtactagcgacaatggcgggacaggcggtggttctggcaacggatctggaaccggtagcggtggatacccttgaaatttcctctctcgggcaagctagaaccagagcccacctcttcattttattattaaacaaaacaaatgaagaagacttc

SEQ ID NO: 1774 - DNA, 674 bp, Avena sativa
ggactggagttctcctcgaagggcctacgggggaagacagccctgcaagcatccttcaaggaagctatggaggctaaacagagagctgaagacgaggcagccgcattgaaggaaaaaatgatggcaatggaagaaagtcagagaaaaatgcaggaggatttggcgagtatgaagagcacagttagtgctatccacaagacagtgccaactggtgacttaccaggtcaacaaatgcgcaacagagcgcctggtaccaactttcaagatgagctaacgggtggaccatcctttcctccaggttccgcacagaatccagatccttcgcccgcgcaaatcaggtcgaaagcgcgccaagcgctcatgaaactccgcgtctgtatcttgatgtcatggctgcaccgtacaatcatttcacgccacctcaaaacagctttgatgttcactcgacatgcaatcccatctttatcatggtgatggatctatgaaatggaggacttagggcgggcgtagctgcttgttgatgtgtagtatggactcccaaaagcagaaaagttttgagttcaacgtctgtagttcagaattatgtttattggtcgttgtaaccgaagactatggatcatgatgttgcctattatgttgatagattatttatgtatttggtgttaaatttaaaa

SEQ ID NO: 1775 - DNA, 835 bp, Avena sativa
ttgtctaaacggcttaagaaagaagaagagcgtggcgaatcaggatttattctcgatggtttcccacgcaccgtaaatcaagcggaaattcttgacggggttacggatattgatatggtggttaatctgaagttgagagaagatgtcattgtacagaagtgccttggtagacgtacttgtcgtgaatgtggttcgagctacaacttggcctgcattgacgtgaaggctgaaaatgggcttccaccgatctacatgtcgccattgttacctcccagtaaatgtgagtcaaagatgattactcgagatgatgatacagaagaagttataaggaaccggctgcggatatataatgagatgagtcaacctgtggaggatttctacaagaagcaggggaaggtgttggagttcgatttgccaggaggaataccggaatcctggccaaagcttctccgggttctgaatctagaggaccaacaagagttgaatcgggccgccacggcgtaagtcttgtgggcagaagaccttacacagtccagagcataccttgcatttttttcaataatggaaagaagataaaatgactcttatattccataagtgtgtgtccctttatgggagtaatttttgacctatagtgtaacctatttattctcaccggtgttttgagtgagacggtaacgattgtatccaaattttgatcctacgcagcatttcttgttgcgtggtttgtagcgcatcagtcatcaggacgctatgtaatgttccttcgagataaggactgatctgttcttgctagataatgcatgtatgatcttggcttagtacttgatatcta

SEQ ID NO: 1776 - DNA, 953 bp, Avena sativa
cccgggatggcacctctctctcccttcctcctccggcccatgcgacggcactgacagcttggccctcctgaccttccgatggccgccgccgccaccgccgccgcgcccggcgcgcttcttcccggcttactgctcaatcaccgctcgcctccgccgccgcagctcctcgcgttgtcctcctccttccgccgcctctccatatccgtctcccatcgccgggccacccatttagtcgcccacgcagacgccggcgccgcagagccggagccggcggaggaacctgcacccgaggccgaggctgtcgttgcatcagctgacgccgagggggctgaggaggctgagggtgctgtcgcggtggcggaagaagaggaagagccggcgccgaagcgtaagcccaagttcggcgaaatcatcgcgattctgaacaagcagttcattgaggaggctgagaaggtgaaagtacttccagatctgaggcccggtgacatcatcgagcttagaatgcaacgacccaacaagaggagattgtcactcttcaagggtataatcattgcaaagcacaaatccggtgttcacaccacaatccgtgtcagaaggatcattgctggtgttggagttgaaattaccttccctatatactcaccaaggatcaaggagatcaaagtaatcagacgcaagaaagtgaggagggcaaagctgtactacctgaagtacaagcttccccgtttctcaacattcaagtgagataagatgtgatggcggaagagctcaaactagcatgtcgatttctccttggcttgacattcctattcagatctgtgcattcgctgtaaacaccgaacctcgagccaccacgtaattttacatctttttgattggcacatatattttgtcgtgcgcagtggaagcttactttcttccaagtgtataaaatctccccactagagcttcgt

SEQ ID NO: 1777 - DNA, 914 bp, Avena sativa
ccgctggcacgccattgtgcacatacagtgagttccacgtccaaaacaaaacaagactgatcaatgtttacaaatcttcctaggttttgcgagccagtagcctaagaatcaatacaaatttccaattcctcatttgctttgtaaggtcacagccgttcacgaagataccaagtcgggcgtctcggcttcgacagacagcaaagtcgtgtgcaccttatcgacccaggtgtccagccggtcgcgcagggatttcacttggtcgatgccgaggaccctcggttgcacccacgatatgtggacagtcacgtcgacctcatcaattatgccttcgataagatgagcagagagactcttcattagtagatactcaacatcttcaactgagagcctggtttgttcagctattgtgctcaacggtatcgtacggtcttgagatgctcgactgaaaatgatttccatcaggcaaaggatattgatcttttcaagtaaccccctctcattctgtaccaaagcaggctgtgcgctcaaagcggtagcatgaattttgcagagttcctggtaggacgctagattgccagagttgaatgattgcaacatatgataaatccactccaccgctgttcccacaaggctgtggataattggatgagcaagcaactccccgaagttgtatatgttgtcgcccaataaagcagcaagtgagaggtcaaatgccaggttctgcttgaatggttctgaaagtgactccactgttgtgtatgcaagatagagaagagcatttttgtaaaattcagagtagtcttgggagactttgtagtactgggaacatatccaataataggtcgaatgtactgaagggtcaacatcaaccatgccatctaaagtggttttcccctcatctagcagcttcttac

SEQ ID NO: 1778 - DNA, 548 bp, Avena sativa
gttcttgaggctgtggcagttaacaatttagggaaatggaagacagcgacgcagatgacagcattgactctcctccttgccagcagagacccaagtctactacctgtacaaggtgctctagctgctcctggagtcgcattgctttatgcatccgctggacttgccatatggtccctagtggtgtacatcagaaacatagggcgaatacttctaaaatagtgttagcacatagtgtaatagaagaaacaggagcaagggctactatattccattcaagatcatgcaatttttgtggaaggttgttgagttgatcgatgtggcctagatcttgttgagatcctcggtgactggtgtgatctgcgcctggcggattagccgccatgggaatctgttgatcatgcgaggatctccttagaaacaaaaatatatagctcgtagcatgatgccaaggtgattactttcctgaaatctgtttcggggtcaccacagcttgagagttggacaccgtgtgtaatgagcttggcaagacttggagacgatgacagaag

SEQ ID NO: 1779 - DNA, 843 bp, Avena sativa
gaacagtgatcattgaatattaaccaaaagaatctgtgaaacaaagcacttcttgtttacatttgctagagtactggtacttatttcagaacccatacactacattacaccatttcagttgagtgaaactagctagcagtctgctccatgtgcctaagactaaggttattcacatagcaactgctagcctcgccccatgcccctaattcacatggcaccacttaaacgaatatgttatacatacaggcgccaccacaactttacaactcctacctagaggagggttggctctgaaggctaccattcccatgtatacggcagagatctcataaaggatcctccaacttgatttcttcttctgacaacataaacgtgggatcatgagttacaatacagtgcccctcagaataacctttcattaagagctttccaatcttcatcctccaatctgtgctatatttctcattccacttgtcatgaactacccgatcacggtagtttagcattgtcccaagcccagtgtttggtatccaaccatattcttccaaaacccgcgcctcaccttctgataaatcttcaccgaccaatagtggcctgttttcaataagagctgtcctgccacagctactaagcttcatagcagtaaccagccttcggatctgccattctattggcaccgattgcacaatttcaaagaaataagttgcataaccatattcagggcgctcaagaactagcctattatggcttctaaatacaaaaatgaaggattgcaaatccctgcaccaaccccattaccacaggacagtcacggaactgaagatagagacgactgctcaatga

SEQ ID NO: 1780 - DNA, 782 bp, Avena sativa
acacacacacacacacacacacacacacacacacacacggtccagctgggctaacctagtacaaattattttatcaattgcacatcttcgctccggccacacatccaaacacaggtcaaaaaagcaatccagcttctgcattcttcttcaccaattaagtcagcatcacgacacataaaacacccggcagtcaccctttgtcccatataatcgcaactccccgctttccactgtcctccaccagtgattccctcaattctcccaaggattcgaaatcagatcattttcctcccaccaaaaccatttgagcgccgccgtctccgaatcagaatgtgtgtagcagaagatgcaggtgggccaatccccgacacagaaaaattccttcagcaaagcatttgtactgcgttaataggcaagatcagaatttgcattccataaccacccatgcttgccatattgacatcccaagcaatttatgcgctctcagctgggaacagccctgtgtacccttccccatgtgctcgctttggtcgccactttgtatgtgccttcacaacatccgctccagactccagctgcagcagatggtcgcactggatggcagagcctgggctactaccatcagcgcattcacctgaaacattggtaagtgactgcagcacactgtcacggtcacactccttcctgtactccagtgtcatgcttgcaagctcatgcttttccagtattgaaattggagcactctcaagaatccagccaatatacttcacattgttcacatg

SEQ ID NO: 1781 - DNA, 941 bp, Avena sativa
cactattctttgtgccgttcagaatgttgttgcgtacttccctctttcattgtcttatttactctacatgctagcttcaatggaatctatccgtggagtaaatgttcctatgtatacaactctaaggcgcacaacagtagtatttacaatgataatggagtatttcttggcaaagcagaagcacaccccacctataattggcagtgtggtcttgattgtattcggagcttttgtcgctggtgctcgagacttgtcgtttgatgctcgtgggtatgccattgtcttcgtcgccaatataactacagctgtttatcttgctacaataaatcgtattggaaaatcgagtggccttaatagctttggcctgatgtggtgcaatggacttgtttgtggaccttgtgtactgttcttgacatatattcagggtgacctcaagaagaccattgaatttccttacctttattctccaggattccaggtggtgttgctattttcgtgtatgctagcatttctgctaaactacaccatcttctggaacacaatcttgaattctgcactcacacagtcaatgtgtggcaatttgaaggatttcttcactgttgggcttggctgggtgctctttggcgggcttccttttgatttgctgaatgtcattggccaagggcttggcttcgtcggctctggcacttatgcctactgcaagatcaaaggaaagtagacattgatgcccaagggatcaaagcgaagtagatactgatgttggcagtatggcttaacccaagtagcgttcatcatgctgtttgctccctgcctatgggagagaaaattttgtaggtttttcgtgtgtgtgcatttatgaacttcagttgtccttggtggaacatgaatgaacagccattaatttgccaaggaaatagaatacaacaagatttcagcaaaaa

SEQ ID NO: 1782 - DNA, 745 bp, Avena sativa
gaacctagatctaggtagacctccacttccaggttatatcacgtaaatgcagccagaactacagctttccgaatttgatttttgacgagcagatttgtggtggtgggactcttatctgggcagaacttactaagaacagtctgcttcaatggcaagtgtttttgtgatgccagggcatatatcttctccgaatccctcctctgataatgaaactgtgcagctattggtgttcagacaggccttctcaacaacagatagagagcttggatggtggcagcttccctgttgataggatctacaggttccactggggtctccaaagctcgcgaacttaattgaagagatctttttgtccttggggcaagacagctctacttttgctgcaactcggacatcatctgagatacttttatcccaagactccaggtctatggaaggatagttctctgacacagaggagcagacacttgtcacaactcttctcgagaatgtaatcttcgtgggatcaccaccatgctcctcaaagaccacaagagtgttccctgatgggtgaaaccatgaccttgggacgtggtaccatctttgggttggcttcccacatccaatcctgcacttgtttggagaaaattgtcctctgtagttacagctgggagtgcacctctcatcagtagaactgatcctgggccagtacctcccctatggcatttccattcaaccaactaggcctttccccatagactgcatg

SEQ ID NO: 1783 - DNA, 675 bp, Avena sativa
gcttatcctccaacaaacactttgaataggtattcaggacctctgcatgctacatcaagtacttcacagtcaggagaagcaagtacttccaatcaatcacaggatgacggagcattgcaggggcagaacactcaggatccatcagcatctcagccttttatttcgcatggtccttctagcttaacagcaagcaaccgagaccttgaaaaatcactacaactggcctacgaaaacgctataaggagccagatagagatgttgcaaatccaattgcaaatggtgcagcaaggggctacaacatcggcaactgacaatgagaatgctgagcaagcaaaaaaatgagtgaagtggtatatatacctgaacaatgagtgaagtgtgatctggataaaaaaacaatttagacggagatttgggcagtacctgaagtgagggctcgcttatgtatatgttagcaatcgacaccagatgtttgttcgttctgcgtagcctaaatctcgttgtcaaacctgggttataccttagatagaaaggcagtcatattgtaacgctgaccaacttggcagcaactgtgagatcaaagaaaaatacatctgctgagagacatttttcgatgtgccaccggaataaaagtatttttggtataatcagatatgatttgtgttgactaaaaaa

SEQ ID NO: 1784 - DNA, 910 bp, Avena sativa
gattcctgtgaggatgccctcaatgtctacattgtcatggagttatgtgagggcggagagttgctagacagaatattagccagaggtgggaggtacacggaagaagatgctaaagcgattgttgtacagattttgagcgtagtggccttctgtcatcttcagggagtagtgcatcgtgatttgaagccagagaccaggtaaaatagttcgatcctcctcttcgcacgcactaatacgtggtacaacacgtttatcagttattgctgatctgttctcctattgtcaatggatcatcatgttgatctgacattaatcacacttcatgaaaggctaaatgatattgttggaagtgcatattatgttgccccagaggttctacacagatcatacagtatggaagctgacatttggagtataggtgtcataacgtatattttgctctgtggtagtcgtccattttgggcacggaccgaatcaggaatcttccgatctgtattgagagctgatcctaacctcgatgattctccatggccgtcagtgtcagctgaagctaaggattttgtgaaaagatttctgaacaaggattaccggaaaaggatgactgctgtccaagcattgactcacccttggttgcgggatgatcaaaggcagattccactggacattcttatctacagattaattaagcaatatcttcgtgccacacctcttaaacgtttggcactgaaggcattatccaaggctttaaaggatgatgaactcttctatcttaggctacagtttaagctgcttgagcctagagatggagtcgtgacacttgacaactttcgaactgctctaacgcgatatttgactgatgcgatgaaggaatcaagaattcttgaatttttgcatgcgttggaaccgcttg

SEQ ID NO: 1785 - DNA, 1005 bp, Avena sativa
ctgttcagtcccgtccaacgccgaagccctagcgctccgcgaccggccgccggacgtgctcaccccgcggcgccgcttcctccaactcctccgtccccatcgtcgcggctgctctccgacgaaactacccggggcgcgtgacgctactcccgcatcctgtccccgatgacgaggaccagcggcgcgaacggtggcggcgggcagcagcaggggtcggggaagctcccgcggaagcgcttctaccgggcgcgcgcgcacagcaacccgctcagcgactcgcacttcccgttcccgatatcgcccgacgacttcgacctctcgcagcactacccgcgctactacccggccgccgacaaaggcgacctcggcgatggcgaggcaaatgcgcccctgattcgcttcgcggacgtgggttgcgggttcggcgggttgcttgtcggtctctcgccgctcttccccgacaagctcatgatcggcatggagctaagggacaaggtgactgagtatgtcaaagagagggttgtggcttttaagagcatcaaatccaggacagtacgacaacgtatctgttgtgcgcaccaattcgatgaaatatattccgaactacttcagaaaggctcagctctccaagatgttcttcctgttccctgatcctcacttcaaggagaagaaccaccggcggagggtcattagcatgcacttgcttgatgagtatgcttatgtgatggaagtgggaggaatcatatatacgattaccgatgtagaggagcttggtatatggatgcgctcatgtctggagaagcacccactctttgaagctgttccagaggaagagataaaagtcgatccagttgtcacattactgtctactgccactgaagaaggccagaaggttgcaaggaatggagggcaaactttccaggccatcttcaggcgcatctccttgcaagaggaataggctagtttggaagttactatcactttcctttactgctagatggatct

SEQ ID NO: 1786 - DNA, 572 bp, Avena sativa
cgcactggagaagatcgtcgagtcgatcaagtcctcctgcgcatacgccaagtggggctgctgcgacttggttagctacacccaacgaagcactcacgaagaagcctgcctctttgccccatcaacgtgccctattcctgtctgtcgatataaaggcttcactggatgttggtcaggtcacttcctcatagaccacagcgctgattgcttgcatttcgtatatggccagccattcgaagtaaacctggagttgtccctgccgtttctggttcttcttggagaggacgatcacctcttcctgcttctgaacaagaacatgacaccctttgggcatgcgtttaccgtggtttgcctgaggaacggcgacctgaactggaagttctcctatgaaattaaagcagctagtcggagaaaccctgaaaactgcctgcaattgaaggcctctattacaaatacaaacgagtgggatggtgtgcaccctagagaagcttttctttggtcccatatgatttctgtggttccgctaacctaacagtcgatgtctctgttttcgaggttctgcctctgtatga

SEQ ID NO: 1787 - DNA, 646 bp, Avena sativa
aactttggaccgatgacgcctccagtgtacaacagttggttcagatcacatgaaactaccaacagaatggccagacaacagactttctctcttctgcccatcagctgtattgagctccttgaatggtaccaaacaagcataaatctgtagtaatggatcaatgttgctgaataatgtcagctttgcaaatttgcgggtggctcacattcataacgttcacagatgcacaaggctaaaaatggttgagctggcgacagcaacttattggtcagtgatccattttcaggtcagtgatcttctggcagggtcacttctatgtaccttttttttctctcataacatcctatgcgtcatctgtagctgcagacgctacaccctttttattcctggtaactttgcttgctggaaagtgaagcctcgcatacagcggtcttggtgctctagataccctatcaaagcccctcacgcacacaaatcctttccaaaagcaatgttgtatttcttcagttgttaaacctttaaagattgaaggaactgaagttccaaagtaaactgttctcttaggaaggtcccatatccatctccttggacatcaactgggtttcggcttgagtcatgatcagcaatacctcatttacttgaaata

SEQ ID NO: 1788 - DNA, 553 bp, Avena sativa
gggactcggtgttcctccgtgaggcatacaagaactcacagctgatcgagaagagccatctggtcctgcttaaggagaagatgagggctcttgttatggttccacgcttccctcgacggggtggacctaggactggtgaggagactgagggagctaatggcgctgcacaaaggtttaatgaaggaagcgacacggaagatgaagacgatgatttttcagatatggaagatttgattggggaacttggtggcaagtctgacaatgactaccgctggggtgatggttgggttggtgagagtgatgcgttgccaccggactttggagatggtgatgactcgagttcagaagatgtcgaggtgacaacgaaagatccggctaattctaccaaggatgactcctctgttcctgtattccctgatggcagacaaagggaacggtggtaaattaagttattttgaaatttaggtgttagaattttaatctgtattgttagttttatctggtctgattgcaaagcctctgtctttgatgtgcctgctggctagtgttatgt

SEQ ID NO: 1789 - DNA, 935 bp, Avena sativa
agtatcagcattcgtctgagcctccagtcaaaatgtttccacatggacatcagtctggggtgatggcacaccctccaatgctatctcagccctttggcacctcttcaagtgttcccactcaaccccttgcgacctcaggaggcttgatatcacaagtccagcctccattcttgccacctcaccatagacccccagttatgccaactaatgtacagcaactacctttgaccaatcctcatctcccccaggttgctgctgcacctgatatacccctgcaggaaactagattgcctgatcgagctagtcatcaggcagagttgactcatccctcaaaattgcggaaattggaggatggaacgtcaacgcctggaaatgtaaacaatagtcatgctgtgtactctgctccatcacagatagtggtccctggtggaccatcagggagctatagttctggtgctgttaattttcagccgccagagaatgaagtagctcagctcacgcccgacgatgagtcagctcttctgcagcaggtcttacaattgacaccagagcagctgagctcgttgccactagagcagcagcagcaggtgatccagcttcagaagatgctatcagctggtaaatagcaccagcagagtagacacacctaaactgttacatacatagacactgtggaagaagtggcgaaactgaaacacgatcgtcgtcgattcctctagccacacatgtagcttctcaactttgttggtattgctgggccatcagttttgttcttggttatttatctggcattctttgtaaagtctgagatagaaatttgatggcaatagatgtagcgagggaaggtgtttgttatcaatctgtttgtaacagtttagaaaagaataatcaggagaagggaggtgtatttatgttctcgtattgtttgtagctat

SEQ ID NO: 1790 - DNA, 937 bp, Avena sativa
catcagtctcatctctttcgtgcaagccctttatctctctcttcctctgctcgtgatttctccgccgggatccgtccatggcgatgttgagggccgtcgggaggcagctcgtcgaccgggcggtcggatccagggccgcgcacacatctgcaggcagcaagaagatcgtgggtgtgttctaccaggccggcgagtacgccgacaagaaccccaacttcgtcggatgcgtcgagggcgccctcggcatacgagactggctggaatccaagggacataactacattgtcacggacgacaaggaggggttgaacagcgaactggagaagcacatcgaagacatgcacgtcctgataaccaccccgttccacccagcctatgttactgcagaaaggatcaagaaggcaaaaaaccttgagctgcttctcactgctggaattggctcagatcatattgatttgccagctgctgctgctgcgggcttgactgttgcagaagttactggaagtaacaccgtctctgtggcagaagatgagctcatgcgcatcttgattctgctcaggaacttcttgcctggctatcaacaggtcgttcaaggtgaatggaatgttgcaggaatcgcccatagagcttatgatcttgagggaaagactgtcggaactgtcggggctggtcgaattggcaggctcttacttcagcgtcttaagcccttcaactgcaacctgctctaccatgacagacttcagattaaccctgagcttgagaaagaaattggtgccaaatttgaagaggacctggatgctatgcttccaaagtgtgatgtcattgtgatcaacacgcctcttactgagaaaaccagaggcatgttcaataaagaaaagattgcaaagatgaagaaaggtgtaatcatcgtgaataaygctcgtggggcaatcatgga

SEQ ID NO: 1791 - DNA, 506 bp, Avena sativa
tggaccaaccaacctctagacaaattatagtatatatagacttactcctttgtcatcctggtataagaaacaaataggaaagatctctgacaaaactgcatccggtgtccgcagtctaccttgtgcctaattcgatctggagaatcaactcggaggtggcaatatacatcagtggctgttacaggcacgcatccgccaatatagccaatgctgtataccatcttccgtgatgacgaagaatcacccaactgcccaccaggttggctgatggtcaggtggttacaaaattcttctaccaactggatcttaactaaacatgctgaaacgtgctgtacgctatgatctcaatgtgcctcgtgcgtatctccataaactggctgctaagaccagtgtggcggccatgccggccaaaatcttcgcatctctgctaaatccaccagagctccaactcacaactgatatcaacgagttccaacgagatggctttggcataagaattactacgg

SEQ ID NO: 1792 - DNA, 803 bp, Avena sativa
gaagggcttatggaacaggaaaaaggaagtgcagcattgctcgtgtttggattcagcctggtgatggcaaattcgttgtcaatgacaaggagtttgatgtttacttcccaattttggatcatcgagctgatcttcttcggccatttaccgtgaccaagacgttggggctttgggatgtagcttgtactgtgaaaggtggcggtgtctcagggcaagttggagcggtgcgcctaggtatcagcagggctttgcagaattgggagccaggactgcgtccatatctcaaagcagctggatatttaaccagagattcacgtgtggttgaaaggaagaagcctggaaaggcaaaggcaagaaagagcttccaatgggtcaagcggtaacaggtctatttggaatattactgtgcctctggtggcaggtcatttgctatttgctgtggatcttctagtcagcacagatcttgtatttgcactggatgtgcgctcatctcggtggaaggccctccggagctttgtactcggatattccaattcttgttgatcatggagttggtgagacaccagctattctgattttttgtatgttgatacaacaaacagatccaggaaagtatcattttgactagacctagatgcagaagatacttttgctatgagctgctgctgactgccaataaaacccgaccgggaagtcaatgttcagctcacagtattgtttccccctttcagtttcgtagggctgcacgactgtatgtcaactgacgccaccattttatgataattagtttcagaactaataaa

SEQ ID NO: 1793 - DNA, 525 bp, Avena sativa
gacaccaacaaagaagaaatgtatgaagtgcaacacaaagataatactgaagaaaaggaggctgaagagactactgcaaaggaggcggacgccgtacacagcacggacactgctgaagagcagaagcagactgaaggcacagtttggcctggaaggaagcaagcagaacgaagagatcgctgccatcgggtcaaggctgaactcagcgaggatctccgtcccgttgaaggtgctcttggctgaggcgagcctggagagcaaagagaagaagcccagcaccaaggagcgggtcctgtcatttaggcggcgagcatccttgaaggacggcaactcatcagcgaagccggggtcagccggtatggatgaccagtactggaactcccctgcgaagctgccccatgacaacaatgttggcaagagatccagagtgcggaagcagccatggatgccgttcatctgctgccactccgtgcactgatgcgctgctgctgcccttttcagttcccagtcttttgatacgccatg

SEQ ID NO: 1794 - DNA, 990 bp, Avena sativa
gactctgcatcttcagagaacttctctggtcatccggatgttgagagatgcccattcctgaggaacatcaatggggctacaaccttttcattctcctctgctttgcctgtatctgcccgaggaggtaggggtcccatctttgaggagggaccagggtttgaatcggcattcaagcttttccatggacaggatgggatagttcccctttcaggaagatcgtatgtgcctgatgagaaccgcagtgaaagcactgatgtcaaccctgaaactgctctgccttttaatccattggctgctagagctgccaccataagtctatcagcatttggaccattcggttttaacttcttcaataatggcaagggtaaaaagcagaacaagaagcccaacaatctagaccagtcacacaagaagcccagcaagccgaaccagaattcgatgaaacagaaaggaggcaacccaccatcacacgagtcactgagcgatgaatggctagaaaacgggcagtgcccacttgcttggtcttaccgggcaatgagtggtgttctgcccctggtcgccaaggctttacagccaccggctggtatgaatctaaagtgcccgcctgctatcgttgctgcacgagcagcccttgcacgtacaactcttgtaaagtctctccgtccccagcccctgccagctaagatggtagccatcgcattgcttggaatggcagctaacgtccctctaggggtgtggcgcgagcacacgaagaagttctccccccagtggttcgcagctgtccatgccgctgttccattcatcgcgatgctgaggaagtctgtcaacatgcccaggaccgcgatggtattcaccatagcagcctccatccttgggcagactatcgggtcgagggccgagcgcatccgcctgaagactctggcagcaaagagcaccgctgatgctgcggccaccaacgctgccatgtacccaacaagaatggcaattgca

SEQ ID NO: 1795 - DNA, 776 bp, Avena sativa
gtctatgccttcaagaaattttattctggccgaaatacagtggtattggaaacaaaagtcatccccacctcatttcaccaaattttagatcgacatccaagcatttcatcaatccacttcattatctgacatgagcagagctacaaaaagtcatctcccgaccctcaacaggtcaaggaaaacaaaagcacgtttttattccggtcgaagagtagcagagggatgccgtatgcctcggattagaaaaccttggcttgaaactcagcatatgatacctaactacttcggtaaagctcagaccgctggaagctcagaccacagaaagctccccgcactcgctgatgacaaccttcttcttgggacggtcacctctgtcagtctccgacgactcgaccaaactcatgatgtccatgccttcgaggacctggccaaagacaacgtgcctcccgtccagccacggtgtcttgacagtgcagatgaaaaattggctgccgttggtgtttggcccagcgttggccatgctgagcactccaggtccagtatgaaccaatttgaagttctcatccttaaaggtgcggccgtagatgcttttccctccggtgccgttgcccttgtcaaagtctcctccctgaatcatgaagtccttgatgacacggtggaagctcgatcccttgtacccgaaccctttctccccagtgcagagggcacggaagttctcgacagtctgtggaacgtcatccccaataaacaagcccgatgacgatcctcccgacgtt

SEQ ID NO: 1796 - DNA, 778 bp, Avena sativa
atatacgagcggataacaactgatgaaaacaatgtgtccctccccccaattgcagaaacacattaagtactgattcagtattttcatcagggacgttaaagatttgtatctctggcaagactggtacttgtgcaacatcaagttcatcagcagataatgagctatcttgtattagtcaaagcagtttcatctcctcgaagatacaagcaaccgtggatattctgaattcaatcattaacacacatgcccttacagacagtgatactaatgaatcaaatccaagccgagtagccccagttaaagccattgtcttctctcagtggactagcatgctggatttgctggagctttcactgaatagcaatcttatacagtacaggagactagatggaacaatgtccctcaattcaagagataaagcagtgaaggattttaactcagacccagaggttagagttatgataatgtcactgaaagcaggtaatcttggtctcaacatggttgctgcttgccatgtaattctcctcgatctttggtggaatccttatgctgaggaccaggcaattgatagagcacatagaattgggcagactcgtgctgtcactgtctctcgcctaaccattaaagactcggtggaagatcgtattttagctctgcaggaggaaaagagagccatggtcaactctgcttttggcgacgacaaatccggtggccatgccagtaggctcactgtagaagatctgaggtatctgtttaggatatgattgggaggagggca

SEQ ID NO: 1797 - DNA, 592 bp, Avena sativa
tttttttttctaacctggggagcttgccgaaggataatttgacaacagcaatatcagacagtacctcgttcgaaacttcagtattgttactgtagtctcagccttttttatttaaacatgtcatgttctgttcttacttttgcacagaatctccataagtggctaagacacgtaaatctaactacagaaaagggtatctagtggtaaatctacaaaagaatgaataagaccagcttgctacatactactcttttagtactacagcgaaaactgcgtattcacgagccattgtgtaaaatctccccaccttctgttgctatctacctgtggatgttgcactgctgcaagtacgtgttgtcatagttaaggtatctgttccagtagtctctgtatttggggagggagatctccagccagggtttaaggttcccgctgtaatggatgacagcggcgctctcgatttcttctcttctcgtgttgccattccggccaagcccaagaacatgccaccggtggtcaagaggcactgtttggttgtagaagacaagctgccccactggcaagcttcccaccttccatagtctccgccttt

SEQ ID NO: 1798 - DNA, 623 bp, Avena sativa
ctgctgctgcctgcctgctgcacacctcagtccggtctacattacctttttttttttggtatatagcttctcttctactaactttcaaaactggcaggaagtgcccagcctctgcattggacgcgggccggcgccagccgcgtgcttccgtgcctggaaagcgctcgggagaagctcctggaacttgtcgaggaatgcattccactcctcggagcacatgtccgacagcttcacaaaactggcgctgggagggagcatctcgttcgcgctcctgctaccagactggtgcagcatgctaccttctccactatagttagttttagcacccaacttgctcttcggaatgcctccgtggtaggctttagctttcccgaagaaaccagtccccttcagcgatgcagacaactttgagacggaagggaccagcttaggcaacataccgttagagggatcagcgtcatccttgataaccaccttggcatcatcttcctcgtcgcactcgtctaacttcgacagtggattcctgtggcttcctttcatggtcccaacttgctgatggtggtggttcaacgcatctgatcatcctcaccgtccagggagaactgggtgaagtcatcatcgtc

SEQ ID NO: 1799 - DNA, 949 bp, Avena sativa
ggatccttcgcctccaaaccccagcggcagaaccttatcccccagcgagtcttatccccctcgcaatggcggccaccctcttctccaccgcgctctcccaccacttcatccccctcgccgccgccaagcccgccgcctcctccgcccccgcctcgttcgcctgcgggccgctgcgcgcggtgtcggcgctgctggcgccccggaggcggctcctgctgcccgtcgccgtggcggtgtcgtccgagttcgacacggaggacgcggaggaggaggaggagcagggcgagggcgggggcgactccgaggccgagtactccgaggacctcaaggtcttcgtcggcaacctgcccttcaccgtcgacagcgcgcagctcgccgggctcttcgagcaggccggctccgtcgagatggtcgaggttgtatacgacagaatgactggacgtagccgtggattcggattcgtcacaatgtctacagctgcggaagtttcggcggctgtcgagcaattcaatggctacacattccaaggaagacctctgagggttaactccggcccaccaccacccagagatgaattcgcacccagaaccccaagggccatgggtggcggaggcggcgggggcagctttgattcagccaacaagctctacgtcggaaacctgtcttggggcgtcgacaactcaacccttgagaacctgttcagcgaacaaggaacagtgcttgatgctaaggtcatctatgaccgggacagtggcaggtcgaggggttttggtttcgtcacctatggctctgccgatgaggtcaacaacgcgatctcaaaccttgacggcgtggaccttgacggcaggcagatccgagttacagttgcggaatcaaagccgagggagcaaaggaggttttgagatatcctgacgtccgttagggattgattatgtgttccctaagtgtt

SEQ ID NO: 1800 - DNA, 859 bp, Avena sativa
gtcattttgttcactgaaggccctagtggactcaacctctgctgaccactcccttgacaatgaatctggtgttcgaatggtggctctttttgatcatgaggaggttggttcggattcagctcagggagctggttcacctgccatgctagatgctttaacaagaatcactggttcacttaaccattcaaactctaagctgctagaaaaggctgttcaaaggagtttcctggtatctgcagatatggctcatgccttacatcccaattatatggacaagcatgaggagaaccacaagccaaaattacatggtggacttgtgattaagcacaatgctaatcaacgatatgccactaatgctgtgacagcgtttattttccgcgaaatagctgagagacaccaactccctatccaggattttgtcgttcgcaatgacatggcttgcggttcgacaattggcccaatactcgccagcggcgttggtatccgaactgtggatattggagcaccacaactgtcgatgcacagcatcagggagatgtgcgcggttgatgatatcaagtactcgtatgagcacttcaaagcatattttgaagaattcactgaattggatagcaaagtcaaagtagactgttgaggtgcaagtaaggaaagcttgttggatcagtagggcttaggttgttgaaacaacctgtacgtaataataagtgatgtcggatgatttttaagccatgaaggaaattatgtactagaacatgttttacgtatatctttttctttctttcataatccattcccgcatacatgtataacagtaatccacttggttagagcaatctcaagcaattcttcgactttaaaa

SEQ ID NO: 1801 - DNA, 801 bp, Avena sativa
aaaacatcggatctgcatcaatcataggtggttctgtctaccgaggatccgccgacccctgcttgtatggaaggtacttgtatgctgacctgtatgcgtcggccatgtggactggcacggagacccccgagagcagtgggaactacacctccaacctgatctccttcagctgctccaaggactctcccataccctgcgacagtgctgctgggagccctctcccgtcgctcggctacatatattccttcggcgaggacaacagcaaggacgtctacgtcttggcgagcaaaggcgtctaccgggttgtccggcccagcctctgcagatacacgtgcccaaccgagaaacctgagactaacaacggaaaggcacctgctggtccttcgtcgaatgcgccaaccacgggagtaggcatgcagatgcgggcgcttttgctgtttgttatcatgtctttggttttgataagatagaaggatcctaccacatcatatcttcgtattgacataagatcagttcacaatcttatatgtactagcagtacaacaataaatcagtaaggatatcagggaattaaatcttgtgcaggtaaaaatatgaatcatgacatttctgcctttgataccagtctctatatgaactagacagacgtttgcaagaaggaacatatgtagaaccagaacttctttcatatataattccactgcatcttggccacatctggtgatatgggacagtatttaagtcaccatcataatagtctgtcatcatcaggaagatgtgcaagttattgagatagatgtt

SEQ ID NO: 1802 - DNA, 743 bp, Avena sativa
tgacacgcgcggcacaggtaaagcccaaccttttattatagtaccaataatcctgccattgctgccaatcttttgcaaggttttttttggaacataatgccttagtagtaaagaagaatggttattgttttgttttttttgcttgccgtggtcctggtttctatatgtctgaattgctctgcgaactgttcttcagctgtgttggagaagggagagggcgctggaaccttgggtcagcccatagcagatctcgtgatctcgtaggccacgaaggtggcagcgttggccgggacgctgcgggccatggcggggccgaaacccttgtacaggcccttcaccccttcggccgcgacgatcttcttgagcgcgtcgatcgaccccgagtacctcggcttcttgtagtcgtccacctggatcacgctcttcacgacgtcggtcgggtacactgtgagccacagtgcgcctccggcgaggcccccggcgaggatcagagagccttggccgagcttcgacgtgtccggaccaccagccatgtactgcttcacagcctcatacacgccaaacattatggcgttgccggggatctcacgccccattgttgggacaaggcccttgaatagacctttgaggccagcgtccttcatgacatgcctagccacatccatcggacctttagggagcgccgcggcggagatagcacctgcttcagctaaacaactctgggcctgcaacctgcacttgat

SEQ ID NO: 1803 - DNA, 704 bp, Avena sativa
tgatgattctggttctgaggttatcgatcctccaaagtccgaggtactggatgttgctgaattcgttggtgatcatattccgcttacaccaaaaccgaatgtggtagcttctagcagcgtgcgcgaacttttggaatgcccggtctgtttgagtgccatgtaccctcctattcatcagtgctctaacggtcatacaatctgctctggatgcaagccaagggttcacaatcgctgccctacttgtaggcatgaactggttggtggtgacattccatacttggtaaatcacttgaaagatgatcacaaagtggacatgcacagtggaagcactttcaaccaccgctatgtcaagtcaaatcctcatgaagttgaaaatgccacctggatgcttacggttttcagctgctttggccagtacttctgcctacattttgaagcatttcagctgggcatggcacctgtctacattgctttcctgaggttcatgggagatgacacggaagcaaagaactacagctacagtctggaggtaggaggtggtgggcgcaagatgatcttccaaggggttccacgaagcatcagagacagccaccggaaggtccgagatagctatgacgggctaataatccaacggaacatggccttgttcttctccggtggtgaaaggaaggagctcaaaattgaagggtgactggcagaatttg

SEQ ID NO: 1804 - DNA, 621 bp, Avena sativa
gagctgtggattgcagggatgagcggaggtgctctaggttgacgtggtggcgtgacgttgacgtcggtggaaatcgatgggtgtccgtggcggagggcggcgagcttctgcgagacggtgagcctccttcaaaataagcgtcggcatctcctttcttgcgagctctcgattctgcatccccacttggccggcctcggtggcgggggagtggtggctgttgaagcgacaactgcgttgggtaggagatgcagttgggactatctgctgctagaagaggatcttcatcacgcaaaggccattgcttgccgatgcgatttctggttgagaaggcagccaattctgatgccggtgagggcatcctttcaacctcccaggcggaggcctttctcaggagcttcgacggcgatgtgcgccctctctcccaagtggtgcgtccctggcgagagggatggtggccgtcctgatcgcgaaggtggagaagaggacgaaggggccgattgcttttatctttccccaaggtcctctgtgcaaaatgccggggctttatgtaattttctttcttatagggccctgttgcctatatgtatcccaccgacagttttcaatgaagcagcactaggc

SEQ ID NO: 1805 - DNA, 834 bp, Avena sativa
tgtaaaggacaatggtacaattgtggaaaacgcagcttctgaaaatgcaaaatcatcatctctttgggatgatagtgtcatggattcccctgttgcatcttctaatggtcatgccaaggatttcaaccactacggagctggtgatcaagttcctgagagcgaaatagggtatgattttggtgatgattctgtaaggagccccggcagtgctggaagaagtgcctctggaagtccatttaagtcttcccgttttggggtgcatgactcatcccctaccaaaaaaggaacatacagtgataatggtggtgctgagtctgtttttggtgatacttatggtgatgaaacttcatggaactttgatgaccaagatactgaatctgtttggggatctaatgcaaatgagactggccatcatggaagcaactctttctttgggtcagatgactttgacggaaactctgttagagtgggctctccaagtggccctagtggctatggaaagaaaagctcattctttgatgattctgttccaagttcacctgcatacacatctggattctcacctaagttcggtgaaagccatgacgatagctcctcttataactttggaaagttcgattccttcagatcccaagacagtgttgttcctcaggaaagtcgcttttccaggtttgactctatgagcagcgttgcaggcgagaatgcagcagggttcgattcatcaaacagctcaagaaatttggccggttcgattctttgatgatgctgatccgttggttcgaccggacctttaagcatcagggctcggtcgccccaattctgatatgaattctg

SEQ ID NO: 1806 - DNA, 652 bp, Avena sativa
gactcgtcccccaccaaaaaaggaacatacagtgataacggtggtgctgagtctgtttttggtgataattatggtgatgaaacttcatggaactttgacgaccaagatactgaatctgtttggggatctaatgcgaatgagactggtcgtcatggaagcaactctttctttgggtcagatgactttggcggaaactctgttagagtgggctctccaagtggccctagcggctatggaaagaaaagctcattctttgatgattctgttccaagttcacctgcatacacatctggattctcaccaaagttcggtgaaagccgtgatgatagctcctcttataactttggaaagttcgattccttcagatcccaagacagtgtcgttcctcaggaaagtcgcttttccaggtttgactctatgagcagcgttgcaggcgagaatgcagcagggttcgattcatcaaacagctcaagaaattttggccggttcgattcttttgatgatgccgatccatttggttcgacgggaccttttaaagcatcagggcccggtcgcccccaaattctgatatgcatttctggtatcgcaagggtttgtctcttactagtacacttgtcgatacagggcgtggtatttttcgaggaaactacaa

SEQ ID NO: 1807 - DNA, 841 bp, Avena sativa
ctatgtgtgaatttactcgtcaggaattcattgatggtctgcagtcaattggggtagattcaattgagaagctccgtgagaaactaccatcattacgagctgagataaaagatgatcaaaagttctgtgagatatacaattttgcatttgcttgggctagggaaaagggccagaaatctcttgcactggagacagctattggaatgtggaggttgctatttgccgaaaggcactggcccctaattgatcattggtgtcagtttgtacaggtcaggcataacaaagccatctccagagacacatggtctcagcttttggaatttgtcaagacaattgacccacagttatccaactacgatgaagaaggcgcttggccctacctaattgatgaatttgtggaatacctaaccgagaatgattgtgttcagcttaaaaagtgaaccattggagtctgcattctcatttcctttgatatcatgattgggatgtacaaacgctaatcatctggggtctagtgtttaggtttcgatgttggcattcttcgtccgatccatcacaaaacagttgacattgtcgttacttggtggaatctatttctgcaggggaagtgatttcactcgggtagtaatggctgtgaccggaaactatcactctgatttgtattttgtgctgcccatctgctacagcaatacctgtaaacagttattggcttattgtggaatgggtggtgtgtctacatttggcgtttctccaggtagtagtatcgatgagacgtctggactgttgtaccagatgagacctctggactctggaccgattatgcaaacttgtgatgttgaat

SEQ ID NO: 1808 - DNA, 848 bp, Avena sativa
tgttttttttaattcaagcagcaaacacaatataatcgatggagtaatttggtacacagaatctaaagaaatcaaatggaaaaaataaatcaaacttaggtacaaaatgctagagtccacacgtgtgttgacaatgacaatataagatcactttatttattacagttatggaaaatcggaacccctgtggttgaagcaaatactactactagtaggattgaagatcatgtacgagaactctcatccgtattgaagatagtacgtcaccttagctggaggactggcaagcagatagatcactagggtaatttctacaacagattacccccgacacacacaaacacaagcatataaagtggaacggatactacgtaggtacttaccaagtgataaattaaccgagtagctagcaggactagctagtcaccagatcatgcactcactgacgacgttaggcagtatggcgggagggacggatggatgatcgtgatctctaagggcactggaatcctgtgggcacgttcttgccgcagtagttgacgaggaggctgaggtcgatgggcacgttgaggttgatgcccaggatgttggctcggagggcggtgcacaggcacacggcggcctccaggtcggcgagcccctggatcagcgtgcagcacggcttcttcggcggcgtgcccagctccaggttgatgagcccgttgagcacgttcgcgcacacacccagcttcagcgcgtcgatcgggcaacgcgctgcacggccacccccgccgccgccggatccacctcctcctgacccgcctccgccactgccaccgccgcctgacccgcctccgccgcatcccggg

SEQ ID NO: 1809 - DNA, 858 bp, Avena sativa
gttcaagacagcttcagggcagttgttggatcttatcaccactcacgagggagaaaaagatcttacgaaatacagcttgaatgttcaccggcgcattgtgcaatacaagacagcatactattcgttttacctcccggttgcatgtgcattgctactgtcgggtgagaatttggataactttggagatgtaaagaacattcttgttgaaatgggaacgtactttcaagtccaggatgattatctagattgttttggtagatcctgaatctattggcaagatcggaactgacattgaagactacaagtgctcctggttagttgtgcaagctcttgagcatgccgacgagagccaaaagcgcattctacttgaaattacggaaagtcagatcccgagtctgttgccaaagtgaagggtctgtataaagagctaaatctggaggcattatttcacaagtatgagaaggagagctacaataagctgagcgctgacatcgaggcccagccgagcaaagcggttcagaaagttctgaggtccttcctagacaagatctacaagagggagaagtagagaaagcccgtggagcagctgttctatagcaacttggtccatgctgttctgtatgtgatgatctgtgtcgttaccgtactgcacatttttctattcctcacagcaataagcacggtgctattaaggggccgtgttcaggccttcactggatttggatggttccaataggttgtccaatgtttgttggggttgtgtttggttgtaagtgtttttagtttgtcacgctattggtgtcgcgatttcagtttgacattcttgtctttttaaagcagttcagcctcgatgtcttg

SEQ ID NO: 1810 - DNA, 621 bp, Avena sativa
aagtgcgccgccatgtccaccgttctctcccgcccggctgcgggcaccgtccagtgcttcggccggaagaagaccgccgtcgccgtggcctactgcaagcccggccgtggcctgatcaaggtgaacggcgtgcccatcgagctgatccgccccgagatgctccggctcaaggccttcgagccgatcctgctcgccggtaggtcccgcttcaaggacatcgacatgaggatccgcgtccgcggtggcgggaagacgagccagatctactccatccgccaggccatcgccaagtcgctcgtctcctacttccagaagttcgtcgacgaggccgccaagaaggaggtgaaggacatcttcggccgctacgaccggaccctcctcgtcgccgacccgcgccgctgtgagcccaagaagttcggaggacgtggagctcgcgctcgtttccagaagtcttaccgttgatttgggtatggttgcgccgttggtgcactccttgactacctatctatcaagcagtttatgccaagtagtttcgcatctttttggacaatgaattcgatatgatgttctctaagactttaagttatctatgcaatatccttttgcttcgtgctaaaaaaa

SEQ ID NO: 1811 - DNA, 942 bp, Avena sativa
taagctggtactgcgcctaaacatacggctaggtagattatgcaggttgtgtccaccgaaagagctacgcagggatgaatatatttacaaactacttacacaaaagaaacacaatcagaacttctcgagcataggtttcgtcgatcccacctgcctcctatccgcccagagattggggcagcgggggatcgcctccaatggccaaaaattatttgctcctgttttggcttggccgacggacgaggctatcccttaccatatcgttgcgaccgggcttctatccgcggcgctccggatgtggaggtggcctcccctcgcgctctggaggtggaggtggaggtggaggtggaggcggaggcggagggcgcggcggatttcgccttatctggtaggaacttgtcgcagtccgctcccttcacagctagctccttcagcagctcctcgaaaagtctcttcagcgacgtcttgaacttgacagagcagctcgtgtcgccctcgtcaacgtcctgcaccccgttcccggcaaggcatccgacctgggcgccgtccaggtaggccttgcaggccacgaggacgttgcgcccgtacttgcggaaatggccggcgatgaaatcctcaaaatgctttggaggatttcgaagagaatacaacattgtcctgcaggacagcaggaaagtatcttcattgtatgttagggatctcttctccccactaggcgtgttggctgaaccagcatacccaggctcgttgaaataaggtttggcattcaaaactagagcctggatggagaccagaacctgcagcatggttgaattggatggattccatttctcgcatccactgccagtccaggtgtttaagaggctaaggcacaccttcccacaagcatacaagtttggattaagccgcacccgccagacgatagttaacaagcggaggtgt

SEQ ID NO: 1812 - DNA, 567 bp, Avena sativa
ttttttgtatttcagtagggaagtaagattgctgtgataagaatacaaaatcccgtcaaaaaacgtctcagaacaaataaaaggtttctctgtcagacaaaagttcaatacttcttgtgaccgagcacaatgccacaggacacgagcaaatattaagctcctgccaattaagttacaaactcataaacacactacaggcgtccgcgaagaaataacacatcttcctcctatgtctctttgtaaaaagaatacatcctcaatctaatggggaggtcaaaaacctcaaaaacatgtggagatgctagagcttgtattagcaagattgcctgtgtggcaggacacagcctacaaacttctgtagtcaagaacagtgacttcctcgtcaggagcatcaaggtcattatagcttcgcaaacgacgagggtcatggtggaaagatggaggcatggctataataggtgcttggcccccacccatcattgatccaagcactcctgagttgccatgaggcatgccattttgttcaaatggaggaggaggtccttgctctctcagcatatgcatggc

SEQ ID NO: 1813 - DNA, 541 bp, Avena sativa
gaccaagaccggcatcattgtcctcgccgagggtcgcctgatgaacctcgggtgcgccactggccaccccagctttgtcatgtcctgctccttcactaaccaggtcattgctcagcttgagttgtggaacgagaggaagtcaggcaagtacgagaagaaggtgtacgtcctccccaagcacctcgacgagaaggtcgcagccctgcacctgggcaagctcggcgccaagctgaccaagctcaccaagtcccagtccgagtacatcagcatccctgtcgagggtccttacaagcctgccgcctaccggtactagagaggatggtgtatgtccagcacggctagcggctggatcgagaaaggagcagcaaagtgtctctgcggcatggatttgttgaaccactgtatcttctattttgcatcatcttgcatgaatgctgtgtctcttagggtggaggatgatttgttatgttttgagtctgagtctggggtggtggaggaagcgtttatttttgtctgaggaataataatggcattgtcgatt

SEQ ID NO: 1814 - DNA, 836 bp, Avena sativa
gggtttggcgccgatgatgatgtgcctccagggtttggcgccgatgatgatgtgcctccagggtttggtgcagatgatgatgtgcctccagggtttggtgcagatgatgatgcgcctccagggtttggtgcagatgatgatgcgcctccagggtttgagcctccacaggaacgtcagcctacccaagctcctttagacttggagggtgctccaggattttgccagggggctctttttcagcaccttggaactccacaagttgaaggaacccagtgtggccagaaatggaaggccgcacctgccgtgccttttaatccctatcctcgagggagtccttgtccttccacttcgtcaactcagatgcctcgtcatgatgggccacccgccatgaaacacaacagttcaggatatcgaggaagaggctcggacagaggtggaagagtacataggaattggccgaacgggccaagaactagacttccgtatgatcaccagggaaggagattcccaagcaaccaccatagattagaaagatgtgagccccaaaggcctcaggagcatgatggttcagagttgagggccagagaatgacctactcctggctttgaacctcagttagttgtatacatggtaactcttgttcatcacaagtgtaacagaaactgtgttagctttttattcaattttaacaggagaagttcattaaatttagttgaagatatgctacagataggtcattaaaattgcagttttgttactaattaattttctccttagcttcccccatgtgtaaccctcacaggaataattgatattgattcatatcttcttataca

SEQ ID NO: 1815 - DNA, 695 bp, Avena sativa
  modified_base (3)..(3): a, c, t, g, unknown or other
ttnttttttctaattaactatatttcgttgttgtccttatttctccagtattttatttttgttgtatgtggatgcacatccttgtctgacaaaatagatattcgatctactacttaataagagtgtctatacacctgaaggatggctcacagtgtccagtccaccattgttatctgccctgctctcctaagaaactgcactgcacaactcttaattacttctgttcctttctagtagggctctatggcattacatcagacgatgttaaagctgcctttgtcgtcgtcttcgtcgtcgtcgtcagaatgctttttcctgcggctgccccctcgcgacggcagcagcggtgcggcatcgtactcggaaaccgtcttcgtgttcccgtcggcgaccgttttccggtgcgcctgctcgcacctgagcagtatctgcagcacgtccttcatggccggccgcgtcgacggctgcgcgccggtgcatatgatgccgagcttgaacacgacctcgaagtcgtcgctgtgaccggcgtcgccgatgcacctgtccgcggcctcggcgatgggtttccccgactgcaggtgccgccacgcccactccgccagggagatgtgctcgccgccgttgccggcctccctgccggtggccagctccagcagcaccaccccgaagctgtacacgtccaccttctcgttcgc

SEQ ID NO: 1816 - DNA, 796 bp, Avena sativa
tgctctgtagtttcgaggtggttgccaggaaacacactgcttcactgagatggaagcactgcaaaagctattcctgtcatcaactgttaggcatcatgcgaaaccactcttttaggttagcctgctgatttaaccatgcttgtggacagaaggacaagacgacggtgctgaccaaggcggcaggctacgtgaagacgctggaggcacaggtctcggcgctgaaggagaagaacaacaagctggagaagcacatcccggcccgcgaggaggacggcgccacgggtatgccaaggcagcagagagccaagatccatataagcaaggcatcggcggacgaggaggtggtggacctgacggtgatggtgatggtggagtgtgacgtggtggagttggtgttgcgcatcctagagtgcctccggtggatggagcagatcaacgtgctatccgtagaggccgacacctactcgccgcaggtgctgctcaaggcaatcgccgaacatcaagctccggatcgtggacggcgactggaacaaggcgtctttccacgagtcgatgacgaagacggttaacgacgcgacctcgtctcctcctccccatgccccgatcgtgctcaccgcctagtacgcagattgtgtccagtccagaggcaaaccctgacaggaacaattcctttgtcaggcgtgcggtcgtacgtagaaacggtaatctctttgcggagcgcgtgtgagggatatatatgacgaccgtgcagtccaggaagatgaagactacaaagacttcagagtttagtatagga

SEQ ID NO: 1817 - DNA, 629 bp, Avena sativa
gttgcaacttccacgatcccttgtgagcatatagaagaccccactggtctcattgaggttgaggatggcaacgattatctagaatgctacaatgatatggaatgcaacaatgatctggaatacaacaaggcatctgaccagaaagcaaagggagctgaaaagcggagggctgctgccattgctgctagtccaaagaagaaatcaaagcaacaaaaaaacattacggttcaggaggtcaggcatgtggaaaatgtaatcgctggtagcacttcggggacatcttctaatgatgttccaagaggtcatgggattaaggatgtcatcaagttggctgtacaatctggggcaaaggaatgcagcgatctgttcttcacggccaccaagttgttcatggatgtggactatagagagttgttcagtgcttttgagaccaacgaaggaaggctcgattggctgaacaggatgcatgaagagatgaagaagaaataatgtattttcttttctggccgcaagcgaataggtggatagttgagtccatgcatgtgtgaactattagttttttccgagatgcgaggataagactcatatcccacactttcggaattacagtggaagtgagagtgagactt

SEQ ID NO: 1818 - DNA, 890 bp, Avena sativa
catgttaacttaactgtacaccaagccagtttgaggcaccaacgacatacacaggcaggtggtagcttcacaagagaatgaaacacaaaccaacaactcttcttcatgcaagtaagcacatgtacagtgaggttttagtgaggtttcggacaaacatcaacccagaaaaactctagcggaacataccgactgactgctaacactctcacacaaccttggtcatgaccgctcgactgcaagataggtattactccagtaaccaaaccactcaaggcatcacctcaaataatacacaagcaggttcgccgagcagctctataggaacttgtgacctgccttgatccgtcattcatttcacaaacacagaaccttgcaagcccagctaatgttcactctttgcccttggtgaagaaccggctgaagccccggttctgcttgtcaggcatctggttagcaatcgacgaagatgacgaggacctagatctgtgctttggccgcttggaactgtttgtcgagaggaaaggacttccgtccacgtcggaaggggccatgtgtgtcttgtatccgttgaggggagatacgttccctgactcctggtctgtatcaagctgacctgatggtttctggatatactcgccttgggttgttcctggaacgtcttgcaagaagtcttccattcgtagccgggttggtgaggaacctatcgactctgctggaggacgcatagcttgcagttgacgaccaaggatcaacattgtctcctggcactctgcaagcttctctgccgcagccgctatttccacctcctggttgttttggtatcttcaacctcgtccacatgcattgaactccgctcgttctcatatctttccatcttctcttcaagatct

SEQ ID NO: 1819 - DNA, 609 bp, Avena sativa
ggcaacgacatcgacgatgttgaggccgagacgcttgaacttggtgatgatggtggggagggtgttattgggagcggggatgtcgttgttggagccctggatgctggcgcccagagagtccctccgcccgaggggcacgtcccagtacgggccaccgacgaggatggtcgagtcacgggcggcaagggcgaggatgtcggcgcaggagacggtgccaggacaggcagcctcgagcgcagccttgatctggtcgacgacctcgaatcccctgatggagttcttgttggggttggaccccttttcactcacaatgttggtgctgttgtccagcagcacagacgcatcacaccccttgacgaagcagtcatggaaatgcagcctgaccagggacgccgccatcctggtctccctggccacggcctgcgccacgatggagtgcacgatctgctttgcctgggggcaggagtggtcgtagaactgggggaagaggcctccgccgtacccagggttgccgcagacggcgccggcgaggaggaggggagacacgaggcagagcgcaaccaggcaaaccatggaagtcgccatggacgacctacgaaatcccgggaa

SEQ ID NO: 1820 - DNA, 463 bp, Avena sativa
gtgaacagtggacaaagaggctgtgtacttctctgctgctgttattctctgttgctgatcttgatccatgggcgggagatctgctgctgctgctgcatgtacttctccgtgcttctccctgtgcagctcggcacccaaccggcgaggatccagccgccggtgaggtagttgggggcgacgccaaggggccgagctcgacgcgcgtcaggcgacggagcgcaacgacaagggcgcgtcaggcaccgtcaatgcttgtctgcggtggcgccgcacaggtggcggtggcggtccgacgtcggcgcaggtcgctggagaatggccgcgttgcccggggatcgtggccctaggttctgccctcgcagacctggcgcgggagcccaacaacagaaacctgctgcaggtggacggaggtgtgggagtcccaagatggcgacctggtgcaggagcacgaacgcagacggaa

SEQ ID NO: 1821 - DNA, 621 bp, Avena sativa
ttttttttttgtagacatgataaatatttcaatatgactctttaacatgcaaagaagttatccaccacagatatggaaataagttgattcacatcttgatccacagatccttaaacatgctacagggacgacgagatataacgatgctgaagaaccaaaatctgaagatcccagtttcgccaattacaacccctagtctgatacaaatatggttgcaagattaattaatgtccaagaaagtaaagtctaggctccagaaacaagagaagtggacttctgtcggccgtctggaatggcaaaaagcacaatcggttttgatgaccggataaacggaacatcacatctgtagtaccctttcctttcaagctgtataacctctcctcgcttgacattccgcatgttcgggtctccaagagctagagcttctcgtcgagtgcatgggttcagattgtcaaggaagttctcatcttcttccagctttttcttattgattaggtagtcaaaatctaccaaagagagacatacaaggtcttcaataactgatagccatgttagcttcagctttgtcatcttcactgacccatcaagatggagttcaccaactagttgagtaattattcc

SEQ ID NO: 1822 - DNA, 810 bp, Avena sativa
  modified_base (51)..(51): a, c, t, g, unknown or other
  modified_base (61)..(61): a, c, t, g, unknown or other
cgttacgttacgtttaacttttaattttttattttttttattttttttttntttttttttntttttgttttttttttttcttacgaatccgtgcgacgtggggctggatctcagtggatcgtggcagcaaggccactctgccacttacaatgccccgtcgcgtatttaagtcgtctgcaaaggattcagcccaccgcccgtttggaagggagcttcgaggcggccggccacagcacatcggccggaccggcttagccaatggcacgggcccttgggggcgcaagcgcccctaacgtgggtcggggcgagcggcaggcgcaggcgtcgcttgctagcttggattctgacttagaggcgttcagtcataatccggcacacggtagcttcgcgccactggcttttcaaccaagcgcgatgaccaattgtgtgaatcaacggttcctctcgtactaggttgaattactatcgcgacactgtcatcagtagggtaaaactaacctgtctcacgacggtctaaacccagctcacgttccctattggtgggtgaacaatccaacacttggtgaattctgcttcacaatgataggaagagccgacatcgaaggatcaaaaagcaacgtcgctatgaacgcttggctgccacaagccagttatccctgtggtaacttttctgacacctctagcttcaaactccgaagatctaaaggatcgataggccacgctttcacggttcgtattcgtactggaaatcagaatcaaacgagcttttacccttttgttccacacgagatttctgttctcgttgtcccg

SEQ ID NO: 1823 - DNA, 957 bp, Avena sativa
acagtacgttgtgaaataaatagtggcaggactagctaaacataacatagaagaccacgaatcctgcacacaacttgtagcagaaccattgatgaacaagtacatgcacagcatactcagtgcagatacctaaacttccctcaacttactacacacatcaagctagctaatggcatcgatactacgcaagcagggacagaaacacatcatcagctgagtttctccttgggagttgtagtcaccgttgcccgttgcccaaaccatttagtaaatgccaggaataaccctatatcgcactttgttgcagtacgtcttccagtacttgccatactttgatgagcatctatcgtcgtccctcttcgctcggtcaagcagtaatatggtcagaaatatcacatagaaatatgggagaaaatgatcaaaaagagctggaacggtccagaaaaatgctgatagtatctctgggacatagtgaaagtgacgagccacggcccaccatccagaagtcaagagaaggctggtttttgtttctccctttgtggtctggtacgaagcaacaatctttgacggggcttttccccagactgtgcattttccatttgtccggcgaaactcttggcgctgacgatcacaatcatagtttatatatatgcacaatattccagcgaggagaattgacagtgctagctggggacccaaattcacaggatggttgacaaggtacattccaggagaggtatatattgatggaacccataccaagcatccccagcaaatatagaaaccagctctatcatgagcaatgtccatagtacaccaatatccagactcccaccaaaagaacttagtgatatagatcaacatcagtgcagtattcacaagcatggagtctgcaacttggccattcatttcatactgctttatgcagtaggttacagcaagaacagcccaagacat

SEQ ID NO: 1824 - DNA, 650 bp, Avena sativa
agctactccgctgattggcaggttacttatgcatatgcacgtaatgggaaaccaataggacctaaggcaaattctgattggctttacatcgctccgtttgggatgtacggatgtgtgaattacatcaagcagaagtatggtaatccagcagtcttcataactgaaaatggaatggatcaacctgggaacctcacccttgatcagtacttgcgcgataccacgagggttcggttctaccggagctacctcaacgaactgaagaaaggcatcgacaatggtgcaaacgtggttggctactttgcatggtctctcctggacaactttgagtggagctctggctacacatctaagttcggcatcgtctatgtcgacttcaacagcccctccctagagcgtcatccgaaggcgtcggcctactggttcagagatctgctgcagggcaagcactgatggagtgcctggcagttcacgtaacatcgtgttgagtttgtccctaccattgttcggcaccgcgattcagaaccagctctgttatctggagctaccaaaaggaataaagatggcatgatgatcagtatttaattcatatttatggtaagaacgcccctgttaatttggtgcatggatcttcagctgtgtctagttgatgt

SEQ ID NO: 1825 - DNA, 756 bp, Avena sativa
gaagctgatattgtcgttgttggtgttggcggcagaccattgactactctcttcaaaggccaagttgctgaggagaaaggtggaatcaagactgatgcttcctttgaaacaagcatccctggagtgtacgcagttggcgatgtggccaccttcccgatgaagatttacaatgatgtgaggagagtagagcatgtcgaccattctaggaagtctgctgagcaggctgtgaaggcgatcaaggggaaagaggcaggtgaggccgtcccggagtacgaatacctgccctacttctactcgaggtcgttcgacctgtcgtggcagttctacggcgacaacgtgggcgagacggtcctgttcggcgacagcgacccaagctccgccaagcccaagttcgggtcgtactggatcaaggacgggaaggtcctgggcgtgttcctggaaggcgggtcgcccgacgagaacagcgccatcgccaaggtcgcgaaggcccagccggccgccgggagccttgaggagctcaagaaggagggcctccagttcgccagcaggatctgatgagtcctgccattttttggagactcggcgggcgcgtggttgaagtgtttgctagatttcccatacatacctcatcctacatgatagtacaatgtttttattcagtatctgattgtgatgtctgtaccacacatactctgtgcacttgtgaatgttcttctcaataaacggtcccaataaaacccacggccttatggtcag

SEQ ID NO: 1826 - DNA, 708 bp, Avena sativa
agcacggataagcagataacgcccgatgccgaggccggcatagcatactccaagccccgccggctccagagagacgagatccccgccattgtcgacgacttcaggcgcgccgcccggaacgccatcgaggcgggcttcgacggcgtggagatccacggcgcgcacgggtacctcctggagcagttcatgaaggacagctccaacgaccgcaccgacgagtacggcggcagccttgagaaccggtgccgcttcgcggtggaggtgattgacgccgttgtccgcgaggtcggcgcggaccgcgtcggcatcaggctgtctccgttcgtcgactacatggattgctatgactccgaaccgcatgcgcttggcgcgtacatggtgcagcagcttaacaagcaccaggggtttctctactgacacatggtagaaccgcggatggccattgtggatggccgcaggcagataccgcacgggctcctgccgttcagaaaatcgttcaatggtacattcattgccgccggagggtatgaccgagaggaaggcaacaaggtggtcgttgatggctatgctgatcttgtcgcctacgggaggctctttccatgtatatgtatatgcatatccatgtacattgtatcctttccagcattggttattgttttctcacaaatttgtaccgacgagattttcatctactgatatatgtttata

SEQ ID NO: 1827 - DNA, 961 bp, Avena sativa
atgaaattgatgacccagaggctgctaagcccgaagactgggatgatgaggaggatggtgaatgggaggccccgaagattgacaaccccaagtgtgaagaggcacctggatgtggtgaatggaagaagccgatgaagcagaaccctgcctacaagggcaagtggcatgcccccatgatcgataaccccaactacaagggaatctggaagcctcaagaaatccccaaccctgagtactttgagctagacaggcctgcctttgatgccatcgccgctattggaattgagatctggacgatgcaggatggcatcctgtttgacaatattcttattgccgatgatgagaaggtagccagctctatcctggagaagacatggaaacctaagtttgatgttgagaaggaaaagcagatggctgaacaggctgcaaaagattcgtcagaagacctttctgaaatccagaagaagatcttcgacattttgtacaaaatcgcattcattccgttcttggaaccttacaagaccaagatcattgaactaattgagaagggagagaaacagcccaacattacgatttcgattgtggcctcaatcgtggtcgtctttgtcagcatactcttcaggatcctgttcggtggcaagaaggcagcgccggcacctgtgaagcctgctgccgcggtcaagaagcccagcgccccggaagctggtgcagctggaagcagcggtgacaaggaggagaaagaggatgacgctgccgcaccacgccggaggtcgcgcagagagacatagactcggtctaggaccttcacattttggcctcttggctctagcctttttgtgaacgcctgagtgtataagcgaagactcatgctgccctctgcagctacctctagtttgaagtaattagaatttacgaactggcgaaaagcttttgttgtttgtgtgctgtactgaatcagcta

SEQ ID NO: 1828 - DNA, 794 bp, Avena sativa
ttttaatctccaaataacagtattgtcaatgctgccaagagctcatgaatccagtccacaaaagcttattgcataggttctcagtacggagagattaataatacataagtagcacaaaacaagaataagatcacgcacaaacgtgcatgatatgagcctgagtcagattctgctgactctacattatattagggctaagatatcaaacacaacttagatctctaagcatgatgtagaccccattatcaagaagagcaacaatcttcacgctttagagatgaggaggactagccagtcccgattagagcagtctacagtaattagaggagtgcaatgctgctctcgccaccaggtggcttccggacaccaccaaggtagtctcgtgaagacgcctttccgtcagagaagatgtcgttgccgctcatctccttgagcttcgccgagcttagagacttgtcgcctgagccaggggaagcatcctccttaaagatgttattgcctgtcagctcctggaacttctggttgtgaattttctttgctgtcttcgttacaggatcctcactaaacgtgatgttgcttggacctccagcaggatgggatactttcactgatgtgtggacgcttcttggaagtgcaaaatccacatttccttgtagctccatattacgagcagccaatggcctcgcaggggtctcaggaggtggaccgaagatattgcttccgctgagctccttgttcttggcttcagaaagctgcttattgtttctagcttcagcatcactctcaaatgtgcc

SEQ ID NO: 1829 - DNA, 772 bp, Avena sativa
tatattgatgggaattggaatcggaggctcacatgggacgagacttttggaacatgaggacagcctgagccagctagctttggccggaggagaggagaggagtggagtgcgcgggtcttcccttccatcgtctcaccgaaaaaccctagccgtcgagcccacagctcgccgccgccgcagcgagctctcctccacctccgcaaccatggcgacgcagatcagcaagaagaagaagtttgtgagcgatggcgtgttctacgccgagctgaacgagatgctgacccgggagctggccgaggacggttactccggcgtggaggtgcgcgtgacgccgatgcgcacggagatcatcatcagggctacgaggacgcagaacgtgctcggtgagaagggccgcaggatcagggagctcacctccgtcgtccagaagaggttcaacttcccggagaacggcgttgagctgtacgccgagaaggttgttaaccgcggcctctgcgccatcgcccaggccgagtctctccgctacaaactgctcggaggtcttgccgtcagaagggcttgctatggtgttctccgttttgttatggagagtggtgccaagggttgtgaggtcattgtgagcggcaagctcagggcccagagggcaaagagcatgaagttcaaggatgggtacatgatctcatctggtcagccagtcaatgagtacatcgatgcagctgtgaggcacgtgcttctcagacagggtgttcttggtatcaaggtgaagatcatg

SEQ ID NO: 1830 - DNA, 847 bp, Avena sativa
acgtcacaggtccaagcttcgaatatcccaatttggttccaaatatgtacgagaccgaattcacataaaccaaatcaaaacgttcctctccaggttatttcatgtttctccctctgcagaattctccagaagtttcaccgcgcaacccggtttaattgcatacagacaggttttcccatcatttcttacaagcaactcaggttctgaatatatgaaagttttaacttaggttgcctctacatccgaggagagtgcagttgtcgatatgatgtgccctccggcgatctgctttcaggcgatgatcggccgaggccgatccactgcccgaatagtctccttggcgcgggtgctggtgctggtgcaggtgtggactctgatgcgctgtgagactgctgtgagctccaccagcttgtctcgcagtccactggcattaatgggtatggcgcgaagcgatcgcgctcccaggcatagaatcggtttcctccggcgtcatcagtctccattgaactatggccggatgaacctggtgggaacaagcaaaatgttgggttctctggttgaggaggtggcggagcaggccgcatgcctcccgatctatgtgccccggcaaaaaggctagatgatggattctgcaggtactgttcgttgaggctgccatgtgccctcataaattgaggtaccagaggaggaacattaggagctctagatctagagccagacccattactgaagtacgatggagaaacaacagatcctcgacgttggctatcaccgtcaacccttgcagccctcattgttccaaaaagggacccctggctgctcggtcaccccattattagctgttgga

SEQ ID NO: 1831 - DNA, 474 bp, Avena sativa
cggcgctgatgtcaacataacaggacctgtagggaaggaaatgctcatgcccaaggaccccaatgccactattatcatgcttgcgacaggtaccggcatcgcgccgttccggtcattcttgtggaagatgttctttgagaagtacgaggactacgagttcaagggccttgcatggctcttcctgggagtccccaccagcagctctttgctctacaaggaggagttttgggaagatgaaggcgaaggcgccggagaacttccgggtggactacgcgatcagcagggaggagaccaacgcgctgggggagaagatgtacatccagacgcggatggcggagtacaaggacgagctgtgggagcttctgaagaaggacaacacctacgtgtacatgtgtgggctgaaaggcatggagaagggcatcgacgagatcatgatcccgttggcagcgaagaagggatcgactggctggagta

SEQ ID NO: 1832 - DNA, 754 bp, Avena sativa
ggagaggatcgttagaaatggatccagtcgagttatgggatttggatcttgatctggtctggatcggcggcggcggatctggtcccgggaattccggacctttgccaacccgagctcgcagccatgcctcccaagctcgacccttcccaggttgtggaggtgtacgtccgcgtgaccggtggcgaggttggcgctgcctcctccctggcccccaagatcggtccgctcggtctctctccgaagaagatcggagaagacatcgccaaggagaccgccaaggactggaagggcctccgcgtcaccgtcaagctcaccgtccagaatcgtcaggctaaggtgtccgtcgttccctccgccgccgccctcgtcatcaaggcgctcaaggagcccgagagggaccgcaagaaggtgaagaacatcaagcacagcggcaacatcagccttgatgacgtcatcgagatagccaaaatcatgaagcctcgctccatggccaaggagatcgcgggtaccgtgaaggagattctcggcacctgcgtcagcgtcggctgcaccgtcgacggcaaagaccccaaggatcttcagacagagatcgacgacggcgaggttgagattccctcggcttaagaaggcttggcattgaggaggctgtgacgtgaggttgctgaagtagtattttctacctagatgctttcctgatgcagttgagagaattaatgtcatatgttcacttgttctactattgctcaaggagaaa

SEQ ID NO: 1833 - DNA, 617 bp, Avena sativa
gacaatctcatatttcatcgtgtaattaaaggattcatggtccagaccggggatcctttgggggatggtactggtgggcaatcaatctggggtagagaatttgaagatgaatttcacaaaagcttgagacatgataggccatttacactttcaatggctaacgcgggaccgaatacaaatggttctcaattctttatcactactgtggctactccatggctagataacaaacataccgtgtttggtagagttgtgaaagggatggatgtggttcagcaaattgagaagaccaagaccgacaagaatgacagaccctaccaggatgtgaagatcttgaatgttacggttcctaagacataagctcctgtttaaccaattgggttgatacataaccgggtaaacggcgatttgctggcctgtccaagataaatgtgcttccgtcaattctcttgatctctgctgtggtgcttcgggttcaccttcttcaccaggccagtggagcaagacaatacgacttgtgcctgggtaatgtctgtactatcaaagttttagtgagcctttgaatgagagccatggctcaaaggctaacaaaccataacattttcgtccgtcggcag

SEQ ID NO: 1834 - DNA, 651 bp, Avena sativa
tttttaattctattacaatgatgtaactcgacgttttattccatatattttatatcgtatattttcagttacaggtattatcgtttataacatggaagctacatacagtccattacatgatggtgcatgcatctgggttctcatcgccgagagtctgcggtggatagtgcggataaggccgatacattgctgcagtatatgggtactgatactgctgatacgcatagtgcgggtacgcgtaaggataggccgggtggtagtagtattcgtagaggctgttcacgtccatcttcccagtctccggcgccaccgcaacaattccggcctgcacaggcagtctgaactggtgacccttcgtctggttcttctcctctataactccattgatcgcatcatcattgggcatatgcacttgggttttcccctcctcgactccttctccatcccctttatttttcttctccggtttggttttctcgtcctcatttttctcttcttcgtctccaacctcttctttggtcccttcttctaccccttcatcatttttctcatcaagattgtcagatggttcttgatgctttacattattggcatcttgcggtgttccattgcccatcgttggtttggccattgctgctgctgctgctggtg

SEQ ID NO: 1835 - DNA, 417 bp, Avena sativa
gtgcaacgaaacttcagttggatcgccaggcaccacagaagactacacgacccactgagagtaacagcaaagtaactactagccgagtaccagcaaggaatagcccagggaacccgatgctaaggcattcacgcagtttacctgaaactggccgggcgacaattcagaaggtttcgaatattaccgaaaagcttggccatatgtctgtggcctctcgaacacgcactactgtgaagccccctgtcccgatgttgaaagctgggcatgtcaagtcagactttgttggaaaatctgatgaaatccctccagcaaagagattgacaagaaaaattggtcagctaaaggagtatatagagtgaaagcctgtcagctgcagagaggcgtactaggctacagagctgaaaccaggttcgcgcc

SEQ ID NO: 1836 - DNA, 725 bp, Avena sativa
tttcccctttcagaaaaaaatagttcaatgaacctacgacaagtaatttggatatgtctaattgtttcatcatgctacataacacttcttacaaggcgaatcaaaccatgtaaatatttagagtgcatggtaggatgccagtctgttccctggcttgtatacaacttccttttcctgtcattgcattacttcctttacctataactaatgtgtttcctgtaatacagaaataatctcatgacaacaggtcaactaataattcatttgacctgatgagtcccgccaggttaccatctaattggcatattcagccacatgagcgttaccgacggcattgagaacacaggaggatcggttcattaataaattcataaacattcaacacaatatacgactgtcctccttcataagcatggacacaacgtcaaactataatcacaaaatgaccactctgtactcaaaaggcaggaccctaatagcatgcatcttttattcaatatatattgcatacagcaagcaagcacactcctgagtttctgagatttcatcttccatgctgatgatgcagtagtttgccgacctcttgttcatccttggtcacaccttcactcaatcccaagccgcttcttagtttgttcaagcagaaattgcgggtccagtttggtttgtgtataagcatcgatcttgttcacctcctcaatgaatttatgaatgtttggtctgcc

SEQ ID NO: 1837 - DNA, 815 bp, Avena sativa
aattatcaatgctgcgacatttacggttagctggaactgtatgaacttctgaatgtttgcataaactgaacgaccccatctgacaaccctcacaattgaagcaaaattgtcatccaagataataatatcagaactctccttggcaacttcagtcccctgaatgcccattgagagaccaatatctgcctcatgtagtgctggggcatcgtttgtgccatctccagttacagcaacaacatgacctctgttcctcagtgccttaacaaataaaagcttatcatttggtgaagacctccccatcacacagattttttcagcagcttcctccctccctaaatctgacagctcacgaaatgtctttccttctatgatgctttgctccgatacattgggatcagtaagtattccacattccaaggctatggctctggcagtttgaagattatctccagtgaccatgcggaccttaattccggctgccgtacacaagcggatagaatcttgaactcctgggcggcagggatccttaattcctacaataccaagcataatcaggttatcttcaggtaatacccactcagccctctggtcctcatttggaacatcactcatctcacaaggtctgtatgcaaaggcaacacaccggaggctagcaacggccatgtcttctatgaatttcttaaattcaccaactttctcaggggtcattgaatgctttgaaccatctgcgtcaagccaatctgtgcatgactccaaaataagttcagcagctcctttccagtaaacatgaacctccagagtcacccacatgcact

SEQ ID NO: 1838 - DNA, 757 bp, Avena sativa
caagctgtaggtcagatggaaatgcgaagtgacctgatggatgctcatctttatgccttcaataggacaacattgcaggatgtaactggaaaagaaagaaacataccgtagcattagacttgaagtcctcccatacttagtgaggagccagttgagatcagctccatcaggaggtgaagggacaatagttgatgaaactggggatgttataattccgcccaacagtaatttacagtgcttgtcacaacatcgtgcaattgcaccatctgctttcaagcaagatttactatcaagttcaggtggtggaacgcatcggtgctgtgtctatattgctagtaaaaacaagtactgtcaccgtttgaactccattcaggcatactgtgatattaaccgagatgttataggcgaagctagtcacctgtctggttattccttctcttcacataataacatcatccacccatcgtgtgtgcttggatcgaagactacagtcgggccacaatgcatgcttgctgaaggttcacagctaggtgacaaatgtagtgtcaagcgatctgtgataggccgtcattgtcgaatcggttcaaatgtgaagattgtcaactctgttgtcatgaaccatgtggttattgaagatggatgtcacatccaaggttctgttgtatgtaataatgtgcaacttcaagagcgtgctgttttgaaagattgcaggttgagctggttatactgtgactgctggtagtgaatcacaaagcag

SEQ ID NO: 1839 - DNA, 625 bp, Avena sativa
cctctccctgtctgtcttggtttccattgagatgttcaactcgctgaatgccctgtctgaggatggtagcctcctgagcatgcctccatgggttaacccctggcttcttctggcgatgtcggtgtcgtttgggcttcattttctgatcctttatgtgcctttccttactcaaatcttcggtatcgtgcccctcagtttcaatgaatggcttttggtgatagcagttgccttcccagtggtgctcatcgatgaggttcttaagtttgtggggcggtgcctgacagctcgtgccaggaaacaattaggaaagcggaaggaggagtagatgctagccatcatcagtattagatttcaggttttgccacgggggtagtagacatctgatgagaccccattattttgtctcttgagtttcaaggtactcttgctctttgtcgtagaaacaggaacatgaaggaatttagggtactctatagaactcataatcaggctgcgagttttaacagactgcatttattcatttgtaacaaaattcgttgttatgaatgtgctggagacaaaggcatgttttgttgcccagttagtcttgtacctgcattcttctctgaatgcaatgacaaaaaaa

SEQ ID NO: 1840 - DNA, 640 bp, Avena sativa
acaccagttaacgctaattctttattagcattaaaaaaaatagaagaccaatggagcatgtatgaagtggtaatcagctacatcacgtgatcatcatttcatacacaacaatcgtgtacattacattagttgctcaagtgaacgcaactgggcatagtccaatatttccagtgattacaactacagtatctcgaatcatatacttagtacatttgtctttcagtgatggcgcttctcatctagcaatgcagctatttgggcaggctcaccgggaggtagacgccttcagcggcaagccagacattgtcaggtcgcttgtcaccaaccacacatacctcttgctgtccgcctgcaatgcgggtgtacttcctatcatggctgtgcagatagccaccggtgtcaacatggcggaaccgaattctctggttttgccgccatgttttgccactgccctcgatctcgagcatccaatagtctcctgtatctgactcgccctcgccaccaaagcagctaacctccaaatttcctgtaatgggagaagcatgcagatggctgtgcaaccactttctagtcctcatatgttgaagccttacgattgttccatgtgttataggatggccttgttttgttgaagtatccc

SEQ ID NO: 1841 - DNA, 921 bp, Avena sativa
agattattagtcctgttagtgaatgaatcctaagtaaagaatttacgtcacttcacggctgtttgatctgtccaaagaacacggtcagaagaagggctcttccatatgcctagcccagcgtgcatcaaaaaccagattccaaatcagaactatactcatgctacagatgtagttccgcaacaaggtaccaggaaaacagctctagtcaggcacgaatacaacactcaagcccagcgtttcttttccttcccaagcttgagctcttgggtgagcatcctgggagcaattgccattgacatgagctcctggaagagaagcttgcatgcgtatggtatatggacctggacaatgtcagtcttgttcttgcaacctctgcactcaaaggagttcttcttgagattggcaatggcaatgagtccgcacttctcacatacatgtactctgtaagcatcactctggtcaaataaccgttccttcaagaaaaatgcagcaccatgagcaatcatgcaatccctctccatttctccaaaacggagaccaccatcacgggatcgcccctctgctggctgtctggtcagtatctggacaggaccacgacctctagagtggattttatcatccaccatgtgcttaagtctctggtagtaagttggacctaggaagatcattgcagtcaattttctccctgtgtgaccattgtacatggtctcaaatccacgcatctgataaccacacttatgaagtgccttactgatgttatccacagtaacatcagtgaaaggagttgcatctccttccttccccatgtgagctgcaactttacccataatacactcaatcagctggccaatagtcatacgggaaggaatagcatgtggattcacaatgatatcaggcgtgatgccttcgattgtccatggc

SEQ ID NO: 1842 - DNA, 784 bp, Avena sativa
ctctgtgagggaccctttcgccgtcatcatccgagcttagtttctatggaaatggttagtgctctgttgcggtatctacgtgaaaggctctgttttgtacttttgttggttcaatgctctattgtacggtattttgattcttgtaggatgactccactcaagtgttgatgagatatgaactagtgcagtaactaaaaaaaaaaaaaaaaaaaaaaggaacggaaccaacagatccccgcaccaatcccgtctccgatcgccgcagcagatcgtcgaatcgtcctccccccagctgggctaacttagtacacattatttatgaattgcacacatcttcgctccggccacacatccaaacacaggtcaaaaaagcaatccagcttctgcattcttcttcaccaattacatcagcatcacaacacataaacatcccgcagtgacccttgtcccatataatcgcaagtccccgctttccactgtcctcccaagttactttggcaccaccagtgatttcctcattctcccaaggatcccaaatcggagcttttcctcccaccaaaccatttgagcgctccggtctccgaatcagaatgtgtgtagcagaagatgcaggtggccaatccccggcacagaaaaattccttcatcaaagcatttgtactgcgttaataggcaagatcagaatttgcattccataaccacccatgcttgccatattgacatccaaagcaatttatgcgctctcagcagggaacaaccctgtgtacccttctccctgtgctcgc

SEQ ID NO: 1843 - DNA, 587 bp, Avena sativa
ccggttctctcttcatctcggtggtggtgacagcattcgccctccaggatggcacgtcacattacctcaagggggtcctcctcctcctgtgctacatcgtcatcggcgcttgcttcttcgttaccagacaaccagcacatcaaccaaacagcagcggcagccttctggatggaccaatgggtcccatgaacgtccagatcgcataactgatcaattgacaggcctgcatgagcaaaccagcatccgtgcaagacaatgaacgaacttttcgagcctgcagccaccgaagtctgtctatcatccgtgcgcgcttgatcttgaagagcgaaggaccattcgggaggagaattccccatcctcatccagtagggttcagtaattgttgcgcgaaactcacgccaatctgctagatttacatgtttatttattttgaatagtagtgaactccatgtccgttgctagatatttcttgcctcttgtactgcaccggtgagttattgcatctatgcacatcaatatgaaatgccgtgaggcacatttatatttatacttaataataaaataaaaagtgtttttcctcattaaaa

SEQ ID NO: 1844 - DNA, 939 bp, Avena sativa
acgctgctggccatcgacaagcagggcgtaggcggcaccaagctcagcaccgtcgcgccgtacaccgtgctggagacctccatccacaaggcggtcaccgacgcgttcgcggcggagacggcgatgatcccgcgcgtgccggccgtggcgccgttcaagctctgctacgacgggagcaaggtggggagcacccgcgtcggcccggccgtgccgaccgtcgagctcgtgctgcagaacgaggccacgtcgtgggtggtgttcggggccaactcgatggtggccgccaagggcggcgcgctctgcctcggcgtggtggacggcggcgccgccccgcggacgtcggtggtggtcgggggccacatgctggaggacaacctgctggagttcgacctgcagcggtcgcggctcggcttcagctcctccctgctcttcaggcagaccacctgcaacaatttccgccttgggtaggggctgccgccgcctgtgctcctctatgctcttgaggcagactccagtcgaagtttgtttgtgtatctccgtcttgggttttgactgtttgattgaataacgatgaataagtttatctgcccgttagttgctactaatgcacagtcgtctcaaagattcgctctggatatagagagaaactgttccgagatgcttaggagagtgatgaaaatcgaccaacatggaagaaagtcagttgattgtgcaatggacgctccggttaagtcacaactaggttctcaactggaatcctaccaaaattccaactttagttcatttgccaattttagttcaaatttacactagattttagcaaagaagtgagatattggtgggatcatccttcaaaaaaaaagatattggtaggatcccacttgacaccctgatcacaacatgcttgaaatgaaattgagcgaggtcacaatgcctagg

SEQ ID NO: 1845 - DNA, 840 bp, Avena sativa
atcagggaccccggtggattgtatctcgctgtcattatctgggaggctatttgcttggtcggcacctgctctggtgatcagtggtatcaatgctgggccaaattgtggttatgagatgttccactcttctgctatcgctgctgcaagagaggccttaatgtatggtgtaccttcaattgcaatctcactcaattggaagaaggatgaaactaaagatagtgacttcaaggatgcagctggcctgtgtttgccattgatacatgcggccttggcagacattgagaagggaactttcctcagtgggtgcctgctgaatattggggttccaagctcgccatctgcaaataagggtttcaagttgaccaagcaaagcatatacagtcctgctcaaagttggcaagctgtgtcgtcaagtagacctgcacctgctgctcacttcatgggcatgcatcaaagcctcggtattcagctcgcgcagcttgggaaggatgcttctgcagcaggggctgcacgcagaggtaatttgcggaagacggttgaggtcgagtctgttgcggctgcagggaaacaagagactcgagaagcagtgaagaaatttttccgcgctgagttcacggagaagctgcatgaaggtttggatgaggatattgatttgagagctttggaaaatggatttacatctgtcactcctctgaatgtgcatggccgtgtggagcctgaacttgaaactccagcttcggactggctgtcatcagctttgactgtagacaaagaaaaagatgcttcggaagctccagctacctaacaaacttgaagacatgtcactctgtaggtgtcttt

SEQ ID NO: 1846 - DNA, 652 bp, Avena sativa
tcgagtttctgtccaacgctaaaccatcactctttgattaccccaagccaacaactcagcaaactacaactgcagcagttaagctgccgacagccattttgtcaacgtatgccaaggcaaaatcgagagcgaagaaggacgcggaaagcaaggcccaggagaaggcagaagcagccgatggaaaggcagaggccccatccagtgaagacgcttctacgtccatgcaggttgacggtgcagctgcggagaagaaggcgcctgagccagaaccaacgttccagatcctgtcgaacccagccagggttctccctgcccaggagaagttcataaagttcctggagatgagccgatacgagcctgtgaaggttgcccatctgggtttgtcctctgcgggacctcagaccatgcgatgaagaggaactagtcctcactgacaccccttcgacagtggcggtgaatgccagtggcaccgctgcagctgctagcccggtggccgccgtcgaggaggagccccagccaccccagccgtttgagtacacctcgtgatggtgactgatggattgattcacccccaatgaaatgtttgggttgtttgtattgttggcaggaaccgtatgttttgttacagctaattcatttctttcagcgtaca

SEQ ID NO: 1847 - DNA, 854 bp, Avena sativa
  modified_base (334)..(334): a, c, t, g, unknown or other
caaatggacaaggaacaccgcgaacccaatcggcagaggggcaaggatcggaacatgggagtccctggcattcctcttggcatcagtggccgagaagacagtgtagaccaggacgaaggtgccaatgatctcagcaccaaggccatcacccttggtgtagccgctggcaactacattggcgccaccaccgttgcccatgtacagcccctgctggaagcccttcacaactccagctccacagatggcccctaggcattgcataattatgtagaagatggccctggtcagggacagcttcctggccaggaacagcccgaaagtcagtccctttttntttttaacttggtaacagccaacataggtaccattataaataaactcatcgaagcaatccaaaacgttagacattcaacctcacagtaaaactgaaaatttcaagacaactgggtaacttgacaaaggtctatgataggataggaaacaaccctaggcagcagaacgctatctctatggtgcaatcaactttcaacgctttccgccgccgccaccaagcttgggacccttagaacccttctgcacagcggcacccttgccctgtgacttctgggatttggtcacctctgccttctttgccttcttctcatcctttgtcttcttgatgcgctccttgatctcacggagagcggcttctctagcagcatcacggacttcaggtttctcagccctcttcttttggataacttccagtgtggcaccaacaattgaccgtgagtacggcttcttggtggtgcggcgcctcttctttgccgcttcggcatggatgtccttcttgtgctgcttcctgtacactgctg

SEQ ID NO: 1848 - DNA, 840 bp, Avena sativa
taacctaaatatctttctccccctttgataatgggaaatatcatgaaatttgcttatgcctgggaggcaagagtacactacgagtcaaactgtagtttcaaaaagcaatatcacccttacattggactcattcgcataactccacactgtacagagaaaacgaaaaagcaaaccgcccaactaaaacatgcatgcctgtttattgaaacgacagtggcagtttgcccttcaaaatcaacatcatgcacccagaatcacatggttaggccatgcttgggtaaagatcactatatttcatatgtgatcccaactttgagcagctgatctttcggaatggctagtgccttatgcccttccgtcaagttctttctcaagaatgtataaacatagttcaccactatcttcttcaataccgaggacttagctttagctgtaacattggcctcccccatcaggtacaccatccctcgctctacctctctgtcaatcagctgcttctcctcctcaactgtctggttcacatggaaatggatcccccccgagtggctgctcaccctcgtttcaaccgcctccacactgtgcactgcagtttgagtggatcgcctcggccttgcctgggcttctgaagcttcactgcaatcatcgctctctggttcgatctgtgcaaatgcgctctcctcctggatgaacatcttgagcctatccacaaggaatactgcaaactccttgggctcctccagcttgtcactgtacccataacgtgccacacaccggaacattcgatgctccctcgggccgacctgccggaagatgaatctttctgcaggcaccacgcgcgag

SEQ ID NO: 1849 - DNA, 893 bp, Avena sativa
tctccttcccgtcccagatctccgccacccagttctcctactgcctcgtcgaccgcgactcaccctccgcgtccaccctccacttcggcaccgacgacaaccagtccgccgccgcggccgtgacggcgccgctggtccgcagcccgcgcaccaacaccttctactacgtcgccctgaccggcatctcggtcggcggacagaccctcgccatccctcccacggccttcgcaatggacgacgcggggtccggcggcgtcatcgtggactccggcacggccgtaacccggctccagtccgcggcctactccgcgctccgcgacgcgttcgtgcagggcacccagtccctgccgcgggcctcgggcgtctccctcttcgacacctgctacgacctgtcggggcggacgagcgtgcaggtcccggccgtgtcgctgcggttcgagggcggcggggagctgaagctgccggcgaagaactacctgatcccggtggacgggtccggcacctactgcctggccttcgcgggcaccagcggcgccgtgtccatcatcgggaacgtgcagcagcaaggggtcagggtcagcttcgacaccggcaagagcaccgtcggcttcagcgcaaacaagtgctagtagccctaattagggagtgattagtgcgcgtggtaattaagtgcaaatgtggtggagtgtagcggagacagacagggcagtgagtgatgctttggaggaaaggcaaaggcgccaggacagacggagacaaggagtgccagcctgtctagtgtaactgtgtagtagtgtacctctcgtcgtctagccccgtacggtgttgttggacctcgccatggatctctcatctctgtgtgtgtacctgctgctactgctaagcatcctgcg

SEQ ID NO: 1850 - DNA, 661 bp, Avena sativa
cccttttccgccaaagaaatcaatttgctcgcaccgtgaaatggacgtggtagctttcatccttttccatgaaaatgacttaggcggccatgacaacgcttaaataaaaatctactgcatccaagtgcaaaagacaaatccgatcatcgacgcatgcccaatagattttatatactactgacggtgatatgagatgatgaccgcaagctcacgtttaattgtggttggttaatttttgcagccatttcaagggcaaggcgcaggcggagaaagcggacaagacatggcggcttctagtcaggaaggtcactagggcgaaggtgatgtcctccttggccaacagggaggtaccggaggtcgtggccacgtcatgggctagatacaacaacagggttgccaagttgagatgagaaaacccacttcgcatcatcgtgtagtttaagccttgtcattagaaacatctgtaggtagtgaattcaggttactgaaagcgtacttagactccaaaatccagcgagtatgacttggttgcagcggaggtgtaaacgcttacacgaacataaaagctatggatggatcatcactttatcagatcattgtccacttgtaaatcacaaaaaattactcacctagaaatgaagtttcgcacaatagacaaaaa

SEQ ID NO: 1851 - DNA, 742 bp, Avena sativa
gccctcttctcctcttctctcctctttgctggtctcttccgcggcggcttctctccaaactcaaaaaagctagggtttcgcgtcggcggcagcttcaaactcgagagcgaagatgagccgcagcctggggatcccggtgaagctgctgcacgaggcggcggggcacgtggtgacggtggagctcaagaccggcgaggtctaccggggctccatgatcgagtgcgaggacaactggaactgccagatcgagaacatcaccttcaccgccaaggacgggaaggtgtcgcagctggagcacgtgttcatcagggggagcagggtcaggttcatgatcatacccgacatgctcaagaacgcgcccatgttcaagcgactcgaggccaggataaggggcaagggttcagcgattggcgtcggccgcgggcgtgcggtcgcgatgcgtgctcgggccgctggtggtcgtggcggtggtcctcctgttggaggaggacggggcggtgcgcctcccgtgaggaggtagatttatccgcagagccgtgtgaaccgagccgccgctccgtatcaactcgctgtctttgctactaccaaaagctgctgcggcaaatgcttgtgagcttatatgtacttgcagtttagtttgtctggaatcgattctctcctgtgttgtcttcagcatgatgtattactgctagctgtgacttggtaggccgagattgacattggaatggattatctctttgtg

SEQ ID NO: 1852 - DNA, 541 bp, Avena sativa
ttcgtggccacaaccagcaagtcaggtcttgctgccatcgacgtgccaccagaggcggtcgccagtgcggcgacgacgaggctccctgagcgcctctctgtctcgtctctgctggacgtcgtctcggatgacttgctgaagctcaacaacaatctgaaatcgcttattggtgcagaaaatccagttttagtctctgccgcagaacaaatttttggtgctggtggaaagagattaaggccagcattggtttttctggtgtccagagcaactgcagagttagctggtttgtcggagctaactacagagcatcaacgcttggcagagatcatagagatgattcacactgcaagtttaatacatgacgatgtcatagatgatagtgggatgcgaagagggaaagagaccattcatcagctatatggaacacggatagctgtgctagctggcgattttatgtttgcacagtcttcttggtttcttgcaaacctagaaaacattgaggttataaagctcatcagccaggtgatcaaggactttgcta

SEQ ID NO: 1853 - DNA, 547 bp, Avena sativa
aagtgtcagcagtgcataaagcaaatattatgaagcttgctgatggtttgtttttggagtcttgccgtgaggttgcaacgaagtatcctggaattgaatatagtgaaatcattgtggacaactgttgtatgcaacttgtttcgaagcctgagcagtttgatgttatggttaccccaaatctgtatggcaatctggtgtctaatgtagctgcaggtattgctggaggcactggtgtcatgcctggaggtaatgttggtcagtaccatgccgttttcgagcagggcgcttccgcaggaaatgttggaatgacagattgttcagtagaaaaaagctaaccctgttgctttgttcctctcgtccgcgatgatgctgaggcatttgcagttcccatcattcgcagaccggctggagtcagcagtgaagcgtgtcattgcagaaggcaaatacaggaccaaggatttgggcggcaccagcaccacccaggaagtcacggatgcggtgatttctaaaactacggttaacgaccaagaccaatcggcaatcgtgt

SEQ ID NO: 1854 - DNA, 725 bp, Avena sativa
gagttcaagaagaccttgagtatttagaagatgcagtagatgtcagtgactgggaaagtgtatcctatataaaccggccagttgagatccggaaggaagaaggtagaagctacatcaccctggaacatgctttggaaacgttgctaccagagttcttcagctcgaagcccgcagccagagccgctgacgctaaccccgcggagacaccagactcggcgcttgatgacccagacaccactccaagagctcctcgtgacggagacccagctctggagagtccgctacggaccgatgcggccaagaactccgacatggtgaagctggtgaaggtgcaaggcattgatctcgaaaatgaaatggacataccgttcctctggttggccaacaaccttaagaaccctgaattctacctccatgtctgtgtatacgtcggtgcaggagtttgataacagggcaactgtagatgaaatgttttgagataccataggagtgcctccagggctaggaatggcctgctggtggtcttgttctcaggttagactgctaggcgttgttctttgtttgtacagatggtaaaatctttgtcatttcggtgagtcgatgtaagatttagttgtgcggtttgaatggggttatggatggattgatggatgcttgttttgcaattcatgattatgggagttaggaaggaagaggttttgatgcattataatgttatatatgta

SEQ ID NO: 1855 - DNA, 768 bp, Avena sativa
  modified_base (722)..(722): a, c, t, g, unknown or other
  modified_base (742)..(742): a, c, t, g, unknown or other
gtggagcccaagatggccctcatcgaggtggagctgccgccggaggccttccacgaggactggcagcccaccccggactcctgtttggtcataagggcacctggaatggacgcactgaaggtcccctcttgctgcggaacgccccacgcttgacgacgtctccgtgtgggagtggtctgggtctgcctacgacgaaggaactgaagcagccgaatggttctccgcctattttgggaagccaagtcggcttgtccggtttaaagaagagactgaagtcagaccgactaatcccgaatacgttcaaggttacaagatcacatttacggattgcttcccgttcctgatagcttcccagggttcactggatgcactaaacgagcttctcaaagaacctgtaccaatcaatcgcttcagaccaaatattttagtggatggatgcgacccatactcagaggaatctctggaaaaccctaaagataaacaagctaaactttcaaggtgtgaagttatgtgaccgttgcaaggtccctaccgttaatcaagagaacggagaacttggcaccgagccaactgaaaccatgctgacgttccggtccggtgaagtgatccgtccgagccacaagaacaagcagaaggtgtactttgggcaaaaatctaagtgtgcaaggagtctgtgtcagcaaagggcaaagggagggtggtgaaggtaggcgaccagttangttctgcagacatacccttntccgaatgaagctccagcctgagcac

SEQ ID NO: 1856 - DNA, 521 bp, Avena sativa
tccagacgtacgcttggattttttttcagtttttttgtacattttgaaatgtgtatttagacaataggtgcatctacacctatgagcgaaagtggatttccctcactttcacacttgccttcttacaatctgtcttaagattcaatgcactctggctgaacttgaaaatattctttacaggcgtgaagatctccggcaacgagatacacagttgaagcagacggtttgtcataacagtttagaagataagttagcggtggagatcatatgatgccgcctaattagatttgattattctttgtagattggtgagctggagcgtgaactagaggaaacaaaaaggaagtgctctcatcttgctgctgagctgcagatgcggaagagccagcaacaacgaccttacatgtgaagcagtatggaggcacacgtaagatgcagaatatccctcacctgttcaaatcgaaagaggcattgccaagtcaaataggttttgaggttcattcaggacacggrtgctgctc

SEQ ID NO: 1857 - DNA, 705 bp, Avena sativa
ttttttaaaaacataccaagcctggtcaacccaacacagctggataataaaatgcaaaaagggggggaaactcaaaaggtgataactacagtgggatcacatgtggactagcgttctgcttaagcatcattcaaaattcaaaaactgaatctaaaaaacataatccaataaaaattgcaatacaacaggctaatcacctagagcagcagggagaatagtcacagaagccaacagagaatgagaaaccaattctcagacagcagcacccttgcgttgctcattctcgccgtgggcgaagtggcagcggtcgccaaatgtgcaggtgcccttgaggaagttctcacagatcttggtcttgtagttgctcctgccgccagggccgccaccggagcgtggagggggtgcagcgctggcagggtttttcgatggcatggtggcgctgatgctagcaatgagctcgcgcaccatgtcgctggcctgcttaatctggtcgaagttgccttcgagctcaatgttcttcaggttcgtgtctgattcatggtcacgtatcgagagcttgacccctgtgactcggcagatctgcttcgtgttgatcccacccttcccgatgatgcctccagcaagagcggcgtcgacactgaccttggcagtggccgatgctccgaagcttccggttgcagggcccatcgaagctggtggaggtgg

SEQ ID NO: 1858 - DNA, 873 bp, Avena sativa
tctggagagattgcgcacgaacaattcttgcagcccactcaaatatctgtctcgtgctcagtgtttacatggaaacaggataagcatctggaggttgatctccggttcagtatatacaatagatactaatctctagattttacacagcaaactccatctcaaagcttcgaggcacccatggacacggcctgctgcacaagctcccgccgcaagatcttccccgcagctgactttggtatcgcggtgacaaaggccactcggcggactttcttgtagggcgcaacatgtttggccacgtaatccatgacttgttgcccattcaggtctgaacctggttgcctcactataaaaagccatcggcaattgcccagcatcttcatctggatatgggataacagcagcatcagcaattccaggatgagattgtagaatatgctccagttcagctggaggcacctggtatcccttgtactttatcaactccttcaaacgatcaacaatgtagagaaatccatcttcattgaagtagcaaaggtcaccagttttcaaccagccttctgagtctaccgtttctgcagttgccttgtcatcacccacataacctttcatgacgaccgggccgcggatccagagctcgccgcgctggtcaggcccgagcgcctcgccggtggacggatcgactatcttcgcctgcaagtgcgatgccagcttcccgaccgaaccgtatgcaagggactcctccggccctaccgtggatgtccacagagccagatgattccgtcaagccgtagccctgaacaatctggacggttggggaagacggcggcgaagcgctctgcaacctcgcggcccagcggcgccccgccgacgccg

SEQ ID NO: 1859 - DNA, 850 bp, Avena sativa
agatacgctggttgcatctgacagcaagaaggacccatttcaacggcgacatgaattgttgatgaaaagtgatcttgctgaggctcttgtccagacttgtgttgaaaatgttggagagttgcttcgaacaaacttcggcaaagatatattatatgaggttgctgttggtggaaaagacaatgttttggagggcatcactgagcagatccacctacttcacgatgcaatagcttctgatgcagcgcggccgaagacggaggacatagaacatgcctttgagaacttccattccagccgtatgatcaggaaaacgataattgattgtcctgcatttgctgctaccctctggaaaaaatcccttgaagggaagtgcaagttgtatgctgatggatacagttccaaggtggtgactgcatatctggaatctgcagactccacggtgaaggatcttgcaaaatcggagctgcagccgctggttgatggtggcaaattgaaaatcccagaccataaagcggcggagaagaaatgagcattatctacagcttttcgccattgccagcaacgcaagcaagcagcaaaggtggtgtccatgcttgcgtgatagataaattttgatcacttggccttgtcatgaatatgttagtttgcaccaatgagtagggaacggtcatatcacctctgtaccctgaagaacaaaatcttgcctgttttggtgtatatctgttgtactcgagatacaatcctactccagttttgtacgtttacaccgagtagccagattttattcgtccagactttctccgaccaggagtactcatttttaacagaaatgccagctcggtagtaggag

SEQ ID NO: 1860 - DNA, 842 bp, Avena sativa
ggcggagacgacgcagcgaagctgcaggagctcgacgagatgaagcgtaggctgaaggagatggaggaggaggccgccgccctccgcgatatgcaggccaaggtcgccaaggagatgcaaggaggggatgccaatgcatctacagccgaggcaaaggagcaagtggatgctcgctctgtatatgttggcaatgttgattacgcttgtactccagaggaagtacagcagcattttcaagcttgtggaactgtgaacagagtgacgatcttgactgacaagtttggacaaccaaaaggctttgcttacgttgaatttcttgaacaagaagctgttcaggaggctcttaatttgaatgaatctgaattgcatggtcgtcagatcaaggtgtcaccaaagaggaccaatgtccctgggatgaagtcagcggccaccacggggagcatttaacccgtaccatggctacccttatagatcgtacgggtcaccgtacttcccaccgtaatgttatgggagagtccccagattccgtcggccaacccgctacaggccttacttctgaagtaggaggaggtttcatgatgcgggatgtccaattatagtcgtcctgtggaataattctacatggctgctgctttgatgttggagcagtagacataatctgctgggagaatgctcctgctatcctgctcttgtaagctgtatttgtaccgttggcttgcatatagctgtatttgcaccaccagaagcatgtgatattggattgccttaactgtggctgttgtgtgctgtccggtattccagctagagtgacaatcatgacccattcatcaattacttaaaaa

SEQ ID NO: 1861 - DNA, 602 bp, Avena sativa
gacacacaaggcactgatgatgatatctaccctcctgacagcagacttatgtgggcaaaccaagcttatgctaccaaagggaggtggatcgactgggacaacgcccatccacggccaacctggggagaagtgagggacctgaaagcgtcgtactaccaaggaacgttccaccagtcagttgcctgcccaggtttcatggcagcccaggcggtctcgtcgttgcagatccgagaagattcgtcggtgatgacctccgcaagccagggagtggccgccgcgaccgtcgttaataggatgctcggtggcaccaacaggctcagcctttacagagagatataaaaagaaagtatacacctcgccgtatagtacttttgtatatagtcaccaaaggtgtgctgactctttcccctgcagttatatgtgctgctatcagaagaatctgatagagccacttgtcttgttgtttgttttcgtcggtcaaataggttatttggtgtcggtattgtaatgaatcatagtatattgttttgattctcttgctggttttcttacagaatattaatttctagccttttgcacttttcttccggaatataatatct

SEQ ID NO: 1862 - DNA, 711 bp, Avena sativa
cggcgcgagcgtttttgccccgggataatggccaccgtcgcggcgaccatgacgacgccggcgcgccaccaccggttacgcgtgcgcgccgcctgggacatgaacccgggcgccgccactatcgccgtgcctaagacgtccaaggccaaggccaagcccgccctggggcagtcgccggcgacggcaaccaccccggtccgcgcgccgcctcccacgcacgccgaccttttcgcgcgcagcagcgagggccaagtagcaaagaagagcacatatatggggtttgagaagtggtggttaccacctgcgccggaggttaagaagccccgttcactctacaacgcggcatccctcgcgtacttaggagactgcatatatgaactttatgctcggagacacttcttctttccaccactaagcatcaatgagtacaataagcgtgtgatggatgttgtgaaatgtgaagcacaggatctgttgcttaacaagcttctcggagaggattttctaactcaagaagaaagggacatactccgttggggaaggaacatcgttagcagcaaaactcgtaccagaaagcgtgcggggattgcagtctacaatcgagcatcttcacttgaaacactgattggatatctttacctcacggatttcaagcgtttggagcaaatgatgtttcaattaggattcacaagtggtgcttcatcacagaat

SEQ ID NO: 1863 - DNA, 959 bp, Avena sativa
cacataaattcaataagaagataacccgaatcttacaaaccaccatgcaagaagaagaagaagaagaagagggcaagaagaagaagaaatgaagtaaggaatttgaacagagagaggaaagaaacaccaccaccggcagggtggcggcagcaaccgacgacaaagaaactctatgcacattgctggccccagctgctggtcgcatccgtacgtagcttacaagaggtagccaagaagggcggccacggcagccacgccccacccgacggccctggcgccggctgcgcccgtgggcgtgacgtcgtcgtcggacccggccggcccggccgcggcctcctcacccttctttgtcttcccccccttggaggcggtgggcgcggctgcgggcgccttggcggcaccgaagagctcgtagggcaggagcaccttgtcgaccgggtagatggcgagcggcttggtggcgacgagcgcgttgttgacggggacgacgacaactccggtggagatgttgagttggttgttggcggtggcggtgatgttgagcgtgaatggcccgtcctgtccggacgcctgggtgcggatggggttgcttgcggtctggaaggactccatggtgtagaactggggcaggatgtgtccctggacgagcgccacctgctgctgctgggtgaggctgttgagcgtgccggccttgaggttgttgaaggcgttgtcggtgggggcgaacatggtgtagccgttgccgctgaagccgttgttgagctggctgttgagctgcgtgtcctgctgcgtcgtcttgagcagccggatgaaggtcgtgtactgcccgcccttctccaggatggccgacacgttctgcgtgtcgctcggcgtcaccgagggcgccggcgcctgcgcctgcgacactgccgcgatggccaggaacgccgccgccacgacggcaatgccgctcctcatcg

SEQ ID NO: 1864 - DNA, 662 bp, Avena sativa
gtatactgaatatcttacaagctctctcaacaaaatagagaagtccaaatgaggtgcacactaattttagacacgcggtgcacctgtcacttgaatttcagtttctcactgattaaaccttatatattatattatcagatcggaggctgaaaaaataatcgtccctcatttccatacatccaatagtgaagccaagcaatggcatgccagtgccattattgcagacacaaaccatacaggctactgcctaaccaacctgtgcaccatcgacatactccccccaagtatgcacaagaatgtaatccacaaggacacgatccacagaggggaaaagatgaaaccaaatagttgctgcagaacaaagatgatgtctcactgaggcctgtagtagttactctggttgtgaggagggtaagcacctggggcattgtatggtgcttgtggataaggccctggttgctgtgactgtggctgctgcccattgtagttcggcccacgccatccaggatatgccggttggccatagtcatggccaggaggtggctgatgcggcggctgctggtactgaccagggtgcgctggtgcgccgtatggaggttgttgggatggcgtgccgtatggaggttgttgggatggcgcgccatatggaggttgttgagatg

SEQ ID NO: 1865 - DNA, 859 bp, Avena sativa
tgccgacttcctgtgtcgcttaaacgatgatagaaatgtgcgtgctttgtttgagcgagctttgagcttacttcctcctgaggaatccatagaggtatggaaacggtttgctcaatttgagcaaatttacggggatttgtcaagcatgttaaaggtggaacaaagaaggaaggaggctttatctaagacatcagaagatgtcttatcgtccttagacaacacattatatgatgttgtttctcgatataattatatggatctttggccatgctcatcaaaagaattggattacctgtcaaggcaggagtggcttgcaaagaacatgtttaagaagagtgacaagtcagttatgctaactagtggtggtggtgctactttagacaaaggttatgttggggttggtgccaatgcaaagttatcaccacagtctgcaagagttgttcgtcccgagacttctcgaatgattatttatgatcctagacagataaaaggaccagtgattgcagccacgtccagtgggtacacgaaggaggttgacgaaatattcaaaatgctttctccaccaattatgtctttcatcacgaatttgcctgctattgaaggtccatcgccagatatagacattgtgcttagtgtgctactgcaaagcacattgccaactggacatgatggtggtaaacctgctggcgctgccaacagtgagcccttggttccccgcaaccaaaacggaccagttcatagacctccaagagatgggcagcccacgaaaaggaagggcatcgaaaggcaagaggaagaagacacagcggcggcgcagagccgagctaggccccgagacatattcaggctcaggcagatc

SEQ ID NO: 1866 - DNA, 885 bp, Avena sativa
tgattttagtggatatcaacactcctggagtgcagataaggagaccctgttagtctttggattcgatgacgcaccacatggacatgcagagattacttttgataacgtgcgtgttccggccacaaatatcctgctaggggaaggacggggttttgagattgctcaaggaagactaggtccaggaagattacatcattgcatgagactaataggagcagcagaacgtggcatgatcatgatggttgagagggccttaagtaggacggtgtttggaaagaggattgcacagcatggttcatttcaatcagatcttgcaaaatgtcgaatagaactggaacaaactaggcttttggtgcttgaagcagcggatcaactcgaccatcacgggaacaagaaagcccgtggaatcctcgcaatggccaaggtggcagctccaaacatggccctgaaagtgctcgacatggcaatgcaagtccacggcgctgctggcgtctcatccgacacggccctatctcatctatgggcaaccgctaggacactgcggatcgcggacggcccggatgaggtccatctcggcacgatcgcgaagctggagctgcaaagggcaaggctgtaaggtcaggatagtgtccaagttcaataataggaggacaaggaacatctggaaaaggtcagtacaggacggcttcacagccacaggtagatagaatggtgaaataagtggtgctagattcctggatgtacgcttcctgtttgccttttgattttccgttgttgtttgtccgtaagagactatgcatacatgttcaatgttcgtcctgttgtgaagggaccaaccctaccagtacagtacagttacatgagagtattacagatctgaatact

SEQ ID NO: 1867 - DNA, 660 bp, Avena sativa
aatctcccctggtgcgcgcacatcacctattgatgtggaagctctagatgatgaagtgcaggcggtatcgccttcacaagttcctcccttgaggaggaaccggagacctagaatccaacttgtgacagtagttgatctggaggtagatgctaccccagaagggaacaaacgcccaaggattatgcctctaatgcatctcttcccggggggagaaggatccagccagcagtcgagtagtgcagcagtagctagcaaagatcctgctgaggtagtggttccgaaggaacctagttttacttgtccagtgtgctggagcaagttggtggagccttccacaacaaactgtggccatatcttctgcaccgagtgcatcaagcaagccatccagtatcagaagaaatgccctacttgccgcaaggccctcaagaagaacaatttccatcgggtttaccttccgaactctgatgcttaaggccaacagcgatcattcggctgaagcgtaacctcacctagatgtgttattgttgagacactagtagcagatgctcagatgaacaattggttaaattgagtgttgtatgtattagatggttgatctttgtaactgggactagcttaaaagctgagatgataacggtggatagcatctttggtaaaaaa

SEQ ID NO: 1868 - DNA, 800 bp, Avena sativa
aggtcaccatacatcaaggaattcctatttggcaagtgttccagcgcaaaagctggaagctccggcagtctgagcctctttgctgactcatataatttgctaccatccacattgatgatctctccaagaaatttgtagacagcaggatttcttccagctcggatggcacctgctggactccaactgaacttataggccagtggattgtttgcggcagctggggatggaagtccaccacagaaagatgtaaacgcctttatttgtcccttccgagcatgtgcttcatcaatcattttcattgacaacatgtgatctatgccaggatcaaggcccatttcgcagagtatagttacacctgctccttctgcagcttgctccaactttgacatggagtcatcaacatagcttgctgtgaccaagtgcttcttgagctctatgcatactcttgcaatggcagcatgaaaactagcaggcagcaggctaactacaacttcaacctgtgaaacaaggtttgtaagacttccaatatctgaaacatcaagctgagctgctgttgcattctttattccgtcaatagtctcctctgcatccttttgatacagagatgccacaataacatgaacttggtcagtgttatatttgttagcactgttgatgtcgatgtttcgataagatgctagaaactcagcagctggccgacaaactcttccagctccaagaattaaaacctttggtcctactttatccatgctgtcatcaattccgtgttcgttgactcttcctatctttagaatcccggg

SEQ ID NO: 1869 - DNA, 713 bp, Avena sativa
aaccgttgggactccagcttacatcgctccggaggtcctttctagaagggaatacgatggaaaggttgctgatgtttggtcctgtggagtaactctatatgtgatgcttgttggtgcttatccatttgaggaccctgacgaaccaaagaacttccgcaagacaatcactcggatactcagcgtacaatacgcggtacctgattacgtccggatttcaatggagtgcagacatctgttatcccggattttcgtggcaaaccctgagcaacgaataacgatccaggagatcaagaaccacccttggttcctcaagaatctgccgatcgagatgactgacgagtaccagatgagtctgcagatggtcggcatcaactctcccccgcagaccctggaggacatcatggccatcatccaggaggcgcggaaaccaggcgacggaaccaagttcgcggggcagctgtccgtgcccggcctagggagcatggagctcgacgacattgacgatgttgacgccgacatcgaggacagcggcgacttcgtgtgcgcattgtgacagacatgtgtctttgtgtcctggtcttttgtgatgtgtgttcatcattctgtcgtgtcgttgttcgttttacagtgagttgcaatctgttgttgtactgtcacccatcttttatgtctgtcgataaatataatatatatgcttccatgtagaaaaaaaa

SEQ ID NO: 1870 - DNA, 565 bp, Avena sativa
tggcatctcctaccgtggcgacatggatattgcccttgccctgcggaccatcgtcttcccaacggcttctcggttcgacaccatgtactcgtatgccaccgacaacagctcacgccaggagtgggtagcgcacctccaggccggtgccggaattgtcgccgacagcaagccggatgacgagcagcaggagtgccagaacaaggctgccggtctcgctcgcgccattgatcttgcggagtcgacgttcctggacttctcagatgcgtagaacagatttgctctcgttttttcctcatctgaagtctggcagaaaacctccaaggtccaagcctatttgctgtgggtgctgcgccaaataaacaattgtagctagggcaaaaagttcaatcgataaaatgtactccagcagattggtattttactggttaatttgtttccgctcaaatctgggagatgttactggaccggatgatgattaagatgcagaattgatgagatacagttgttgaaaaatgagttctgctgtttataaatcaatgcattgtgatagaaaaacagttagtta

SEQ ID NO: 1871 - DNA, 655 bp, Avena sativa
cgggatcgaagcccaccgaattcctcgcgattcctctcccctcgccctcctcgtcctccccatcctaggggatcgccggagaggaatcgcgacgagggccttcttgtatcagtaaaccaagccatggagcacaaggaaaccggctgccagtcctgggagggtcccatcctctgcgtcaataactgtggcttcttcggcagcgcggctaccatgaacatgtgctccaagtgccacaaggagatgacggtgaagcaggagcaggccaagctggcagcctcctctttcgacagcatcgtaaacggcgccgacgccacgaaagaacatcttgttgctgctggcaacacggcggcggtagctgttgcccacgtcgagctgaagacgacacttattgctgcacagcctgctgatgtcgccggtcccagcgaggcggcccccaaaggcccaagccggtgcggcacctgcagaaagagggtcgggcttaccggattcaactgccggtgcgggaacctgtactgcgccctgcaccgctactccgacaagcacgggtgcaagttcgactaccgggccgcggccatggatgccatcgccaaggccaacccggtggtgaaagcggagaagctcgacaagatctagggggcccctgaatggtcggcaa

SEQ ID NO: 1872 - DNA, 946 bp, Avena sativa
cgggatcaaagttgagtcaattaatttgggacggagggagtaacatttctgtattgtttcttttcgtagaaaaacagtaacatttctgtattgtttcgaattgggaatgctgcaggctgttgccaattctacatcagcaacattcttgcgtgttgttgggagtgaattgatccaaaagtaccttggtgatggtcccaagcttgtaagagaactatttagggtggctgatgatctatctccttcaattgtctttattgatgagattgatgcagttggaacaaagaggtatgatgctaattctggaggtgagcgggagattcagaggaccatgttggagttgttaaatcagctggacggttttgattcaagaggagatgtaaaagttattcttgcaacaaaccgcattgagagccttgacccagccttgcttcgaccaggtcggatagacagaaagattgaatttcctttaccagatattaaaaccaggcgacgtatcttccagattcatacagctaagatgacattggctgaagatgtgaacttagaggagtttgtgatgaccaaagatgagttttctggtgctgatatcaaagcaatctgtactgaagctgggttgcttgccttaagagagcgcaggatgaaggtgacacatgccgacttcaagaaggccaaagagaaggtcatgttcaagaagaaggaaggtgtaccggaggggctctacatgtgagaccgctcaccccctgagcaccagcattttcctcctggacgtattttagtgtaatagtggagtgctggtgtttgtatttggttcaaagcgttcagagtacttactcgcactcgtttttggtctacaacccataacttacaaacaccccttcgttaacaatctactgtaccatttaaatgctggttgccctgttagttttaattggaaatttcagtcctt

SEQ ID NO: 1873 - DNA, 613 bp, Avena sativa
  modified_base (598)..(598): a, c, t, g, unknown or other
gaattcgatgtcgagaagattgaagctaaaattgccaggctgaagatcttgcagcggcacttcaagctagcagaatgaatcctgcgaaagctggtcccagtgatacggctgctggaagctcccagggcattagtggtggggcgggagttcaaggccagtatgcgcctgctgctgttccaggtgggttgaaccagcctcgtccgacaggcaacgccccacaaccaatgggtggatcagatcctctacatggatatgatgaggagaccatgagactacgtgcggagagaggagcacgagcaggtggctggactgctgagttgggtaagcgaagagcattagaggaggcttttaacagcatattcgtataaaaaatagatcaggcacagcaaatatcctggaggacgcatggttaacttgtgaaaccccccccgggccacagctcttactacctgtccagctatagcatggttagttatggtacacacctggacttcaagcagaagggaatcagcatcaagttgcccagaaatcatattttttgctaagtcgagaactaagttgcatatcgatgtacctatgctcatggcagtaactgatntgtacttgccagtcg

SEQ ID NO: 1874 - DNA, 815 bp, Avena sativa
ttctgggactacagctactggtaagacgtccgagcttgaagctgaagtgtccaatctgaaggagcagttgaagaaaaccacactggagaaggctgagatgacagccaagtatgaaaagctgtcggctatctgtcgctcccagcgtcaggaaatccaagagctgaagcgcactgttgctgagactacaccgccaccttcaagtaaagtcagctcaaggataccagaattcggatctctgcgaaaggagaagattgaagggacggtgtgggagcttgaacaagggatgctcgcaggcaactcgtcgctacccagctccgaggccaagacatggcaggcattccctgaagcaaaagctcaggccagaccaaaggtcgaccatgcaaccaatgggaggcaaaacctaacgaggaacacaaacacagggctgccttctgatgcacggggtttcggcacatcatcggttagtactgctgctgcagcacagatcaacagaacgagtgttcaggggagttcctcccagagattcagcgcgggggtagcgaagaaagtagatcagccatcaggatgggccggattctagcttctcatcaatctgtggtaatctcggttctcccgtgtctgtttgtaggctgttctgggctactgactcaaaggatgagacgagttgtgattcttaccctgcccaaaattggtttattgtaagggtgtttatagttggttgagccgacctggacatcggttttctggggtcgtttgtccgttaccttgttaataaattttatgtttattacagatgtatatttaacgtgtaaaaa

SEQ ID NO: 1875 - DNA, 752 bp, Avena sativa
gaaagttccacccataccaataccatgttagttgttgataatactctttagtatgctatttgtgctaacagtgcaatctctgctgctcagtatgactataatccaaatgaagactatgctgagacagagttgaagttgagggaacatttgcaatcatttctcgaaacagttaaatccttcaatatgatatacactaaggaaattcatccttggacccacatgatggaggtcccccagttgcatggatttggcccagctgctaatcgcctgttagaggcatataacacacttttaaagttccttggaaatttgaggagccttcgagattcctattctgcgatggctgctgggtcactttcaaactcaaatgagccttcgtcagtcacaaaaattatttcagactgtgaatccgcgctgacattcttgaataacagccttgccatcctttcaacttctgtggcacgggagcagggtgaaactctgtgactttgcagtctgatagtgataccgagattcaactttgggcacatatgtaatgtaagcttgtatttgcccgttttagtttcagctgaggcatacggtaaagattttgttgcaactgtgggtgtgttgttgtatctgtctgcttcttgatgcttgggcagttgtaaggttcgctgatcatatactcaagtgtgaaaacatagctctgattgactgaacccatagtaaaactgtttgcaatggtttatatggattgccttgcatctmac

SEQ ID NO: 1876 - DNA, 684 bp, Avena sativa
gtaaaactgcaccgatacaggcggtgtcacttattatactgggcccctttgcagattactacctcaacggacaatggctgtttaactacagtttttcaacgggggcaactttcttcatactgctttcatgctccttggctgtggtctgcaacatgagccagtacctgtgcatcggccggttctccgcaacctctttccaggtcctgggccacatgaaaaccgtgtgcgtgctgatcctcgggtggattctgttcgactcggctctcaccatcaagaacatactcgggatgctgctcgccatcatgggcatggtagtctacagctgggccatggagtctgagaagaaggcgatcgccccgatcccgaggaacaagagcgacatgctggatggggaggacgtgccgctgaagtcgaggctgagtgggctgccgtccgagcttgacctggaggaaggcccgatgaagagctagcctgccaccgttattcattcattcttcttggttctttttgtatgtgtatggttcacattgttgggctgagtcctcctcgaagctatcgacactcattgttaattttgagttcatcataggtgatgacgaccctggctggtctggacgtagatgaccacttagaaaaatactgtcaagggcctatgtgggcctgagccatgccaaatcgtgatgg

SEQ ID NO: 1877 - DNA, 625 bp, Avena sativa
atatctccacacaagcgaagttgtacaatacatgcatgatcagaatgaaaaaatgtagttgaatatctcgttctcacaaaatgatatacaattacagcaatacacacattcagttccaaatgatttgcatcagaaaatctttccatataagcgcagtacaattcgtcatcctcaaatgaagagccatggtcatatacaaatacatgcatgaaccgtgagcacaataatcctcatcctggaggcatggtcatgtgcagaatgagaagtaaagggggatatcttgctctaatgaagtgatatacaacaatacagatgtgttctgaatcatggctcgacgggtggctttagcctgatcagcctccggactctgtccttctccgtgttctccagcaaccccttccaaacaatctcatcaaggcacaagcagatcctcccgtacttgtcaaggaacaggcgctcactaggtggttttccacagacatccttcactgccgatgtaacagcaaagatcacctcggacagagcaagctcatcgtattcatcctttccaaccatgtacaggcagacgtccccaatcatggtataaacgatagagaccgatctgggatagtgaataatcagattt

SEQ ID NO: 1878 - DNA, 473 bp, Avena sativa
gaggcactcagtgatgcttatagggctcaacagaaagcggaagatatccaacttctcattggcaggcctctggcagattttgaacaatttatttactcctcttctccagttttgtactgtagctcctgccctactgggtgcaactcttcttcacagaaatgggttagagatcgcttgtgttctcatcagactgtggatatctctctaagtagcatttggcagtggtatgaagaaccttgctgctatggcttggaagtgaaggcacaggatctccgtagatcgaaaggtttctggaatagtcattaccagttcaatgcctactttgttccttatctatcggcggttcaattgtttggtcaacctaagagaaccattggtaaggatgcagccgatacaggtgcaagatctaaaacatctccatgtctgagctctctcccaatattagcgaagcttctacctaaggagtcatctaa

SEQ ID NO: 1879 - DNA, 628 bp, Avena sativa
ggagatgggaaaggtgcacttgtgatgacggggcagcttggagatgtcatgaaagagagtgcgcagattgctcacacagttagtagagctatactgcgagataaagagccggataatcagttctttgcaaactcaaagttgcacttgcatgttcccgcaggggccacccctaaggatggccctagtgctggatgcaccatgattacatctatgctatccttagctatgggcaaacctgccaggaaggacctagcaatgactggtgaagtaacattgacgggcagaatcctcccaattggcggggtaaaagagaaggccattgctgcccggcgaagctccataaagacaatcatatttccatcagcaaataaaagggatttcgatgagcttgcccctaacgtgaaggagggtcttgaggttcattttgttgacacatacagtgaaatatacgagttagctttccaggctgagacagagacaagctagcaagcaattcgaaaagagtgttcagattgaggtctctgggacagactgaaaagtcgaagaagtctgcagctagaccatttttagggacatcaggagtaacttattgttgtaagattctttttctaagttgccccatgtggca

SEQ ID NO: 1880 - DNA, 841 bp, Avena sativa
atcatctgtccccatccatttaagcatattttctccaaatgttgtgaatctgacacttattgatcttcctgggcttactaaaattgctattgacggtcagtcggacagtattgttcaggaaattgaaagcatggttcgaacattcatcgaaaagcccaactgcatcattcttgctgtttccccagccaatcaggatcttgcaacttctgatgcaattaagatttcacgggaagttgacccaaaaggtgaaagaacctttggtgtgctcacaaaaatcgatctaatggacaagggtactgacgctgttgatatattggaaggaagatcttaccgcctccaatttccatggattggtgttgtcaatcgatcccagcaagatataaacaagagtgtggacatgattgctgctaggcgtagagagcgtgactattttgctaacacactagagtacaagcatcttgctcataggatgggatcagagcatttagccaagagtctctcaaagcatttggaatctgttattaaatcaagaatcccgggtctccagtctcttataacgaagactattgctgagctggaaactgaacttactcgtcttggaaagcccattgctaatgatgctggaggaaagctgtacacgattatggaaatatgccgcatgtttgatggcatctacaaagagcatctggatggagtgcgccctggtggtgagaaaatttaccatgtcttcgacaatcaatttcctgtggcaattaaacggttgcagtttgataaacaactgtcaatggaaaatgtgaggaagcttataacagaagctgatggttaccagcctcacttgata

SEQ ID NO: 1881 - DNA, 797 bp, Avena sativa
tattgatgataagtttcagcagattattatggttgctgcaaccccatagtacatggcatttctatttaagaaaaggtatacaaccttttactccctccctgttattttacattctcgcatgtaagattatactccctctgttccacaatataagcctttttagcaagctgttttaatttgctaaaagggcttatattatggaacagaggtagtatatatgtaaagtgcataatttacttacacactaaatatagccactctaaattattgttgccgaacaaaacaaaattattagctgagcactggaattgtctgcctcggtagaactaatggtgaaatggaaaaaataggtacagtaatataaccgtggctacacttctaataacttcttcagctccttcttgttaacctttcccatggcattccgaggaagagaatcccataagtacaatcttgttggaatcttgtatggagctagcttatcttttgaccaacttgtcaatgcttctaaggttagtgctggctctgaaccctgtccagctctttccttcgcgtcctctttaggcacaattattgcgcatataacctccccataggcttcatcgggcaagccaaggacagcacactccagtatggtgtcatgctctaacagtactgcctcgatttctaatgctgacaacttgtaaccaccaactttcatgatgtcagcgtttgtgcgccctaaattacgaagtatccatcctcatctacagttactgtatcaccagttttgaagaaaccaccatcaataaatgatt

SEQ ID NO: 1882 - DNA, 487 bp, Avena sativa
  modified_base (483)..(483): a, c, t, g, unknown or other
attcgataactaaactgcacctgcccaaggtccacaagtctggtggagctgccattgatatgtggatcaaggcaaagagttggggagacgaaacacggattactacctggaccttttgtccaaaggtgtcggtaaaccgaaggaagagcttgcggaattcctgagaggcccgaggtacttccgcgcgcaggaggccatcgattatgggctcgctgacacgatcttgcactcgctggatggctcgttcaagccaaaggacttgaccgcgcagctggccaaagcacagaagatgcagcaatctggaatgcgtgcccctgctggagctggacgatggtcgactccaaccgcacccagataggttagatgtacgcttaggcgactttccctctacgaaacgtgcctgttgtagactagatatccaccggtgtctgggagtgatccatcaatgctgttgttcaaaatagttgcacactataaaaaaanaaaa

SEQ ID NO: 1883 - DNA, 770 bp, Avena sativa
ttctgtgttccttcgcttttctcctgctgacttccccgaccgcagcttccacaccgttgggctgcctcagcattgatcctcgctgtctgtaaaagcactgaaccatcatcaaccctacgctgtctgcaacgaccttacagaatcaccgttggcatcgcctactacactgtctgcaccaaccttactgagtcatcgccgtcatcgccgtctacaccgacttgccgaatcatgaccgtcatcgcctactactacattgtctacaccaaccttaccgaatcatgaacggcatcgccctctactacactgtctacaccgttagacctgaagtcatctttggatcatggagttagaaagcagagaatgctgcatgcagtgctacacgtcaccaactatagaccttgtttaattgtgatgctgcaaagagaacccgtaagaggacccctactcctggagaatactgtggcccaagaggcgggcgttctcgatcttcgcctcgccggtccagcagggggcgctcgaggtcgccggatggaagaagcgaccgagacaggaagcgcgactgagatgggagtaaaagcaggttgctacatgatggtatctcactgggaacggcgtctgattggatgtctcttcggctaggatggtgaaactttggtctcactgccctggaggctggctggagatgtcatttgctttttattttttgttctagttaagttattcgaagcgtgttccggacataagtagtacgctcgctgtggccgtggatg

SEQ ID NO: 1884 - DNA, 719 bp, Avena sativa
gccaactacccgctgatgcagaagctcagggccgtcctgatcgagcacgcgctggccaacggcgaaggcgagcgcgccctggagacgtccatcttcgccaaggtcgcggagttcgagcagaacgtgcgcgccgcgctgcccaaggaggtggaggccgcgcgcgcgtccgtggagaacgggacgcccgtggcgccgaaccggatcaaggactgccgctcctacccgctgtaccagttcgtgcgcgaggtgtgcggcacggagtacctcaccggcgagaagacgcggtcgccaggggaggagctcaacaaggtcctggtggccatgaacgagcggaagcacatcgacccgctgctggagtgcctcaaggagtggaacggcgagcccctgccgctctgctgagcaaaaggtaatagtactaccaaaggaaaggaaaagaagacgtacacacactgaatatactagaacacattccaagactgtgaagcgggaggggttcctgttgttatctagattggcgatacgatctgtctgtgtttctttgtacgtagttaagttgatgtgttactgttgtggttgtttccagctgccgcgatgccatgaactggcaaaggcaggcagcttctcaaactcgtgtgttgttgtaacttgtacgatgggagatcatgaagaaaagtacagtattttgtttcatataatacacgccatgttctcgacaaaaa

SEQ ID NO: 1885 - DNA, 495 bp, Avena sativa
aagaaagccattgatgatatggatcctaagttgaaagaggcattggagaatatccggttttacaagttctaccctgtaaaaaccaaagatactcctgatgtaagcagagtacaggcaaagtacatcaatagatactaccacaacgcacatgaactgctgtgatgtgcaacctcacatatcctgtgagcaagatcaagcttgaagctatcaaagcctgaatggatagcactcaaaattttgtaagatggaggagatgtgcttggttgggctcatttagttctggtctcttattgggctcatttcgccccaggctcccaccaatccttgtagagcatctcttccctcaacattctctcctgtattgctatttgtaacactctgggaggtcgttgtatctgtcagccagtagttgttgttagtgcagaacaagtgctgtaggaacagtttgttcccttctttttattccccccaagtatagctcatgctactaaaaaa

SEQ ID NO: 1886 - DNA, 659 bp, Avena sativa
acggacgcgtcgggttcctacgtcgtgtacgcgccggtggacatcgtcgctatgaacgtggtgctcaacggcggcgacccggactacgtggcgctcctgccgtcgggcttcgcaatcctgcccgacggcccgccgccgccgcctgggacccaaggggccgcggaagactccacgggcggcggaggaggaggagggtccctcctgacggtggcgttccagatactggtggactccgtcccgacggccaagctctcgctgggctccgtggccaccgtcaacagcctcatcgcctgcaccgtggagcgcatcaaggccgccgtctgcagggacgcgcccagcaatccgcactagtagcttccacttcactcgtctactgtacgtgcttgcaaggagtagcaagattttggagatttcttttcatcagtggggagtcaagaacgcacctcatgctctgcttgccatgtggtgctcatgcctgcgaggggtagatttttgctctcggcggcgaaaattgtgtcaccactatgcaaggggggatggttcggcattgacttccgccttcagtttcatatcatcaccagtttgatgctcatcatgctgctctggttctctttgttaggatctgtgtttctttttcattgtttcaggaggcataagtt

SEQ ID NO: 1887 - DNA, 902 bp, Avena sativa
atcattctgtgagatgttttatcaatccattcatctaagataactgagcatatactggggtagttcatcagggcttgtgtctcagaactcttttttttctgagatttttgtgtctcgaattcttcttaagaagaaaaagatgggagagtcaataaacaacaatctagtgcaatatcatgcgggacaaatagttactgggtacagatgaaactcctcgattgtctttcattagcgattcacactggaacccagcaaaaattagtaatttcctttctaggtcacacatacacataatagaagactggtgttgacgagtctactacactccgcatgcttttcctagtcgtcctcttaagatcttcactccgaagtatctgcccatcatcatgaccgtggcttgagggttggtccctggtgatttagaaaatgttgagccatcaacaacacggagacctgagacgccaagcactcggtgttgctcgtcaaccaccttccctacatgacatccaccatgatagtgccagatggtgattactgtgtccttgcaaaattgctccagggattctgtggtattggcatgcttgggtatcagatttacattagcccgtacactcatgttgagcaccctttccattccagcaccatcaggagacaactgagcgaaacggtttgtcttcaatatcttttcaatggtcttgataccatagacacaacgactgagatcttgtggatggctgaaatagttgaaagtaactgccgggttgttcttgacatcagtgtctacgaggagaaggtggcctgtagacaagggaccatcgatcttctcaaggataaaaccaccttggaatacctctttgggtagattaagttttttatctgcatacatcttggctagtttcagg

SEQ ID NO: 1888 - DNA, 845 bp, Avena sativa
agggaagaggcggaggaagacgacggcggctcgggggcgctcaccgggacgctgctcgccggtgcggtgctggtcggggtcgtaggggggttcggggcggccgggtacgtgtacaaggaccagatcaataccttcctcacacagttctccgggttcattgagggctatggcactgctggatatgcgctgtttatacttgcctatgcaggattggaggtacttgcaattccagcagtaccgttaactatgtctgcaggtctattatttggtagtgttactggtactattatggtttcaatcagtggaacactagctgctgcagtggcctttctcatcgctagatactttgcaagagagcgtattcttaaaatggttgaaggaaataagaagtttctggcgattgataaagcaataggtgaaaatggattcaaggttgtgactctgcttcggttgagtcccctattacctttctcccttgggaactacctgtacggcttgacttcagtcaaattcttgccctacgtggtgggcagttggttgggaatgcttccaggaacatgggcttacgtcagtgctggtgcatttgggcgagctataattcaagatgagacggaaattagtttgggaggaaacagccagttattgacattgggcataggactattagttacagccattgctgctacttacgtaacaaggcttgctaaggacgctgtaaaggatattgatgaatagaatggtaggattacatagacaagagggacattcttccaatagcaaagtagcacgcattgtacatcactggcatcttttgatgcaatctaatctactaaattacgagcaat

SEQ ID NO: 1889 - DNA, 865 bp, Avena sativa
gggatcacgactgcaagcgagttcaacggcgaggttcagttcctaatcacagacatggctgtttggtggacgaacaagtaccacgtggtgtttgagaagctatccaagtaccccttgactcgacttcaacaaagacggcgaagtgcattgcttcaagcatgccatcgtcggtctgcacgcctacatggagttcacgatcgactcctcgaaggctccccacaactactccatggtggatttcaacaggttcatgcgcaggacgtactcgttgcccagggacagcgtgtccgcgctcggcgagatccccaagtccaagccgagactgctcatcatctcgaggcagaggacaagaatgttcctcaacctcccggagatcgtcaagatggccgaggagctgggtttcgaggtcgtggtcgaagaagccaacgtgagctccgacctctcccatttctccaaggtggtcaactccgtcgacgtgatgatgggtgtccacggtgccgggctcacaaactgtgtcttcttaccggacaaggccaccttgattcagatcgtgccgtggggcggcatagaaggcgtgtgccgcatcgacttcggcaacccctcggagcagatgggcctgcggtacaagcagtacagcatcgcggtgcacgagagcagcctcaccgaccagtacccgctggaccacgagatcttcaagaacccgctggccttccacaaggggttcagttcatcaggcagaccttcatggataagcagaacgtcaggctcgactgcaaccggttcaggcctgtgctgctggagacccttgaccaactaaaccaataataagaactactgattcgtcgtcgtcgtcgtcgtcctcggg

SEQ ID NO: 1890 - DNA, 607 bp, Avena sativa
ttgtcaggctcttcgcttgctgaattgtatgggcttttatgtgtctacatagaactatagttaattggatgctggtgaacactactgttatgaacattacttggttgcctttagtttctgtgcatttctgtgcggagcgcaaggactaatgaccttccaagttgctcctcaatgtgaaagttactgaagatatacgagatgctcaccttcctttgccacccttgtctatcataaggctgaaattcagatgtgccattgtgatcaaattatgcctttattgggggtgtatggcagatacaaggttttaagcttcagccatctttagtaagaggtggctgctacttttatgttattcttcttgtcttccttagaagtgagttcttccctgggtgatctcctgtcctcatgccatcaacaagccttgtatggttattgtggctttgctagttgcagtgcggatttgaagacacacatcaaggtgcaaattttgccttggcttttacagttagatgtctatcagtttgatggtagacatttcgattctgccatcctctgagacgggttgtttggccctcgttagcaatagttggttttccccctctttgaa

SEQ ID NO: 1891 - DNA, 1075 bp, Avena sativa
cgacaccgcacttgttgcgcacgttcgagcccttgcagatcttgtagtaccctttctccccccacgttttctccccacgagttcttgatgatccagtagggcttgttcttcaagcgggatggggcaaaagcagacgccccgtagccaacaagaagaacaccgtggtcaaggttcctgccgcagatgtatgggcatgacacaccaccaatgtatgtctgcatgtacgcggcgttgatcccgattgccagtggtccatgcttgaggaggttagcagcgatctgttcttcatcaacagagacaacactgtagttttgaactgaagcaacaatcttggacttgtcgaatttgcaggtaccatccttcccagtgtaagggtaatccttctctctctcaaggccaccagatttcagaagatagctgaaggctgaagtcatcaacccaccattgcatccagcgtcgcacgaatcaggttctgaactgtcacactcatggtcgcagtcgacgaactgctgctcggagagcacctccatctttcccgtcgcgaggtagttggctccctctagcgccccggatgcgctgaacgaccagcacgacccgcacgaaccctggttcttgacgggcccgacggcaccgtggtccctccagtcgaagtcctcggggaggccgtccgtgggcaggacgggcgcgtcatgggctgactcgcccatctcccgcaggaacgagcgccgcgacgtcttgaggccgaggaaggtccggcggaactcggcgggggtgaggtcggagaacttggtgaccccgtgctcggcggacgggtccagcagctggttccggcgcgcgcggcgcaggttcgccttgaacacggacagccggtgcgcgtgctcctccgcgtccttgtacgtcttcccgaaccgctgcacgaaactgacgaagtgcgagtccagctccaggtcgttgtcgccggcatcggcgttcccgacgacctgccggattaggggcgtcctcatcgcccacggcagccgtttccgccgccgacgagaggaggaggaggccgaggaggaagaggagaggggcgacg

SEQ ID NO: 1892 - DNA, 866 bp, Avena sativa
tacacagacgatgaagatgatatgatgctggttggggacgacccttggaacgagttctgcagcatggtaaaaagggtgtacatttactcctacgaggaggccaagcatctgattcccaaggctaagctgccggctattggtgacgccgtcaagccgagcctgagcaaaccatcgtccgaatctgacttgccgcaaggtgacctggagaacaatgcccaagttgccgataacaaggactgctgaacgctaactcggccctatcttttcctctccttttgggatgttgatcatgatggcctcatggggggccaatgccaccatggtcctcgagactgctaagagttatcggttgttgcttggcggacccaggagacagtcatccacatctaccttggcttgtggatcatgcccgttgttgctggatcagggaggtcccttaccagctgggaaccatcactgcggccattccatgtgacatcttccatccatgttttcatttgctgcacatttgattgcaacttcatgtccagtactcgttttggttgggtgaagaggactggtaaagaatctgcgggggctaagtctcttcgccagtaaataggagtatctaccatgactatcaagtagtagtagtacatatcagcatcagcatgttccttgccgtgcagagtgttgtgtttattccagcaacatcctcttcttctttctgccttgtccggtgtgcttaacgtgcttgggttgggtgagtggtggttggtgttgtgctttcggaatctcgaacatatcgttgttagtgcttgtgctttcttgctgccgtgtcattgactcagtgtattttttgtacatatgattgaatcggactaatt

SEQ ID NO: 1893 - DNA, 752 bp, Avena sativa
ttgccagacttcttggatgcatccattgggaagatcttgaagcttaggagcaaaattgcttcagcaacatcagctattaaatcagtttttgggcaagaagttcagcagcaggatgcagcaaacaaattggagcaactcagagaaaggatggtcaaggtgcgagagctttttcgtgacacagagtcaactgaattcataattgtgacaattccaacggtcatggcaatcagtgaatcagcaaggttacattcttccttgcagaaagaaagcgttccagtaagaagactcattgttaaccaagttctaccaccttcatcgtcagattgtaaattttgcgctattaaaagaaaggatcaaacacgagctttggatctgataagaaatgatccagagttgatggggttgaacataatgcaagcacctcttgtggacatggaaattagaggtgttcccgctctcaagtttttgggtgatatagtgtggaagtaaccttagtttatggaaaaataggataacttcagggcaactactgggttgatatgctgttagcttttatgctgttaaaccgttgatccaatccaaaaaatcagcttgagcagtaatgttgagcttctgggtagtgcagtttagcagatgctcatgcccttatttgagtaaatagcatcaaatcggaggattttacttactggcatatgtgatttgatctgacaacagggttggtcacagttgctacattgtcatgctataggcgt

SEQ ID NO: 1894 - DNA, 592 bp, Avena sativa
ttgtccagagaaactcccagaggttacaaagtctctgcgaccatttggtgctaacgaagacaaagctctctcggagtttcaagtggagttgattcagcttgcctctcagattaacggtgaccatgtgctcaacacctaccccgacattggcaagacaatgacggtagtggaggcaaaccgctacgctgaggatgctgtcgcacgattcctggaggccggcaggatcgcgcttagagctggcgcgaacgaatctgctctggtgacgatgaggcccgcactcaccagcagagctgcaatgtcctccggcttaacatctgaactttgatggatgattgttcatgattggcactacgtcagctgcaacatatggttgcatcgcctattggatagagaatctgaaacatggcttttgtacatagacaccacgatacttcgtatctgaagcttgcttcagcggatcgtcgtggtcacgctgtgatatcagctcaggagtatcgcccaacataccagatgcatgccaaaagccccgtcaggataaagctgtagatggtatttgtaatcagtggttgggaattgtacctattcagctcgc

SEQ ID NO: 1895 - DNA, 621 bp, Avena sativa
gacagggcggccgagacggcgcaggcggccaaggagaagaccgtccagagcaaggacagcaccggcagcttcctgggagagaagacggaggcggccaagcagaaggccgcggaggccaccgaggccgccaagcagaaggcgtccgagacggcgcagtacacgcaggagtccgccgtcgccgccaaggacaagaccggcggcgtgctgcagcaggccaccgagacggtcaagggcgccgtggtgggcgccaaggacgccgtggtcaacacgctcgggatgggcggcgacaacacctccgccaccaacacggccggcaaggaccacaccaccggcgccaccgggaacgtcaccagggatcactagacgtggtctcgtagttcgcttcgcctttcgtttagtccttagtggggtttcacgtaccatgtttttatcttttcatcacttccatgattcctgcacgccccactcatttagcagtttgtaagtttgctttgatctactctcgtgtccgggtctgtaatgagtattgtacgatgatccatgtacttggtgtaaatggacgacgatggcagtcaaaggtggaaataaaagttcatgttataaaaatctttacgtttaaaa

SEQ ID NO: 1896 - DNA, 885 bp, Avena sativa
ttctggtggtcaagatgagccgcctggaatgcacctgatctatcttccatactcggacgatgttagatatcctgaagaggttcatctgacttctggggatgcaccacgagctacggatgaacaaattaagaaagcttcgaatctgttgagacgtattgatctgaagaatttctctgtatcccaatttgctaacccgggattgcagaaacactacgggattttggaggccttagccttaggtgaggatgagatgccggatataaaggatgagaccctgcccgatgaagaaggcttggctaggccaggagtagtcaaagctatagaagaatttaaggcttcagtctttggtgaaaattatgaccaagaggaagctgaggcagcagcaggaaaagctgggacctcaaagaagagaaaagcaattactgatgcagcttcacagaaaaacgcagcttatgattgggcagaccttgcagataatggaaagctgaaggatatgacggtaatggatttaaaatcatacctgacagcacatggcctcccagtttctggtaagaaagacgccctcatcagcaggatcttgactcacctaggcaagtgaaactacaatagttaactgagttctgtaagacttctggtgtgcatcttatgtacgaccatagattctccctctgtctgagtttgcgataattttgtatagcactatcgtaacatcaggtgccaatggaacttcgatgtgagcttatttcaaatcatgtgctcttgtgacatgtaccatgggagatctcttagatggtagatttggtagtagcaccaccaagatctttgttggtgatgccattttactagtctggtgactcacgagtgacccattgctgtccttaaatg

SEQ ID NO: 1897 - DNA, 833 bp, Avena sativa
aagcagtgtgaatatgtcaccatatttgatgccgatttccagcctgaacaagacttcctctcagaacagtcccttcttgatgcacaacccagaagttgcgcttgttcaagctcggtgggccttcgtgaatgacaccgaaagcatgttaacaagggtacaaaagatgttcttcgattaccacttcaaagttgagcaagaagcaggatcagcaacattttccttcttcagtttcaatggaactgctggagtatggcgtgcagcagccatcaaagacgcaggaggttggaaggaccgcactacagttgaagacatggacttggctgtccgagcaaccctaaagggatggaaatttatttatgtcggggatatcagagttaagagtgaattgccatccacctacaaggcctactgccgacagcaattccggtggtcctgtggtggcgcacatttattccgacaagtagcaaaagatattttggctgcgaaagatgtatctatcctcaagaagtttcatatgctctatagtttcttcttcgtgcggagagttgtggcccctacagtcacatgtattctctacaatatcatacttccaatatcagtcatgatcccagaactattcataccaatctggggcatcgcctatattcccatggtacttacagtggtcacagcaataagacatccaaaaaatttacacatactgccattttggattttattcgagaatgtgatgacaatacatcgcatgagagctgcgttggctggtctatttgaattatcagtagtttaacgagtgggtcgtgacaaagaaggtagggaacaattttgaagac

SEQ ID NO: 1898 - DNA, 740 bp, Avena sativa
ttggaagctctttcttgcctttgccttccaggcttcttcctttcaaccacacgtgaatctctggttaaatatccagctgctttgagatatggacgcagtcctggctcccaattctgcaaagccctgctgatacctaggcgcaccgctccaacttgccctgagacaccgccacctttcacagtacaagctacatcccaaagccccaacgtcttggtcacggtaaatggccgaagaagatcagctcgatgatccaaaattgggaagtaaacatcaaactccttgtcattgacaacgaatttgccatcaccaggctgaatccaaacacgagcaatgctgcacttccttttcctgttccataagcccttcctttctcatcaacctgtccttacgcgtgccttagcaatttcttcttgcatttggcgttctacttcagctctgcttgatgttgcgttcattttctggatagctctatcttgtatttcgcttaggggtggcaatccaggtattcccctggcatccttcaagaggatcaaactgtcaatcatatcctccgtaatcccagaggcagaaatgagatccccaaatgcacgatccggacctttgagagtctccatcagctgctgctccctcgccttgttctcctcccgctgacgctccgcgtcttcgtctttcccagcaccaagctcttcggtctcagcagcctcgtctccgactcccacaacccgtcatcaagcacagcc

SEQ ID NO: 1899 - DNA, 817 bp, Avena sativa
ttttttttaagtatgtagaacttgaacactagtagcacatcactaataagaatcacaagaagaataaatagtagtagcacatgtggaatacaagactagttatacaacttggacgaaacagcaatcgaattctaaccccggtgggaagtgcagaatttgcgttgttcgttctcccccgcaaaatctgcatttcccaccgcacttgctagcaacaattccctacttacagttacaggagcacacacttgttgcgaatacagtctagctagtgggcgaggccgattacttgttaccagctgaggcggggatgtccttggctccgacgagcacaatcttctggtagacgatgtcgtcggaggactggtgcatggggtactccacaggcgcgacgggacggcgcgtccccatggagtaccagacgaagagcacgaagaatgtgagcacggcgccggcgacggcagccagcagcaacgacacccagtggtaacggttgcttggggcagcgcggtggcggcggtctgcgggcgccggcgtggcgagcgacatgccggtgggatcgaacggcagggagtgcatgaggtagggaggcccggtgttggccctgaaagcccagctgaagagggtgcagttggcgtgggaggaggagagcccggcgagcaggagcttgtccccgctgctgctaccgccgcggaggagggcagagagatcgagcagcagcgagaacaggatggcgcggtcgtggggggccgaggtggagatgcctatccggagcgtggtggatgtggcgttgtagtctatccaggaatgcagcctgtgg

SEQ ID NO: 1900 - DNA, 741 bp, Avena sativa
cgcagttccaccagcaacctggcggagaagctggacctggacttgtcggccctgcagtacatgctgaacgagtaccctggcaatgaggaggagcggatgcgggccgcgatcgggaggttcggcctgtcggggaaggcacaggtgatgccgatgaggaacctgtcagacgggcagcggagccgtgtgatcttcgcgtggctggcgtggcgggagccacagatgctgctgctggacgagccgacgaaccacctggacatcgagacgatcgactcgctggcggaggctctgaacgagtgggacgggggcctggtgctggtgagccacgacttcaggctgatcaaccaggtggcggaggagatctgggtgtgtgagaagcaggcggtgacacggtgggaaggggatatcatggagttcaaggagcacctgaagagcaagtccggccagtcagaggactgagagctgtgaactggtgttatggtttgcttgggtaatgtcgtccattgatgaatgctctagctagtattgaggtttcacgtaggtgttttgagttgttgttatggtgaactaatgcggcgcatgccatgacggatgatgccgactgtcggtagtatgctggctgccttatgtatgtgcggcaccggcgcatggcaccaatcagatgcgtgtgaccttgttaagttacctggatattttgattcttgcatgtgtctgttatgtatggtgtggtatgttacttatgaa

SEQ ID NO: 1901 - DNA, 496 bp, Avena sativa
cccgggatatgatgtccgcgctggacgtgcaggagatgctgggccttcccctgctgggcgtggtgccggaggactcggaggtgatccgcagcacgaaccggggcgtcccgctcgtgctgacggacccgccgacccctgcgggcctcgccctggagcgggcgacgtggcggctggtggagcgggacgcgatgacggcggtcatggttgaggagcaggagcggcccaagaagaagggaggcttcttctccttctcgttcttcggcgggtgaagccgcatgggtctagttgagttgctggcggtttgtatagagcaacgtactattgttgggctgtttttggtgtccgttttgctttgcctttttgttctagggtagcacggttcattcgttgtgcttttgattgactggagatacatttttgtttmcataattagctctgaacgttagttatactattcaatgtacgtaggttttgttttgatgtgtattctcatgtg

SEQ ID NO: 1902 - DNA, 492 bp, Avena sativa
tctttttttaattccaaacaaggtgcaaacatctacataaatattgtatcgttgattcgtttcatccaccagcatgaaagttcatatcaatcatagctcatacagtacataaggttgatctagtagttgtctagtacaacacacaactctcgtttgtgtttacacattatgcctcaaccagcaacgagcaaaaccaatgaaaatgtcgtccgacgaaaagaaacctatattgattttgtaagcaagggataaggaggccgttctgtcagtatcttcttctttcaggtgctgcaaaataatcgctactcttgtgtggggcccgttggcttgcctcctatgtggctatgggtgaaggtaggatcagttctctgaaggctatgtatatatgactgcacatggatcccgtgttggacaactttgctgaatctgaacctactgaacacataatcaggccgacccatatccccccggggtcgtgtcttctgccatttc

SEQ ID NO: 1903 - DNA, 490 bp, Avena sativa
gaagttcaagcggctgttccactcgctcacggagcgcaagctttatgtgtcctacgtgaacgccctggaccaggagtcggtccgctcggcgattcgctacggccgggagatcgtcaagtgggaggaggagaagcccgtgttcaactccagcgagacggtgtacagctgcgacgagcccagctcctactcccactgaccacggtgaacctttgcttgcgtgtcacgaagacgaagaagaggtgtaaatagttgtgcattttcctctccctggcgatgacgaccttttgttagagctttgcccattttcgtccttttctttcttcttagctgatcatcggcttgtattgtatggtttgtttgtttatttgttcacgagtacgtagaatgaagcgcaagaggcctgcctgatttacgattcttgtatgtattgattatcatctgatttatatggtgagcagatcgccagcatgttctatttagtaaaaaaagt

SEQ ID NO: 1904 - DNA, 850 bp, Avena sativa
agtctgaaaaagaattacatatttcaaaactcgagagacaaattacagtgtctgagctaaaatacatggaggagatccagactatgcaagtggaaacaactgaaaagaacgaagcacttacaaccaagatgcaggagcatgcagacgtagtccaagcaaaagatgagttggagcaacaattgctggaagttaggaaggaactggatgctgcttaccacaccatagcaaatcaggaagagcaagcttcagtgagggagataaagtgggatgcttataagacatattcagcggatcagctagaagcccagaagcaacatactgaagatttggagaaacaaatcacaactcttacagagcagctacaattagccgaaacacagtacaagcagaaggttgcagaagagagtgaaaaactcacccttgtcaatacagagctgaacaagctgacccaaaatctgagcaagagtgttgaaatggagaagaaggtacaggaccttgagcagaaactgcaggcaaaggatgcagtggtatcgtcaagatcccgagagttcagcctggactcggcaacaccgcaaaacaaacaacatgacagatctcaggctcctggcgctgcgcctgcggcacaagaagtgcgggagccttcgggtatcatggccttcaagttcatcctgggcgtcgccctgctctccgtggtcatcggtgtattcctcggaaagaaatactagtcctgctcttgtgaaaccgctgctggtgccctatgggaaatcccgctgttaaaagttaaaactgcttccatgaacctaaactgctctagctgaacacatactagtttggtttggtggactgctct

SEQ ID NO: 1905 - DNA, 967 bp, Avena sativa
tcaatggctgctgactgaggagggccactgaaagtgctaaactaccctcaagtgcactttattgaaaaagttcaaaagcgtgttgaaaaatatcctcatatatctactctaacaaagagcacatgatcaggctatttctgtacttcagcgtggcccatatttttcagtctgggtgtgaacatgacatcttcctttttttgcaactgcaggttcatatgcagtaccttgaagcaggtgccgacgtcattatttcctcttcctaccagggttcttggccagaggattactcatggcggaggcagaggggttactgaggacaagcgtccagctggcactggaggcacgagacgagttctggaagtcggcgctgaggaagtccaagcccgtgtacaaccgcgctctcgtcgccgcgtccgtcgggagctacggggcctacctcgctgatggttcagagtacagtggatcgtatggagacgacatcacggtagagaagctcaaggatttccaccggcgccggctgcaggtgctcgcgagcgccaggcctgacctggtcgcgttcgaggccattcccaacaaaatggaggcccaggctctggttgagctgctggaggaggaggacatccaggtcccttcatggatctgcttcagctcagtggacggcaagcacctctgttcgggggagagcttcggggactgcctccagatcataaacgccagcgagaaggtcgcgatcgtgggagtgaactgcactccaccccagttcgtcgaggggatcatccgcgagttcaagaagcaaactgagaaggcgatcgcggtgtaccccaacagtggggaagtctgggacgggagagccaagaggtggctgccggtcgagtgcttcggtcgcaagagtttcgacgtgatggcgaagcggtggcaggaggccggcgccagcctgatcggtggatgctgccggacgacgccgtcc

SEQ ID NO: 1906 - DNA, 757 bp, Avena sativa
tgtcggagatcgagagggtttctgatggaggagcaggcggcggaggcggatgcggaaggggtggaagggatcagcgtggaggagttcttcgacgcgctgttcgacggaggggagggggccgaggagggaaagggagtgaggctgggggcagcacggatgggggactccgggagggtggaagaggaggccgaagtggtgacacccgagacggaggtagaggtggaggtagcgacaccggagacggaggtggatggcgatgatcctatcagcaagaagaagaggaggcaaatgagaaatagggattctgccatgaagtcgagggagaggaagaagacatatgtgaaggatttggagacgaagaacaagtatcttgatgcggagtgccgccgcctcagctacgcactccagtgctgcgtagctgagaacatggcactgcgccagagcatgttaaaggataggcccgttggtgctcccacagccatgcaggagtctgccgtactcacggaaaccctgccgttggtttccctgctttggctggtgagcatcatgtgcctattcctcatgcccggactacccaacagaagcctggtggctccaaagagcgccggaagagatctcgtgatggtagccagaagctaagcagtgataaaccagagactttggagcttctgcttcatggaaggcgctgcaggggcaccagggcgaggatcaagttagatacctctgccatttcatgcagctgctgcttgctaggcta

SEQ ID NO: 1907 - DNA, 814 bp, Avena sativa
caacagtggattgaatgatcgtacatttacacgaatatgaccatccagtgttccaagaagctagcagttgacatttattttcttcttttattgtcctctctttacaagaatataatgcacattgctatgactgtcagagaaattatatacctgatcgtatcagaaaggtacaacaacatttgcaagcgatggtttccaagtaactgctgtttccatgaaaacaacatcgctgttgcacctaaaattacacgtgacatcttgtatcttcaccgctgataatccttttattgttattctgtgaggccaatagagttgtcgattccttacaacgggaccatcttgggatactcttttcctctttgctccagaacttattgaccagcatctttaggaaagccctgaagtcaacaacaaatgaagttacaatctccagcggcgagcaaggcgtacgacctccattgacataatacacaaataagtatgagtcataatgctgtcctcttatgtagtagaacattggaagtcttctggctagcttaaatagcatcttcttgtaaaagttaattgcaggctggttatatgaaatgacatgtaagtaaacacccctgcaatttgatacactcgcagcatgtttaatcacctctcgaaccagggaagatgctatgccgaggtttctgtagctatccactacaccaagcgtcaggatataaagaagtgttagatctttgtgcgagtagttgtacctaaataaatcctcaatctcrctatcttttgctgcaatcatcctcgtggttacaaagcctatcagttcatc

SEQ ID NO: 1908 - DNA, 798 bp, Avena sativa
gcctgaccgacgatgacctggaggagctcaaagggtgcgtggatctggggttcgggttcagctacaacgagatccccgagctctgcggcacgctccccgcgctcgagctctgctactccatgagccagcggttccttgacgagcaccagccgccgtccaaggccgccgccgagcaggtggttcctgagccgccgccggttgttccggcttcgccggcgcagtccatccccaactggaagatctcctgccctggtgacagcccagatgaggtgaaggcgaggctcaagtactgggcgcaggcggtggcgtgcaccgtcaagctctgcagctagtcaatttgcatcgtccaaacgcaggaggaagacgaagccaactcatattcattcttgatccacggggcatctgttgcgtttaggatgctcccagcggaaacccagatcttctgatgaccagtcggagcacgtcaccgaattacctggaaatcgcactgcatcgtcacggcaagcacaagatgtaggatggatcatcacgcatcattcccaactgattctgatctcgtcgatgctgattcgttcagaattgcgcctcgatcgacggtaagaagccaagaaaccaagaagatgtcaccagccatgtccgtctgactctgcacttgcatatgaatccttgatccaaggttgtagctactcatcattcattcatgtaaactactactccaacctcatgtataatgtattcttcttattaattcattggaaataaacaattgatactcctactagtagtaccaatcaaaaa

SEQ ID NO: 1909 - DNA, 758 bp, Avena sativa
gcaagccccgaccttgcagcactcctccagggggagccctttcaccagcccgtacaggaacccgcttgcaaataggtcgcccgcgcccgtggcatccaccgcgttgctctccccgattgccggcacttgaactacctgcttgccatgcttagcaaggcatccctttgatgcaagggtcaccacagcccacttgcagtacttggacaggaatgcaagtgcctcctctggatcaaacgttagccctccccctatgatctcccttgcttcatcctcattggcgaagcaaaggtcaatgttgcccgtctccaaaagggcaactagttgcgacctatagtcgcgaaccatctcaaaactagccaaatctaatgataccgagagaccttcttgttttgcaaccctgatagcctcaataatctggccgagattttgttgtgcatatctcacaaccagccacttggagccttggaagtcctccttagtgaactcattggcctggagcttgactgcactagataggcatgggcgcatggtgcgattgccacttgcatcaaccaagcatgcacactgcgcagtgtgccccttttttgcccttaatctcgtgagatctacaccactacagctcatattgttgacaaacagaacaccttgatcatcgtctccacgagctccaattattccagttgatatcccaaaaccggctgagagccctcgaattgtattagcaacactaccaccagccatagttcttaccggagtga

SEQ ID NO: 1910 - DNA, 591 bp, Avena sativa
acacagttcattatgattttaaagtttggaacattcttaaaaaaatgaactttactttcatttttgttgcctcggccagctggtatctgtagtatttatttttgggaacatggactaagtaggaccttatctatctagtattatgtgattctccaggtttggaacttttgtgtttgcaaaatctatctttcgaactcagtgacccagaacaagctccaagtggccttaatccccctatctgcttcactgtttgctttctctgtccttacatgcgatttttctcttgcagtttgtttatctactgttattttgttcctggtggtgcttgcacggttccttggaatggtgtggatgcagcctgtcatgccatgcggcttgagatttttgagggaagttatgccatgtatggttctcagggatcagagatggccatgtctatctctgtatgggctagctgtgtgtgatgcgttgatattatgacaattggtactagaaaagtcctctcgcttttggttttctgttaaactgtttttagcgtatccttgtcttgtaattactcagttatgcttccctggtattctcagcttatgt

SEQ ID NO: 1911 - DNA, 767 bp, Avena sativa
aaagtcatataaatcagagaagattcttggaaggctttatcggtcaattcaagaagcctcgggcagcgatttggtctcagaagaagcttgctgcggctcaaatgatgtgccttatgatgctgatctggaagttcctggtgcatcagatttcctcgcggatgcatggcaatgcaagtgcctgtacgaagcgcagctagacgcattgcttaaccaatacagggtccgcaccgaagcagagcttgtgacagggcacatgtggtcccttaccaagaccaacagcaggaaacagggggagataaaggagaagctcaagaacgcgtacaacgcattcaagaaggagtaccgatctatttttgaaagcgtcacatccgatgggtgtgaaatctctgatgatgagaagaaccgtttgtacgagatgaaggcatcggcgtggtaccaggtaacctatcacccgaaatggatcgagaaatcgagggccatgctagatccggatagtgacgaagcgccggtaaagcttagctttgcatgggtggcggtggattacttggtgcggataaagctcaggtgccgtggagaagtgaaagtcgaaggccggagacctgctgaaagactggcagcctacatttctgagaggatatgaggggctctcactagtcccctgcaagattgctgcaagaccactctgccaatttgtttttcacaatgccgtttggcatcgctcagctgttgccattttgggccatttaactttctgctgaacttgctac

SEQ ID NO: 1912 - DNA, 750 bp, Avena sativa
tccagggctcgacagggaagctgcagactaatttccatcgatgggaccaagttgcttcaaataccggagaatatgttcatctcacaaaagagattctcaccagctgcgaaagcatcgagtggcaggtcgatgagttggaaaagacaatcacagtcgcatcacgagatccagcatattatggtcttgatgaagttgaactctctagacgacggaactgggttggctctgctcgtaatcaggttggtactgtcaggagagctgttgaaaaggggaagaacagttctgcaatggcaagacatcaggacctaacgggcacaagcagaagtaatcactattcttcccaagacaatgatgactttattgacttggaatctgatagacagcttctactcatgaggcagcaggatgatgaacttgatgagctcagtgagagcgttcagaggatcggaggcgtagggctaaccatacacgatgaactgtctggacaggaaaggatcctgaacgacctaagctttgagatggaaactacttcaaacagacttgactttgtgcagaaaaaaggtagcagcggtaatgaagaaggctggcatcaaggggcagatgatgctgatcctgttcctggtcgttgtgttgattgtacttttcgtcctagtgttcttgacataggaatactggtactgtacgcgtagctacttactgtaagttgtgtgtagaaatatatgtagtagtacaagttattacccattttac

SEQ ID NO: 1913 - DNA, 518 bp, Avena sativa
tttggtttaccaatgctcaagaatcaggttactgccccacccagaatagctgccactccaaattttacatttcacaacaggtcaggttaatatgcaaagaaatatattacactagtacaacaattcatcagcgcttgaaatataatgcgatgagcacgaacaggttactgacaattcctcaaggacgagaagcatgataactaggtagggaacttcagatcgtatcgtaactaggtggggaacttcagatcgtaccagatatctatctccagcaaaagaatgaaccaaagatgcagagcattgcaactcttgataacaccacatacagagatgcaaggagctcatatttctcctcggtaaccgccaccgccatagtaatctcttctggagccggcgatcgccacagacttctggtgctccagcttcggacagtcagacgagacgatgtccaagaccaccacagaatgcacatcccttgacaccactctccttggcgatagcctccgcgtcctccagcg

SEQ ID NO: 1914 - DNA, 775 bp, Avena sativa
atgaaagtacgaaatcgaacccggacctctattataattgtgccatcgctaacaaatacttagagaatttcgaaagggcccttagtggatttgaagctgcggctttaaaggaccctgaccttggcgctgatacagaagttcagaagatcaccagtctccttgataagctagtgaatgcaatgaagagacaactacgatccaagcgattagcatcattggtgtcttctttggttgaagtcaacttaaaatctgcccacaagaaagcaaccataagcattctatcagagggtttgaacaagacggttgctgttttggcgaaggttgtgcttttgataagacatgacgatgttgctccactgtattatttagcatgtgactcggatcagtcttattttatactatcagtttatgggctacgaaatgaggcgattaaagaaggtgaccgggtggcactgttggaaccatactacagaacgctgaacatacggtggaaagagcagcgctaccagtttaaatcgatccgcgtggacttcccggaacaaattcttatcaatgagaaagcagcagctcctcatcatgttatccgcgcttcgatctatgcacgcaataaagcatgactgttggcaaatgcgttgattcttgtcccatgtttgtattagagacaaagtatacgtgcatccatggggacctcgttgtcagcgattgatacgtgctatttttcgcttggtgtggtgtcggttgaagtgggagactcattgtgtgtgtcatgtaaata

SEQ ID NO: 1915 - DNA, 334 bp, Avena sativa
caaggatgctccgggtgatatttttagatgcaagaaacaaggaaggaacgaatttgttatacgcctgcagccattggaatccatgtatatgaaattaactgtaaagaaaccagggctagaaatggcaacagaacaaagtgaactggatctatcctatgggcaacggtaccaagatacgaagatcccagaagcatatgagcgcctgatcttggacacgataagaggtgaccagcagcattttgttcgccgagatgagctgaaggctgcctgggagatcttcacccctttgtgcacgacattgatgccggcaagctagaaggccctgccataccaa

SEQ ID NO: 1916 - DNA, 857 bp, Avena sativa
tacgctggttgctgacgagatgcaccgtaatttacatcttagcatgctaaacgaccaaagaataccggccaaaagggaataaccggcttttccttgcctctgatttgctagcatacttctctgtgtccattacaattgtttctcactgttgtcccaccgtccatgctgatgtaagcaggccccaagattctagaatttgaagagcttattgtgtactttcaaaactagccggcatgtcaacgagactcttgtcgtcgtcctgtggaaggtatcacttagatcggagccagcacggttatctgctttaccttggctgcaatcagagcttagatgcttgaattgtgggcactgcgagatatttgcaaccttgtctagattatgcagctcattatcttgtataccatgcagaaagtctgtgtaagccttatccttgaatattaacaggctgcagggcattagcagaagtgacaaagaagcaggatcagcttcctttgagccttcaaccttacaggaaccattactctcctgcagttcattagactctacggtttggggatatgtatgttcgtgccctctaagctttccgtggggtgtgaaatcaatcacaactggtgaagcaagggatatgatagcaacaacagggaaatatgcaggaccatcttggtgtggcatgatcccttgattaggataatattcattaatcagaacatgattgattgatgaaggaaataaaccagtccactggcagattctgtcggttacctttgtcagccatggaggtaatgcctgcggcagtagccccttctcgtgcaccactcctccccagttctgcagccgccggttcttcagagtcttcc

SEQ ID NO: 1917 - DNA, 493 bp, Avena sativa
ctgaatcgtcctccactgatgggcaggccaagctttcagacatcgaactctttctagacaacggtgctgctggtgttatcaaggaaggtagcttacaaaaaatgaagcacaaacagaagcagtgcactcccctcctctcaaataagactcgataccaatcacggaaggtgaatgccgagtgtcgcccccgggtcaaggggaggtttgtcagccaggcatctcttctgcagaatgccgtgaagaaagagacctagggcaagacggtcttgctcccatggacaatttttggggattttactctccctctagaagtgaagcatatgaaggcttctgtcttctcatgtctgcacttctgagatgatgtagagggtagggatgcctgtagagtggcttgttctcatggggatgagatagttcctggcaactttctcagctcagatgctgaggtaaagagtgccataagccaaagcttatagcaatggtacagtgttgt

SEQ ID NO: 1918 - DNA, 769 bp, Avena sativa
atgacatccggttctatatctatgaacttcttaaggcactagattactgccattcccaaggaattatgcatcgcgatgtcaagcctcacaatgttatgattgaccatgagctccgcaagcttcgtttgattgactggggacttgctgagttctactttcccgagaaggagtacaatgttcgtgttgcttcaaggtattttaaagggcctgagttacttgttgacttccaagcttatgattactctttggacatgtggagtcttggctgtatgtttgctggaatgatattccgcaaggaaccattcttctatggccatgacaaccatgaccagcttctcaaaataaccaaggtgctaggtactgatcagcttaatgcttatttgaacaaatacagaattgtgcttgatcctcagatagaggctctgattgggagccacagcacgaaaccctggtctaagtttgtcacacctgagaataggcatctggtctccgaagaggcaattgattttctcgataaacttcttcgctttgaccaccaagataggctcacagccgaagaagctatggcgcatgcctactttgagcaggtgagggcagcagaaacaacagagggagaacatagccaagagaaccaagagaatggacccgaactgcttctgttgagccgcactatgggcagggcattgcgggattggatccttctagcatgaggagtcgatgcaaatgttgattgccggattatatagttgtcacatgcatctcagatatg

SEQ ID NO: 1919 - DNA, 591 bp, Avena sativa
catgcttcgtaaaagggctctctacaatgacatgtcaaggtatgtgtgttgtgctggctatatgccatgcagtggcaagtgtggtgaaagaagatgcccagaattctgtcttgcaactgaggtgtttctgtgctttggcaattcagttgcttcaacccgcttcttgcttcaagatgaattcaacatacagacaactaagtgtgataactgcatcattggtttcatggtatgccttcaacaagttgcttgcatcttctcaatagttgctgctattgtcggcagtgaggaactttcagaggcttcccagatcctttcctgcctgtctgatatggtctactgctcagtttgcgcctgtatgcagacacagcacaaagttgaaatggacaagagggatgggaagtttggcccacagcccatgtcagtgcctccggtgcagcagatgtcacgcatcgatcagcctatccctcctcctgctggctatgcgccacaaccagcatacggccagccttacggtggctatccacctcccccgccaggtcaaggctacccaccgccgccagctcaaggctaccgccaggccgttaccggcct

SEQ ID NO: 1920 - DNA, 310 bp, Avena sativa
cttctgaaaatctgtcgatggcctttgttgcgtgctaaacctacttcacatcggttttattggcgagactcgagtggcaacaccttcaaagtcaatagctctaataatgggcactgattgggggaagaaatagcgctgtctgcctgtcatgggaaggaccacatccaaaacttttctgttgcgcaaagctgttattctacctaccactgtgtcttctgtcatcaaacaatgcattctcgcggtacctaaactctcagtgtggcttatccactggctattgcatccatgtaaaaagatgtataaccgtagt

SEQ ID NO: 1921 - DNA, 747 bp, Avena sativa
ttgcgattgagggagttaccagagtattctttggatctgattttgtaactgtgacgaaatcagacgaaacttcttgggactatcttaagcctgaggtctttgccgcgataatggatttctactcatctgggcagccactttttctggactcaaatgctgcagctgctatggacacagcaatccatgaggatgattcagaaatagttgctatgataaaagaattgttggagactcgcattcggccagctgttcaagatgatggtggtgacatcgaataccgaggatttgatccagaagcagggattgtgaagctaaaaatgcaaggtgcctgcagcggctgtccgagttcatcagtcaccttgaaatctggcatagagaacatgctcatgcactatgtgccagaggtgaaaggagtggagcaggagtttgatggtgatgaggaagctgaactggctagccagacagaatgagcttctaaggtcaaagtacaaccctgtaacatgttcagggaaaccatgctatgcatgaaatgtttgggagaattcaaaccacctcccaaaaccacaggttatcactatgttttgtgagataaaccaggaatagcctgaagtttttgcgatgattagatggttgtaattttgatcagatgtattgaagaagcagactataatacatggtagaggcaacagtagcctgaaccaccattggctgcactagggctgaataaagtgatagttgattgataaa

SEQ ID NO: 1922 - DNA, 678 bp, Avena sativa
gaagagaatcatcattaacgttaacgtttacctacaataaaatggcttcaaattaactggctaatgcgaaaggcaaggacagagacggtctgccgaaacatcaacacatgggagatcacagtagaaatctcgagttataaaattaccatgcctgacaaacaaatttacagaattcgctaacgaacaaaggtaatagatggtcctccagacgctacgtatctcgctgaaaaccgagcagtaaactgaagaagaaactgcctagcctaggtatcgcacttccacttggacgtcggcacacagttcaggtagtggcaccagtggcaaccatcgttcccattcttgcccttgaagagcatcaccaatgaaagcgtgaacctgattagcagcaagacgagcgccacaacccacagaacatattggtacgccttgtacttgggaggctgattagtatggggcaactcactacgttccatccaaccaaattgtggtcttgccaacaacacaaaccccagaaggaagcccgcgataaatccaccaatatgagcaaagttatcagcatgcggtagtatcccgattgccacgttgatcacgattatgaacaggagagtcattatagctgcaaccttgttggaataaatagtccagttcataagtagctcagaaagcatagatccaagc

SEQ ID NO: 1923 - DNA, 873 bp, Avena sativa
tgttattaacttattataccgggagcaatctaagcttgaagccatggtctacctaagcccgtccagatccaaagtacacgaggagctcctcgatggacttctacaggatgggaaaagctcaataataattgtttatcgaaatttgatggaagccacaactcagcaggagaaagtatccctatgtctgcagaagtatccggttattattatccgttattgtaacctcaattcaaattcatacaccgggttgccgtgcctagtattattacatatccgtccatgtcaggatggcgagggtgtgccgcccgccacaggcaacatagtttgcttgccataggccggcagagccggtgctggactttggcggcggcaagtttatgggcacttccattgggtggcccgttgtcaccttcctaccatagcctagacggccatgatcgcctctcccgtaagagaatatccgtccatcactagttagcgcaactgaatgggtccctccacacgacacctgaacaatatcctctccagctagaagctggacctttaggggcaccatgtgactactcttatcatccccaaagccaagcctcccatgttctcctcttccccaagcatatacctctccctctttagtcaacgcagctgaatgccaacctccagcagcaatgtcaaccaatgaaaggtcagatagcccttcaacacggattggttgcgatcttggttgggtatctccaatccctagctgaccatactcattattaccccaggcccacaagataccgtcttccgatagtgctaaattatggaatgccccaacagcaatcatgctcacttgttcaagcccttgcacgcgtactggtgtagatattttct

SEQ ID NO: 1924 - DNA, 656 bp, Avena sativa
tggaaatttcttcaccaccgcgcttttcctcgattctgttgatgtcatggaggaggtcgaccaacccagatgaggatcttctcgcaatggacctaaggtgacaaagatgcaggagctcccacccgaacatcccaaagctcaaatcccacatcgcagcctatgcagttgtgcaggtggtggcggagcataaattttaccagccagtagcaggacatatgagctaccggagatgaagggcgtggctcagctgcgacaggcggcagcggcggctgccgagctaaggagctccggggagtagcagccggccgaacagagagtagcaacggctattgtacgtggataaggagcaagcaaccacaccgctgggcgagcggtggagctcctccgcaacagatcatgagcgcgtccaaccacacgagcaggttgcagatctggggcagcgatgcaacgcagatgttgtgcggcgtgagcgcgtccacgtgcacacggtcggaagtcaggatttttaatctatgctaattttggtatgatttgaacctatacggatttgtttgtatttgaactttgaatacacgcccttgtcaattagacgggcatgagggagtatcatttttagctgaattatttcatgaaagacaataactttaaccttaaaa

SEQ ID NO: 1925 - DNA, 784 bp, Avena sativa
  modified_base (717)..(717): a, c, t, g, unknown or other
cagcaacgttccacaagtgtggttgctgaatcaactcatgaaccaaaggttgtggaatccaatgttaccgaaaatttagtttataatgaagagcaaaaaaacccatgattcatcttcgaatggcagctctactggaaagtttgaacaccaagaggaaaagggtgagaaaattgcatctggcaagcagtctgtggagcatgtacccaggaagcagaatcaagcttccgattttgctggatcaactactcagatccacttgaacaatgcggtaccagagttgaagtctaatgttgtgaatcaggctgacacacttgcatctgccggtggtggtgcggtttcatttttacctcacgcaccaaaggagcctgtccttctagacgaaagatcccttctagcttgcattgttcgtgcagttcctgctggatctgataaccgaatcaggataagttcaactctgccaaataggcttgggaaaatattggcccctcttcattggcatgactataagaagcaatatgggaagctagatgattttgtggctagtcataacgagctttttgtgattgagggggacttcattcaccttcgagaaggagcacaacagataatttcggctacaacagctgctgctaaaattgctgcagctgcagctgcatcttctgcttcttactcatcgttgttgcctttcggttgctgttactccggtggcacaaaacncccggcaaaagagagggcctgttggtgattccagatcttcaaattcaataccatcaggaaatggctc

SEQ ID NO: 1926 - DNA, 852 bp, Avena sativa
agcagatatagtttgctgtatgcagaatttacagatagttatgctttgaaagtgaggaacacgcaaagaagcttctcaataatgcatcatcgttgctcaaacctggaggctattccttggcataattcctgattcatccacaatatggacaaaatatcaaaagaatgttgaggcttcacataataagggtctgaaggctgttccaaatagtcatccgctccgagaattatacaattaccttcgaaatcgaggaagaaaagtttcctttctttggaaagaagtaccaactcaaatttgcaaatgaagcgttgtttgagaatcattgcttggtccattttcccagccttatgagattagcaagagaggctggacttgaatatgtggagatccagaatttgactgagttctacgatgataacagaacgcagtttgctccaatgctaggtaattatggtgcaagtctgctggatcctcgtggaaagctcgttgcccgctcctacgatattttaggcctgtattccacttttgtattccagaagcctgatccagatgcaataccacccgttgtaacacctgacctgaatgatgctgataacgctcatgaagaggaagtgctctggaggcagcaggcaacagcggatggacgggaggcgctcacatgcagatgtcattccgcttgatcctgatcagaaaggcatcctgggtccgggccctgcagatatgagactttagtttgccagaaattcagatgtacacgtcctcagttgatgatccatggctctctgctagctacacaatgtcatcctccgttggaacctatcccccacaagaaggccatgccgaaaccaacca

SEQ ID NO: 1927 - DNA, 955 bp, Avena sativa
cacctctgcacagcatatctagctgcaatcagagatagccccatacgaagatgcaaacatcactagctgcaatctaaatatgtaataaactagaaataatataggtagctaatatcactaactttaatctaaaatatgtaataaactagagtagaaaaaaatatgggtggttacaagaaatacatgtgatataagcatggctagaatacaaggatctgcctggcaacaatgagaagccccccaccaaggcacccacgccctcctcggctcctcccaaaataagggctgtacgactacctcctttctggaagtaacctccaaatcatcatgtacaccgtggacagcggggtccattagaaatattgacaggatttccccagaattgtgatagatgtttcatcagaatacttcactggctttgccgccaagatccgatatatatgacaccctcctcgaattgtttttcactctgattcctcaccactagcacttaaaatcctcgctaggtcctggacaatttcagacattggcggcctgaattctggttccggccggacacaatgactgataatgtcggcaaaacgtgacaacactttctcagaacactctccacgaatagaaggatcaaccatctttgttagggaatcaatgtcatgaagctgagaatcagcccatctaacaaggtgttgttcagcacgagggcgagaactgtcatgtggtttacgaccagtcagaagttctagcattaccacaccaaaactgtaaacatcacttcgatcggtaaaagtcccagattcctggatttcaggtgcctcgtaatttagtaatgtccgcatgcgacctgacaactgtgtaacggaacttgacaacatcaataytgacagtccacattcagcaacacgtactgagaatccattactaagaagaacattggctggttcaaattctgatgcac

SEQ ID NO: 1928 - DNA, 907 bp, Avena sativa
gaacttcacacaacaagcatgtatacatatgtcactaaaactcacaatttacaagtgtgacaatactcctagagggacaagaggaaataaaaatcactcatcccttcaattacattacatgatcgaaaacatcgataaccgcaagcacactatgacagaaagaagcaaaaccatcttctttctataggtatccagcttaacctgctaaaaaacctattcataaccccgaggtcccttcttccgcgcaaggtattgaggtcttacaaccactgaatccacacacagacctcctttagtgtgtgtgcagtctatctgaaccattgcaaactggatattcagcggctcgttcgagttcttcacgacaaaatcgccaacatgatggtagatccagacacctggatcagttagataacacttggactgagcctgctgcccatcagaagtcgatagttggaagcgcaccggctttatgtcccagccatggatgtgctcggtgctataaacccggcgggcaagccgcttgaaaggtctgcccagatgaactcggaagagcaggctgtatgtaccttctgggaagcagaactctacctcccctctgacttcaaaccaccaaatctgagagagatacgcaaccgagcggaaccttgattcatcgtttggaatgaagttccagtatctccgatcatcaatgcctgttatcgagagcgcccttgaatagattgtcatgcaggtgcctccaccagccttgtcgagccagaactccttggtgccaccgtcgaggccgttgcggcggcagagccgcgcgtacacctccttcttcgggatcgcctccgcctccaacgcgcggcttcctcgttgccaccgccttcgccggcggcggcgaggagccgcgcgtagttgcgcggta

SEQ ID NO: 1929 - DNA, 363 bp, Avena sativa
  modified_base (325)..(325): a, c, t, g, unknown or other
cacaggtcggagtaataccgatgcggtttacttcaacctaccttctggtgcccctgtttgttctccttggactggtgggagtatgcgtgaaacttcgaaaggcgcgtaagcaagatggtgcgccgacataccagaagctcgacgcaccagagctaccgatctccatcggagggaagatagaagcggatcagcctgatcagtgggatgacaactggggagatgattgggacgacgaggaggcgccgtcgacaccatccagttctatgcccaacctgtcgtcgaaaggtctggcttcgaggaaatcgaccaaggatgcctggaaagnttagatggcaaatcgggtaatctgaatcaaatggatca

SEQ ID NO: 1930 - DNA, 630 bp, Avena sativa
aagaaggttctgatgaggtctcgtctcgtccttcaggacttggtacccggagcagtagtaatcctaaggagaggactgggcatttacattctcgggccaacaagaggttctccttgcctgcgaccggtatagaagctggcaaacgcctgacaaataaacctacgcttacccgattccccaagtctaccgaagactccccgacgctggaaggaaagcatcgtcgtgccggttctgttgatctgttgcccaagagagttgagctgcaggtgtgacaagccatccagatcccacctatcgacaaggttcgcagcctgcaaactgccagccatagccccgccatggtgctggatatgtcggtggcctacacagactacaacgatgcattggagcagtgtgctctgcatccttgcacttctggccatatagacatgcagtcagaatcagatgatcgtatcgtgagatgagatatagtagtgcttgggtatatgtatgtgccggtgcctgaagagctggaggttattatatttttgatggtattgtaggttattactgaattgattgtactgcggtactactgtatttgtaacttttcttttgaagttttgtgtgtttaagatgtccaagaaaaaa

SEQ ID NO: 1931 - DNA, 689 bp, Avena sativa
cggcgacgactactatgtctgcagattccaggaaactggattcgaagcaggcttcgcgagttttgacttaaagaggttcttcaaaatggcgataactgttcaaaccacgggttcttctgctatgtcccttaaaaaaatgcaggcaagcaacaaggaaataacactgccttcttggctatctgaggaggacatcagttacctagcaagtgtatatgcaaagactggctttgctggtggtcttaattactaccgctgcttagacctgaactgggaactgatggcaccatggacaggagcaaaggtgcaggtgccaaccaagttcattgtcggagacggtgacctggcataccatcacccgggagtcaaaggctacatacacgagggagggctcaagagagatgtacctatgcttgaggaggtggtggtcatcaagggtgctggccatttcattcagcaggagagggcacaggagatcagtgatcacatctatgactacataaagaagttcgacacgggtctctcgacaccgaaattatcaaaattgtgagatagttgatgtacatagttaataatcaagagactcaggtgtgattatgtggccgtgagaacttgtatgcaactcgaaaacctttaatctgtgaattccttcactggaaatagatataacacgaggtgtagttgtacactta

SEQ ID NO: 1932 - DNA, 528 bp, Avena sativa
tttactgctctttctattgggcgatctaagtggaatggtcaagtgggtagttctggattagtagtcacgttggaaacaccccttaacaacattggaaggccatcattatctgtgcaattgaatggcggtttcgagatttgatgtcttgcaccgaagttgtacataccactgtacataacgccgccactaatttcgatgctctgtactagctgggatagcgcctcgacctgttacgtgtatttggaagagagatgcagcttgtgtgtgtggcgataggccttgaccaggtaaatctactgtttggttagccatgcagaccgagacttccatatgtctccaagagtttgtgatcaagcgataaaccagttcaagtgctctcttctggaagtcagaaagatgaagcttggagctcagtctagtttgtggattggaggttggagaagttgccatgcaatggacatgctgtgagaagctttttggtgcaaggctggcwaawttttataattttgggtgctgaattgtctgcca

SEQ ID NO: 1933 - DNA, 620 bp, Avena sativa
agcaaaccaagctatagagcttcttataagaaaaggagttcctgaggaccagatcatgtttcttaatcttatctcggctcctgaaggaatccactgtgtctgcaagcgattccctcgtctgaagattgtgacatcagagatcgacgtcgggttaaacgaggattaccgtgtcgtccctggattgggcgaatatggtgaccgctacttcggcacagactagttgaccatcggtactgctttcgttggcattgaaaaatgataaccggattagacctaacaggagatatactggtgtttgatggtgtgtggtatactagcagagtggggcggagagatcactctgctaacagttggacgtaccaagccgaagggcacacgaggatgtgcaccttcatatttcatatgactttagctagacacatctggtgtgctgctctttctgttcttgtaacgaacttggcccttctgtaaaatgtatagcttgccttggattgtgggtctgcggctggtgccgtgctatttcagttgtgtgcactgcatgctcagttgaagcttaataaaatatacattggcaaagctagcgctcttgcataaaaaaaaaaaaaagttaaattaatcgc

SEQ ID NO: 1934 - DNA, 759 bp, Avena sativa
accagcttcttgactttgcagggccaccttctgactgacaggcagcgatggtggtggatggttgtactgtttcagcaggcaaggacggagagtacaagcacagtagcaccatccttgtatttacatggacagtattggtaccttctaaaatcagagacagtgccactggcctttactgccaaatcaaacatttactgagacttctgtctcaggttccttactttcctccagttgttctatcacaggttcgtccccatccaaactactttcctccaattgttcgatcacagcctcatctacatctgattcgtcttctgattggtccatttgtccttccgcactgccctttttgtttgccccatcttgttctttctgtatagctagtttattgggcacaagaatcacatatatattcctctctgcaaaattcttacttccttctgttgctagctcaccaacatcagtttggaatcttctgagaagttcaatcgcttgtttttgtacaagttctcccggcctttcagattttaccacaatctttaccttgtcaccagctttaagaaacttctttgcagctctaagcctgacactgtaatcatgaatgtcgatgttgtaccccattttcagctctttcaagcccatgcgttttgcaacagatcttttctgctgaactctttttttcttctgttgttcatacttgtgttttttgtatttcttttctctttcaaaattagtcgaagtactggaggatctccatct

SEQ ID NO: 1935 - DNA, 341 bp, Avena sativa
  modified_base (266)..(266): a, c, t, g, unknown or other
tacacgtgaacactgccattggcaaaactttgaacccagacttggtatctgttctcaagacatcatgctttccattaaatcctcatcagaggatggtaataaaagttcatacagacattacaaggggaatggaaaggactaaacgaacaacgaacagggataaggattgcagaacaaacgaacacattggtaaaatcgcctcaagttgcaaaatgctgcacttgccacagtcctcaacatgattgaggctgctgctgcttgggttnctcgccttgccaagcccaaaactatgtccttcagtgctggcctcatgtcttggttcaagaccttctggtactcca

SEQ ID NO: 1936 - DNA, 711 bp, Avena sativa
cgctggtgctcgagacttgtcgttgatgctcgtgggtatgccattgtcttcgtcgccaatataactacagctgtttatcttgctacgataaatcgtattggaaaatcgagtggcctgaatagctttggcctgatgtggtgcaatggacttgtttgtggaccttgtgtactcttcttgacatatattcagggtgatctcaagcagaccattgaatttccttacctttattcgccaggattccaggtggtgttgctattttcgtgtatgctggcatttctgctaaattacaccatcttctggaacacaatcttgaattctgcactcacacagtcaatgtgtggcaatttgaaggatttctttactgttggacttggctgggtgctctttggtgggcttccttttgatttgctgaatgtcattggccaagggcttggcttcgttggctctggcatgtacgcctactgcaagatcaaaggaaagtagatattggtgtcgaagggatcaaagagaagtagatactgatgttcgcagtatgtggcttaaccgaagtagcgttcatcatgctatttgctccctgcctatgggagagaaaattttgtaggttattcgcgtgtgtgcatttatgaacttcagttgtcctgggtggaacatgaatgaacagccattaatttgccaaggaaatagaatacaacaaagatttacagtaaaaaa

SEQ ID NO: 1937 - DNA, 706 bp, Avena sativa
tttttttgtacaacttcacctatatatgaaagtcgagcaacattgtaacagtacaaaagtgtgccggcatcactgaagtctagatgctgccttgtgcttcagctcgtagtgacacctaacaaacttcatattgacagtacataatcacatacataatctcagatgagccccgagagcaaacagctgccatcgtgtatgtttaggcgaacgatacaacatcatacagaatctgcaaacctgagatcaccgtgtgtctcagtaactggctcactccagcaggttgcacacttccttgaaaactagctacctaacacctatttcaacattagaaatcttagaacacatggcagatttgagaccacaagccggttacagctccacttcaacttcgtacgcagcccaacatgcctttctgcttcttcagatacataaaccgttccgggcgatgcatgagaagggaaccacagctgctttcagtgccagtctgatttcttatgtttttcttcattgggctcgtcaagttttctcttgaagatgtctgagttgcgaagcttttctctggactcgtgtgctgaaggtattcttgtgttccgctggcccgttccaagagattctctgttccttccacggtgaacatctttttcatgtatagtgtcaggaaagaaaagcttctgtgcttttttgacaaacttgaatccctcaatat

SEQ ID NO: 1938 - DNA, 508 bp, Avena sativa
accataccttgtttaagtggcaatggcaaaatcaggttcgacaggtgatgctagcggctttgcaagcgtggagaaatcacatcctgggagcctgacgcccatgttgggggacaaaaaggtggagctctttctgggcatcaagcgaggcgcccagtctggaggcatgcctcctctgcctccaaagaagccgaagcactgaggttgcgctggacaggactgtgggtaggaatctaggaaccagccagtagctctctagcgagtctgcaatcttggagcagatttcggttcaccggcacggtggtgccaaacaggtgatgtaattcaggaacctgagatacccagtgccacaagtagggtcagtcatgagatgtgctgaaatgtaagaatctgtaaatttggatcctagattttacgactacagcatcgacacaggtgatgtaattttttgtacctgtacaagcacccatttaccggttgcaaggaaacctctatttgactaatttaaaaa

SEQ ID NO: 1939 - DNA, 741 bp, Avena sativa
accctaagaagaggaaggaggaggaggtcaggacggcgggccccgacgatgagaagtacaggctgggttacggccttgccgggaaaggtgttgcggcgccctggtacgcgtcgaagcccttggcttcctcctctaaggagaggagagattacgctgaaggcaatggagagaagaggagtggaggtaagaagagtatcgaggagcttagagaggagaggaggaagagggaggccaaggagaaagagcgtgagcgcgccttgcttgccactacatcaaggaagaaggagaggcagccagaccgaggctactcgtcaaggtacatgcgttgatgtgagggttcgtgtgatatggtgttcaggatttgcaatggatgttcgctggaggaaacagaaggcgttgtgtctaacttaagcggaaggattgtgaaagatcaatgtggaggtaaaaagccatgctgctcaggtgccattacatgaacttggaagcagttcgagaacatctcagtaaacagctcgagatctgtcagagattagtttgtttgtgatttatattctgtaaaataagcaagtactccgtatgtgagtagtgtgctgagctggcgattgcacatgcactattcttgtaaattttatcacctctttgctggtgtgaatagttggtttgggtttctgaatttcactattcaaacaaattgttccaagttctgccgcactgtactgtaagaatagccgctttgtgcat

SEQ ID NO: 1940 - DNA, 625 bp, Avena sativa
gtgtaggatggttgtggtgcaggctgtaagtgagatcgaggccagtgcgagtttgctcttaatcgagtgcaccgtcaggtaataggccggtgcaaagacaccgatgtacggaccgcagagcgcctcgcgagcgtttccctctaggttgcagatgtaaggtggctcatgtttcactatgcaatgcgttggatatataagtgtaacaccacttcttaattctctcgattaaatcactctcctgtgcggttattggatgaagctacatatgccctaaaagtgaagaatgaagccatgtacaaccagaaagtgaagaattcagaggtgttaccatgggcatctacatgagaaaaaccagcagacgtgcatcttatgatttccagtagtaggcatcttaaagtatggtgctgaactatgtcattgttctccataaaaggtgaagcccggaggaaaaggagactccagttgcgcttacgaccgaagaaccacacctactgttttgcgcagtacaggaatatatcctggtatggatacccaaggtgcttgactgaggccataatatgcaggaaacaagtgtttgtaatgattgtgagtatttatgcattgaatattaagttgtgataaacgt

SEQ ID NO: 1941 - DNA, 625 bp, Avena sativa
  modified_base (553)..(553): a, c, t, g, unknown or other
cctattctcacaagaaagtgttgactttgccattgttgaagcaggtctcgggggagctagagatgccacaaatgtcataaggaacagtgaactagctgcatcagtcataacaacaattggaagaacatttggctgctttgggtggttccctccaaagcattgcagtggcaaagtctggattatcaaggaaggccgaccagttatcattggtggtccatttttcaacagatatcgagcaaattcttcgggatagagcattcctgacacaatctcctgtcgtatctgcttgtgatcctggtgtcaggagcatcacaagatgcattggatgggattatgcaaaaccttatcaaagttgtgacattgcgttgaagatttcaaatgatatgccattgtctatggaattgcatgatgtaaaactccagctgctaggagaccatcagcttcagaatgctgttacggcttcttgcacagctctatgtctccgtcagctaggatgggatttgtccgatgcatctatccgagctggtttagagaggacacaattgccgggganaagccaatttcttacgcgagatgaagcctccgtccttgggctcgacggagcagtccactcttctacttgatg

SEQ ID NO: 1942 - DNA, 534 bp, Avena sativa
tttttttttttttattttttttttttttactatgagccagaaataagcattataacaaacggtaacagtgttataccaatctagtacatattaagggtcaacacagacatgcagcgactaatctcgtgcctgcctaccttaatatccaacattacaacatctatcagaatcgccagtgagcatgggtgagccgacaactgaacacaaacaaagcaaaagaaaaacaaggttgcatcgctacgaagctcagttgtcttgcatcggcgagctggagatcagagacatgttgggcatgagcttctcgtgaagacatgtcagcaccatgcagaagatacaaccaacactctattcttccatccaaggtaaaggacaccgtctctctcctcaagcctgtagtagctattgtaactatgcagaagtgttttgatggtgttgttcaccactgaacttagcgggtatggcctaaatccagccatttcaaatcttgctttccattttccgaacacctcatgcctctcaaccctatcaacaccc

SEQ ID NO: 1943 - DNA, 604 bp, Avena sativa
ggccggggccgtgctggtccaggtggtgccgttcggcgggctggagtggctcaccagggtcacgttcaacgaaccggcggccgacatggaggtgacgtacatggactacaacgtgctgctggaggagagctcgctgctggaccagtacccgcgcggccaccaggtgctggccgacccctacgccgtgcacaagcagggctgggacgcgctcaaggccgcctacctcgataagcagaacgtgcggctggatttgggcaggttcagggccaagctccgggaggtgctcgccgcgctgccgcccacgccgtcgacgtgatgacagcctgcctgcctgccccggtcgacgtcgataggtataggttgtcggtgtatatctatctcggttccgtgactcgttttggttaacttgatcattcttgatttcttcttcactgttcttgctctgcttcctgtggcaagatctccatggatggatgacgagcaagaactacttgttgccacagagcgcgcccagcccggcccggacatgccatgccccctttttgtgattattggttgcttacattcgattaatttacaaaagaaatgtgaagaacaatatgtg

SEQ ID NO: 1944 - DNA, 762 bp, Avena sativa
acctgatgagccttctaatttctgggacaggccaacttggcaacctgatgagccctctaatttctgggacaggcctacttggcaggccgaggaggaaactgtgtatagggactaccagtcatgccagttcaacgctactccacaggaagctttcactgtggctcaagacgtcgttaagacgatgctggcgaggggatacatactcagcaaggacgcattgtccaaggctagagcttttgacgagtccttccagatatcagggtctgcagcggcaaaggctgcagagctgagcaagagaatcggactaaccgacagagtcagcgccggctatggtgcgatcagatcagtggacgagacatacaacgtatccgggactaccaggaccgtcgcgagtgtgaccggaagaacagcagttaaggttgcgaacagcatcctgaccagcagctacttctccgcaggagctatgatggtgtccgacgctctcactcgggctgccaaagcggcggagaatttggctgctcatggccggcagaattaagtggaaataaacacgtggtgtggtgcatacggtcgatggtttcatcagttaaacaaatgcagttgttcagacaataggattgaacccaaggtataatattggatgtatgatatataataacagtacagtactggcaagataataactgttggttattcagacaacaaatgttagcttgaacaagctaatttgtacagaataacattcaggtgatcgtgcagtca

SEQ ID NO: 1945 - DNA, 679 bp, Avena sativa
agttgaagatggaaggttgcaattaatcgttgagaaagaaacaaaaggagcggtctactctctaaatgcattcaatgggaaattgttggcagctatcaaccagaagatccaattatataagtggatgacacgggatgatggttcacatgagctgcaatctgagtgtggccaccatggacacatactggccctgtatacccaaacccgtggtgatttcattgtggtcggagacctgatgaaatcgatatccttgcttgcctacaagcatgaggagagtgcaatcgaagagcttgctagggattacaacgctaactggatgaccgcggttgagatgatcgatgatgatgtctacattggtgcagagaatagctacaacctgttcactgtccgcaagaacagcgatgcggccacggatgaagagaggggcaggctcgaggttgtcggggagtaccatcttggagagtttgtgaacaggttccgtcacggttcgcttgtgatgcgccttccagactcggagatgggccagatccccacggtcatctttggcacgataaatggggtcatcggcatcattgcttcccttgcccctacgtacctacttacgtgttcctggagaagctccaggcaaccctggtgaagttcataaagggcgtcggcagcctgagccacgagcagtggc

SEQ ID NO: 1946 - DNA, 651 bp, Avena sativa
cttactgcagtaccagggaagttgtgaggaggccatatgcgagagcaagcttctcgctgtgctcaacaagaaggttattttctcctcatcatcgacatcgtgcagtgcaaaatctgtctcagggacataccccattgatttgacacgatcgatcaatctctccagaagagcataaatctggggggatagcgaatgtgatctatctccaacaaagaatgatgcagttcctttcttaccctggacccaactacatccgggtcttttcttaatccctgagttcttcatcagatttctgattctggctacatccttccagcgccttgctttagcatatatgttggagatgagtgtgtaagatccatcattctctgcattcatgtcaactaacttgctaagagcatattcagcaagttccacatttgaatgtactctacaggcactaagtaatgcaacccagactactgcagtaggttccattggcatgtccttaactatattccatgccttatctatttgcccggagcgggccagcaagtcaatagcacaagcaataatgctctgcacaggcagccacaccatagtctctactcatgctgtcgaagtattccaggcctcgatcgaccattccagaatggctgcaagcatacagaa

SEQ ID NO: 1947 - DNA, 569 bp, Avena sativa
gcagaagctgaagatgatatgcctcggcgaggccttcaacgggaagatcaccaagaccgcacgctcccacggcaagaagttccaggtctccatccagcaggagatgtcccgcattctgggcaaccttggctgggcttacatgcagcagaacaactacgaggcggctgagctggtgtaccggaaggcccagacgatcgtgcctgatgccaacagggcctgcaacctcgggctgtgcctgatcaagcagggcagggacgaggaggctgagcaggtgcttgaggatgtcctgcttcgaaggatctccggattggacgacgacaaggctgtctcccgggccgagcagctgctccatgagctcggcccgaggacacgtgttccatcaccagtagatctaggcttcagtttcagcgaagacatcatagagagactagacctcgcgatgaatgagtggacgcccttcaggtcgaggaggctgcccgtgttcgaggagctagacgcattcagggaccaaattgcttgttgattcttttttgttaaacagcatgcgcctgcggtaatagaagttgatg

SEQ ID NO: 1948 - DNA, 1027 bp, Avena sativa
tcgacgtcaccgtcgccgccactgccatgtgcggcgtcgccgacgcgctcgtgcagggcggggtcatcggcttcgcgggggagctaccagagcggtacatgcaggccgtctttgccggaaccgccgcttcaggtgtgcttgtctcagcaatgagagtacttaccaaagcgagctacccacaggatacccatgggttaaggcaaagcgcaatcctgtacttcatcgtcggcatcgtgctcatggtcatctgcactgtgttgctacaatgtgtctgacaggcttccggttgtagcctactacaaggacatcaagcggaggtctcagaaggcagaggtaggcggcggcatgacggggtctgcctggaggtcaaccttgtggagcattgtcgggagggtgaagtggtctgggatagggattgttctcatctatgcagtcaccctgtccatatttccgggatacatcacagaggacgtccattctgaggcactcaaggattggtaccccaattatgctcatcggtgcctacaatgtgtttgatctcgtcggcaagtgcctaccagccgtctatctcctccaggacgccaatgtcgctgttaccggatcctttgccaggctactgttttaccctctcttttacggttgcttgcatgggcccagcttcttccgcacagagatcccggtcaccgtgctgacaagccttcttggactcaccaacgggtacctgactaccgtgctcatgatccttgcacccaagtctgtgcccatacaccactccgagaccgccggaatagtcatggtcttgttccttggcattgggctggccatcggttcgcttgtttcttggttctgggtcatctgaatggggtctgtcatccctatgtctttgggtcacctgaatgggggctctgccatcttgtgtattcatgtctgtctgtgtaccataccatcaccttcttgctgatgtttcatttgcccaacaaagggtatgtaacttgtgttagttgtaagtttgcattcatgaaaagga

SEQ ID NO: 1949 - DNA, 647 bp, Avena sativa
ccgggatgatggccaagatcttctgctgggtcgtcatcgtattcctcatgttcttcgtgcccaacggcgtcgtcagcttctatgaatcgatatccaagtttggatctggactgttccttcttgttcaggttgttcttttgttggacttcgtgcatgggtggaatgagaactgggtcgctaaggatgaacagttctggtacatggctctgttggttgtttcggttgtttgttacattgccacgttctctttctcgggcctactctttcactggttcactccatcaggacaggactgcggactcaatatgttcttcatcgtctccacattgattcttgtgtttgtattcgccattgttgcgctgcaccctaagatcaatggaagcctgttgcctgcatcagttatcggcctctactgcacctacctgtgctacagcggactctcaagtgagccaagggactacgagtgcaacgggcttcacaaccactccaaagcaatgtcaactggtagccttacgttgggattgtgcaccaccatcctttctgtggtctattccgctgttcgtgctggctcttccgcaactgtcctctcagcaccagactcaccacgtgcccggtgccgacaagccactgctcccttcagcaaggct

SEQ ID NO: 1950 - DNA, 834 bp, Avena sativa
acgaggacgatgaggctggccaactcccgggagaccatcaacgggaagctgaggtacgcggtgaacagcgtgtccttcatcccggcggacaccccgctcaaggtggccgacttctacaacatccagggcgtgttcacgccggggagcatgcccgacaacccgtccggcgggcccgggtacctccagacggccgtcatggcgtccaacatgcgggactacgtcgaggtcgtcttcgagaatgccgagagcctcgtgcagtcgtggcacatcgacggctacgcgttctgggtcgtcgggatggaaggggaccatggacgccggcgagccggcagagctacaaccttcgagacgcgatcgctcggtacacgttgcaggtgtaccctgggtcgtggacggcgatctacatgccgctggacaatgtggggatgtggaacgtgcggtcggagggctggggcaggcagtacctgcggcagcagttctacctccgggtctactcgccggccaactcgtggcgggacgagaaccccatccccaagaatgcgctcctctgcggccgtgccacaggccgcaagactaggcctctctgaatgaactattgaactctccaactgggtcagttttcgtgtcacgaaggggtgactggatctgagaaccagacgagtctacgacggcgcgggatagtacaacatgggttgttcaggctgctgagctccaaattctttttattgacaaactagtgtacctgtgctattcgtgattctttgttggaaattgtaggtaaaatgttgcaggtggattctttgtgtagcaagcatcttgcttgcacacatatat

SEQ ID NO: 1951 - DNA, 488 bp, Avena sativa
agtagatgagccgtgaccaaacacaaacacgtcgcggccaacagacagatgcaatgttagcacaacgtcacaaagtttttgagcaggatgtggcctcgtttacagtcgacatcagcagcacacggtggtgcttgccgagggggagggggggcaagcaacacatctacagagctaatctattctacatcaagctctcacactgcccaaatggtgtacaacgtggagggaggtcctacctagaactcattgccaggcagaaagggggttccttccaggaaactcagcaacattcctcctcggagttcacagtcgccactacaacgtcatcgccggcgctagggggacacagagactgaagggaaagcccttcatttctctccactagcctcttcttcgacctagggtttaagctcctgcgaagctacagcgtcctcgctaggcatgacatcaacaacaggcgcgtacaggtaccactccttccttttccg

SEQ ID NO: 1952 - DNA, 684 bp, Avena sativa
gatccctgaggttatcatccctgaagatttggttctcaacattgcgctatctacacgccatgagatcaacagagcctttgcgaatcttcgccagattgctcttggccgtgacattaagaagttccttattgtgattgctggtctatggctgctttccatcctcgggagttgctgcaacttcttgaccctgatttacattgttttcgtggttctgcacacagttccagtactgtatgagaagtatgaagatcacattgactcctatggtgagaaggggtggattgaggtcaagaagcagtatgctgtgttcgatgccaaggttctgagcaaagtaccaagagggcccttgaaggacaagaagaactagacgctgagtggtgcggtgtaccatctgtatggaattataggactggttcgtggttttcaggaagcatcgtggctgcccttgtggtatgagcaccaaatttgtcacctgttttcttgtgctatgtaaggctgttttgttgcttgagactttgatgggagtagaccgggtagcttgccctccaacagtaatgcagatgcagcacttgtttgctgtaccgctgtttaattttgatctgttaagatgtcgaatgtgtagcatgaatatgatttctgtgacactttgctacctgcattgctgcagtttggagttttgatgat

SEQ ID NO: 1953 - DNA, 455 bp, Avena sativa
tttcactgggtgctgttcagcttgagaaacctgaacgaacatcctttatagtcagcactatattggcccttttatgaatttacacattagccaatggaagaaacagtttatatactatgaggtctctaaacattgttcttcaagccagctaatcatatcgaatttcggactagtcacagttacaggaccaccgggccttcttctgggtataacattatcctacataagacagcataaccacaaaatagactattgatcaccaggaacgtcatccggatctgtcgccatgttgtctccttgggcaaggccactgtcttcttggctatgagagctagctttgagcatataagactcggcaaattttcaacatttcttgaacttccttcttgtactcrtccacagcaccactttttwwcttagatgcattatgcaccatttcttgaatgttgcgccag

SEQ ID NO: 1954 - DNA, 526 bp, Avena sativa
ttagttggatgataagataggtaaatgcatccaaccacgacaataggtatttagtctaactggtatgtactatgctggaggtacgagtacaactgacaagcacactgtagctgtaaggccaaccaggacaacaggttcaatcacataggatcccaaaatccacaaagctaggtattgtcttgtctccttttcggtgttctaccattaagggtttcaagaagcctttgccggctcatcgctcgggaggtcatcctcgtcatggtagatgttctctgccatctgccatatctgaaggatgttgtcttcagcgacgctagcaagcacccaatcctcacacgggttccaggagaagtcagagattttgcttgtatggcctccatgaatgaacaagagctcaggagggccgtcctctgcatcctctggtgtttgctcctgatcaattctgcttagatcccaaaccatcagccttctgcccagacaacaagatgcaagtatagttcattcttgggctccatccaacttgaat

SEQ ID NO: 1955 - DNA, 556 bp, Avena sativa
tattcattttcactgaggcggtaatttcacaacaagatatacaaactggatcaatgtcaataatacaaacactccaaacaaacattgtgagtctacagttacaacggaagcagagacctgcttccatgtatgatccacggccacattgccatcctagctggcgagatggctgggcgagcttttgaacatggtgtgccacatgtatgccctggagaggaccatctcgagctcgtggtgcgcccagttcctggttgggaggtgctgcaggaacatcaccatctcttggaaatccagtttctgcagcttgtctgaccatgttaacaaaaaactcgctgatatgtacacgagaaaatctggtagatagtctccttcagcaagatacgtatcccacaggcgtgtcacgagatgaaaaggaacctcgcgtatcagaaggcaattgaaccaacggaaggcaaactgaaggaactccaatccttgttcctctatgtgcttcgacaaaggttcatctatccgatgaaccaactcttttcaacctgaatacaagacgttgtaattt

SEQ ID NO: 1956 - DNA, 791 bp, Avena sativa
gggcggacctgtcgttctgtccccgccaaggaagttgcgcagggtgtctgcccctgatgggacggaaagcaacattcatcgagcagagaaagcagaagaaattcctcctactggcatgaggcggcatactgatgagaacatgtccagtcagagttcgagaataccaatgtcagttgatgttggagttgtgtttggcacacgaccaactcctagaccaacattgaacagtgccgacaagtcacacttaaaaaggaaattagatatggatcctgattttggatacgcagagtaaaagaagtctgtatgcaccatttttcccctcactggcgtgttgatctttttacatattctttgaggagacgattccaccaacaaaagaatgtgtccaaagccataaaaacttcattgaagacggctgacacaatgaactgtgctgttataactggccagccagctcgtgaaccgaaaagtgaagagatgcatcgctagtttacgctgagagagaggtgcacaggtcattggtataattagccaacatccatggggaaggctcctcgatctgtaatctttattggatacatgagtgtttgctctggcgagaacctcagtctgtaatctttattggatacgtgagtttgctctggcgagaatttgttttcactttgttcttgtgtggacattgagctttgagtgttgtttaggtgcagtaattcttgtaaccaagagaaggttatacgttaattttttgtaagactaacggtgcattggtggtcataaagaaaatgagaaga

SEQ ID NO: 1957 - DNA, 711 bp, Avena sativa
gggaatggtagcaacaacgaaggatgggatgatgtagatccatttgaggacaagtcaccaccatctcttctttccaacatacatgctgctcagaaacgtccggtggtgcaaccaaagcaaccaattccaagttcatcaagatcaaatccagcagtggcaccaaaagcagaagatgatgctctatggggtccaatggctgttccagcacccaaaagtacatcgaagtctgcagacatcaaaccgtcggtatcacacaatagcgatgatgacctctggggttcaatagcggcacctcagccaaaatcatctgggagcctatgaagccagcagcaggagcgaacagtgatgacctatggggtgccatcgcagcacccccaccggcaactaaagctaggcctctagcgtcatcaggtaggggacgaggaacgaagccagcaccaaaacttggtgctcaaagaataggaaggacttcctcaactgggatgtagagtgccatggtacagcgttgtacaaggacgtgtgttttaacctgttcccccgttgctctgtctaggagatcccccttttgtaaactagcccaatcttttacatggacatgatttttcccattgtattacttcgcaatgcgagtgatcaggagatttgtatatcacagatacagcgcctgaactgttttattaatatatggtttggcattacttttcaaaaaaa

SEQ ID NO: 1958 - DNA, 607 bp, Avena sativa
gctaatatctaacaatagtaacgtagaaactaagatatgggccagccattgaccctacttgtttcttaactacgaagcgcaatggtaaacaactatgacttttatcctgcacctattaagatatactactgcggaagaaataaacatggataaggatgggtgatagtggtggggggattaaattacagacgggcttactcttgggagcactgcagcttcgaccaacttctctgtgccatggcgtgagatgtgtggcgacatcctccactaatttacaatccatatagacctaactattgcacttggtcatgattttggaaaaaacgagttacttctctgtacaactgctccccttcgaagggcttggaaacatagccatccatttcacatttcaggcactgctcatatgttgcctgaataacatctgctgtcatggccaatatcggagttcgccacgtgcgaatattagcacattctggtggcatttcccctttctctattcgctcatttagatctctttccatcactcttatcctcctagtggcttcaaatccatccatttctggcatttgtatgtccatgaaacaagcatcaaaactatgaggtg

SEQ ID NO: 1959 - DNA, 857 bp, Avena sativa
tgtcgatggaaacttagcagatgacagcacaaaaggaaatactgatgctgactggctacttggtactggagacgatgctactgttgagcagattcttgtaagcattcaatctgttcaagacagaatctctaatctgagatcagatctcaagaaagaaatagccaagaagagcaccacgcttgtccttaaaagtgaacacacgtgtgaacggcgcacagagctcaaattgctcacacggaaaaggcaaagtcgctgacatgcttgaaatgtcacctccggacgcatcggattgtgatatggatgacacagacatgcccgatagtgctgtctcaagctatggagaagctaacaatatggatattttcgagagcaccatgaacctattgtcagctgaagatccacataaaatcggtgaactgcaccagagttcagaagatgtattgatcgacaaccaacgagccgaggaaggataccagaactttgaggtgatcagccatccgtcccagcggctgcgggtatcggtcaagagagagcgggtatgtgtcaagagagaaactgatgcatattccgaggatgagagcgttgcctcccccacagccgcgaccgtcgtcaaggaagaaggtacaaccagcttcggtctccaggggactttgaagccctactacacgggcaagcgaaaagggaggaagccaaaaattcaaaggtatggcggttcatcatcgtccgctctcagctcgtggaggagcgctcggactcgaaagaagaggaaactgtaggtgcagaacttgtctcaggaaaagcacaccttaccctctggcttcggatcttcggtttaattagatgatgatgacgacgat

SEQ ID NO: 1960 - DNA, 773 bp, Avena sativa
  modified_base (218)..(218): a, c, t, g, unknown or other
gtaagctaagggcaaataagtgggaaatgtatgtcggcggagtgccaaacaacaacaggaacattgccgtcatctggaaggccaaaaatttcaccatccacagcgtcgtgaagtggttggatgcccaacttcctcaccacccccatctgaagggattctataggtcgatatcacctcgcctatttttttcaatgggggattggaacacagggggggcnctgcgacagcacaagttctttagccaagggaagcggcatcttccagaatcgttctgatgacgctgatgccgagggtgcggtgatgggaacaagggtcaagctattggatatcactgctctatcacgtctgagggacgaagggcatatatcacggtatagtattaaggccacggaagggattcaagattgcttgcactggtgtcttcccggcgtaccagatacgtggaacgagatccttgctgcccagttatagtccggagtattactgtatttgtctatcaactttgtccacgctgtgatatatttactggagagcttatggacaaaggcaagaagcgggggattctgtgggagctagcgttcttgtatctattgagcttcattctgtaatgtaacttcttgtaggtggcggttctcctaggaaacgcattgctgatgtgcgtggtgtttgagctgccgttttgctcgatcagggctcaactccctgcatcatattgtaccgttgccacaatgccacgtgattcttttcactagcaatatacactttgatttaaa

SEQ ID NO: 1961 - DNA, 369 bp, Avena sativa
ttttttttgtctggcaaacatacatcatttctctcgccgaatggttacaaacgagcacaagcagtttctccaaactttcagaaaaaagaccactagctagttcttgaccgaggatagcattatcaacagacaagcttttccgaaacaatggtcctccctgtcgaaagccagccaagtcacaactctacacaaagaacgtagtagtaacaaaccaaccaagtaaaccaatcaagctgcacagaaacctgtaacatctaacactgcgacaccgaatgaaaagggcactagagtcagcgcctgtttgcaatgctgaaggagctgactttctgaggtgtggcgaccaccagaggagcgtcaggggagtcgctt

SEQ ID NO: 1962 - DNA, 661 bp, Avena sativa
ggtggctggggagctcatggaggaggtgctttctccggcaaggatccaacaaaggtcgaccgcagtggagcatatgtcgcgaggcaggcagcaaagagcattgtcgctagtggccttgcccgtcgctgcatcgtccaggtctcttatgccataggtgtacctgaaccactctcggtgtttgtggacacatacggtacaggcaagatccctgacaaggatatcctcaacattgtcaaggagaactttgacttcaggccaggcatgatcatcatcaaccttgacctgaagaggggagggaatgggcggtacctcaagacggcggcgtatgggcactttggaagggatgggccggacttcacctgggaggtggtgaagcccctcgagtgggagaacccttctgcctgagcaaagactcgcagacagctccatgttggaacattttcctatcacattgtctcgaaacatcttaatgcccatcacgtcatgtaatctctcaggtcacggctctagtatctgcgactgtgtggaaggttctattcctattgtctgttaaaaggagcttgtattgcgggtctgctgcgtgtgatcttttctgctcatgtaacggtggcgaaaagatagaaactatcgaagaaatgaaactatatacttttggttatca

SEQ ID NO: 1963 - DNA, 851 bp, Avena sativa
aggaaatgcagatgcacggcctgaacctcacctcaccccagtgtctccagaaattggagatgcaacaccatttgattcggcacctgagctccctcgattctctccaggagggaatcaatctccagtaagatacgatgatactcctttcaagactccaggtagaactccacagaatagacctgaaggaactggtgctacgatggaagtaccagcaacatatgacagttgtttatcacctggacaaagtactcgtgtgtctgatcccagtggatctccgttcccattcgatgatgaacttgaggaagatctgccagatattcctgggctcatcaatacccctagcatgatatctagcgtgggtactggcaccacaggattaggtagcatgtctactagaacaagggctgtggctgagtacttcaaaaataagatatcttcagccacatcagatgatcaacgaggggagttcagtttgaacggaatcgtggaagggaggacaaggaagcaagctgcatgcatgtttttttaaacactggccctgaagagttatgattatattgatgtcgagcaggaagaagcatatagtgatatttcagtttcacttagaccttcactcacagccgtcaaattctgaataactcaattcagagtcgaggactttactccttcctctaatattagtcctggtgtaggatcgagttgttttgggcataccggtgtgagtgccatgtcatgtattcatttactcatcctgtattattttgtgttggtatctatgttgtgtcaattctgttcagaacctgccaagggctgtcagtgtctgcaatgaaatggaaatgcattccttatta

SEQ ID NO: 1964 - DNA, 919 bp, Avena sativa
tgacaagcttgatagtgaagatgcttgcaaaagcgtattcatgagcttgtctctcttgggaatttggaagctgcggtgtccttgttactttcaacgcctcctgaaggatcaaatttttaccctaatgcattaagagcggttgtattgtcctctgcagtgtcacaatccttacatgaacttgcagtgaaggttgttgcagccaatatggttagaacagacaaatcactatctggcacacatcttctctgtgctgtgggaaaatatcaggaagcatgctctcagcttcaagatgctgggtgctggactgatgctgcaactttggctgccacacatttgcatggatctgattatgcaagggtactgcagaggtgggcaggttttgttctccgaggtgaacataatatgtggagagctctaatactatatatcgctgctggagcactgcccgaggctttagaaacactccgcaagaaccagcgaccagacactgccgcgttgttcttgcttgcttgccacgagatctattcacaaatcaccgtagagtctgagcccaccgataagacatcagaattggtaccagaagggagccagaagctccggttcccttccaagaatgtgaatgaggaggacttgattacggtcagcgaggtctttgggcagtaccagcagaaactggttcatctttgcatggatatggaaccaactgtgaagctctgacgcacatgtttttggctgtgctgtcctttgcatggatctggcctactactgtaatttttttgccattttgcgtgaagtattttcatcaaggtgcgcaagctactctcagttctagacactgaatagagcctgttgcgtggtacgctacccaggcagatactagggttgctgatgtgcagttagtattgaagaagatggtcgt

SEQ ID NO: 1965 - DNA, 713 bp, Avena sativa
aagcagcgccagcacaagtgtctgcaccggtattggttcttcactattgcgcaaccagcaagttcacccgccgctccggtatttggtgctccagctgcccagcagcctgccggaggagttttccagtttggtggtcaacaaggctcggtgcagcagaaccagaacccgtcatttgcacctgctggtggtagcctagagtttcagggtgggaacttctcgttgggcagtacgggtggtggcgacaagtccggcaggcgaatcatcaagcccaaaaggacacagaggaaaagatagcttctcggttcagttgtgcattacaatgggtggctagtttggatggtgcactgccagggaacatctgctgctcgtctgaattggaattgcggagatgatgggaaatggttacagcatgatttgtacggtcttgtgaaatttgaagcatctccaagctgtctgtcacactcgctatgtctatcgaggctgggatgcgaacctcaaggtcagtgtagagtagcccctcaactgtcttcatccttggtcaaaggcgggaagtccgggtggtatgatggggcatgttgtagtagtagtatgcttgtgctcttggggtataaaatatagaacaaagagagtatcccgaggtgtaattttgtctcctttccttcctgccgtccgtaatttgtttcttatttgagtccgatatatgtgtctggtag

SEQ ID NO: 1966 - DNA, 725 bp, Avena sativa
  modified_base (8)..(8): a, c, t, g, unknown or other
ttttggtnataattaatatcccggcgtgattatttcatccttttgtaatgttcattgacatggtctgagaacggtgtctcgctctccacagaaaaatgcaactagttcaacatactgcaactgtaacttgactgacacacagtgacacatatgactccccgagtcaacgataaaacacagagccaccaatccgggcgatccatccccaaatcaggcggagacggcggccacgccgccgttgtcgtggacaaaccgtctgatgaggcggaccacctcggtgccggcatcgccgtacggctcgacggagaagaacccgtggtcttgcccctggaacttcaccagctcggccgacttgcccatcgccttgagcctggcgacgtagtccgcggcgcggtcgcagagcaggtcgtactcggcgaccaccacgagcatcggcgggagcgggagggcgtccatggccgggctgtccggcccgaatgggttggcgaacgggtggtccctcgtggagcccggcggcagcagaatgcgccagcccttgtcggtgaccggcagcgacagtaactggcccggcgggagctccagctccgacgccgtcctgtcctccccgccgaagagggggaagagcagcacgtgcccggcgacgcgcacggggtcgaggcggccgacctggcccgaggcgagacggacggccgtgtggtggacgacgccgccgccgcccgagtctc

SEQ ID NO: 1967 - DNA, 854 bp, Avena sativa
atattgtatattttattaagtttttgtataaagtacatttgtacaggaggtttgtacaattaaaagaaaattttatctagagagccaaaagaaatcaaatgaaactatctagccaggctgagaacatgtgatagctctttcttttggccctcgaatgcctagtgatgaaatgcccttcctaagttgaatggaagcattagttttgccaaaacatactacattctggaccagaggacgtaattgcaaaccaatgtaaatctcgtgattgtaacaaaatccatgcctgtatatagcattctatatactttccacctccaaggacttctgtccaaattgggatacatactcaaaacatagaaaacggcctccatgtttttgcgtctgtctgctgatcttcatatcgacagattccagtattggtgggtggtgtcttcctccaccaagactacccttctccaaatggtgcagttcaccaggatgcacaaccttgggacacagaactcaaaaatatacaaactacacaacaccagaatatctattctacatagtggagaaatacacgtaaccatgagtagcgccaagaacagagtgtacaatgtcttattattgcacatcagaccaataaacagaaggattgaaggacaacagtatagtcagactaggatgaatgatccagtctttactattcaagaatgattctatcaactatcttcgcaccccttgatttggccatgtaaagtcccatgtgatgcataagatcctgaagcattagaagttattagtagctggtcattgcccataggatcatcaatggaaatattttgtttcattcttttaaagagctaaaagttcca

SEQ ID NO: 1968 - DNA, 628 bp, Avena sativa
  modified_base (23)..(23): a, c, t, g, unknown or other
cagcaatgaacataataatggcngggaacgagcttgccactgccaatctatgcatttattcagatggcaggattggaaccttggccatgggttgtctatgtcagctccagccatattcacactgggtggggttctgagtgaacagatgctgggagaagtggagacagacttgctgtggaaccgaatcagagcaaaaatgagttgatatctcatctcaaataagccaaaaaaaaaaatacttgggaagcttgctgaacatccatcttcatgccagaaatgggattagagctctccgccatggcttgggacagctgcaccagttgtagaagttggaggtcggagaagcatgtgtggagcataaatttttgacatcggtccagcagcagcaggtccaaatgtagttccaggtgatgctggctggtacgctgaagagtccttgccaagaatgtactctggccgcggaacagaagatgatggagatgggggccataggagcaacagggagactaagaggatagggagcaataggcatgtcaccaagcgatgacgctgaagggctatagcttagaccaccaagtgggtgatcaaattgcatcccggaccatacttgcagaagccatgctgtgaa

SEQ ID NO: 1969 - DNA, 688 bp, Avena sativa
ggcaggggacaatgctgagtttgtcttcttccagatgggtccatccatactctacttggatattaagtgcagggagttacgtaaagtctatgccatgacagaacatcatcaattcctaggtcacatatatcctttcatgatggtctggcctcccacatttcctgcacccaaggatgatcttgcaagaaacgccagttgagtagcaaggaggttatcatgaagtttttggttggtaccaatgtcagccataaaggtgccggcaaggaggaccaaaaagctgcatttccccctagctgattaatataaacaactctcttcattggcattgcccagaaccaacattttgttcttttgttttgagtcaatgacaagttccataatatctaccccctccgtcctgaattagatgtcgcagatttgtttaggttcacatgtatttatacactaaaacgcgtctagatacatgtgaatctagacaaatcttcgatatctaatttgggacggagagagtactagattatgaatttagaatgttatatgcaactggaggaacagttccagtctcaagaaatcctcttgttggtatgtgtgcccgatgtgcataagtgtgattctgtggttgacatgtactaatcagtttctgccatgcatctatggttcatgctttgaactgcaataaaaaaaaaaa

SEQ ID NO: 1970 - DNA, 744 bp, Avena sativa
gagctgctgaaggcaataaacagcaatctgaatgatttgaagaagttgcagcagaaactggaacaacaaaagaagaagcaacagcagcagaagaagcagcagcagcagaagcaacagaaagcacagaagcagccagaagaccatattcaagccctggctgcgctgagtgctgaggttaaaagcaaactatccatcctcggcctgatgccaccatcacctttggcagaggtactggagcaactgaagctaaaagcattgagtcgggcagggctgaccgaagagtcgctgcaggagcagattgagcagagggtcgtggcaaggaacaacaagcagtttgatgtgtcggaccagatcagaaaggaccttgtgagcaaaggcatcgccctgatggatgagcccactggcacggtgtggagaccatgcgaacgagagtaggccaggccgcggttaataatccatgcctggtttaacaaatgacagtgtacaatgaagattgcatcggtgcagattgactcgtatcgccatttttggacatgtggtgtttctgtagtggtttccagttttcagtgaacagacgatgagaactgtgttgttggtggttgtaagacaaaaaggtactacccagatagttggtatacttgagtactccatgggttgaatctctgttttggatttgcagcttaagttgatggttactatacttacattcgaatgatcggaatgtgcaagacaaaggtactagta

SEQ ID NO: 1971 - DNA, 799 bp, Avena sativa
ttttttgccacaacaattaacactgattcatattgtacaacaaaaacttagctatatgcaccgacctaccctcagagccacacaacacaaggacaaaaattacaaatgaattccccttcataccatacacgggatacatgatttcttacacacatgccaatgtccatctccactgttgcattgcatggcaaggggaaacaattacagtgactatacgatctggatccaggtatacattgcttagtaattacactctgcacgaaaactccaaacaagacaggctgctactatcaaacatcatcggtacagtttctatcactgggcgaatgaagcgggtcatcaaccatgctaacaatgggagtttcctgctcatgctgagaaggctgtaacgcatcggatgggatgttgatgccagcaaacccaactaatacagctgcagctccgatgtagttcaagagatggggagcatgtccagtgagtgtatcgacaagggcagcaattggaacttggattgtgagaccagctgtggccacagtggttgttgtgagaaggattgcttttgcccacaagtagtcgctcaaaacattatctagcaaacctttcccaacaatcaggccaacttgttcccatgacagcttgtggaacggctccagcttggcaaaattcagcaccaacgcaacaggaagaaaaaacaacatattgaacagtcccaggaatccaagaaactgagccatactcacttggccttgaccttctttctcgtcaggcaacttttccgtatcaaggtgatatacacagc

SEQ ID NO: 1972 - DNA, 684 bp, Avena sativa
tttttttttttttttttttaagtcaactaaatcgattgccataaatcatgatacataaacagagaagggatcaagccctcttgaaatcaattgctgtcttgcaaaatcaattgcacagcagaagggaactaaatctgcttgcatagcatacatgaggacccccagagaattggaggccacacagcccagttacagtccgcttcagggcttccgtcctacagaatcgaatcacataatatggcagcacctaagaaataactcatgttctgttacaaagtctgtgtacagtgtacagatgaaggcggagacagactagcctgtcagccgccgttgcatcaatgagcactacttggacgggttcacgacccggtttggctgtcgatgagcaggagctgcctagcttcagcgacgtgaacctcgatggcgtcaaggtcccctttcaccttgtcggagacgtgcagcgcggacgcatccgaaccgcgagatgttctgtcgcgcagaagctcgccgaggtcccgcatcgcctgatttagcttcgagttcagctcacccagggacatcgtctggtgctgcaatgactcctcgcacagcctgatctcctcctcctccaggctgacttggaaaatgccatcttggtactcaaccagtaggctcggcatgtccttctgctcaccttcccaaatt

SEQ ID NO: 1973 - DNA, 620 bp, Avena sativa
cagaaaacaaggatactccatctagcgaagctgaagatatagagttctcaccctccagcatccaatacaagagtggggtgtctgaagcaacatcgttccaagaaccaactcctgatcctttgccaggtgttgaggccatcaagcatcctatttcaaccagtgacccggaaatagtcgacaagtctgtgattgaagaagagctggtggtgaaaaatgagatgaataatataccagctgagaagcctaacctttacaccccggaggatgatgatgacaaagaagtggaggagtggctagaggatatggatcacgtttccagcaaaacaggcgacatcacttcagttgggaatgatgaagatgtgtcattcagcgacttggaggatgacgatgatgattaagagacaggctggtagttaaggaagctcagtcagctcgcggtatatactctgcctgccttgtgtcaaatacaaagcttgtagcttcaaaagaaatggtcgctgtcaatgaagtatcatagcttgcgtagctgttacaacgtgaaacagtgtggtagcagaatcacggcaagttatgtgtctgggtttgtttcccgattctagttgatatttactcgtgtgcca

SEQ ID NO: 1974 - DNA, 717 bp, Avena sativa
agaaacatctcaaccttcagatgcactaggagagcatgtttctgaggagagcactggagatatgggccgagggcgtggtagaagccgtggacgtggaggcagaggccgagggcgtggctaccataaccataacaacaaccaataccacaacaacaaccatccgcagcaccatcaccagaacagcaacaatcaaggtatcaaccgaaatggtgcccatcctattggaaccccgccttcgagccacccagtgaagactgagcagcagcagacacagtcaccgccaccggcaggagctaacaaacagcatccagggccacgaatgccagatggcacccgtgggttctcactgggcagagggaagccacaagcattggcacccagcttatccgcgtaaaccttgaactcggttcacagcacgagacacagcttgtgctgattgtcatgttgatagagagatggtgagagactgtcttttagaagtcatgtcttttgagtgtgctttctaatttacagactatatacggttttgcctgtgctgtgtgtactttaaccctgtagtgcactggtttctgagtgattgtgaccacctattttgtaacctttatttttgcttcctttttgcctcttgctgtaaggttgtacaagtaggaaagtaaacgcttatctgggcacagacaaaagacaaaagaaaagtaaaagggacaataatagaaaaat

SEQ ID NO: 1975 - DNA, 957 bp, Avena sativa
gcagggccacgcggggacacgccaagtaccccgacggccatggtttccagcccaagttcatgcagttcaccggcaaaggtttccgtgccggcctggtgccctgcggcggcaccgacgtctactggttcttgacatggtctcctgcatatgcacatggcaaaaaggatgacgtcgagcagagttcgacggcgatgaagcagttcgtgctggccaagctgaggagcatcaacgcccctccccaggtactggacgcggtggagaggagccagatgaacgacgtcctcgtggcgccgctgcggtaccgcccgccgttctcgctggcgttcgcgagtatcagcaagggcaacgtgtgcgtggccggagacgcgctccacccgacgacgccggacctggcgcagggcgcgtgcgcggcgctcgaggacgccgttgtcctcgcccggtgcctcggcgacgccatcttcggcgacgggagggagagtgtcgaggcggctctgctcaagtacgccgggatcaggcggtggaggagcgtccagctcatcgcggcgtcctacatggtggggttcttgcagcagaacgatcacgcccttgtgaggtttctgcgggacaagctgctgtccgggctgctcgccaagggactcctcatgatgccggactacgactgcggaacgctctgatatggtttctcaattcagctccggttggttgctgccagactatctatagtagtaccacttggttcaaagtgtacttcgttttcgtcacaagctcgctcactccactcactcacgtacgttcgctcgctcgctcgccacgctggaacgatcaattccctagacccgctcgtacgtacagtacagtactgtaataagtgagtttgaggaaaagtcaagtaccgatcgcacggaaggaaggaagaaaaaaaaccggaatctctatctgttggctccgtttcttctt

SEQ ID NO: 1976 - DNA, 520 bp, Avena sativa
cttgaatacaatgaaaacaaacccgtgacaaacagcagagatacccaggaggttaagcttgagcaaggccttcaggtgctaaagattttcaaggatcatgtctgcaagacttccatgttggacgactttggcttctatgataaccgtgagaagataatgcaagagaaaagatccaagcgacagcagccgctggagaaggtaatgaacaaaaaggtggttgctaccaacaacactgaaagtcaagacgttgatggaaagcagggactgcaggaagttgcagaataaaatggtgtggcagctgtagcagtaaacggtgttgccccgacagatgcaaagccagcagtggatgccattggctgttgatttttgctgcttaagttatctgagtatctatgcaaggaggacagcttatacagggtgcagaaagctgctgtggttggaaggcattcaagatttccgtcggtttcgaaaatgctttgaaaggttgcagaaagttgcaagtctgaggcaattctaggat

SEQ ID NO: 1977 - DNA, 793 bp, Avena sativa
ttggattgaacaacatggttgtaattactggtatccatctttgtgcaagattatggaatcattactcttactactacaaggagaggtctgacctcttacaggaaaagaaagagaccgataattttgccaaaccgagctttccatccctaccttggtcgtgcttggttttataagcagacaaccaatcagtcaaaatattattcattcttggctccatgtgtggagacagagacattttacatgctgtacttgtacacttgaattatacactaaaagaatgttttcagctcagtcaaaaatcaagtctccagttgcgtaggtgttatagaagacggtggcgcagaagtaaagcaccgccgtaagggtgaggaaggcctggaaggatcccagccactggacgaaatatcctgctcctacggtgctaactatggcggccaccaccccgatgccgttcgtcattccgtgaagagatccagcgtattgaggggcaatgtcctgtacattacagaaatacccagcttgactgcaggaactcaaacccaaggctgcggtcatgataactgctgcaatagatggtgtctgagcgaatcttaaacatagcaatgacacacctgggccgataaaaccaattgactgcataattttccgaacttgcacggtagggtagccagatttgatcatgtaatctgcagatgctcctgcaacatatcctgatagagccatgacggcccaaggtacggcgctgaaccatgcagcttgtttcaaattgacattatataccgttttgaagtat

SEQ ID NO: 1978 - DNA, 683 bp, Avena sativa
atgaacatcagcatgaccatggccacgatcaccatcatcatgatcatgatcatgaacacaaacatgaccatcatgcgcatgatcacacccatgatcccggtgtttcttctgtaagcattgtttgcgaaggggagatggatcttgaaaaggctgacatgtggttggggaacctactgctggaacgcagtgatgacatataccggatgaaggggatactctctgtcagtggaatgcctcaacgctttgtcttccagggagtgcacgacattttccagggatccccggacagaacttgggaggcagacgagccacgaatcaacaagatcgtgttcatcggaagaaacctcaagcgtgaagagctggagacgggcttcaaggattgcctgctgaagcaatgagcgagagaccccgagcttctccgtttctactacagacgggatggatctccagcttcatgattttgagctttgtggctgcagaacttgtccttggaatgtcgaaactagtcgtgttggtcaaactgacatgaaatgcgagatgtgtatatagattggggaaccgaaactttactgtccttggacccttgctgtcgtgtctttcagggatctccactgtacctcagatgttctgcacgatgatgcattgttacttgcagagatttatgaatcgtcctgtgatttgtg

SEQ ID NO: 1979 - DNA, 821 bp, Avena sativa
ttttttttaaagggtacaagacaagccattgctttaatatatacagttacacaagaccactcctgttttccccaaatcggggacagacaaccagtagtatacatgctgttctgttctgtgcacaaatccatatgattctaataataataatatacatgctaacattcagtctgcatctttttagaagatccttcggtctccgtctaggctggctgcagtgttcccgagcactccaggcgacacgcacggacacgaaatggaccgatctcccgcatcgtcttaactcgaggaagggcacgaaggcagatgttgccctgtttctatctggcctaacctgatcataatctttgcctgcgtttcctctatttctggctatttctcagtgagtatggtaggagcagcgatctaccgtacgcgacaggaagtgccagcactttcttcgcctttccgacataggccctcttcgtgaagttgttgtagtcgttcgcttcgatctcatccaggatttgccggtacaacagtagagatgcccacaccggccaccggctttcctttctgagctctgtcacccctctctcggcctcctcgaagaacatcctggccctcttgatctgcctcttcatgaattttctccatttgtcagtgactactcccttgaagatgtcctcatcggagagtcccgcctccgcgagttcgtcctgcggtagatatatccttcctctgctcgcatcttctccgacatcccggagtatgttggtaagctggttcgcgagtccgagagccaaagcagcaccgtacacgctctcggctgtcgccttgga

SEQ ID NO: 1980 - DNA, 794 bp, Avena sativa
acagtaggtgatgcctctggatatgcgcatagttatggaatagttcttgttgtgagattcagaaggcacgcgtaatatgttgcctgaagggttgagcatgcgtttggatacagtagtgcaccccctgcagggtaaatattttcgagaagccgtgtgtccacggttatggacgcctcaggagtacagtgtcatgatcatagacaacgccattaatgttttgcctttaataatatgactagtaattatccttatcagctaaacacctgcttaactaaaattgccactgtgtgcattccgcaagaggacttcctcgactggtcttcgagggggaaatcttcggacgggttatgtttggtgttatattattgttaccgcatagcgccttcttatctcgctctaatagccgaagttgtagcgtgtctgtataagttagatagtgcaagctttgctgccgctgagcccaccatacctatgtaggcgaggaccgccgaattctagtctcgccgtgtactggcctcagtactgaccgctctctttctgttttcctttgccctttgtcggcacccttttggcttgacaggtatgtgattgacgacgttagaaaggttacccttcaggcttggcctgggcagtgttgtacaccgcttggttattcttcaggactcttagtcccatttggatcttgtccgtattcgtatactatcttgctctcttctggatttgtatcttcgtgttgtaccttttgtattcttgactcgttgagtcattgttgtatatataagttcttagtagga

SEQ ID NO: 1981 - DNA, 612 bp, Avena sativa
ttttttttcggtaaccatgaaattaaggaagggcacatttctttcaatatgtatacagtctaccctacagtagctaagttttataagaaaaaaattaacaagataaccagaacaaatgttacgcagaacgataaagttcttgtttttctgccacacaaaaggatggaacttgaacatcagtgcgagctttgccagctgcaattaacttcaaaaataccagggcagccacatgacgctaactgaatcaatacacatatgccgaatcttgctgagttgcgtaagaaaacctaacgatattcgaggtaatgccagcacttactccactgcggatttgcacgagatctagcaaaaggaaaaccttctcgttttagttcaaggtgaagatggctcgtgcggttccgactgactgttctgaactattcgagacatcagcttagatatctcaaaaattgcgctctgtacctggtcatcatcaggatctgatggccgaacccacacgggtgactgcagacctgacattgcaccgcttgctgccgccttctttccctttctagatgttgacaaagctttctccaagtctgattgcctcagggcccttggactagatgctct

SEQ ID NO: 1982 - DNA, 990 bp, Avena sativa
cggaaggcgtcgcggagcgggcggtcaaagggctccgggcggaggtgggcgcgcatgagttcgaggaagcgcgggaaatcgaagggcgccgtcagcttctcctgggtagcgatgtcgcggagctgcgcctgcgtggggttcccacccagggagcgcatgaggacaccgagctccgagggcgcgatgcggccgtcgccgtccgtgtcgaagagagagaaggcctcccgcatcgaggccacctgctcctcgctcagctccttgccggccatcgctgccggtgaggtcggatcgggagggattgggagatctcgcggctcggcgcggtgcgttgcgtgcgtcgcagcgggttctgaagaaaatggtctggtagaagataaacaggtagcaggaaaagaatcagttcccaaaccagatgatgaaagcaagactgccatggacattgagaaagcagaggatggaaaggcttcaactgatgatgcagctattagtaagaagaggaaactagaagacgttgatggaagcaaaccccatgccaaagaagataccactgccactgaagatgatgtggaggagcccagcaccatatcgaaaccgaataaaaggcagaaaatttcatctgagcctaaaactttgattgcattccaacgggtgaagctggatgatgttaaatttgctgatgaaaggctacaagataactcatattgggctaagggtggtgcggactctgggtacggggcgaaggcacaggaggttcttgggcaagttaggggaaagggctttagacacgagaagaccaagaagaagcgtggaacctacaggggtggaaacattgatctccagacccactcgattaagttcaataattcagacgacgagtgaccgcttcgctgctggaagttatcccgcatttctccattcttaccctcactatcccttgttacgggcatgcctgctctctggtgaagcgaaagaagacaaatttggtgccct

SEQ ID NO: 1983 - DNA, 600 bp, Avena sativa
cacggaggagcggatctcccacgacagcgccaccgccgaggcaccactggagtccatccaggtccgcctttcgcacgtccagtcaaagtttgctggcgcaatcagtgatggcggcgacattgtcctggtaggaagggtcaagtatggcgtgcctcacctgacggtcgtcggtccatacgaggttgacgtcagcatggagggcaatctgatcctctgccggcagatcgaccagccagggatgatcggcaaggttggcaacatcctcggccagaagaacgtgaacgttagcttcatgagcgttggccggacctcccgtggcaagcaggcgatcatggccatcggcgtcgacgaggagcccgagaaagagacgctggagaagattggtgcgattccggcggtcgaggagttcgtgttcctcgagctatgatggaagggccggagtctgcgtaggataattagtagcgcatcgtcagttggtggctacgcggagcaagtgatccgtggtccgtcgggacttctgcatttttgaagcctgaagattggaagaagtacatatatgtagggcgccttcgcttggcccctgtcaataagaagatgtac

SEQ ID NO: 1984 - DNA, 569 bp, Avena sativa
ggacatccctacaattacacctaccccaattgctaatgaagttgttccaattgcaaagaaggatcaatccaatgagatgaggattggaccaatcacaagagctcgtgccaagctactagaataacaggtgaacttgtttcttaatgaacctggtgttttaattaatgagaattttatactacctaagtctttgaattattgtatgatcaggtacttaggagaagaaggcatagcacagagtgaggagctgaaggaacatggtgtgttgatcaatgaggaatgcgcgagggaggagagggaggaagcgcaaggagctgtccaagacgaagagcaacaagaggaggaagttctctgccgtgacagagaaaagcctcgtttctctgccacggcaggctgtcgtggcaggaaaaccgactaggactctgccacggcagagccaatcttggctgagccacttgtggccgatttgtatccaggttgggtggaaccaacttgggttccaccataggccgccgcccttttgaaccccataaatagatgggggcgtcgtagattagggtttagaccac

SEQ ID NO: 1985 - DNA, 1021 bp, Avena sativa
ttgtggatgaggatggctcgatggccgtttacccaagctgcgtgtatttgccgaaagggaaaatttgaagatagtatcgattgctgacttgattagatataggagaaaaagagacaggctaattgagcgtgcatctgttgcacgcttacctttgagatggggcaatgttcgtgcttactgctacagatctgttatcgatgggatcgagcatatcgcaatggtgaaaggtgagattggcgatggtcaagatattttagtgagggtccattctgagtgcctcacaggtgacatttttgggtcagcaagatgtgattgtggtgaccagcttgcaatgtcaatggagatgattgagaaagctggaaggggtgtactagtttatcttcgtggacatgaagggaggggcattggtcttggtcacaagcttcgtgcttataacctacaagatgatgggcgtgacaccgttgaggctaacgaggaactaggactgcctgtggactcaagggaatacgggatcggtgcacagatattgcgcgatctaggagtccgttcaatgaagttgatgaccaacaatcccgcaaaatatgttggtctcaagggttacggattgagcattgtgggcagggtacccttggtaactccaattaccagtgagaatcggagatacctggagaccaaaagaacaaaaatggggcacgtgtactccagtcgtcaggttaaccatcagacccaaagcaccagcacaggttagaagcactagaccaattggaccttttgcttccactcacattcagaggatgatgttcttgtacggctgagtttctgagattatttcacaccatatgttagaggtgaattattttcaggtcacgataggttgaaagatagctaccggctaataataataataaatcatcccttaatttctttgtaatcctcagtgaaaccattattgtaaatatacacaatccagtgcagttatgaggaagtccccctctaaacggaggtttacagtactggaact

SEQ ID NO: 1986 - DNA, 601 bp, Avena sativa
agctgagcaaatttacaattcgctttgctccttacccacatgctatgacctgagctgaacctgtggatcctgaatcagaaatctgatggtgaggcacagcctgctgctggatccggcctaggtcaggggcacagattaaactggacggttatagcaggtcactgaatctggccaacttcgactgcttcaaagttctaaccagtatactccacatttcactgatgttggtcttggggtgggtggcacagaccgggcacgagaagtcaaaccaaggtgatgcgaccttggttttgtagcagcaccgcatcccggctcacctgtgttgtactagcagtagtcttcatctcatcatgtgtgtgtgtatgttatgtaattttatcaattttctattattgattatttaaaggtgtccaagttaacaatttgggtcatttagagcccaaggcattgctggacagggctcatctttatgtatttgtgtatgtacaattgtcggtccgccattgatccatgtaagccttgaatatgttgagctgtgtaacaaacgggagctgatacagtttgttgaaaaagagcggctgtttgtttgtgttgtaaaaaa

SEQ ID NO: 1987 - DNA, 792 bp, Avena sativa
tacagcacagacgagagcactctgagagacgccttttcccattatggtggaattgttgatgctaagattattatagaccgtgacactggaaggtctagaggttttgggtttataacttacgcagcagatgagcaggcttcatctgccatcatggccttggatggaaaggatttacatggacggaacataagggttagccctgccactgagaggactagtggcttccgtgatggtggttttggaggtggtggtggttttggtggcggtggcggttatggtggcaacaggggtggtggcggttatggtggcaacatgggtggtggcggtggtggttatggtggcaacatgggtggtggctatggtggaggcggtggtagttatgctgcccctggaggatccaggggcaatgatgccttctctggaagcaactttgctccttctggcggtgacaactttgctgccagcaacttcggcgctgatagtggtttcggtggtaacccagctggaaactatggtgctcctgcagcttccaccggtggtgatgagttctccagtggcacccctggttccaactttggaagtgccaagaatgatgacctcatggacgacctcttcaaggatgccgagcctgacaaatacgccaacaagggggtttagtctgtatcttcttttgcatgtcgctagtgctgaaccgtggataaatttgaggtgaatgatcacccatcagatactttcttgctagatttctactgtctagagataaaaatacctatgagtgacaatgagaatgtg

SEQ ID NO: 1988 - DNA, 754 bp, Avena sativa
  modified_base (745)..(745): a, c, t, g, unknown or other
gccgacgccaccaaaaaagccgtcgccgtgctcaagggcacctcccaggttgagggcgtggtcacgctcacccaggaagaggacggtcctacatcagtgaacgtccgtatcactggacttactcctggactgcacggcttccaccttcatgagttcggtgacacaactaatggatgcatatcgacaggaccacattttaacccaaatggcctgacacatggtgcgccaggagacgaagtccgtcatgcgggtgacctgggaaacattgttgccaatgctgaaggtgttgcagagacaaccattgtcgatagccagattcctttgagtggacctaatgcagttgttgggagagcatttgttgtacatgagcttgaggatgacttggggaaagggggcatgagcttagcctcagtaccggaaatgctggtggaagacttgcatgtggtgttgttggcctgactccattgtaggttgttggccttgagttgtgttgtccctgtcaaacctgtcgagacggcgtctttctcgttttacctggatttcacaccatggatgcttaatagcttatgttgatgtttgtatcagagtgtaaagttgagtttagcaaataagtgttgtcacacagacacacacatcttgtcgagctatgaatcatgaacttcagaattttgattactcaagtttactactgtataaaatattgcttaaaggattattatggtgtgatctcttaaaaaaaaaaaanaaaaaaaaa

SEQ ID NO: 1989 - DNA, 623 bp, Avena sativa
tttttttgtcacagccagagtcgtgaatgcctcacacggatcaaactcttcgaaaaagacagacggcaaagagaagtgtgctttcattaacatggacatgcgtctcaaacactccaaattatttctcagaaatcaggttccttccaccgttacaccagatggatttattccgatacgacattcatcatcaggaaaaagaagaaaaagggtccggtacaaacactagtttgttccagctcccagtagatataaggggaaatctttgtagaagataaaactcaacacctgaaagaagaaagagggcagccacagacacaagtgttccgagctcaaagttattcgcagacgcaagactgaaggaagctcccctcgtcagatgccttgtagaatcgaggatgagaacttcttttgggtagggatacaatctgaagaccatgtcaagtgttcaccaaaatcatatacgataggctttgatgcatcctcattatcagtatagcaattcctcgaaaacagggtccacgcttcggttccacttcgtctcgtacaggttcagaagcctctcagcgggtgtcacgcctgttctaaccacttcgtcgacctctctcagaaaaccaacctccttg

SEQ ID NO: 1990 - DNA, 759 bp, Avena sativa
gaaacacgtgtcctcgggccgagctcatggagcagctgctcggctcgggagaccgccttgtcatcgtccaatccagagatccttcgaagaaggacatcctcgagcacctgcacggcctcctcgtgcctgccctgcttgatcaggcacagcccgaggttgcaggccctgttggcatcaggcacgatcgtttgggccttccggtacaccagctcagccgcttcgtagttgttctgctgcatgtaagcccagccaaggttgcccagaatgcgggacatctcctgctggatggagacctggaacttcttgccgtgggagcgcgcggtcttggtgatcttcccgttgaaggcctcgccgaggcatatcatcttcagcttctgcttcagaagatcgatctgctcctcgactttcccgcatttcttgtagaggtcgatgagcaggttgtcgagggactcctgggcctgcctggagcagaggtgcctgaaggacctgatggcctcgatggcctcctcggcgcggtcctgctgcttcatgaccacggccatgtccttgagcgcgctgtccaccctgtccccggagttgatcgccttccagaaccacactaccgacgcctccgcgtccttctccaccagcctggaggtgcttggcccggacgtaggggctgtcgccggcgggcaccttgtggacgacgtggaacagatccttcttctctcctcctccggctctcctcctggaagaagcggcagccatggcggcggacgg

SEQ ID NO: 1991 - DNA, 441 bp, Avena sativa
cgctgatgttcaacttcccccggccggccgtggtagcgagggggagaggtggagcaaggcgactccaagctctctgcttgtgaagaaggccgttgtccatggcgctgtgcagatcttgcctctactcgctcttgccattgaggatgtggaaggaacgaggtggggtatgctgctaggcgtccggttcgacaagctgcagtccaggagctatccaggcgacgacgaagatgccgaagctatctacggccggagaagccgtctaccgctcaggtacagccacttctggcagatgtattcagatgcaaatccttagtctgactgaacaatgcaatatgtatacttggctgaagttttatctattggctgcgagctgactttctagagatcctggtctaccaattctgtttgggtgatcccaaataggtgggaggagtatacttg

SEQ ID NO: 1992 - DNA, 694 bp, Avena sativa
aaagcacgagatgagccaatgcatgaacatacagcactatccggcggtatgacagaggtggatattggagatattccaaacactaaaggtgaagggaagaatgggtcatgggtcttggtttcctgtgatactgctgggagcaatatggaggaaattagtggaatcgataacgaaaattatgtaatggttaatgacaatgacatcgtcgatgctcttgctacctttgttgctaggtgcattcttgaagatccaaagtccaagtcattatcatcgaaggagctgcaaaaggctgttgcaacagcactgagttccatgacagatcggaaaatggataagtttttgggaggctgcaaaggtgatttacatattggcaacttgggggatcacaatagcagggctgtacaggagtcgtgcagtcctgaaaatggcagcgaaaggagctgtggtgtccaccaaatttatcatgaaggcattgtgaggtgccaatggatagtgatgtcagtggttactcgcaatgatcagcaatctgtaaatacaaactcgttgtgtcaactgtacatattgtgatgtgtgatatggttcatctgtgaactattcatccttcagattgtgctgtatgcctgtaacttccaaaaatgatgacgatttctctcatcatgaatgaataatggtacgtacatgggcttagaaaaaa

SEQ ID NO: 1993 - DNA, 507 bp, Avena sativa
agaggaaggtgaacatgtgcaggctctccgggtggtgcgaaaaagaagtcgactattctccagttctcctgcatgttggtctttggacttggcttgaaagcatgaaccatgtcagggaatttcatcccatctcggataaagaacacaggcatattgttcccaacaaggtcaaagttaccctctctggtgtagaacttgaccgcaaaaccacgtggatccctcaaggtttcagggcttccacgctcatgaaccacagtagagaagcgaacaataaccggggtctgaacccccaggagcccggagaaagtcagcacacgtaagctgagaaacatcgtgggtgacctcaaagaaccccttcgcactggctccacgtgcatggacaacacgttcagggatacgttcccggtcaaactgcgcaagcttctcaatcagatgatagtcctcaaggaggataggtcctctgtttccccgacggttgagtgcgctgttgttccagactggcgcgcc

SEQ ID NO: 1994 - DNA, 485 bp, Avena sativa
ttttttgagtttggttcgtacctattcggttttttcaattttgggctcatagtttactaatatccatcaagtaataaagaagcataataacaacccaggaaaaaacctacttggcaacaggaggcttcttctgctgccaactgctacatcaatatctgctcatcatcgcaacacacaatacaacaatgtctcaatgcagacagcatcagtcactacatactagtgtccgacgacacatttcggtaaagcaaaacatatggacagtaacaatgatcagttaatgcaacattctgggagtacaacatatatacacattctaagcacaatcaggtcacttaggatccgcctacatgctttggtatttactagctccagctgtttttttctttccgaaggctgtttgttgcaagaggttgggaagacttccccaacacgtttgtccatcgaagcacgtcggcttacgtactctgaatagataccatggc

SEQ ID NO: 1995 - DNA, 848 bp, Avena sativa
ccaggagatggcagcgcttgcgtttttccagtggggtaatgttcatatgtctcgggctaggaagaggctgctcttaccggaagactctccaaaggaattggtgcttgagcaagtgaaggaagcgtacgagtgggcaaaggaagagtacaataaggctgggaagacatacgaagaagctgtaagggccaagccagacttttttgaaggtttccttgcacttgcacaccagcagtttgagcaggcaaagctctcatggtattatgcagtcggtaccaacgcagacctggacacatggccttcctctgaagtcttggagctcttcaacagagctgaggatagcatggagaagggtacagaaatgtgggaggaaatagaagaacagcgcctcaagaaccgatccaaacctagccaagaaaatgctgtgctagagaagatgggcatggaggagtatatcaaagatgtatccatggatgacgctgctgaacggacttccaatatgaggtctcagattaatattttgtggggtatgctactttatgagcgctcagttgtggagttcaaattaggacttccaatgtgggaggattgtctgatggcagcaatcgaaaagtttaaacttggtggatcttcagctacaaacattgctgtgttggtgaaaaaccactgtgcaaatgaaactgcccaagacggtttgggcttcaacattgacgaaattgtgcaagcctggaatgagatgtatgacattaaacggtggctgcgtggtgttccatcttttcgtctcgagccattatttaggaggagagttccacaattccataccgcactggagcatatataggatgcatgaa

SEQ ID NO: 1996 - DNA, 438 bp, Avena sativa
gagcagtggctcatccggaaccacggctacgagacgcagtacgcggtgacggagctcaacgagaaggacttctggcgcatgttcgacgcctcccactacgacctctgccgccgcaagtacggcgccgtcggcaccttcatgagcgtctactacaagtccaagaagggccgcaagtccgacacggaggtgcgggaggcagaggcagccatcctcctcgacaccgccgaacaggaggacgacgactagctagctagctgcttctttcttcaggatgagatgcgttggtcggaatctgaactacgtactactctttttgcttggttattattagaactcgatcgatcgatgatggtgtgctatcatcgtttggtttagcctttttattttgttgttgaatttcctagaccttattaataaggagagatgtactaagtaaaa

SEQ ID NO: 1997 - DNA, 768 bp, Avena sativa
gtcaagggctcgtacaagcttgccgccaaggcccctgccgccgcaaagcccaaggccaaggctcccgccaagaagaagcccgcgaccaaggccaaggcccctgcgaagaagaagcccgccgccaaggccaaggcccccgccgaagaagggccgccaccaaggccaaggcgccagtcaagaccaaggccgcagcgaagcccaaggctgctgccgcgaagcccaaggccaaagcccctgcgaagcccaaggccgccgccaaaacgaagaccgctcctgccaagcccaggggccgccctgccaaggctgccaagacctcggccaaggacacgcccgggaagaaggcgcccgctgctgccgccccccagaagcccgccgcgaggaagccccccaccaagcgcacgacgccggtgaagaaggcccctgcagccgccaagaaggcaccggcgaagaaggccggcaagaagtagattgttccagaaggtttccattagcagtatgtcctctgttgttcccttctgaggggtagtggcactaggctgtaaatttgatattctgggtgggggtgcagcggtcttcctccgcacccattggtggccatgcgtgtgagaaaccggtggtgatgatgacgatgacgaggggaatctgttgttgttatgttcctggagtagtagcctctgtatgtctgtagctaatttcagtctttgtgttgtactagctgcatcagcaatgttacatctgtcgaaatgataatcttattttaccaaaaaa

SEQ ID NO: 1998 - DNA, 651 bp, Avena sativa
aatcatgtttatatgtttacaaaaaaagggagtagactgcattatttatttgctgtgctcggtctcggtctttcagtaacttgggaacggcataagcatagccgatgatctaatttaagctcatgtactacatggtatcacatacaaccaaaaaatcaactggggtttcaactcgagtaaccttgtaaactacatactacttctaacgagtcggcctgcttcaaatccagagtctacattctctgctagtgtacaccaaaagcttcttaagatcatatcaagtttttctctaccaaagttctggatgggacgttggttttcatagctccgttttgcccgactttgcaggcttcttcttcccttgccaccatttcttcaccactttcgacaccttgctcacatggcctttcaatttcttagtggtgtccttgatctgtttcacaacctgttgcttcagatctttcttttgtggacccttgttttttagaaccttccccaagttcttggggaagttgtcctcctcgtcttcatcgtcatcttcatcatcatcgccagcttcatcagcaccaaagttattcttcatcaggtcgtctctagagtacatcttcatgtttggagctcctgggataccctccatcgatctcattatct

SEQ ID NO: 1999 - DNA, 904 bp, Avena sativa
agtgtgatcgtcgctcgcagatgcgagcatgtgtggattgtaggattccagcttacacagttaaccgcgccggagtgaccagacagagtctcaatgacatctcccgtagctctgtgccatatatatacctttgaatcttcacttccactggcaatgaaagcctgctctgatccaccaaagcacgatcttatcacaaaacgactgcgcttatggccagtatactgtctaactctactggggtcattccttatgctccacaaatgaatctcctcagttataagatttacaagcaagaaatcgccatcttcagaaagagaaaatgaagtgattgtattatcctcttcaatcagcctctcctgtttcgtatccctattgaataaaagaatcgtggaatctctactcatacttattataagtttaccatcttttgctacggcgaaatcagatgtttttgatgatctctgccctttccagcaatctgcttctttaccatctagatcccacaagcaaatgctttcatcagttagaccagacaatatttgctttccatctggaaaccaattacatgacaccagaccaaggccaggcttttcataaacatgaatacattcgccagattcaacatcccaacgccggatggcttcttctattccacatgtgagaagctggcgatcatcagggctccatgcaaccatcatcactggtttctcatgaccagtcaatatgtgcttcaacaatagttctccatcttcatcgaccttccatatgattgcagatttatcatttgacgctgaggctaagtatttcccattgttcgaaaattgaagaaaccatacttcgtcgtggtgcgcacgcaaaacctgcagtgttcgagacggtatctgatccttccacagtgatgatc

SEQ ID NO: 2000 - DNA, 802 bp, Avena sativa
ggacgcggcggtgcggtcgcagctggacgaggagggagggttcgaggcgcgggtcaaggacaggggcctcctggtgcgcgggtgggcgccgcaggtggccatcctttcgcacccggcggtgggcggcttcctcacgcattgcggctggaacagcacgctggaggccctctcacacggcgtgccggcgctgacgtggcccaccaacgcggaccagttctgcagcgagcaggtgatcgtggacgtcctcgacgtcggcgtcaggtctggcgtcaagatcccggccctgtacgtgcccccggaggccgagggggtgcaggtggagagcggcgacgtggagagggccatcgtcgagctgatggacggcgggccggaaggggcggcgaggagggccagggccagggccaggaagatcgccgtgcaggccaaggcggccatggaggaaggcgggacgtcgcactccgacctgacggacatgatccgccatgtctcggagctgtccaggaagaggaggctccagctcgagacagctgacgcgacctgtgaagaagcaacaagagcagcagacaacgctgccgcagtaccggtgcatctactgtcccaagctaattaattaagctgcatctgcaatcgctgcacaagaaaccggccggcgcgatcaaataaactttcgtgatttgctcctagctagagtattttcccttcttagtcgatttaggaatttttatttcaaattcgagtcttcttataatttataataaggttatcgatccggaaaaatcagaaatgtgacaaatttgaaaac

SEQ ID NO: 2001 - DNA, 881 bp, Avena sativa
aagggacatggtatgatctgcctctttgaggattttacatttgacgctgcccagtgagcagctgacacccaggaaggtagcaatattacaacagtgtaaagtttctcgcatatatatgtcgtccgggctctgactcagacatgcttaatgacacataacttaatctccagaaagaattttcctagcaacaagtggtgaaacctctctacaaaagctacctatggcagaaggctggctcttcgtgtgacacttcctcttcaactggggatagcatacaaaaacagcgaggcggtgacccaaaggtgtcatgactcatggataggcattgggcccgattggtacagtactatgagcttaggtggaagatttggcattcaggtttgtagttgctctttaaagcagcctgctcaaacttcttcaatggcccttcattctctgtcaagccagtctggatgaagtaacgcgtccaccacgaattactccgcaactttgctggtcttccaaattttggcagttcagaaaccttagccttctgctgacctggattgccagtaaagatcacaaggccatttgcagcgacccttgctaaatcaggaagtgttttgttcagataccttggggtcagataatccaaagcatctgacacaacaacaaggttaaaggaatctgagcggtatggaagattgtacttaatgtcagacatacggacaaaacccttccgcacaaggcttttgcagctactatcagcatcctccaaatcataaggctccaccccccatgcttcaaccttcccttctttcaacaagttagaaaactactgtacaactatcagggccaacatggagaaccttctgcatatcactgccatacgcctttttaag

SEQ ID NO: 2002 - DNA, 420 bp, Avena sativa
ggctggttcctcctgcagtcagtgcatccctgtacacatgtacatacatcattaggttgagtggttaggattctgcagaatgcctgagccgatcacggtccacaagctgataattcttctaattgaagtagtggttacgcaatacatttttcatttgactcccaagacaagcttggatgcggacatcctcctagtagtgatgtgtaggtccatcacagttttcccttggtgctggactgagtgtgtgagagtgtaacataacatgttgcgatgttcttaccagttagggcgagcaacttgctccccaatagaatttgtctgtatgtattagaggccagtgccctgtagttatgatacagtacattgtacatggaagctcatcttagtgggacaaataagacgtacatgcaaatcatgtca

SEQ ID NO: 2003 - DNA, 358 bp, Avena sativa
aataattgattacatagacacaacacaccttcaacatgccatttctgtttagttaagacgaacggagcacataatctagcaaatcaagctcacaggataccagaaacagagtaaccaaaatgtagaattgatacatcttacagggatttggaccaaacacattacacaagtcgtaactctgcattccaggtaaaggaaactattctcctaagaaaaaaaggtaaagcctatgctgctggcatttccgcattccataaacccaacaccgtacaggctacaacacgcgcttaacaatggacaggatatcaaagacagatcaaccctgtcttgccaaggcatacagcttcgacggaccatc

SEQ ID NO: 2004 - DNA, 408 bp, Avena sativa
aagcagtgacataatccataacttggaagacgcacggaatgttttcaacaagggacggtgcgggtggtatcaagggcaatggtgcaacaaaagaaaggcaagacgtctcggtacgccggcgacagaaggtggaagccgaagcaccagacgacctgatctcagactcgatcaagatgatgatcaagagttttctgccgaggccgatttccagcacacatcttctaaaatacggacaagagcagcagcacgaagagcaagctcgtttctcgaagggtttaaatccgccgtgcgcaagtcgccgagcttcgcagagactgagaacaacagcggggtctccatgtggccgagctccaagtgggcctttcaaccacaaggagtccttcacccggccgctgctcgacggcctgc

SEQ ID NO: 2005 - DNA, 786 bp, Avena sativa
cccgggatacggaaccaaagccgtcgcgatctcatctctccctccccgaccaacccaaacccaaaggcccatccaatccaaaagcagccgcgacgaccagggcaggcggcggcggcggcggatcggacaaccggatgggcggcggcggcctgggccgcggaacgcactaggacggcggcgatcggcggcggcgcgacggggaggaggagcacgcggagcggggggacaccatgtctgcggtagtctattgcggcaagaggtcctcctccatcttcgccgacgagctcctcccgccctcccctacctcctcccccaacatggatccacagttgcttgagagagctcttgaagcgtctggtgatgatttggattcagcaataagagtttgaaggagctgcacttggagtcaactcaggctgctactggttacgcatctgaaaatgggcaaccaacaacagttcagccatctgttgaaggtactgtcaccaacggtgtcgtggacacggctactgaacaccaacctgccgctgatactcgtcacccatgcaatagtggccctgaatgggtcgatcttttcgtgagtgagatgtcaaacgcgtctgacattaacgatgcgcgggctcgcgcgtcgagggctctggaagccctgacgaagtccattgtggagggcgccggagctgaagcagcacagagcttgcatcaggagaacatggtgctgaaggagcagatgacggcgatcctctcgcagaacgctgtgctgaagcgtgcggtggcgatccagcatga

SEQ ID NO: 2006 - DNA, 508 bp, Avena sativa
aatcaagcagtaggtgatgctctaagtggaatgcttctggtggaggctattttacaacataagggctggtcattacagaattggtctgacctatatactgatctgccgagtaaacaacttaaggttaaagttaaagatcgtacttctattgttacaactgatgcagaacgaaaagtttttcaaccatctggcttgcaagaattgatagatagggaagtcggtaattactctcaagggcgatgttttgtacggccatcaggaactgaggatgtggtacgcgtatacgctgaggcatctacggtggaagcagctgatagccttgcaaaatctgtggcacaacttgttgaacgcattcccgggtaaactaggtccctgtgtgtaagaacacctaatacactatatgttttgttgtgttttccaataccagacatgatttattttcaaattttacatgtgttcataacttcatgtgtactacctccaccatgacgtatgaatctaagaaaaa

SEQ ID NO: 2007 - DNA, 905 bp, Avena sativa
tgagcaagctgctgaggcacaaaagtcaaagggttcacttgcgcgacgtggtagaactagttctgatactagtggaaataagagagattcaatctcagttgatgctattctatcgaagaatttatctacatctgtcctgagtggtgaatcttcgtccaaagtctacctcattaactgtttatcagctatcgaggaaccactgatgggtcaggaggttgctaagagttatgttaacaatcttcgctctatgattgaaacacacgtccgagccttagtagataaagaagccgatagcattctcaccaaatgtggattgtcaagtaagatgtcatacataaagaactacagctctaccgacagcaaggatgatgcaagacctctggcagacatcgtggagacatcaccacaaatgcttctggaatgcttgaaggcgttctatggtcttgtgaccggaacagaaggttccttgcctgagtttgagcagctgcaggtcccaaggctacgttcagatgcctgctacggtttggcaagagctctagcagaagcttatgagctcatttacaaggcggtgatggatccaaagaactgttatcctgacccaagatcgctggttaagcattcgcctgagcagataagaactatactggagatctgaggcccatacaaaccataccttctgatacagtgtagtgacaggagagtcatgttaaagaatcactgtgatgtatgtatatttcccgctaaaaaacccgtgggtgcgatttcttgaagaaatattgaagtggctgcacctttactgaactgttgcttgtcctggattcagtttatcgtttgcttaaaccacattagtatttgtcaggttagtgatgtcaattgtattccagagaagagaaacattttctgaa

SEQ ID NO: 2008 - DNA, 898 bp, Avena sativa
  modified_base (183)..(183): a, c, t, g, unknown or other
aatatcgagcctgtacaaatatgaatgtttcgaagtgtttcttgacagtgaatgaacaaatcgagttcatatccagtagcactccaaaatttaccgcacttgttgcatataacaaatcactccatgctcggcgaatactgactgtaattgttctgtaccatttccaccaggaatcgttcgtanatttttttgcctccatcacgaggatgggcttttgctcaagagttttgagatccatcaagttcgttgctcagcatatggtgcagcagaatatcaaccatgttaccctttgaccgcacacgcacagaccggcgtctgcttattcctccagtggtaggactctggatatcagtctctccagttttctccagttccatctcggcaaaaaatgcctccaacacaaatgctacaatcagattgagcagcagcaatactgaaataaggtaaaagctgacaaaataaatcaggctccaagaacttccagtcagttgccaatagctctccatccagatttgccaattgcccatcactaacaaattaaatagagttaccataccacttggatagtcattgaaattaaaaagaagatagtcattattaaagaggtcggtttcttccagtgtcgggtttcctgcatagacgatgcccccaaatatctgcaaaccaagggagcagtacatgcaaagaacgcagaatacgatccccaaatatggcatcaaactagacataagagtaaggaatgtcgcaacaaatgctctgaaacgttgaacttgcagcaaaattcttgttaagcgcaacactcttccaaggagaagataccgaatccattctccatttaaaagaaaagaaagctttgaagggaaagcaaatgttagagtctctccaataaatatagtcc

SEQ ID NO: 2009 - DNA, 768 bp, Avena sativa
gctggctggacgcgcagccagagaactcggtgctgtacgtctcgttcggcagcttcgtcgccatgtccccctcgcagttcgaggagatcgccatggggctgcgtgacagcggggtcaggttcttctgggtggcccgggacaaggccgccgatcttcaggagaggtacggcgacaagggcttggcggtgccgtggtgcgagcagcagaaggtgctgtgccacccctccgtcggcggcttcctcagccactgcgggtggaactcggtgctggaggccgtgtgcgccggggtgccattgctcgccttccctgttgggtgggatcagctggtgaatgcccggatggtcgccgacgaatggaaggtcggcatcaacctgagggagcagaggggccgggatggcaccgtgggcagggccgcgatctctgctgccgtgaggaagctgatggatttcgacagtgaggttgggcaagaaatgaggagaagagatgcagaactgcgccacgcctctggtagcgctgtcaaggaaggcggctcgtcgcatcgttctttcagcggtttcttgcgagatctcgcggacggtaaattggatgtaacggaatctcctcagtgatatttcttcgtttatttgtccagtgactgacgacaaattagttgtttacgggttcaaataatgcactgaaataacaagcccagattcgcgacaagggattttgtgcacgtagggaagcgttgctccgagttaattgcaaaaaaaccgcgagaatcacgcg

SEQ ID NO: 2010 - DNA, 807 bp, Avena sativa
tgacacgttccgagcaaggtatccaccacacggacgacgaactgtcgtcttggaggacggcgtgcattgggacaggatcagggcagctccggtggaaactcttgcgcatgatctgcatgcctccgactgcctacaccaactccggccaggtgataacattgagattcagtggagaaggaacaaggagttcccatatggctggtggtatggagttgttggccacttggagtcatgtgatggaaatgaacacttttgtcggtgtcatctgagtgatactgttgtgctggagttcaaccaatacacacctggctcaagatggaggcagtctctggtcaaccggaaggatcacagagaagagggcaatgagggcgatggattctacggtggaataaggaagcttcagaacaaggatgaaatatccaagtggaagcagctgtggccaacagatatcctggaataacgcactatttcgcccgttacgacgcatcaagattggttaactgattgataccttccattgatccgattagccgtccctctgttcaagctgtacacacggatagaacacggggtgacaaaatctggtagctagacacggttgtaaacttactgtcgggcaaaataaacccagactgcttctttatttagggaactgtaggcctgcaacaagagcctactacattcagtgtatgtaaaccgcagtctgtgtcctttttgcccgctgttgtagttctagagcagaaagatcaaatgtaaattacaattttagttcagatttacgacacattcgcaattgtgtccctagac

SEQ ID NO: 2011 - DNA, 498 bp, Avena sativa
tttttttagttgctaatatgcataaacaataccttttttttaacttgcataaggaacgaccttgtacatgtctagtcaagcttctgaaccatcaccagagtaaccacaaaaaattgtatagtcctaattaactcaagtggagatttaagtttgaacttctgctgtaatgctacatatagtaacatgaacactggatatgacgagtgttatacagtgttcttcgataaaattacaggtatagtaggcgtgtcttcagtttcttgttgcctctgcaacagcgggaatacgtgtactgtattcttttagtataatgaacgaatatttataatgggaccttcagtttattcctttataaggataatcacacccagcagcactcctatatgttgactggtgaaagttattcctgctcatggagtgaacggttcatgagttactagcacggcaagcacttgtcttggtaatgaaataaatggattattttactaccaagacaag

SEQ ID NO: 2012 - DNA, 668 bp, Avena sativa
gtaccgtcaaatgtatctgagactgatcttgagaatgagttcaagaagtttggccagctcattcctgaaggcgttgctatccggagccgcaaggaaactggtggctactatgcttttgtggaattcgaggaactcagtggtgttcacaatgcattaagggcttcaccacttgaaataaacgggcggcagatatatgttgaggagcggaagcctaacagtggcattagaggaggaagaaggggtggcagaggaggtcgcttcggtggtggaggcggcggtggaggtgcccgtggatacgcgagaggcgatgagtacaacaacggtagccgtgggaggtcgaacggctaccagcgtgccccgcatggcgagaggggcatactaggggcaaggaactgatgatgtccctgtctggcctcctcaggagggagcataagaggttttgatctgtgggagggagcaacagaggtccaaaacttgactattggagcgctccattccgtttaggttgcgtttacggttttggaggttttggcttgagtttgccacagcaagtgaacgtctgtgtctgtccgttcgtaccaactattgatagatgctttaatgttgctatattgctgccttctcgtttatgctagatctgttattttctgtgcttaaacaaaaaaata

SEQ ID NO: 2013 - DNA, 933 bp, Avena sativa
cgaatgcacagttggtggggacgatggtcagcaagttacagtacatgaacctgaggtcagagatccgcttccgctaacaatccatcacctccccatagctgtaacctttgcatattttggtgatggtaatatcatggttattgatccaacatacaaggaagaagctgttatgggaggaagaatgacagccacaattaactcaaacggtgatgtctgttccattcagaaagctggtggagagggtgtcatgtcaagcgttatcatgcagtgtttacggatcgcttcggttaaagctgctgatataacaagcaaaataaagagcaatgttgaggagtataccaccgcgaaggcattacagaaagtaaagcgtactccagtcttagtggctaaaaaaaatgacgttcctgatataaccatggagagcaatcatgatgcactggaaagccaaaccttgaagacacccaatgatgctcaggacataaccaaagacccaccaactataccaaatgagaagaggaatgaggatgccaaaatgttaactgaatctaatctggaggtggaaagcatgttaaattctgtaaccgctggagagtcagaggaggccaaggaaagtgaatcacctaagagtctaaaagatgctgtcaaaccaaaacataaaaaggaagaaaaaacaacatggaaagagttagatgaactgtaacttataggtctgcctggtaagagttaaatatcatgatggttgtagactcagctagttagttagcttcctttttctcttgatggtgcaaatgctacataggtagtgcatgggatttgagagtaatattactcttttattgtgtcagagtttactgtaaatatccaaattacgaatcttgttttgtactccctccgttcagaaatataagatgtttttagtttgtaagaaaaaaa

SEQ ID NO: 2014 - DNA, 769 bp, Avena sativa
aagaccctcgtctccaggacccagggtaccaagattgcatctgagggtctcaagcacagagtttttgaggtttccttggcagacctccaaggtgacgaggaccaggctttcaggaaggtcagacttcgtgcagaggatgtgcaaggaaagaatgtgctcacaaacttttgggggatggatttcaccactgacaagcttaggtcacttgtaaaaaagtggcagacgctaattgaggcccatgttgatgttaagaccactgacaattacatgcttcggctgttctgcattggcttcactaagagacgtccaaaccaggtgaagcgtacttgctatgctcaggccagccagaccagacagattcgccggaagatggttgagattatggccagccacgcttcaacctgtgacttgaaggagctggttgcaaaattcatccctgaggtcattggaaaggatattgagaaggcaacatcaagcattttcccgctccagaatgtgtatgtccgcaaggccaagatcctgaaggcaccgaagtttgatattgggaagttgatggaggtacacggcgactacaacaaggaggatgccggtgttaagttggataggccgactgagggagatgaggcgatgacaacagaagaggttgcagctgcagctgagtagggttggtgttacttccttaattcaggagatgcgtgtcctctgttcagaaattgatagtgtcggcttgattcagttttggtacctgctttctawctcaaacagatag

SEQ ID NO: 2015 - DNA, 662 bp, Avena sativa
tacagaagtcgacaatcccgtccaagttggcatataaaacacagctttctgcgatccatgtcatacgacattagtgtgttctcgtgcccaccaactatgaaaatcatattgtgttcggagtggaacgagacgacattgaaatgatctgcagatgatgaacaccgtgctccaaacagctccaggtggctgacattgtgcttcaaggtccattttccagtattatagtcctcaagagcccagattgatagctcagaactatcagaaccagcagtattgtctgtgatatacaactgcccctgtgatacaaaaattgcatcatcacgagcataatcattgtatggtggcaaaggagtatcaatgagccaccaatcatttccttccacatcaacggctaatatagaaatagaagcataagaggtagccaaatgcaggatcccgttaaaaaaaacgcctttagcattttcgggtattgaaaacatatagctgtccaggctatgatgctcccaaactccagttttagacgagtatatagccagtgtttcgatgcggtcgtcacactcgcctcgctcagactcatctaaaccccaggcctcttcatcaatgaactcgaacagatggaagtgagaggagaccgtcggctcgaaccccaggcaagctatctg

SEQ ID NO: 2016 - DNA, 662 bp, Avena sativa
gtcacatacaagctcaatgaccacaaatatgtccataaatagtcacatacaagctccataacgacaaatatgtctataatagtcacatacaagctccataatcacaaatatgtccataatagtcaaatacaaggtccataaccgtaggaagagtggcgccactcggcagcaacgtcgctatctcggactcgtaggctgtcatcttctgtgcaatccacgtcatcatctgactctgctgagcaatgatagcctgagcctgctccctctgtctcgtctcgttctccaagtcctcccgaatcttgtcgatggctctagacgacgttgtcgaacggaactgtatggaagacgaagagattgagctgtcacgcctaatctctctcatagatcggacggtcttaggatcaatggagctgtcacacatccacaagcggccattcttccggccacatcccgcacacatggcaacctcagggtcaaagggctcggtatcagggttcgcgtcgggatgtgttgtggcaaggaacttccggtactccgtgtccttgagctcggcgttcgggctcacccacgtaagcgtcccatcctccttgttcttcttcttatgaaactaactccagaccgtgaatatcaagggctccgcgcctagctcttttgccacgttc

SEQ ID NO: 2017 - DNA, 444 bp, Avena sativa
cgtcgtggagtaggcggtggccacccatgtctgtgacgccggcggccggccccagctgcgcagggttgccggcgcagactccggagggctcgctccccggattacaaggcccccctcggcggccgagcgtttcgaagccgtcatgggtcgtccgcaccgagtcaaatgttaggagagaacggccaaaaccacgtgaaccaccatgcaccatctgcaaaggcacaggggcaatagattgccgcatctgctctggtagaggaagagtaaaatcatgtcgatcttgttatgctccccaagggcgaatggccacaatggtgccagatatgtggaggcagtggcctagattactgccaccggtgtcatggaacaggcgaatatcgagaacccatgggctttcacttcactgccaataggaaatgagattggcacaagcagttctagagc

SEQ ID NO: 2018 - DNA, 464 bp, Avena sativa
tcccgggataagccatcctggagtatgggttcttccttccagctgaagaaaaaagctgtaaaggctctcccgaaaattgaaattgacgacgatgatgaactgattgacgaagacagcctcttgactgaggaggacttgaagaagccacagcttccagttgtgggagcttgtgaagtgggagccacaaagaaggcatgcaagaactgcagttgtggcagggctgaggctgagcagaaggtggagaagctggggctgaccacagaacagattgataatcccgtgtcagcttgtggcagttgtgggttgggcgatgcattcagatgtagtacttgcccatacagaggcctggcgccattcaagatgggtgagaaggtcacattgtccaaacgactttcctctcggcmgacatatgatgacgagagcagcagcctccgataggaaacgccttctttcaatttgttggt

SEQ ID NO: 2019 - DNA, 892 bp, Avena sativa
gagacggaaaccggaccgtcgaagaagcattccaaagttgctggacaggaaccattacctgacagccatctgtcatgtattcttgaatttgatggtgcttgtaaaggaaatccgtgggaagtcaggtgccggtgtagtagtaaggcggcttgatggatctgtgattgctcacctacgtgagggtttgggtattgcaacgaataacgctgctgaatatcgtgcattgctcttgggcctgagatatgctgctaagaagggattcaagtatatccgtgctcaaggcgattctaagcttgtctgttaccaggtccaagatatctggcgtgttaagcatgataatatggctgacttgtgcaagaaagttaaggaactgaagggaaattttcttcagtttcagatcaaccatgttttaagggaatttaatgccgatgcagatgcccaggctaactttgctgttgaacttcctgttggtgaaattcaagagcagtcaagcttcccatgctagtagttgtgcttcggagtagtctgtgtattactccaccttgtcgctgcgactgaagctatgtaacatttgctcattttgcattgactgaaacaagagttcacgagccggagctgagatatctggataagaagtccaagccgatgaaacgtgtctagattttgagatgtcgcagagctagctcgagtaacctagcactagtgtcttgattatttattggactagtattacaatgacagacgctatttagtactccctcctacctaaattagttgacttagatttatttaaattcgtttgtatttagacatgattaagtattagattcatgcgaatcttaatgaatttgagacaactaatttcggcccgagggagtaatagtactagaca

SEQ ID NO: 2020 - DNA, 1093 bp, Avena sativa
gaagagagtacacagtttagcccgcgagtttagtaacacaggggaatgtcataatctcgtttgcctcacttgctattgtggctctttagcctgattttgcctacttttgtggctaataacatttataaaataaagcataatgcatcacaattcaacagctacaaacccatgccttagaagaaacacaacactcacgcataaattttattgctgcggtacacctaaatgcacaaaagaaatgagctcaatcatggatgatcaatcgacgaaggggtagccagtgatggggtcgggcacatagaaggttgtcctatttgaggaaggggtagtcggtgtagccgacgacgggatcggaggagtagaaggtcatcctgtcgtacttgttcagctccgcgccgagctcgaacctctttggcaggtccgggtttgcgaggaacaaccgcccgaaagccaccaggtcggtgtacccctcggcgaccaccttgcccccttcctcgcggtcgtacccaccgttggcgatgaaagtccccttgaacgcctcccggtatggcaacagccgcttcagcaccacccgccgcccatccacgacggccatcctcggctcaatcatgtgaaggtagaggacgttgtggtcgttgagcttggtggacatgtggagcgcgagggagtgagggtcggagtcgtggcactccagcaaatccgtgaagggggagagacggacgcccacgcggtggcctccgacctccttcacgacggcgtcgaccacctcgagcgcgaagcggcacctgttctcgaggctgccgccgtactcgtcggtacggtcgttggcgctgtccttgaggaactgctcgatgaggtacccgttggcgccatggatctccacgccgtcgaaaccggcgtcgatggcgttcctggcggccttcctgaaatcgtcaacgatcgcaggaagctcctccacgttcagcctcctgggcggcgagaactcctcgatgtgtccgtcgaagctcgtctgcggcccgatgcccttgtcggtgctcgacagcggcgcggcgccgccgggctggaacccgtacgtggacactctcccgacgtg

SEQ ID NO: 2021 - DNA, 681 bp, Avena sativa
gtgatggtaaatggattgctgattctgatgtgatcactcaggtcattgaggagaagtacccaactccatcacttgtcacccctccttgagtatgcgtcagtgggctcaaagatcttctcgaccttcatcgcgttcttgaagagcaaggacgccactgatggtacggagaaggcgcttgttgacgagctgcaggcactcgacgagcacctaaaagcccatggcccctacatcaacggtgagaacgtgtcagctgctgatctgagcctgggcccgaagctctttcatctcacggtcaccctggagcatttcaaaggctggaagatcccggagacgctcaccagcgtccatgcctacaccgaggctctcttcagccgggaatcgttcgtgaagaccaagccagccaaggagcacctgatcgccggatgggcgcccaaggtgaacccgtaagctcccgctgcctggaaggaagaccacccgtctgtgttctgtcctgtccttgttagtattgagtatgggtagtaggcctcctctgtagccagatcgcgcgatctgggttggaataatgtagccttgctgggtgtggttgttgcaacttgcaagcgtgcactttctgcgtgaacttgtctcaggctttctgggtgtgttatgttccgatgcaggagtgcgtgcgtgtgtgtgtgt

SEQ ID NO: 2022 - DNA, 910 bp, Avena sativa
cttggtgcgaacctacatttccaaggagcaagaagaaacatgtgccttgcactatttccaggagaacttgcccaacgtatcagttgttccgaatgagaagcaggatgagcttgagttgaaatggaaagagtgggattaatctcataaatggagaccagagggatgacaaggtttcgcgagcttccatcacgtcattggcaactgcagctggttttcatttctcgggagattcagtgcagaagaacttcattgagagcagctttgatttcaacaactttacttggggtgagctacctgaaggccaaatgacaggagcagcagattctctacagacgcctggggctacaagtagtcgactctctttcggcatgacgccaaaatctgtaaggttgcccaagaatggcgagatgctcttatccgtgcacgggtctcctcttggaatgtacaaagaagaaaacctggcacctattactgaatctggaaatggaagcgaagagctgcctcgtgacgccagtggccatcaatagtagcagtagtgcataaccagcccttgacataaggctaggagtttgatgctgcatctctgttgactgaagctgggacactaatcagaactctgatcgacaagatgcattgtttttagcttattatatcctctcgtgtagtttgacaaagcatgtcgaatgaggccagtttcagtcagctgaaaccgtttcgtcgggtgctttagcagtgttgtttgttgttaacttcgccaccagtgtaaagctggtgagattagctgaatcctttggtgcggccttggtgattcaccaacagttattgcatgtatgtactgtcgatgctgtaagcggaactgcgatgccccatttagcgatgcgccgtggtgcgccgtgtacatcaggtgcta

SEQ ID NO: 2023 - DNA, 750 bp, Avena sativa
agcaagtggatgacaacatgccgttttatgatgcatcaagcaaccacaaatgggaggatggaaaggatgattatctaaatgtgaatggcctcatctaccagccaattgacgatgagcctctcttttgatgtgggagatgatctgatggctttcttcgatgcaccagaggacgatttcaacttagatcttttgggcccagttgggggctctgattctcaacttccggacatgtcgaactttgctcaaaaggatgaaaagatggatggttttatgttcgatggtatctccaagacttcaaatgcaaacgctcaaaatggtgcatcttcatctggctcccacgggaatcagtatccagacattgctctttcaggtgtgccaatggatgataaggttggcaacagtattggaaagcgccttgccaacatgctgcagtcgtacccagccccacctgcaatggctgaagaattcccgccagccaccggaaaatcggttgctgcaatgagcgagcctagcttgattcgtgtcactgcaggcttcgtccaagttggaggtctcagtattactggtagcgaccgctggcccctacagaagaatggaaacttcagtgtacacctttctctcacggtggagagcagcgtgtctgcaaaatccattggcttcgacgaggagccagccacacggatgaacaccgtgccctcggtgctgcgtggcggcctgtaccttttctttgtatcggccatgatcctcgtg

SEQ ID NO: 2024 - DNA, 860 bp, Avena sativa
ggagtcatggacaccaatcttgccaagtattgttcgataaatcacattggtggtgtatcttgctggactattaatcgtttaagcttactgtgcttgctcatacatgagcagcgctctcttggacagatcaattgacttcgacggtgcggtgtaaaggcgagcggaagtgagcggaacacgcagtagagcaggcatgtgccacctaagatctacgcatgagatcgagaccaactagcagtgcggtggccttctcaagaaagcgtgtgagatctcagttagtactccatctttcacggtcatggtatgaaagtgcagtgaaggttgtctgctaggattccaaagaagatgtactcctatattttatcgaagatgcactatgctttgtatgtgaaatgtcccgagttgattgatctgaacctcaactcttgtacgaatctgcacccaggcattatgtcctttcctgtttcatcaggttgtcaagtcagtaactgttattatcattgtcaagaatgtgcatgcatttgggtgtcaagatatgttgattggtgcggttagaaactagggtcataatatattataccaaagatctgggtcgttttcacttgccattcttctctctggtcgatggcgattcgacacatccaatcaacctagatccatctacggcctacccctcggcaaggagctgatcctccttcgttctgaatgctaccgagatccatcaacttcagttgggttcagattggaactcctattcaacttgacctttcgtcaggatccttttggtgctgttacatggagattctttaaaacaatgccatgtgcaaatcaacgttaaagttgttagtcagctggctgtt

SEQ ID NO: 2025 - DNA, 724 bp, Avena sativa
ttttctttgaacgaacaattcagcagcaatgatgcaggtggtactaaaatcaggatagagagaccatgtacactgcattaagaccccacaattcaatatgtatgtacaccgaccccaaggtaccaatataccacttgttttaaccacgacatgtacgagccaacgatagccagtagacactggtttattcatcttaaaaaacacacagaatctaagacggatgctgccttctctcaatctgacacggtatgtaaaccaatggaacctcacaatgccaactactacagccaggtaacaacacacagggctttggtcagcatatagcctattgcccaaaattcccaaggagtcgctccaccgcggcatggacatttccagaggtagctgtcagcgctcggatgttctccactgtgtcgaagaaccccatctcttggagctgagctagctgggttgcaaagcgctcttccggtggcacacttggcgcatttggaacaccaagtccaccgccagcaccaagcccactgaacatgctcatcaagctgttgaggttaacattgcctggattagtgcctgcttgagtccggtcctggccagcttgttgaccaagttgcgacgtcatggcctgctggaattgaattaattgctgcaatgtttctggggacgtcaactgtcgaagaaattctggattctgaaacatttctctcatttgggtgtttgattccat

SEQ ID NO: 2026 - DNA, 676 bp, Avena sativa
tggacggggcaaaaaacagtagtaacataagttgagatgaagagcactagtagttacagaggcaagaaaatcccaaataacacaaatacaaagtcatcacaaagcaaaaaaaaaaaacaacgggtgatctaaaataggtagcctagttccaaaagtcgtctacaccaggattacagcctcacgatgttcacatcatctctttaggccttctatgctctccttgaggtttctttaccagagcaccgcaggcttgtggcagcgtaagttttcggaaccacaaaatcaccaccagcgacgcggatcaccagatcggagcgactagtctgtcgcttccttgccctgctttgccccgacagagaagaactcggttatgacctccaggggcatgcccttggtctcaggcaccttcatgtagacaaacacgagagatagtatgcagacgagagcatatattccgaaaacaccagcgagtccgatggcgttaagcatcacgggaagagtgtacgtcacgatgatgtcaccgatccagaaggttagggcgcagatggctatgcagatgccgcggacggaggtggggaaaatctctgcgcagagaatgttcgggataggcccaaaccccatgacgaagaagcagaaatagactatcacgctgatcgttgaagagtgccgcatgcac

SEQ ID NO: 2027 - DNA, 842 bp, Avena sativa
gaaggatcattcctgctccggcaggacggagacggtgatcatcaccgacatgaactactacccggtggcgcccttccacttcgacctcagcggcacggcgttcggcaggctcgccaagcccggcctcaacgacaggctccgccactccggcatcatcgacatcgagttcaccagggttccgtgcgagttcccggggctcaagatcggtttccacgtggaggagtactcgaaccccgtctacttcgcggtgctggtggagtacgaggacggcgacggcgacgtggttcaggtcgacctgatggagtcgcgaggccccggcggcgggaagtggactcggatgagggagtcgtggggctccatctggcgcctcgactccaaccaccgcctccaggcgcccttctccatccgcatccgcaacgagtccggcaagacgctcatcgccaacaaggtcatcccggccaactggaggcccaacaccttctaccgctcaatcgtgcagtacagctgaagaaggtcatcccaccggccgtcgatgctccgagtacctagtaatgctactactgtactagtactatgcagctagctgccacggagagtctgtcattgcgttgcgtcgagttgtggtaaactgtatcgggttgtggtgtcggtgctgggttgggtgcgcgtgatcgatgatgggtcgtgtattggcaaattggaaaaagggctctgtgggaaatggaggaggcaggcgtacaagatacgctctcccgcccactgtcgctttataatttataagtatcatttaaggcggtgatattaatcaaaagtacgtatattattactactcgtaaaaaaaa

SEQ ID NO: 2028 - DNA, 773 bp, Avena sativa
tcgggaagctggggctcgggggcgggggaagcccgcgggcctcggaggcgtcggcggcgctggcgcaggggcccgacgaggataagccggcgcccgggaacgagttcgcgcagttcggggccggctgcttctggggcgtcgagctggtgttccagcgcgtgcccggggtcacccgcaccgaggtcgggtacacccagggcgccttccacgacccgacctacgaggacgtctgcaccggcgcgacaggacacaacgaggtcgtccgcgtccagtacgaccccgccgcctgcaagttcgacgacctcctcgaaaccttctgggccaaacacgacccgaccacgcccaatcgccaggggggcgatgtcgggacccagtacaggtcagggatctactactacaccctggagcaggagaaggcggctctggagtccgtggagagacagcagaaggtcttgaaccggaagatagtcaccgagatcctccccgctaagaggttctacagggcggaggagtatcaccagcagtacctggagaagggcggtcgcttcggcttcaggcaatccgcccagaagggatgcaatgaccccatccgctgctacggatgaacaggcatgatgaccagcaagcaaataggcagcactttatagttgagagagagagctgcctgaataaggtcgggtcagagctgaatttcactacagttttcgatccaaagattgtaagagacaaaagctatttaccattgcacttagtattggattaccatcgtactt

SEQ ID NO: 2029 - DNA, 804 bp, Avena sativa
gctgaagcgtggtcggggagtacggtctgcggtgcaagcgtgagctgtggcgcgtgcagtacgctctgagccgcatccgaaatgcagcaagggagctgctcaccctcgatgagaagaacccccgccgcatctttgagggtgaagcgctccttcgccgcatgaaccgctatggtctccttgctgaggaccaaaacaagcttgattacgtgcttgcactcactgttgagaacttcctccagcgccgtctccagaccatcgtcttcaagaatggcatggccaagtcaatccatcatgctcgtgtccttatcaggcagcgccacattagggttggaaagcagctcgtcaacatcccttctttcatggtgagggtcgacactgagaagcatgtggacttctcactcaccagcccactgggtggcggccttcctggaagagtgaagaggaagaaccagaaaaaggcctcaggtggtggtggtggcgacggcgaggaagaggaagagtaagagctcagccttttctctgaaggactttgtggcagaaattgtgaaaacttcagtttaagatcgccttgttgaacttgaaaccgaatgttgttggaactttcatttgagctttagaaacgtcgtggcgaagagattttgttcccctcagaatctagcattgggtaccaaacttatgggtgtcagtttttcttcgttcgatcagctggagaagaaaccaacttcgtacttcttaatttgaagcgtcagacgtgttgtcaaatgtactcagtatgttggtatcgattttcctacactctgcaaa

SEQ ID NO: 2030 - DNA, 408 bp, Avena sativa
  modified_base (269)..(269): a, c, t, g, unknown or other
gagtctaggacgttcttcaaccttcatcaagcacgagatggtcgaccgcctcggcatctccatccagttcctcgacaccaggtacgtcagcggcttctgccagctcagcaaggacctcaacaagatctgcaccttgcacgcgaactgctgtgttgggctcggcgccaagctccatgatctcaggaacgtgttagatgtgtggaggaactacaccgccgcgcccgtgccccgagaagaggagcggcaagttccagtggaaggtcccgggnatatgcatccactagctgaagatacattggcgaattggttcttccggtggctgtccattctttctgctcctgctcctctgcttggtctcctagtagaatcataatgataaagggaagactgagattgagaccgagagag

SEQ ID NO: 2031 - DNA, 638 bp, Avena sativa
tcgcaaatgaggatgtgtacaagctggctgagacaattaaatcatcttctgattgtaagatcactcgtgaacctggtcctgtcaagggaggatccactgttattgcgtttgcacaagacccagatggttacatgttcgagcttatccagaggggtccaacgcctgagcctctctgtcaagttatgctccgtgttggtgaccttgatcggtctatctcgttctacgagaaggcccttgggatgaaggttctaaggaagaaggatgtgcctcaatataagtacactattgccatgttggggtatgacgacgaagataagaccactgttctggagttgacatacaactatggtgtcacagaatatagcaagggcaacgcatatgctcaggttgctattggcaccgatgatgtgtacaagagtgctgaggctgtcgagctggttaccaaagaactagggggaaagattctgcggcaaccagggccactaccagggctgaacacgaaaatcaacctctttccttgacccagactggctggaaagtggttctggttgatcatgcagacttcctcaaggaactccactgaagatcagtggtcagaatgtcacggggagagaaccttgtgtagcaatgcaggtccg

SEQ ID NO: 2032 - DNA, 662 bp, Avena sativa
gtgtacgcctccgggggaggaggcgaggaggaaggggaacaagatcaacaacgtggggtggtggttcaagccgtggttctaccagcacgcgcagacggcgctggtgcgcggcaagggggagttggtggagtacatcccgactaggcagtactaccaccggcacacccggtccctgttctgggagtgcaagctcatcctgcccttcgccgaccagctgtggttcaggctcctcctgggctggctgatgccgcccaagatcgcgctgctcaaggccacccagggcgaggccatcaggaactactaccatgacaaccatgtcgtccaggacatgctcgtgccactctacaaggtcggagacgcgctcgagttcgtgcaccgagagatggaggtgtaccctgtgtggctatgccctcaccgtctgttcaagctccccgtgaagacgatgatctacccggaggccgggttcgaggtgaaccagaggcagggcgacacgaggtacgcgcagatgttcaccgacgtgggggtgtactacaccccggcctgcgtgttccgcggcgaggagtttgacggcgcgctggcggtgcaccggctggagcagtggctcatccggaaccacggctacgagacgcagtacgcggtgacggagctcaacgagaaggact

SEQ ID NO: 2033 - DNA, 926 bp, Avena sativa
acagatgatatcatgaaggggttcataatgctcctgcagtcagcagaggacactgccctagacattgtggacgctccaagtgaacttgccctcttcctggccagagcggtgatcgacgaggtgttggttccactgaatttggatgacatcagcagcaagctacgcccgaacagcagtggtagccagaccgtgcagatggccagctctctccttgcggcccgccattccggcgagaggatactgcgctgctggggcggtggcaccggctgggcagtggaagacgcaaaggacaagatctcgaagcttctcgaggagtacaacacgggcggcgacctgggtgaagcctgccagtgcatccgtgacctcgggatgcccttcttcaaccacgaggtggtgaagaaagcgctggtggtggcaatggacaagcagaacgaggccagcatcctggccctgctgcaggagtgcttcggtgagggcctgataaccatcaaccagatgaccaaaggcttcgcccgcgtcaaggaaggcctcgacgacctggtcctcgacatccccaacgcgcaggagaagtttggagccttcgtggagctcgcgacgggccgcggctggctgctggcgtccttagcctctgcgccttgagcttcctcacccaggcggctggctagacttaaagaaacatgtttctcttgtatatctttactacacccacccgtgctgtctctaccaccataccaaaattttcctgttgctagccctttgttaagacgatgtgttatcatataccggagtctgataggatcgctgtgtcgagacattgtcttgttggtttggtcttggaggttagacttggagagttgagaaaataacaccatttcgtgtcccgttatgggatgtgtacatgaacagttgccctgctctaaagacta

SEQ ID NO: 2034 - DNA, 598 bp, Avena sativa
gagcaggaggacggagctgccgcctcggtgggacgggccgacagggaccgtcgtgctcgtcgacaagcccaaaggatggacatcatttactgtttgtggaaagctgcggcgattagtgaaagtgcaaaaggttgggcatgctggtacactggatcctatggcaactggattgttgattgtttgtgttggcaaagcaactaaagttgttgacagataccaaggaatggtgaaaggctatagcggtgttttccgtcttggagaagcaacatcaacttgggatgcagattcaccggtgattcaaagagaatcatgggaacacatcaaagatgaagatattagaaaggctgcagcatcattcatgggggagatatggcaagttcctccaatgttttctgctattaaggttggcggtgaaaaaatgtatgacaaagcaaggaggggtgaaacagtagagctttcacctagacgtatatcaatatataagtttgatattgagcgcagtttagaagacaggcaaaatttgatatttcgagttacatgctctaaaggaacatacattcggtctctatgtgcagacttgggaaaagcacttcgaagc

SEQ ID NO: 2035 - DNA, 857 bp, Avena sativa
  modified_base (791)..(791): a, c, t, g, unknown or other
aaccaccagtacaacacggtcgagcgaggcagtacaagagacaaatcaacggatgggcgtgtacgagttccctccagacgaaccggagcccctctgctgctgctcctcggaagacgacatcttctccttggtcatcgtgccgacgtccgtggcagccttggccaccttgccgaaggcgctcgtcacccacgacgcgctcgtgaagacgtaccggttcttcatgatggccgacccgcactgctcaccgtctgctccgccgccgccagcgccgacttggtcttgtccgacacctggaacttctggtccatctccttcaccttctcgttcaccacggtggtgcccatggtgaacttctcgctcagcccaatcttcctgtcgatggacgccaccttggcactggcggtcgacgtgaagccgtgcgtctcgtcgaaagatttcgccctgccgacggcgtctttgcccagggtgaaacccctcgcaagcatagtgctcacaacatcttcagccttgtggatcacattctgaccaccgactggtactctggttccactcatcagtggagcagaggcggtagggggtggttgatattctggagcaggcgcgatcataacagaaagatcaactattgttgcacccgaaagaagaagtgcagtctctgctccttgggagtctttaaaagtaacatatgcaacttgagaccactcgtcaccactttgcatatcaacatgttcgatgtctccagaaaaggaaagaactccttaatgtcttgtacagttgcactcagggaaacnttagtgaccttcaccgtcctcaccggcacctccaccggagccgtcgccgccgccgccatccgcgcg

SEQ ID NO: 2036 - DNA, 591 bp, Avena sativa
gctgcaggttattgctggggtgcaaaggtagttgcagagttagcaaaagctaatgagatccaggcagctgttatgtcgcacccttcttttgttactgttgatgatatcaaagaggtgaaatgccccatcgctatacttggagctgaaactgacgtgatgtcgccaccagaattggtcaagcagttcaagcaggttctatcctctaacgcagggattggttcctttgtcaagattttcccgggggtttctcatggttggactgtgagatacgacagcaacgacgcagctgccgtgaagaacgctgaggaagccctggcggacatgatcgaatggtttaacaagaacctcaaatgaacctgaagtagcagccctccttttctaataagtcctttggtcactcttcatagtcattatgcaagcatcctgggcttatgtatggtattagctgtagggtctgcatctttgtctggcacaggtgtactggtattggtatgtatgtgatttgctcatttgggggtctgtttgtgctgaacactgaattattgcactccaataaaatttggcatttgcagttttgagagctgaaaaaaa

SEQ ID NO: 2037 - DNA, 786 bp, Avena sativa
tatgcccccacagcaccaagttttcatagggtatcaaaaagaccatcaaattcatcacaatacagaaggaagcaattatcatacttcagtcatacatctaaatctgatggtgcaagacaaccacatcagacattacccaaaataccacaagagagatggtaaatcatagtttatcactagatgagcccatacacttcagcttaacaggaacttaaaagtagtataagaagtcccacagcatcttcattacagttaggttaacagcaactcatgtttctctcaaacttcagctgagaagatgcttccttcagggctacctaaacagctagggatggatgctagcaagcagaagaagcttgtcgcacagtcagtcaataaatgctgacttgtagtggaagtcatcaatcgtcgagtaaatgtgcccaccatcaacatggaaatcaatagcttccttgatcttgcttgccggcattctgagacgcttggcaatatcatccatgtgcacaccgtgatcactcgcaatgcttgctggttcactgaaaacactcagcacctgcgcgtacaaatcagtcccagatacgtttgtcccgctggtcgctagcaccgggttggatttcaaggaggttggagtgcttagttcgctgatgctattggagaatggggttcctagaaaagaattggtgtgtgcaggactgccaacctttgattttgtgttctcgatatgcatccgtacacactggatgaaatgcagtgtgacctcattgtaatcagttacaggtctgacac

SEQ ID NO: 2038 - DNA, 633 bp, Avena sativa
ccccaccaaccagtcagattcacatcgcccaccaccaccacccctctcggattcttctatcgccgggatctgcgacccctctcgaatcccaaacccgacccggcgaagaagcagaggagcgagaagacgatggcgaaggaggcgctgacgctggcggaggtctccaagcacaacaccaaggacgactgctggctcatcatcgccggcaaggtatacgatgtgacaaagtttttggaggaccaccctggaggtgacgacgttctcttgtcctcaactgccaaggatgcgaccgatgactttgaggatgtcggccacagcacgactgcccgtgcgatgctggatgagtactatattggtgatgtggacgcgtccacgatacctacccagacgaagtacaccccgccgaagcagccacactacaaccaggacaagacccccgagttcatcatcaagatcctccagttccttgtccccctggccatccttggcctggccgtcgccgttaggatgtacaccaagtcggagtcggcttagttagccggtgccatttgttctcgagaaactgattgaaggtgtcggaataagttagcagtttgctgcgtgataaattcaatttgagatgtggcctgtgtc

SEQ ID NO: 2039 - DNA, 578 bp, Avena sativa
gcagatcaaatgcaccgtcctcgacctcccgcgggtgatcgacacgataccagccgatggtgtggtcaactacgtcgccggcgacatgttcaacctcgtcccacctgctcaggctgtgttggtcaagcttgtgctgcaccacgtggagtgacgaggactgcgtgaagatcctggctcagtgtaagaaggccattccgtcgcgagaagatggagggaaagtgatcgtcatagatatagttgtagactcttcttcaggaccaactcatgaagccgaactcctgatggacgtaggcatgatggtgttgaccaatggccgacagcgcgacgagtctgactggggcgagattttcaccaaagcgggattcactggctataaccttgtgaagaaactaggagctcgcggcgtatttgaggtatatccatgagacaagcccaataacattgtgcggtttggtgcaagagatgtgctctaaggtgtgtttataagtatgcgaataaggagattgtcgtgcgtactttgtgaagttttacagataataaagtactaacaaaaagcataaccctcataggctaatact

SEQ ID NO: 2040 - DNA, 989 bp, Avena sativa
gctgatagaggcatatgcctcattgatgaatttgataagatgaacgatcaagataggtatacagtacccttttcatgttttgtaattattacaaatgttgactttccccttattgttccagggtaagtattcatgaagccatggagcaacaaagtatcagcatatcaaaggcaggcattgtcacatcccttcaagctcgatgcagtgttattgctgcggcgaacccagttggaggaaggtatgattcctccaagacattcactcaaaacgttgagctgacagatccgattatttcgcgttttgatgtcctctgtgttgttaaggatattgttgacccatttacggatgaaatgcttgcaaggtttgttgtagatagccatgccagatctcaacccaagggtgctaatcttgaagatagagttgcagttgatgaggaggaggatccattgaccgctgcgagacaagctgacccagatatccttacccaagacatgctgacgaagtatattacatatgccaagttaaatgtattccccaaaatacatgatgctgacctggacaagattagccatgtctatgctgaacttcggcgcgaatcatctcacggtcaaggagtccccattgcagtaagacatatcgaatcaatcattcgaatgtctgaggcacatgcaaagatgcatttgagaagttatgtgtcccaggaagatgtcgacatggccatccgtgtgctgcttgactcgtttatttcgacccagaaatttggtgtccagaaagcactgcagaagaatttccggaagtacatgacttacaagaaggattataatgaattgcttctgctccttctgcgcaccctggtcaaggacgcactgcactttgaagaaatcttgtcgggatcaaccacacgcatgacacacattgaggttaaagtggatgacctaaagaacaaggcgcaagagtatgaaatctacgatctgaggccgttcttctcc

SEQ ID NO: 2041 - DNA, 778 bp, Avena sativa
gcgttcgacgtgctggacgcggaccgcgatggccgcatcagccgcgaggacctcaagtccttctacgccaacgctggcggcggcgccaccaaagagcgcttcgacgacgacgacatcgcggccatgatcgccgccgccgacgccgaccgagacggcttcgtgcagtacgacgagttcgagggcctcctcggccgcgctgccgcggtgggggcgggaggcgggtgccggtccgcgatggaggacgcgttccgcctaatggaccgcgacggggacggcaaggtgggcttcgaggacctcaaggcctacctcgggtgggccggtatgcaggtcgacgacgacgaaatccgagccatgataagtatggctggcgacggcgacggcggcgtggggctccaagcgctcgccagagtactcgccgtggactttgaaaccgtcgtctgaacctctaaaataatccgactgtaaagcactaaactcgattttttgggacttttcccccaaattttggttggctggggtcaagtgatttgttgagtggttctcgtgagttgtgagttttgtctgtatggtagcagctgttttagccttggaaaatagaaaagattcgggaatcctgcattgggcggcgtccttactctattcattatcgatcgatttgaggctggtcatagcatattactagtatcatgcatattatactagtatcatagtaatattgtatttaatttttctacaatcacaatgcaattgtgtgtatgagatgtattggtcattaaat

SEQ ID NO: 2042 - DNA, 608 bp, Avena sativa
gtcacagataattgtatagaagctcagtcatttggtggcgctaatgacatgacagttgacacaaccattgcctctgcagaccaaaatggaaaggactcgacagctccccctgaagtagatttgcaacctgaaacatctaagcaaggacgacgccaaccaaatcggaagggtagagcaagaggtgtgaaaaggacaaattctgttcttgcggtagttgaagatgctaaagtaatacttggtgaggatggcgatgagggtgatgagtactagagcctttgtcctggtgcttcccaaggccgactactgctattcccgtgatctgcccagagtggcttttatctgttacctgtctgtttgaacatgtttgctttgtgatgtttggtttacaacctgttccgttgtaagaacctgtggtatgtttgaacctggttcgcaccttggttaatatgcatgttatgtggcctttgtctcttaccttggttaatatgcatgtgatgtggccttgtttagcttgctactgcctgtttctttatgtacgttggcttgttgtatatttaagttgcttactcttctgaaatgctaggccttgcaagctctgtacttcttga

SEQ ID NO: 2043 - DNA, 789 bp, Avena sativa
  modified_base (224)..(224): a, c, t, g, unknown or other
ggttcatctgcttcaacatggtcttcgtcgaccaaaggtttacgggttccagtttcaaggtgatgggggattttcaagcagacgaaggtgagtgggcaatcgttggtggcaccggggagtttgcgtatgcacaaggagtcatcacctataagaagacccagctggcatcaggaaatcagagagagcttcatgtccgtgctctgtgcctctccttgtcaaaaccngcaccacaacctgaacccaataaaacctgtgcagatccctgtcaccatgattggcccatggggtggtaaaagcggggacatcctcgacgttcccgcgatgccgcgacgtctagaagtgtgacgatttgccatgatacttacgtcgagtcgcttgcattttccttcatcgaccaagccggtaaaaagcatactgctggtccgtggggtgccaaatacgggcaacacaaggaaacgatcgagtttgctccttcggagttcgtgacacaggtctacgggacaatgcgttatggagaaaacacagagaagaatgtcatagcatcactcaaaatcatcaccaatgtcaaaacatacgggcctttcgggataccgaacacgacaactttcaatgttcctgtgtatggcgatgacagtatagtaggtttcttcgcacgtgctgggagctacgtggaggcacttggtgtttatgtgagtccatcttgttcacactagtcccccgagcgagtggtgtttcctactcgggaggtgcctcctgtttccatgtctatcacaacaataagaagagata

SEQ ID NO: 2044 - DNA, 433 bp, Avena sativa
ccctgtcgttcagaacgtctctgcgcccgcagctgctaccgacagcaccaaggtccagacggccgtgccggtcctggagagtagtatgcctggtgctcaggctgatgctcagaagcctgctcgcacttctggtagttaccttgtgctttcttattgttcagtatccatttggttgtttaagatgcaccaattgctagaatcctttcgatgctgattaatgatcaagtcttttctgtctttcagatatgccaattgctaggaaggcgtcacttcaccggttccttgagaagagaaaggatcggtaagctgctcttgctgtcaagaactcatggtttcgcagaatgtggccaatttcttttcctgcaactgcagtttgtggatctaacatgtgcttttttgtccttatagtctgcatgccaaggcaccataccaa

SEQ ID NO: 2045 - DNA, 1006 bp, Avena sativa
cctgaaccaatctacgggacccagtatctccccaggaagttcaagattgcggtcacagttggtggtgataactctgttgatattctgaccaatgacatcggcgtggttgttgtttcagatgatgcaggagaacctgtgggctttaacatttatgttggaggtggcatgggaaggacacaccgagtggaaaccacattccctcggctggctgatccacttggttatgttccaaaggaggatatattatatgctataaaggcaatagttgtcacgcagagggaaaatggaagaagagatgaccgcaggtatagcagaatgaagtatctgcttgaccgctggggaattgacaagtttcgggctgaaactgaaaaatattatggaaagaagtttgaagagttccgtccacagccagaatggcaattcaacagctaccttggctggcaggaacagggtgatggtaagttattctatggggtgcatgttgacaatggtcgtctcggcgggcaagtaaagaaaactctgcgagagataattgagaagtacaacttggatgttagcattactccaaaccaaaatcttatcttatgtggggtcgaacaggcatggaaagaacccatcactgcagctcttgctcaagctggtctgttggaaccgaaggatgttgatctcctgaacataacctccatggcatgccctgccttacctctgtgccctctagcacaaacagaagctgaacgagggatcctaccaattcttaaacggattagagcagttttcgacaaggttggcatcaaggatgaggagtccgtagtggtgagaataactgggtgccctaatggatgcgccagaccgtatatggcagaggttggtttcgttggtgatggcccaaacagttaccagatttggcttggagggacaccaaaccagaccaccttggcggaaacgtttatgaataaagtgaagcttcaagatattgagaaggttttggaaccactgttctcttatt

SEQ ID NO: 2046 - DNA, 834 bp, Avena sativa
ttgcggccgcccaccatggagcacatagatgcacaattttcttgttgccaaattcttacaagttggtactacggcactaggaaaggagaaatgaagaaacatatgatgatgtgaaagttgtgaatttccagcatttcttgccaaccgccaactttactttcattgaagtggttcacaattaaccttctctacatgttatacacagcagtagtgtagtttctagccacaagaacaggacatggagtttgatctccacaaaacaaaaatagtgggcgtggtgaagccgcgaacgcagggagagaaaatggcacaaagaacctcatgtagtactaactgtgcttcttcctacaattgtgtagacacatccaacgccccgtgcagccaaaacactgaggattacgccgccaccaccaccacccgatcatcagattgctgctggttctggactcccaccatcaattaaatcaataagtacccatccaaaaaacaagaaccttggaatggagttcttcccctggatgtcgagaactcagatgctccgagtccggttgattttggcgagctcctgctccagctcgtccaggccaccaacctcctccagctccttgggtcccaggaacagcccatacggtacgccctcgaacttgtccatgtggtgtatcttgtgagccgcagccactcgccggaagtagggtacattcgcgatggggccgacggggaatcggcggtggaccaggccgtcgtgcacgaacatgtaggccatgccgaaaagcgtaatcccgaggcccgcgccgaagcagaggcccgggatgagcccgctgtggaagaagccga

SEQ ID NO: 2047 - DNA, 920 bp, Avena sativa
ctaatggatgaggttgatcggtacatcccggatcctgtgagggtgcttgacaagcatttcttgatgccaattgaagatgttttctcaattcagggccgtggcactgttgtgactggtcgtgtcgaacaggggatgattaaaactggtgaggatgtcgagatcttaggtttgacggagactggtcccgtgaagactacagttactggtgttgagatgttcaaaaagatgttggatcatggagaggccggtgacaatgttggtcttcttctccgtggtctcaagcgtggtgatgtacaacgtggccaggtggtctgcaaacctggtagcttgaagacttacaaaaagtttgaggcagagatttatgtcctgacaaaggatgaaggtggtcgccacaccgccttcatgtcaaactacagcccacagttctacttcagaactgctgatatcactggaaaaattgagttgcctgagaacgtgaaaatggttttgcccggtgacaacgtaactgcaactttcgagttgatatcccctattccacttgaaccagggcaaagattcgccctaagggaaggagggaggaccgtcggtgccggagtggtcgccaaagtcatgagccaataatctgtgtccaccctttttttcggcgtagcgattttagtagacaaaatgaatgttgatatgaaagatttgtcggaactgaaacacgagataacgagagtcgtcaagagcaaggggaaccagtatgcatcatgtttgaaatgcatttggccagctgccatggatgtggcttgcaggcattctgaagatttttccttttttctcatgtcaggtagtttgctgtattgcaccacagcttgttaccttgacacagcttatcaggcatatattagctcggtgattcaataattgacagtctctag

SEQ ID NO: 2048 - DNA, 806 bp, Avena sativa
tcatcgagcacagagcaactagggttttagtttttgtgttgtataagaaagaagctgggcgagtagaagcaatgcttaataaaagggggtggaaagccgtttctgttcatggagacaaggctcagcatgatagaacaaaagccttatctttatttaaagaaggaaaatgtcctttaatgattgcgacggatgtggcttcacgcggacttgatattcctgatgtcgaagttgtcattaattatagctttcctttgacgacggaggactatgtacacaggattggaaggacaggtcgtgcaggcaagaaaggtgttgcacatacattctttactcaagcagacaagggacttgctggtgagcttgtcaatgttttaagggaggctggtcaggttgttcctccagcccttatgaaatttggcacacatgtcaagaagaaggaatcaaagatatatggttcccacttcaaggaaatcacagcagatgctcctaaatcaaaaaagattacctttggtgattctgatgaggagtaaccaacagagaccttgctggtgtattttcttgattgctcaatagcagtacgggaattcttcaaatcattagtataatttagacttagggttagttgatgatgcaatctttttggaagggaagaaaaaacagaagttagagatatcaacttttttcatgattgtgatttgttagtctaaggtgtctccctggagtaaatgtttatttcctctgagttgagcgtataattgtggtaaactgatcagtaaaattatcagcatactagttaaaataaaaaa

SEQ ID NO: 2049 - DNA, 935 bp, Avena sativa
cattgaacatgtaacacaaccaagtagcagtatttcagaaacatcttcatgggagaacatatttttctttctttttctaacagttacatgatataaaatgaccaggcacgtctctcatcaaagtgttgctgtagtacatgacatcacaatgaaccgctggaatgcttgatgtttggggaaacggatatgaacatggaggggcaacctgtgctggtccaatgtacagtgtggagacaaaccttatcacacacttactgagcacttgcgatttggaggaaccttacctggctcagtgagcatacttaaagtagagtatgataagtatggcaacaacaagggctgatatgattcccccaatgatccaattgttcctgtccatcctctttgacattgccgacaggatctttttgctcttgccaacgttatcgtcaaccccatgcaaggtagtgtgggcatgcagtagtgattgccgttgttgatgaaggtcctgaagaattgacacaccaagatcttctgtctccagcatagttcttcggctctctttaattctgtcagtggactgattcagtcgctcagttgtcatcatcaaccttcccctctgatcagtagacactgcaagtgtgtcagccatgccagactcgaggagttcctcccttgtagcctgcctggcattaggtgacgagatccttttgagctcgctcttgagattgttgaggtcagacttgtactcacgcagcttagctagcaaacccgccttcgtgctcggctgcaggctccttgcctccaggtccatcttccgaatcagagattcagcttcctgcacgccggactgtatctcggagagcctctgcttcttcttctctccatccgagagcggaggcggcggtgcacttgcgggagaggggaggcggtgacctcgcagtactggcgctcgt

SEQ ID NO: 2050 - DNA, 861 bp, Avena sativa
cacgacgagaccgtcaccaacgacgagatcgcggcggacctcaaggagcacgtcatcaagccggtgatccccgccaagtacctcgacgagaacaccatcttccacctcaacccgtcgggccgcttcgtcatcggcgggccgcacggcgacgccggactcaccggccgcaagatcatcatcgacacctacggcggctggggagcgcacggcggcggcgccttctccgggaaggaccccaccaaggtcgaccgcagcggcgcatacatcgccaggcaggccgccaagagcatcgtggccagcgagctcgcgcgccgcgtcatcgtgcagatctcctacgccatcggcgtgcccgagccactctccgtgttcgtcgacacctacggcacaggcaagatccccgacagggagatcctgaagctcgtcaaggagaacttcgacttcaggcctgggatgatcagcatcaaccttgacctcaagaagggtgggaacaggttcatcaagaccgctgcttacggccactttggccgtgacgatccagacttcacatgggaggtggtcaagccgctcaagttcgacaaggcatctgcctaagaagtaagaacacaacacattgctgctgctgctgctgctgctggacacgtacgttgccttgcctcattagtaggtgactccggttgctcctccaccaccaccggctttgatgacgtgggaaccacaacgagtatgtggcgccatgttttctttactggtctgtatgttttgttttggcactggctattggacggctagctgttttaaaattgcacatttgcaaccaataaggagctccctgtatgtgctccatggtgggcggccgcaaat

SEQ ID NO: 2051 - DNA, 660 bp, Avena sativa
ccggtggacatgtccaagggcgagcacaacgtccccctccttcctcaagctccagcccttcggccacggtccccgccttcaaagaccacctcaccactgtcttcgagtcaagggccatttgccgttacatctgtgaccagtactcagaccgcggtaacaggactctcctaggccgggaagaagacggggcggtaggccgtgctgccatcgagcaatggatagagtctgaaggccaggcatttaacccgccgagcttggccatcgcattccagctcacgttcgccccgcttatgggtagggccactgacatggccgtggtcgagcagaacgaagcgaagctcgccaaggtgcttgacgtgtacgagcagcggctgggggacagccagtactttgcgggcgacgagttcacacttgcggaccttgtccacatgcccaacactgaacttcttgcgagcaagaccaagacggcgggattgatcaccgagaggaagaatctgtccagatggtgggatgaggtctcggttcgtccgtcatggaagaaggttgttgagttgcagagtgtaccacgccccctagatcttgaggctcccttcctttttatcttgagcagcttctaatgcaccagtcacattatgtatgtgttgaccatcactgttactc

SEQ ID NO: 2052 - DNA, 668 bp, Avena sativa
cattaacaccttgcttcctggatgggtttatcactgcataattaatacaacgagcccagagaacagagcactaggaacttggcgtgttgtgaataatgcaggaaaggacaatgagcagcagctcgaatttaagatcgaaccgatgtacaaagctgcgaagccatcacttcgagctattatgcggcattttggcgagggagctcgggtgatgatcgaggagagcgttcgaattgggaaacctattataccaagaggttttgacaaagccggtgtgctaagcattaacaatattgtggcagcgtgtgattttatcatgcgtggggccgatgacacaccaaacttcgtgcaagtgcaaaacagcgttgcagtgaacaggctacgcggaatacagaataagctgtttgcacaagcacgactgagtgcgggtactaatgaggacaactcacgtcacgacgcagatgatgtgagggagaacacgcacagtttcaatggtgtaaacgcgcttgcgtgagcacagtagaaactacaaatccatgagtaccagggtttgagcggaataacgctgcgtttcgttaacccttcgttgttactaggtgtgtacttctccacgagaggcgtgcattcttggtagccatgtgtgggttagggcgacgctacaaaaaaaaaaa

SEQ ID NO: 2053 - DNA, 683 bp, Avena sativa
cctggatacatgtatactgatctggcaaccatatatgagcgtgctgggcgtattgaagggagaacaggctcgattacccaaatacccattctaacgatgcctaacgatgatatcacacatccaactcctgatctcacggggtatatcactgaaggacagatatacattgacagacagctccataacagacagatatacccacccatcaatgttcttccatctctctctcggttgatgaagagtgctatcggtgagggtatgacccgtcgagaccattctgatgtgtctaaccagctctatgccaactatgctattggaaaggatgtccaggccatgaaagcagttgtcggagaggaggcgctctcttctgaagatctgctttatctagaattcctcgacaagtttgagaggaaatttgtggcacaaggggcatacgatactcggaacatcttccagtcacttgatctagcatggacattgcttcgcatattcccccgcgagcttctccaccgtatccctgccaagaccttggatcagttctacagcagagacgctacccactgatctgtctttgttaagaaattccagtgtttcctcaaagtgcagcttgaataaattgaacagtgaacttctggcctttttgctgtagttatatatagtcagatcccattcttcgagtcgtg

SEQ ID NO: 2054 - DNA, 596 bp, Avena sativa
ggataattgattggtttgtgtttcttcagaggatgccggtgtggtggaggtggtactcgtgggcgtgccccgtttcgtggacgctgtacgggctggtggcctcgcagttcggcgacctcacacaggaactcgaggacaccggagtgcccatcaacgtcttcctcaaggacttcttcggattccatcacgacttcctgggcgtcgtcgccgtcgcggtcgcaggcttcgccctgctcttcgctgtatgcttcgggctcgccatcaaggttctcaacttccagaggaggtgatcgatcgatcaaccgttgcacgggctcgcggctttgaggccgacggcgcacggatcgtatcggaaacgaatgatgatgtacacgttgcttttttgtctccttggttccaattttttgtttgtattattagtgatgcgcaaatgcgtatactgtatgtaaaaatgtaagcagcacgtagcaacagtctactcagtagcaaagagcccatgacaaaatgtaggacttagacggtgacatatcaaattaactcttgaaaatatattttctacatccatgatatcatcgtcttacatgctaccaaaaaaa

SEQ ID NO: 2055 - DNA, 363 bp, Avena sativa
tttttttgtcaaactaatttcgaaaaacaattgcatcacgggtgcaaaaggggggaacagcggctgataccgaatcatgatattaccaaagtgcgactataagaaattgtattatcatatcaatgggtacattatctctcctcctaaagtacagggaaacacgctaagcccttcaaagatacagcccactgactgctttcttattatttcatctactcaagaattgaagaccacctcaccatcttggctcatggaagtgctggcagaaccttccccgtgcaggatccaaatccaacgttgtagtcctcacccttgcagcaagctgtcaggatgacttcatccccatcttcgaggaacttgcgg

SEQ ID NO: 2056 - DNA, 895 bp, Avena sativa
ggagtgcgtcctcggcgtggtcggccgcgacttcgcggtggtggcggcggacacgtccgcggtgcagagcatcctcgtgcataagacggacgaggacaagatcatggtcctcgactcccacaagctcatgggcgcctccgggggagcccggcgaccgcgtgcagttcaccgagttcatccagaagaacctccacctctaccagttccgcaacaacatgccgctcagcaccgccgccacagccaacttcacccgcggcgagctcgccaccgccctgcggaagaatccctactctgtaaacatcctacttgcagggtttgatgaagatgttggtgcatcattgtattacatcgactacattgcaacactacacaaaattgacaagggtgcattcgggtatggttcgtacttctgcctgtcgctgatggacaagctgtaccgtcctgacatgactgttgacgaggcggtggaccttgttgacaagtgcatcaaggagatcagactccggttggtggttgcgcctcagaatttcgccatcaagatcgttgacaagaatggtgccaggctccatgcgacgcgtgaaatcgtaggtgacggtcctccagctgaagctgcagccccagtagtggctgcctgaggtgattggcctatccgtcgatcgtttggatggaggctgaaccttcctgttacttgtttccgggttctgtcacaatgtaatggcaatacgtttggatttgagaactgtgttgcaaattgtcccagacattgactagtctgtttatgcccattactgcatcgttatatgttactgttccttgctctcaaatgctgtgtgtcccgttattttggaattcatgtttatgagaataccttgcagtaatggattgcacttttctt

SEQ ID NO: 2057 - DNA, 659 bp, Avena sativa
ttctcccccaatccccagagaaactcccccaaatccctcgccgccgcctcctcctcctcagcccccgccgccgccatgtctcgccgctatgacagccgcaccacgatcttctcgccggagggccggctgtaccaggtggagtacgcgatggaggcgatcggcaacgccgggtcggccctaggtatcctggcggccgacggcgtggtcctcgtcggggagaagaaggtcacctccaagctcctccagtcctcccgatccgccgagaagatgtacaagatcgactcccacctcgcctgcgccgtcgccgggatcatgtccgacgccaacatcctcatcaacaccgcccgcctccacgcccagcgctacgccctctcctaccaggagcccatccccgtcgagcagctcgtccagtccctctgcgacaccaagcagggatacacccagttcggaggcctccgccccttcggcgtctccttcctcttcgccggatgggacaagaaccacggcttccagctctacatgagcgacccctccggtaactacagcggctggaaggcctccgccgtcggggccaacagccaggccgctcagtccatgctcaagcaggactaccgcgacggcatgacccgcgaggaggcggttgcccttgccctaaaggt

SEQ ID NO: 2058 - DNA, 496 bp, Avena sativa
ttttagacaagcacgttgaatttgtccgggagtctgcattcagcaatattgcccaaattcagttacaatacataaaccaaccactagaaaaaccaattggagcaggaacaattgacacttataaagaccaattcgcttcaacgatcttactaagctgatcatagaattccattcaccaattattgccaaacacgccctcagattattggacagcaactagtattaagcagctagtagtaagcaagcacacaccctgacaccggctacaggaggatacagagctgtggtggcagtacagagctgactacaggaggatacagtactactcgaggacgggagagggggtgccgacggtggcggctaggattgggcgaattcactttcaggcggcgaggcggccgacgacgggggtacttggcctggaacttggtctcccagtcggtgagcacgccgagctccttctcggtcaggcccgagaggtcgccggagacctcgc

SEQ ID NO: 2059 - DNA, 920 bp, Avena sativa
cttatcaacattgccaggaaatgaacaggcattgcctcgatatattccaccaagagtatcaatcgattctcgctaacaaccacatctaaaaccatgtcaaccaatggaaacaacacaacacgtaccaaaacaagaaaggctcgttatgtttgtattaacagaagagcaagatgatatagctatatgcttttgatgatacaaatccgcacggtgcagcaatgtacaagactaccatgcccaatcggcacacatcctgtcttccttccactcacactaccttgcctataactctggctgctggttttcttcatcagaacgcattactcagggcactgcgtgccgcctgttgtttcatttcctgggcttttccacttccacggaagtacatgtatacttgctgaatgacagctatactcagcagtgattcaaggcagaacagtccaaatccaacaaagtaaaatatcccaacaatagcactcttggttatgacatcaatggcaggcaaaatcccagtcaaagagtttcctttgaaaggaaatggtggcgacactgctgaccacacacagaagataatatgaagcatgtaaaacagaaaaaaccacccaaacttcaaagcactctcagttctcattgcgttataaagagggcgataccataacacataagccccagggacaccagatatgaagtagataattgcaagcagccaaatcataacaccttcccctttaatccatgctgttgtagtcgctatgatattgaagaagaggcaggtagcaattcccaaaaatgatgaaaatgcaaggtactgcattttttgtagatggatgggtatctcatttgaaatgttgtggtgaatgagagggaaaaggggtggccagtttttctcttcaatgacaattccagctcgtgatgcagcc

SEQ ID NO: 2060 - DNA, 724 bp, Avena sativa
ttttttttattagtagtagggtccaaagccatttcctactgaactttataaatgaagatgtgctcaaactgagtgatagtacaatacatcagaggaacttcctcctcactatagtccatttcccaccgtattaataagatacaatagtaacaccatgcagtgttctgtgtaataatctgataataacaaggggtgtcaagtcctatgagaaactatcttctgcaacaacaatgcacactgacaggtaagaataataatagaacaacatgcatgcttattggattggcacccgattaaaatataaatgtatgtcgaacaaataacatcaacatgagaggaggctgtgtgcagtctgttccatttgtcaagccttggacgtcttctgattcggtttgaaaacatttttgatcagcgactccttgattgacaaaagttctgggaattccgtcttcaatttaacagtgtcaagttcattgttgctcctcggtgctactattaccttggcttgctcctccaagttgaagttcttccaagagaagcttggatcgatgtagtctctgtacatctccaatatctcgttgtggctcaccacaccaggatttgtgaagttccaaattccagtgaggtttctcttcgccatttcgattgagatgggaagaagctcatccaatattgtcattgaattcgggatatccacgaccttgtcataccgagtgattttggt

SEQ ID NO: 2061 - DNA, 862 bp, Avena sativa
gtcttcaaccagagacgaagatcattgatgatcagctggtgaacattaacttgaagggtttccttaccatcaacagtcaacctgctgtgaatgcagcgaaatctgattctcctagtgttggatggggtggcccaggaggctatgtttaccagaaggcctatgctgagttcttctgcgcaacagagaagctggaccaactgatcgagcagtgcaaggcgttcccttctctcacatacattgccgtgaacaaggaagggaagacgttctcgaacctccccgcaaacgccgtgaacgccgtgacatggggcgtgttccccggcaaggagatcatccagccaaccgttgtcgactcatcgagcttcttggtctggaaagatgaggcattcgagatctggtcgaaggggtgggcttgcctgttccccgagggcgattcgtctagggcgttgctagagcaggtccagaagagctactacttggtcagcctcgtggacaacgactacatccagggggacctcttcgctgtgttcaaggggatctgataccgatgagataccttacagtcttccaacctcctcttgccttgtctaaattcatcagtaccatggcttgctgcatccacgactacagggtccgatcacactggaagttgtggattgacccacctgtgctagtctgctagagctccccatctaagtccgatttctcgtgatttgtatcgatttatccaacagtccaatatcaataagaatttgagcttcgtgtttctccccattgttctcgggcgcaatatgctctctctctgcctggtttattgttattgttaccgyctagcctcactttcagccaaagaggatctcatgtt

SEQ ID NO: 2062 - DNA, 630 bp, Avena sativa
cgcacacgcacacgcacacgcacacgcacacgcacaaactatatattgccaccatgtccaccacaccaacgccccctgctgatgctaagcccaatccaacctatttccaatcttctccggttagcccagacacgatccagcaaacggaggttcttctccacctgtacgcgtaccagcgcctcccagaattcccaaatagtaaccagaaagttttactggatcccaagagtccctactgttttggtaccctcgctgttaatgactggagcatatacgattccctggctgatgaccccgacgccaacattgttgcgcgtgctcaaggtctgcatcttggggctgacatggcagcttggaactggttcatctgtttcaacatggtgttcgtcgacgaaaggtttacaggttccagtttcaaggtgatgggggttatccaagcagaccaaggcgaattggcaattgtcggtgggaccggggagtttgagtatgcacaaggagtcatcacctacaagcagacccagttggcaacaggaaatctgagagagcttcatgttcgtgctttgtgcctctccttcccaaatccacccaagacagcagaaagttcatgtactgcacgcccttaaggaccaa

SEQ ID NO: 2063 - DNA, 759 bp, Avena sativa
ccacctggccagaacccgggtagcatgcctccgacaccacaacctggtcagaaccgtggcaacaatcctccacgaccacctccaccatatgctcaaggtggcccatcaaattatcaaccccaaatgccgaacccacaggcagcatatacaccaggccgtgcaccccaagtgcagaacccacaggcatcatacaccccccaaatgcagaatccacagccagggtacacacagggtggcgcacccaacatgccgaaccagcagacagggtacacacagggtggcgcacccaacatgccgaaccagcagacagggtatgcaccaggcggcgcacccaacatgccgaaccagcagacagggtacacaccaggcagcgcacccaacatgctgaaccagcagtcgggctacgctcccagtggtgctcctaactatcagcaaggtggtccagctgactaccaaggtggacctgctgggcatcagggaggtaaccaagtttacccgggagccaacatgcctagcggccctggaccagcacaccctggcagcaattctggataccaaggtggcaacgaaccatctcgtgatggttatggctatcctggcggctacaacaacagtgcacaaggtggctataatcgacagtaaggtctaggagcaggcaatcgaactaccaatgagttggcgccaagtccacaaatgtactgatttcctggaagtgcttctagtataattccctagaagatacgatatgtagtataaatc

SEQ ID NO: 2064 - DNA, 755 bp, Avena sativa
agctgattgaggatgtgaggaaagccctctacgcctccaagatctgcagctacgcacagggcatgaacatcatcaaggccaagagcacggagaaaggatggggcctcaaccttggtgagctggccaggatctggaagggcgggtgcatcatccgcgccagcttcctggaccgcatcaagaaggcttatgacaggaacgccgagctcgccaaccttctcatcgaccctgagttcgcgcaggagatcatggacaggcaagccgcgtggaggagggtcgtctgcctcgccatcaacaatggcgtcagcacccccggcatgtccgcgagtctggcctacttcgactcgtaccggagggacaggctgcccgccaacctggtgcaggcacagagggactactttggggctcacacctacgagagggtggacatgccgggctccttccacaccgagtggtacaagatcgcaaactcgaagatctgagctgctgggtttgatggcacatcatggtttggtcgtctcagtatctttggtgtccagttacgagtccttttctgtaggggaggaactactgtttaatttcatatttgagtaatgcgtcctgtatttcatttcgatataaggaggtcaagtattctctccactactttcatgtaatcagccctggaggggaaccaccattgttatctgtcggatctcatcgttcttgaatttagtatgaataataatatgcattctcaccaaaaaaaaaaagtttaa

SEQ ID NO: 2065 - DNA, 867 bp, Avena sativa
gacaaatgctgttcgggttggggacctagaactgttcaaagctgttgcagaaaaattctcaagcactttcagtgcagacaggacatccaatttgattgtgaggctgcgccacaatgtcattcggactggactgcgcaacattagcatatcatactcacggatctcccttcctgacattgccaagaaactgaggttggactctgagaaccctgtcgctgatgccgagtgcatcgttgccaaggccatcagagatggtgcagttgatgccaccgttgatcatgccaatggttgggtggtgtcaaaggagactggcgacgtgtactcaaccaacgagccacaggctgcgttcaactccaggattgcattctgcctcaacatgcacaacgaagcagtcaaggctttgagattccctccgaattctcacaaggaaaaagagagtgctgagaagaggcgagagagactccagcaggaggaagaacttgccaaacacatggccgaggaggacgacgatgatttctagattggctaccccttggtgcgttcagctgctgcatgtttcgtttaaaaaacgtgaggactactctgttgattacaggagccgcacgatctccgatctacctgctgggacaatttgaatcgtgcaatgtttgatactgttactcgtgtggtttatttatgttcctaacaattcttttatcaccacaaattgtttaggaagcaccttatttttccctgagatactgtaatcgaggaagcaagagccgcaacagatgactgttttacatcgcatcccatgtttgctttcctggaagttgatttgcggactaagttcagtgccacaacttcatttcgctgtacgtgattcat

SEQ ID NO: 2066 - DNA, 757 bp, Avena sativa
tttaaagtaccacactgtttttaattgttaaaatcatcatcaaatagccagaacaatcagctaagcattaaccaacaagcgtgaatgtaaagggcagggaaaacaggtattcgttctctgagacttccgttgtaagcaaattcagtgaatcttttaaatcccggacaagcgattcgctcacataattctataatcctccaaatagcatcaccgcagattggtgattaccacatagtagcactcataccactctttctggcatctattgtgagctcaaaattgaaataaaccacacacttaagagagctcagcaatcacatcagatgatttcaacactatgtagtttgtgccatcagcgcccttgaactcgccgcctgcgtacttggagtacaacacagtgctgcctgctgacaccgaaagtggctgtctgttgccttcctcgtcgagagcgcctggaccaacagctacaactgttccaatggatggcttctccttggttgtctcagtgaggataaggccaccatcagtcttatctgaagcctcagcaaccttgatcagaacccggttgctgagaggcttcatgtccttgacgtcatcagactcgagaataccaatgatgtcatcctctttcataatgagatgcttggcgttgttgaattcgacctctgtcccagcatacttggaatatacaacttgagatccagtcggtatgctgacctccaccttcttatccccaatagttctgccccctccaaca

SEQ ID NO: 2067 - DNA, 603 bp, Avena sativa
ttttctttttttaagagaagtgtgcttcaattaacatggacatgcgtctcaaacactccaaattatttctcggaaatcaggttccttccaccgttacaccagatggattcctttattctgatgtgtacaacattcatcaggagaagaagaaaaagggtccagtacaaacactagtttgttccagctcccagtagataaggggaaatccaaagttgtagtagaagataaaactcaacacctgaaagaagaaagagggcagccacagacacaagtgttccgagctcaaagttattcgcagccgcgagactgaaggaagctcccctcgtcagatgctttgtagaatcgaggatgagaacttctgggtagggatacaatctgaagaccctgtcaagcgtttcacccaagttatgtatgataggctttgatgcatcctcattatcattatcagtatagcaattcctcgaaaacagggtccacgcttcggttccacttcgtctcgtacaggttcagaagcctctcagcgggtgtcacacctgttctaaccacttcgtcgacctctctcagaaaaccaacctccttgtatcctcttctttctagtccatt

SEQ ID NO: 2068 - DNA, 797 bp, Avena sativa
gcctgctgaagatcttgccagcttcagcgtagcgtccccgcctgaacctctctgcgccgacctccgcacggacccgagccattccttcctctctccttccccacccgagccaacgaccaagcaaaccctagaatctcgagcgcacgagagatctcgaaggtcgcagccatggcgatgcgtgccctgtacaacgagatccgcgcgatgaaggtgcgcgatgtcccggcgtacctcaagccgcgtctcacctgggagaacgtgaagaagagcaccgaccaggcggtggaccgctacatcgagaagtacatcgagaccaactccgtcgatccgctcttccacatctgcttcggcggaatggccttctcctacctcgtcaacctgcccgttgagcgccgccacctcgagcaccttgagaagcacggcggcggccactagatccggatccgcctcgcgcaggagagcttatctgctgctgattcaggatatggtgttctccattttcttctactgatgggctacctggagttgatgttcatttgatggctggttttattttgtacgggaaggcagcagcaaactgtctagttcaccgttatgttcctccttgtcttgtcataagcaacttcaaactgggaagtgcatgcattgtgattaaaaacgttttcagataatcgagtacaagttcttcgggatactccagcgatagcttgccaaccctgtgatgttgtactgccacttccctatgtggacaagtctgttttttgctgcttttctcaatctgtatgatgattaaagtc

SEQ ID NO: 2069 - DNA, 949 bp, Avena sativa
aagcacaaagcacttagcagcaaaggatcggcccatggagttatatgtcgaggaggaacctccgtgggtcttcgaccaagtccttgatgcggcgcaggaagtagaccgcctctctgccgtcaatcagcctgtggtcatatgtcagcgcaaggtacatcatgggcctcgcgaggatgttgccatccaccaccacagggcgttgcacaatggaatgcatcccaagaatcgctgactgtggggggttgatgataggtgtgctaataagacttccatagacaccaccattggagatggtgaatgttcctcctgccatctcatcaattgacaatgccccctcggtagccttctttgcaaggttgtttatccctttctcgatgtcagcaaagttcattgtatcagcatctcggataaccggcaccacaagacccttggaagtgccaacagcaacactaacatcaacgtagtctctgtatatgatgtcatcgccgtcaatgacagcattcacgattggctggttttgcagtccagaaacagccgccttgacaaagcaagacatcagacccaacttcacaccatgcttcttaacaaattcatctttataatcagaccgtagcttcatcaaattggtcatgtcaacttcattgaatgtggtcagcattgcaaatgtgttctgggaatccttcaaacggttcgcaatgcgcttcctgagccttggcattggcacccgccgctctcggtctttcggagggagctgtggttctgtaggggaggtttttgaaggagttggttttggtgcttgcttcttcggaggttctactttcggtggtttcgcttctacttttggtgatttctcttcaacttttgctggaggtgatttttttgggccgcctcctcagatggagcaacatgtgtttcagctggtgctgcagactttgatacaatagcaact

SEQ ID NO: 2070 - DNA, 664 bp, Avena sativa
ttttttttggtgaaaaaatgtagtaccaaatcattgaattctgatggtttgtgtacatggaaatgttccaaattattgcagtatgatacaattatagtacagtatgaaagtgcttacagagatgttgaatatcgttcctaccaggctcggtgaaagcaaaacactcccaaactctatccgatgaatcgtagtagtttgaaacctattcaattcattcagtggagatacttcaagcagaggacaaggcttactaatggtagtatggtacattcggaacaggatccaaccattcgaaatgcaacttaacttatcagcgaagacaggatttccagatcaacaaacggtcacgcgaaaaccatagatttgatgttgccctagatacggcttagatcttccttaggtggtacataatggcaactcgatcacgattgcctcacggtaacaataacaactcacgaccagcgtcaatgagattgctaaatcctcatcagaggctcatagttgcttgggtagcggcggcacaagcctaaccgtagctcagtttgcacggccttggatgacatcgaagccgacctcatcagcatctgtcgcctgcagctccacctggatgccgtcgagctccctcttgaacctctcccttggagctcgtgtagatcatcttgct

SEQ ID NO: 2071 - DNA, 209 bp, Avena sativa
  modified_base (181)..(181): a, c, t, g, unknown or other
ttttcaaagctgagaaagtcacgtaactcgcacaaataatactgtaatacagtagtaataacacacacaattaatagcagatccatagacctcaggtttcaggtttgcagccagattcgatccaatccaggatcgatccgaccacatggcattattagactcatactcatagatcccccanaaggggatcgataactcaaccaccacga

SEQ ID NO: 2072 - DNA, 920 bp, Avena sativa
ggacatctcttttcggaatcaatgactgtagtttggtgcaatctgatggttggtaatttaaccatgccttgtttggtcagtgagagtgctgacaagagatagaaactcaggtttagattagttaataaaagtaataaaccaacttcactagttccttactagatatgctagtaagtagaagtgtagaaccactttacatggttagctttttttatataatataagcatttctatccccgtggcctgtatatctaaataattttcccaattattctgatttaaggagcagtggttagcatatgactcttaaagtgagctagatagttgttagcttagatgttgtctgctccaatttttctaaataatgcttggttccatgtctgcaaaacaatgacaaacatgcacgcaggtttcccagtaactttctcaatacatgtcttgcaggtttttcaacaacgcattctacgctagagtaggaggaatcagcacgatcgagatgaatcggctcgagctggatttgttatttaacctggacttcaggctgaaagtgaacctagagacgtttgggagctactgtttgcagctggagaaacatacaacggcttcaccagagagactgcccgttcagctccattgtgtcaagggatctaaagatttggtatataacggtggtagcaccgatgagttttgccagagcaagcttgtgcgccatagttacagcagtcaggctctccaaggatgtagctgaccaagttacttgtggcctacggttttgcagattactgattattcttttagatctgacatttgtgcattattaagattacgacaattcgttctggagtgtttgatgagtagttcatttgtgcaaaaccactttagttcgatctttctttcacaaggtctggacattattcagt

SEQ ID NO: 2073 - DNA, 759 bp, Avena sativa
ccctgatgacaagaagccagaggactgggatgagagagctaaaatccctgatccagatgctgtgaagcctgaagattgggatgaggatgccccaatggagattgtggatgaggaggccaccaagccagaaggatggttggatgatgaacctgatgaaattgatgaccctgaggctgctaagcctgaagactgggatgaggaggaggatggtgaatgggaggcaccaaagattgacaaccctaagtgtgaagaggcacctggatgtggtgaatggaagaagccgatgaagcagaaccctgcctacaagggcaagtggcatgcccccatgatcgataaccccaactacaagggaatctggaagccccaagaaatccccaaccctgagtactttgaacttgacaagcctgacttcgatgccatcgccgctattggaattgagatctggacaatgcaggatggcatcctgtttgacaatatccttattgctgatgatgagaaggtagccacctctatcctggagaagacatggaagcctaagtttgatgttgagaaggaaaagcagatggctgaacaggctgcaaaagattccaaagaagacctttctgaaatccagaagaagatcttcgacattttgtacaaaatcgcattcattccattcttggaaccttacaagaccaagatcattgaactaattgagaagggggagaagcagcccaacattacgatttcgattgtggcctcaatcattgtcgtccttgt

SEQ ID NO: 2074 - DNA, 778 bp, Avena sativa
  modified_base (746)..(746): a, c, t, g, unknown or other
  modified_base (764)..(764): a, c, t, g, unknown or other
atgatcgatcagctacagtcctaaaacaatcgccatcagatatagtaggagtactactaatcaatccttgaaaattattggaacttatcagtagtagtctgatttctaattaattaacgtgtgacccaaattaaactgttcgttcgttcgtgcaggacgtggacgtgatgtggttccgcgacccgttcaagcacatcgccatgggggccgacatcgccatctccagcgacgtcttcatcggcgacccctacagcctcggcaacttcccccaacggcggcttcctcttcgtccgctcctgcccccaagaccatcgacttctaccgccactggcaggccggaaggtaccgcttcttcggcaagcacgagcaggacgtgttcaacctcatcaagcacgagatggtcgacactctcgacatctccatccagttcctcgacaccaagtacatcagcggcttctgccagctcagcaaggacctcaacaagatatgcacattgcacgccaactgctgtgtcggccttggcgccaagctgcatgatctcaggaacgtgcttgatgtctggaggaactacaccgccgcgcccgtgcccgagaagaggagcggcaagttccagtggaaggtcccgggcatatgcatccactagctgaagaatacattggcgaattggttcttccggtggctgtccattctttctgctcctgctcctctgcttggtctcctagtagaatcataatgataaagggaanactgagattgagaccganagaggtagtagcag

SEQ ID NO: 2075 - DNA, 546 bp, Avena sativa
tcttatataacaggggagtacactgatgtaaaacattcatttcggtccagttcctgaagaggttgtggcgctcaggcagtgctactgcttcatctgtccttgagagctccagtggaaaacgtaagcaaaaagcatatacttggatgacatgaacaaagaacctcgtgtcatcgtaggaaattctacattcgactgctttattcacaagcacaagtaggcaagcaggctgtcccagttcacaagcatccatacatccaaaagcatttgcacaactaacttgcggaacgaaatgaaactcagtatcctcctctcggagacattctaacactttattcagtgtcccttactgctagactgagacagtctgtgtaccgcggaaccaccaggtgtgctccgctgtcggctgtcgcgacgatatacacataacataacaagaacaaagcggaaacatcgcacgcaaatagaagttcaacaacggccattgtccgtggagagaacacggcctatttcgtcatcatcaccctgatcatcattattagatcccgg

SEQ ID NO: 2076 - DNA, 794 bp, Avena sativa
atctctgccaccatgagtggagtgacatgctgcttgaggttccctggccagctgaactccgacctccggaagctggcagtgaaccttatccccttcccacgcctccacttcttcatggtcgggttcgcccccttgacctcgcgtggctcccagatgtaccgctccctcacggtccccgagctgacccagcagatgtgggactccaagaacatgatgtgcgcggcggacccccgccacggccgctacctgactgcctcggccatgttccgcggcaagatgagcaccaaggaggtggacgagcagatgatcaacgtgcagaacaagaactcgtcctacttcgtggagtggatccccaacaacgtgaagtcgagcgtgtgcgacatcgcgccgcggggcctgtcgatggcgtcgaccttcgtgggcaactcgacgtcgatccaggagatgttcaggcgggtgagcgagcagttcacggccatgttcaggcggaaggccttcctgcactggtacacgggcgagggcatggacgagatggagttcaccgaggccgagagcaacatgaacgacctcgtcgcggagtaccagcagtaccaggacgcgaccgccgacgaggagggcgactacgaggacgaggaggacctgcaggccgacgaggagtgaggttgtgtgtgtggtcttctgtgtgacgggcagggctatccgtctccgatggctctgttagtgtgctgcggtgtgagtgtggctgtgcccgtgcttgggcactcgtgtggacttggttgtgcgtttgtagttgt

SEQ ID NO: 2077 - DNA, 653 bp, Avena sativa
agtattctgcaaattacatatcatcatcatacaaaccaaaacaccaaatacaagcgttacacgtgcttaagcaagtgccattgttcaagctagcacgtaccgatcgacccattaaccgtcttgtacaaccaaattaagaggaataatctcaacaaacccaaatgcatatactacgagaacacatgcatgcatgcaagaattaaaactacttacttattgactgaagtaatgaaattcagaatggactgactcgtagaacagaatgatacatgcatgcctggcatgccctgatggatggatggatgtgatcaagtgcagcttgattaagagcactggaagcccgagggtgcggacttgccgcagtagttgaggatgaggctgagcttgatggggacgttgaggacgacgccgagcacgttggccttgagcgccgtgcagaggcagacggcggcctcgaggtcggcgagcccgccgaggaggctgcagcacttgtcgccgccgccgctgggggccgtgccgacgcccgcgctgatcaggccgaggacgttggcgcacgcgccgagcttcagggtgtccttggggcacttcttcccggatgacgacggcggggaggcagggcgtgggtggacgggggcgtgggcgttggcggcgtg

SEQ ID NO: 2078 - DNA, 615 bp, Avena sativa
catcactgctacttgactcagcatcatctccatcagcgctcactgtcccaccgccactgcctgactcacatgggttctttgactcatcggtaggcaactgaaagcgacaaactggacaagaactgtggagctccagccatggaaggatgcaatcggagtgaaacttgtgttgacaaggcatctcctttgcttctgtccccatttcaaactcttcaagacagactgtacagcccaatacttcctggatgttcacagttggcaatgcagctactgattccttcttagcaggaggtgtgccagaacgatttaggtcactatctgccagacgctgcaagagaagatctaggccaggaccaagaaagtagtctccaagtgaaacgccagcactgttgttgcttgagcgctcttggttatcattaggtccaaatgttccttggaggataatggcctcattgttggagttgatcagtattaagctttctgtcctttctgtcactcgatctctctccctcgccctcaccctttctcggtccctgtctcttctagccctctccctctcccttctttctctcaggccctcctggcctctgtccctgtccctgtccctgccatgtc

SEQ ID NO: 2079 - DNA, 741 bp, Avena sativa
aacgaggccatgaagagccactccaccatcatcaccaagaagctcctcgactcgtacgctggattcaacgacataggaaccctcgtcgacgttggcggtggaacgggcgccaccatccgcgccatcacctccaagtacccacacattaaggggatcaatctcgatctcccccatgtcatctccgaggcaccgccttccccaggtgtacgccacgtttgtggtgacatattcaaggaggtgccctcaggcgatgctatcctcatgaagtggatccttcacgactggaccgacgagaaatgcttaacgctgctaaggaagtgctatgacgtgctgccaacgcatggaaaggtgatcctggtggagttcatcctaccggagaacatgaatggcacgacgaagggggtcttcatggccgacatggccatgctcacaaacacaccgggtggcaaggagaggtaccggagggagttcgaagtgttggccaagtgcgctgggtttggcgctttcaaggctacctacatctacgccaatgtttgggtcatcgagttgacgaaatagatccgtcctgaggccctcctagacctaaatctgcaaatttactttccatttttttaccttctctgaataatattatggattctaatggttgtgtactattcaagtatacttgaaatgtagcattgattttgctatgcagcattagttacagtttctactagtcccattccaattaataaagtg

SEQ ID NO: 2080 - DNA, 542 bp, Avena sativa
ctttgatttcccaaccacaatcgaggattatattcacaggataggtcgaactggtcgtgctggtgctactggaatggcatttactttcttcacacactctaatgcaaaatattcgaggaatcttgtcaagatcttgcgtgaagctggccagactgtgaatccagcgctggaatctatgtccaagaatgccggatctatgggaggaggaggcaatttccgctcaaggggtagaggcgggtttggtaaccgttctggatcgaatagcatcccagtacgaagaagatattaatgcaaatgcagaatgatattctgattttgaagacaatcaatgatgaacaccattctggttttgaagacaaacaatgatgttctatctgtatactgtttaggtattttttgggggaaatttctttgaaattcctactactgctagatcgaccaaaatctattctgttttgtatgagggctatggataattatacaaatgacagaaacactttgttatatgtattcaagttagatttatacttttaaaaaaaaaa

SEQ ID NO: 2081 - DNA, 833 bp, Avena sativa
aacccaagcccaagaaggttgttgaacaacaaccagaagagcctcaggacaatgccagcagagagcttccaagcgagcccaagagcagccccattcctgctcctgggtggtcgctgccgccccccatgtacttgccagtgacccctgctccaccaccaccaccctcgcccgcaatccaagaggtggaggccatacgggctgtcgtggtggagagcgcaaatgtgctggagaagctggacaaggcagagagcgagaggctgcaggagctcgccaggaggtccaaggagctgcatgacaaggagttcaagctgccgtatcagaaccccgtgccgtgtgccgacgagaaggcaggctgcctcgactgctacgtgagcaatgctgtgcaggacccgctcaagtgcgctgaggccgtcaggaggttcgaggcgtgtgtccgcatggccaggcagagcggaagcgtgagtggggtcgcgtccaagtgaatgagtgaggtggtaggcacacaaattttgccttgtccggatggttttgaataacctggaatttcggtgatacctgaaacaccattgtagatcaatttgcagtgaattggtctaagcgaggcctgagtgagtgtccttcagtttagggattccatgttacatgcgtaatcgaactgcaggattgactggtctcatttctgtttacttgtctttgtgagcttcagccgtggcatgttctttgttcggttcagaaatcatctagtgcctaatttggaagatcctcatttgtgcctmgtctgaatttcctttaatctacagattgatgcctgagttttcctcgtgtgtaaggcc

SEQ ID NO: 2082 - DNA, 639 bp, Avena sativa
aggatcctgtgatcttatcaaaaagaggaaaactgtggaagacttctgcaaccaaatccacaaggacatggcgaagcagttcaaatacgcgctggtgtggggttctagcgttaagcacaagcctcagagggttggcaaggagcatgagctcgaggatgaggatgttattcagatcattaagaagatatagttacaccgtggagcgagcggatattttttgcaaaccaggaaggagctctcagccatgaagtttcttgagatgtttcttatgcaagctatggtgcctgtagatgtgtcgctgtttgcataaaccttgttgtgatggaaagacagaatgtaggcagttgctttttccctcccgtgaagtagccatgtaatcatgctgttcgtcgcagatgaactgaaagtcccgccacagctgaactcatgaaaagaaagacgcgtgcttatcttctgaagatgttaagacggttcttataatggtgcaagtgtttcggttttgttagtttaccattatccattgtacctaatgaacattgctgttaactgctattgaggctgcgaactttgatgaagaaaggacacatcggaagggtactggttttgattattaaaggagatcaccttatctaaaaaaaa

SEQ ID NO: 2083 - DNA, 835 bp, Avena sativa
tcttcgcatctctttctcccctggcagggccgctccgcctcggccccaagcacacacactcagaaaagagggaggccgcttcgagagaagacgagcgaggagaggggagccatggacgactacgcgagggagatgatggagctcaagacgctcgtcacccgcaccctcgagaagaagggcgtcctcgccaagattagggctgaactgagagctagtgtctttgaggccatagaagacgaggatcgtgtggcagaggagaatgaagatggtgggaatcctgctttgcttggtagctgcaatgaccgtgctaagcagctgcatgcttcaccttcaggtaggttattgacagcacttataggtgaatacttggagtgggcccagctaagtcacaccatgaaagtttatttgccggaatgtaatctgcccaaggacttttggaagaatgagctaaaggatttttctaacaaaaatggccctgaaggagcaggagtgctgagagtggtcccatgcttttagatgttcttgaaggatatctcaaatatgagaatttgtctcaaacaagaatggctggtaggagaatggtcaattctgagtctgattcaacattgaatactgatcatcggaacatgaggaggccaccgtcttcatcttcagtcgggggcatgccttctatgggaaggcaaatgccatcatcgcagacatcagaccgaagagggggctcttccgcatccaatgcaaggaaagaggagtacaactggggctatgacgatgatatctcagaagaagttctgcgttcaacaaccagctctatggagaacttgcaattagaccggaa

SEQ ID NO: 2084 - DNA, 996 bp, Avena sativa
gaaggcggcccaactcctgagcaagcacgatccaccaattgttcttgctaaggttgatgccaacgacgagaagaacaagcctcttgcgaccaagtatggggtccagggcttccctactcttaagatcttcaggaatgaggggaagaacattcaggaatacaagggccccagggaggctgagggaatcgttgattacttgaagaagcaggttggccctgcttcaaaggagatcaaggcaccagaagatgcagcgggcattgaagacgggaagatccacattgttggtgtcttcgctgaattcagcggcactgagttcgcaaacttcatggaggttgctgacaagctgcggtctgagtacgagtttggccacactttgcatgccaaccacctcccacgtggtgatgccgcagtcgagaggccattggttaggctgttcaagccatttgatgagctcgttgttgacagcaaggattttgatgtttctgctttggagagcttcattgaagctagcagcaccccgaaagttgttacttttgacaagaatccagacaaccatccttacctcttgaaattcttccagggcgattctaccaaggccatgctcttcttgaacttctccactggaccatttgagtccttcaaatctgcctactatggtgctgcagaggagttcaagggcaaggaggtcaagttcctaattggtgatatcgaagcgagccaaggtgccttccagtactttggtctgaaggaggatcagacaccacttatcctcattcaggacagcgaatccaagaaattcttgaaggaacagattgaggctgaccaaattgtttcttggttgaaggattactttgatggtaaattgaccccgttcaggaagtccgagcccattcctgaggctaacaatgagcctgttaaggttgttgtggctgacaatgtcaacgacgtggtcttcaaatctggcaaaaatgttcttattgagttctatgctccctg

SEQ ID NO: 2085 - DNA, 733 bp, Avena sativa
ggaggaagaatctctgaataataattccaccatcctcgagaaggatgatgtagtgggcacaaacaccgaggacaatgaagaagaagaagccttccacccggaagacgacatgatgtacgacgatagcctttcacccgctgatgacaacgccgctgaagctgcagccgatgcgggtaaagaagaactagaggatggggagcagcaggaggacctggagacagcggaagaagaatacgagtacgaggcggctgacgacgtcaacgccgaggaagacaacgactaccaggagtacgaggatgatgatgacctggaggacgacgatgatttcgcacgcaaggtcggcgtgctgatctcatagtgtgcaataagctgggtgtgcccctaaggcaacaccttcatggactgaaggaaagaggaggagctacggatcgctcctccgaaaaatcttgatctgtattcttttggcgctagatacttcttagttcactgcgctatagaaacttgggctaataaatttgcagacaaagcaagcagatcaagcaagagaaaaaacaagcaagcaagcaagctgatagctgttgtattctagtgtatgtgtgggtgtgctcaagtctgctacctgtgttgtaacattattattgattaattggtgaacaaaaagagacagatcacacaattgtacctttcatttacatttgttagtgcataggatgatgataacaagaaaaaaaaa

SEQ ID NO: 2086 - DNA, 953 bp, Avena sativa
agcttgctactcagttttcatcaatccagctacaagtcagcctaatgtctctggactaattcttgctggttctgctgatttcaagacagagctgagccaatctgatatgtttgatcagagacttcaagttaagatacttaatgtggttgatgtttcttacggtggtgagaatggtttcaaccaagctattgagttgtcagctgagattctagcaaatgtgaagttcatacaggagaagaagttaattggcaagtactttgaagagatcagtcaagatactgggaaatatgtctttggtgttgatgacactctaaaggctcttgaaatgggtgctgttgagactctgatagtgtgggagaatctcgacatcaacagatttgcgctgaagcacagtgtctctggcgaaattatcatcaaacatctgaacaaagagcaggaagctgatcagagcaattttcgcgattctgagactaatgctgagttggaagttcaggaaaaaatctctttgttggaatggttcgctaatgagtacaagaagttcggttgctcgcttgagtttgtcactaacaaatcacaagagggatcacagttctgtagaggattcggtggcattggtggtatgctgcgctatcagttagatatccggtcttttgatgaggcctctgatgacgagggtttgtacgaagactctgattagcaatcagccaatcaaatgactgtgctggcccatggaaggacgccacagctgcaacagctcggttttgctctgcttatgcaagaaaacttcaaacgcagctatctagagattgatgggcatgggccagcctcatcatatgccgaaggagtttaaaccaaatgaaagataccatcatggcagtaatgtgtcaagaagttaaccgcgattaaaggctaaagcttgttatagctagctgccaccttatgcttctctattc

SEQ ID NO: 2087 - DNA, 487 bp, Avena sativa
tttttttttgcctttcaaaaccttcgccgcccatgttattgctctcagctatctccagttgaaagatgaaactaacccagtccgataagcattttttgtattcaccaacaacaaatttcgagaatcatttactatgaatgtataataaccatgccgctacattcctgatacatatggactggaggcctgtagatctacagataaggggccctcgacggccaataacatgtataacggggccaagaaatatgatcagctcttgtcgccagaaggcgaggggggagtctccgcccgacttgtcgtgctggaacttcacgacgacgcaggtgatgttgtcgccactcccacggggcgaaggcggtctccgtcagcttccgggccgccgcctcgggttcctccgtccatcttgactagcgagacggcatcctcattcggaaccacatcccacagcccatcactggccaaaatcagaaactccagttcatca

SEQ ID NO: 2088 - DNA, 869 bp, Avena sativa
ccgggattgacttcatcatcatcatataaacggaacaagaaacggaggagacttccaccgattgattccctttgcttcccttctcccaaagccacctttttttactagcaattcccctcgtacttctcctcctccgaatcgatcgagacccagcggtagccatggccagcgccgagtacgattacctcttcaagctgctcctcatcggggactcctccgtcggcaagtcctgcctcctcctccgattcgccgacgatgcgtacgtggacacctacatcagtacgatcggtgttgatttcaaaatcaggacggtcgagctcgatgggaagatggtgaagctgcagatttgggacacggcaggccaggaaaggttcaggacaataacaagcagttactaccgaggagcccatggaattattatcgtatatgacgtgacagatagggaaagcttcaacaatgtcaagcagtggttgagtgagattgataggtatgccagtgacagcgtgtgcaagcttctagttgggaacaaatgcgatttggttgatagtaaagtcgttgacacagaggaggccaaggcttttgcagaatcattaggaatgaattttcttgagacgagtgcaaaggaatccatcaatgtggagacagctttcttaaccatgtcatcagaaatcaagagcaggactgcgagccaacctgcgccggcggagaggaagacggtccacatgaaagggcagcccatacagcagcagagcagctgctgctcataagctcaccaagactccattcctacatctcatgatatcttagttgggtggttggaggctggaagattcatcatcaaagtcttgggagcgcagtgaattggatat

SEQ ID NO: 2089 - DNA, 680 bp, Avena sativa
ggctatatgttttggcaaaggcctctactttgcagatttagtaagcaagagtgcacagtattgctatgtggatagaaataatccaactggtttgatgcttctttctgaggttgctctaggagacatgcatgaactaaaaaaagccacgcccatggacaaacctccaagagggaagcattcaacaaagggcttaggaaaaaccgtgccgctggagtcagagtttgtgcaatggagggatgatgtggtcgtgccttgcggtaagccagttccagcatctaccagggcatctgagcttctgtacaacgagtatatagtctacaacacatcccaggtaaagatgcagttcttgttgaaggtcagattccatcacaagaggtgactggaatactagggagaatatagtcagattccaactaagatagtaggttatgtcgccctcactttcgatccattttgggtgggaaatatagcatggggcatcggtgtgagtggcgaagtaatcctccgcattatctttgcgttgatgataattgctaaatcgtctggaactattttgcccgttgttttgtctttgacatgtcagttgtgctgcattacacttgcacgtatttatatttgaacctgatgtagagaatttgaagtagcagtggtctatgtgccctttcctaccaaaaaaaaaa

SEQ ID NO: 2090 - DNA, 494 bp, Avena sativa
gcggccggagtgggtcaagaacgaccggaggcgcctgctccacgttgtctaccgcgtcggcgaccttgacaagacgatcaagttttacacagagtgcttggggatgaagctgctgcggaaaagggacatcccagaggagaggtacaccaatgcctttctggggtacggaccggaggactcgcactttgttgtcgagctcacctacaattatggcgtggaaagttatgacattgggtctggttttggccattttggaattgctgttgaggatgtcgaaaaaactgtggaacttatcaaagccaagggaggaacagtaacaagagaaccaggtccagtgaaaggtggaaattcaatcaattgccttcattgaagatcctgatggttacaaatttgagcttatagaaagaggtcccacacctgagcctttatgccaagtaatgcttcgtgttggagatctagatcgtgctataaatttttatgagaaggcatttggt

SEQ ID NO: 2091 - DNA, 825 bp, Avena sativa
atttattgcaacgacttacccttgtcggccttgcaaatacagaaaaggttggcaacagcagtgagcgatcttagaagatattctaggccaagcccattactcagtcacagagcatcaacttcgtcaaattcgccaaatcatgagccggcagttgatggagttcatgccgctgcagcgttggctgcagatcaagtttctaattcaagcaccatggctgtgattcaggaggatgctgctttcaccgaaagcgtgggagaacctagcaatgcagggtcttcgagaaccctgaggaggaggggaagaagcgacgccttggcttcattggacgtggacggtggggacacacaccggaacaagagaaggcgactgaactagaaggccaaaaaccgactcttgcaggtttcaggttgttccagttttcatggttcgctcttctcggcgaccccattttatctctttgggcggcactgctatatgctgggtgtgataaaactctttctgcttcttctgcctgtttaataggtactgcttagtaggctgtttgtttagttcctccctgcctgtttaatttatgctgttactagaggcatgtataccaaggaaaacctgagagatgatcatcagatgaaatttccctttatcgtaaaaatcagatgtgcaaatatgtaccacctgtcttgtaatgtcatgaataataatgtaccatgattcgaacctaggctgtagatggcctctgattttcaagagtcctcgatgaacatgtcaagctggcatgatatttagttggatgaaatgaatcaataccaagtaacagattacgttgta

SEQ ID NO: 2092 - DNA, 788 bp, Avena sativa
ttttttaggtaaaagctttttcattcatgaaacaatgagtggtctgatcgagctctttcttaccggctttgctgaaaccgatcaatacttgtaggatttattttgtatatagtggacattagatccccacgttaagatgttggaactatcctatctactgaattactcagttcataggactgaattacataagcggaagattatgtagcagtgctaatatacatgctactcagctgaatggcagatactcgagtgaggtttgctttgccatccaggatcaggaacaacgcgaagaggcgagagctgaagcgtgatatgcatcatggaggggcagtgtgtgcgcttcattacttcaccagcatcttgatgtttttgtgagggattcatagtgtgatcccttcgggctgtctgtgcctatggtgttaagccatcccatcttcatcttctctttgctgattctaaaattcagcgggatgcccatcttcatcatctgccccgactaaagcggcactcgcatagaagcccaagcaaaataaatcacttggaaaaaattccagcaacaacggccacggacagggcctgtcgtgctcgtcgccggcggtccttgcatgtccctctggactctgtcttgtcaccagacggctggatgcgatggagaccatccaatctggcccttctatgccccccacagcacaaaatggaagatctggtgccataatgtaccaagtttttctaggagtcttcgtaatatgcagcagctaatcaactaccatgtagcatggtatgaa

SEQ ID NO: 2093 - DNA, 778 bp, Avena sativa
cacggcgctgtcgagcgcggcgctcgtgcggcggatgctacgaggtcaggtgcgtggaggacctcaagtactgcctccccggcacctccatcgtcgtcacggccaccaacttctgccctccaaactacggcttccccgccgacgccggcggtgtctgcaacccgcccaaccaccacttcctcctccccatccaggcattcgagaagattgcgctctggaaggccggcgtcatgcccatccagtaccgccgcgtcaaatgcctccgagaaggtggtgtgcggttctcggtctccgggaagggctccttcttcacggttctaataagcaacgttggcggcgctggcgatgtcagatcagtaaagctcaaaggaacagagtctggctggctctcgatgggccgcaactggggccagatatggcacatcaacttagatcttaaagggcaaccggtgtccttcgagctctcctcaagcgacggcacgacgatgaccaacttcaacgttgtgcccaaggattgggaatttggcaaaacttacaccggcaagcagttcctgctctagaaaaggaattaccaatagggcctcataattattcttttttattccacgagttggctgtactgtatattatattcctctgaggagcaagattagtagggagaaagttataatctctattgtatattcctctgaggtacaagagtattgttaggaaagaaaatgtttagttcagagcctcagatagttctacaggttacatgtgcttataaatgttgcac

SEQ ID NO: 2094 - DNA, 462 bp, Avena sativa
ctaccttggactggaaatccggcaaaagttggtggagcgcacacagttctgggtaacagaactggggcttaggaatgttcacttttatgttcgcaaatgcaacggtatcttttgagcaaatcgtgtcatcgtaccctggtccattatcacttgtttcaatactgtgccctgatcctcactttaagaagaagcatcacaagagaagagttttacagacaccattagtggattcaatcacacggaacctttgtctgggtggacgggttcttgtacaatcagatgtgcttgatgtagctgcagacatgagagaaaggttagatggatactcagatgtgtttgaacatgttgattccattgataaagatcttcggtgtgacaccgaaggttggcttctggacaaccctatgggaatacgtacggagagggaaatccatgctgagttagaaggagcaaccatatata

SEQ ID NO: 2095 - DNA, 588 bp, Avena sativa
ttgcttgttgcagaagaggcaagccaaaggaaattcctatattgattgatgccgagaaaagagggatggattggatgagcttcttaactttgcatcatatgttgtatgctctgcaaaatttcctcaggcctggacaggagcctcatcaacaccggttggtttggtgcatatgcttctaagattacctaatatcaagttcgttattgtaacccggggagaaaaaggttgcttaatgcttgaaagaagcatgacagatgcttctgagactgaggaaactgatgtagaggatcttctggaatcgctagagcaaaaagttgatttgaattctagcttgccaaaatgcattgcttcgaagtcaaatttgagaataagtgcggatggtgtaggctcgatgagtggcaggttgcttttaggcacggctgaatctatactctctgaagagctcatagatacaactggtgcaggtgatgcattcatcggagctgttctgtatggtttatgcacgggcatgccagttgagaagatgctgccttttgcagcacaagtggctgcttgcggttgcagcgcgtttgggggcgagggctggtc

SEQ ID NO: 2096 - DNA, 762 bp, Avena sativa
ttcaaatataacgttactgaaatgctggcaactggaaatatcttcacctcaaatggtaaagaatatgcactgagtgatgtcatcgatactatcaaacatgcttttgggggctcaccacagatcatttgcaagaagggctcggttgaagaactaaggttgtgcttcaccaaagacttgaagcctcgcgattgcctcactacttcttcgatgtacaaaaacttgtccaaagcaaagcattgccctcgaagcatctccctgccagcatatgatcccaatgcattcttaaattcaaccttggagattcttccagaagccagcaacagtgggatgtatatttatacatcctaagataccattacagcacccgagcattgtatgactatgatgaagcagataccttctggactcttgactgctttgaagacatagccacaggtgctgcggtgagcactgcatgagatgctggcgaaaggtgtctctggtttatcaaaccatttgtaaataaaactcttccacattacctcctcagaacagcagatgattcgattatgttctggctattgtctactactgtactcatggaaatcaaatagccaatgaccgaatgtatacattcatgaacgaaagctgaactcaactagtttgaatcagaatgcacgttcaggagcgaaagctgaactcggcgtcacagttgtataacagatgtttgtagcacacaattccaagctggtgctcaggattcagtaattttttaccgaaaaa

SEQ ID NO: 2097 - DNA, 929 bp, Avena sativa
aggagacggacgggaagagatgggttcttgcgcgtcggttaacagggacgacgtcgggctgcccaagaagctgctcctcgcgtcgtcgccgccgccaaggagggggcgtggacgggaagggcggcgccgcggtcggcgacgtcctcgttgatctcaagcgcaagattgaggagcagggagggtacggccacagcaggagccctgattctggtagcaaggatgaaatgttcttcgagtctcaagggtggttagattctgactgtgaggatgactttcacagtgtgaatggagatttcactccatcccgtggcagcaccccgaattatcaacctagagcaaacactgtgatgagcaacgtctttctacctaccaaggtaaatgactcgaaatcatcagagccttctccgactggacgaaggaagctatccgagctcctgcaggaggcgatgcagaacggcactgaagagaacaccaccaccgtcaccggagaaccagatagcagcaagaacggagatcagcagccacaatccgtcaccgcagctgggaagccggtgtccgagtctagcaccggctgcagcactacggaaccgactcctgtcagagaagccaggagccggaaagagaggtcctggtacagcggccactgctgcctgccgacctttgtccatagcctagccttagaggaagatcaggggaggcagaagacgcgccctgggcctgttgctgtctgacagcgccgctccctccggtgcgccccctccctctccgagctgtatcggctacgatactactgcctgatgccggccctgaatcgatcgaactactgtaaagaaagccaagttgccgagagtgctatatccttgtagtaatcaagcgaatagccactccgggaattcatgtgctgtactcgaatctggctcgaggaatgc

SEQ ID NO: 2098 - DNA, 519 bp, Avena sativa
ggacacgctagcgaaccttgcgattcttggcgaaggtgaatctcttccttcccagccaactacaaagcacccacgacatcgtgctggctgctcctgcattgtctgcattcaacctcctagtgggaagggcccaaagcacaagcagacatgcacctgcaatgtctgtatgacggtgcgccgccgtttcaggacactcatgcttcggcgtgagaaacgtcagtctgagaaagactccgaggaacctcgcgaatctcgcagaaaagagctaggacagtccagcgagttggttccacaaaatggatctgatcttccgcctgctatcaccagtccaattagctccccccagaaggcggacacaaatgatgatgctgaagagcatagcatgtcatcctctcctatgaagaaccagattgacctgaacattcagcctgaacgggaagaggaacagtcaccaaaatccgatgcggttggtgccttgagaattcctcgagacaatccaacctagggcgatgaagtcca

SEQ ID NO: 2099 - DNA, 574 bp, Avena sativa
gatattcagcaccagaagaggttgatactttgccatcaacatgtagtgcctgtgctgctgagtgtgtcactcgattcttttctacaaaaatcccatattttcgagaggtaattcttatggctacaacatgtgatgtgtgtggttatcgcaactcagagttgaagcctggtggtggaatcccagctaaaggaaagaaaactacactacatgtgcaaaattttaaagatcttagtcgtgatgtcattaagtcagattcggctgcggtgaatgtacctgaacttgagttggagctgtcagctggaacactgggtggcatggtgacaacagttgaaggcttaattgtaaaaatatgtgaggcactggagagagttcacggattccagttgggtgatagcacacatgaatggaaaaagaagaaatgggatggtttcacagagagattatcaaagattctaaatttagaagagccgtggactttaattattgatgatgcattggcggcttcatttattgctccagccacagatttgatagaagatgacaagcaactaacaattaagaaggagtatgagag

SEQ ID NO: 2100 - DNA, 588 bp, Avena sativa
aaatgttaccaagggtaaacctgatatgcacgaagcaattgattgctacacgcctatcgaaccggggaaatatggagctcttgctaaaccaatggaaggatctaatttgtggccggatcacccaccaaattttgacgcgcttctggagaactatataagtcttctaagagatctttcaagaaagatcatgcgaggtatagccttggcattgggtgcgccgttggatgcctttgaaggcggaacggcaggagatcctttctgggttctcaggttgatcgggtatccagtctcagctgacatcccgcaagagcaacgcactgatactggatgtggagctcacacagattatggccttctgacactggttaaccaggacgatgacgtatgtgctcttgaggtcagaaacatgtctggtgagtggatatacgccaagccggtccgtgggacctttgtttgcaacattggtgacatgctgaaggttggtcgaacgggatatatcagcccacgctccaccgggtcgtcaacaactcccctcgttaccgtgtatccgtcgccttcttctacgagtcgaacttcgatgctgccgtt

SEQ ID NO: 2101 - DNA, 704 bp, Avena sativa
ccgcagcgaggcatcaaggaagcctacagggtcctgaggctcggcggaaaggcttgtctgatcggccctgtgcacccgaccttctggctgtctcgcttcttcgccgacatgtggatgctgtttcccactgaagaggagtacattgagtggttcaagaacgcagggttcagggatgtccaacttaagaggattggaccaaagtggtaccgtggtgtccgtaggcatggcctgatcatgggatgctctgtgacgggcgtcaagagagaacgtggggactcccctttgcagcttggtccgaaggctgaggatgtcagcaagcctgtgaaccctatcactttcttcttccgcttcctcatgggaacgatatgtgccgcatactatgttctggtgcctatttacatgtggataaaggaccagattgtgcccaaaggccagccaatctaagggagaggaattaagctgcagcgaagagtggatagccagtatctgaattaggcttctctatattaggcactccacacctgtttttgtttatctttaaatttccgtcgtcatgtatttatttttgctgcggttcttgtttccatggagaaataatattgaagactttgattatgcttggcagaactcttgaacgtaaaaatgtatccttgtagcaggtctgtttgttaataggatgaatctgtaatacttctaccaaaaaa

SEQ ID NO: 2102 - DNA, 744 bp, Avena sativa
ggcgtccaccccaggaccgtccccaacaaccccgacggcaccatggacatcgacaagatcgtcgccgccgtcaggaatctggacggtggggggatttgttatcccaccaccaggctcatctgcctggagaacacccatggaaactgtggtggaaagtgtatctctgtggaatacacggacaaggttggcgaagttgctaaaactcatggcttgaagcttcatattgatggagctcgcattttcaatgcttcagcggcacttggagttcctgttgatagacttgtgagagccgcggattcagtttcggtatgcctatcgaaagggttaggtgctcccgttggatcggtaattgttggttccaaggccttcatagaaaaggctaaaatccttagaaagaccctaggtggcggaatgagacaggtgggtgttctatgtgctgctgcccatgtcggagtccgcgacaccgtaggcaagcttgccgatgaccataggagggctaaagttttagcagaaggactgaagaaaattaaacagtttacagttgatttatcttcagtcgagaccaatatggtatacttcgacattactgatccacttgtatcacctggcaagctgtgtcaagtcctgaaacaccgcaacgtgctcgcaatggcagtaagctcaaagagtgtccgacttgtggttcactaccaaatttcagacagtgacatccagtacgcgctgacatgcatggaggaagctgtt

SEQ ID NO: 2103 - DNA, 877 bp, Avena sativa
ctgctcttgtcagaccagatgctgtgttcaatggtcagaaacccatcagcggtggaatccacattgttccccagttggccctggcgccatcagcagcatggatttgcaaggaacgtgaattggtctttcactgattcagaagtcaccgaaggagatccggctgtaaccttggaactaaaagacgattcctacagccgttcaatgtgggattttagtttccaagctttatacaaggttgtgctgcactctacaagcctgtcaacaaccctgacaataacaaataccgatgataaacctttctcgttcaactcagcactccatacttatttcagtgcttccatcgctggcgtttcagtgaaaggtcttaaaggtagtaagactctcaataaggatcccgatcctaaaaatcctattgaaggcaaagaagaaagggacgaggtaacctttccaggatttgtcgactgtgtttaccttggcgcaccgagtgagcttaccctggacaatggattgggtgacaaaattgtcatctcaaatacaaactggtcagatgcagtgttgtggaatcctcacttgcagatggaagcatgctacaaagattttgtctgtgtcgaaaatgcaaagattgaaacagtacaactgggtcctaaagaatcttgggtggcaaagcagaaaattgaactaatctgaagctaatcagtgcaaaagaatatgatgtggcggaagggtcctttttttttacttctggcaatgtgaacatatgccacacccaatgtacttggttcaacttatgccatcacatcagatgtttataagtaaatcaataaatttagttcttgtttccttctcttggatggtcagctgtattgcatgttctgct

SEQ ID NO: 2104 - DNA, 607 bp, Avena sativa
tcgagatcatggagccctgctgcagtgtcaaggacaggataggaatcagcatgatttcggacgccgaagagaagggcttaataacacccggaaagagtgtcttggtggaagcaacaagtgggaatacaggaattggtcttgctttcattgctgcctccaggggatacaagttgatactgacgatgcccacgtccatgagcatggagaggagagttctgctcaaagcctttggcgctgaactcgtccttacggatgccgcaaaagggatgaaaggggcattggacaaagctacagagattttaaataaaacacctaactcgtacatgcttgagcagtttgacaaccctgccaacccaaaggtacattatgagactaccgggccagaaatctgggaggattcaaaagggaaggtggatatattcattggtggaatcgggacgggcgggacaatttctggttctggtcgtttcctcaaggagcaaaatcctgatatcaaggttattggtgtagagcctactgaaagtaacatactctctggtggaaaacctggcccacataagattcaaggcattggagccggattttgtttcctaaggtaactttggta

SEQ ID NO: 2105 - DNA, 699 bp, Avena sativa
atcgtctgggtgcccgtctacgaccgctatttcctttcgttccccgccgtgcgctccatcaccggcaggccacgcggcttcacgcagctccagcgcatgggcatcggcctcgtcgtctccatgttcgccatgctcgccgcgggggtcctcgagctcgtccgcctccgcaccatcgccacccacagcctatacggcaaggacgacatcgtgcccatctccatcttctggcaggtgccgcagtacttcatcatcggcgccgccgaggtgttcaccttcgtggggcagctcgagttcttctacgaccaggcgccagacgccatgaggagcatgtgctccgcgctctcgctcaccaccgtcgccctagggaactacctcagcacgctgctcgtcaccgtggtggccaagatcaccaccaggggtgggaaggaaggatggatcccggacaacctcaacgtcggacacctcgactacttcttctggctcctcgccggcctcagcctcgccaacttcgccgtctacctcctcatcgccagctggtacacctacaagaagactgccgaatatccaccacctgacgccgtcaaaggatcagctgatcagtgagtgagagcttcggttcttctctgaatatgtatgcgtgtgttcagatttcaggagacaagaccaaaaaaaggttacttagaaaggattgttggtact

SEQ ID NO: 2106 - DNA, 790 bp, Avena sativa
cttggacactctgagaggagggctttgttgggagagtcgaacgagtttgttggagacaaagttgcatatgcactcgctcagggcttgaaggtcattgcttgtgttggtgagactcttgagcagcgtgaagctgggtcaaccatggacgttgttgctgcacagacaaaagctattgctgacaagatcacagactggaccaacgtggtgattgcgtacgagccagtgtgggccatcggcaccggcaaagttgcaacaccggctcaggctcaggaagtgcatgccaaccttagggactggctcaagaccaaggtgagccccgaggtcgccgagtccacacggatcatctatggaggttctgtgaccggcgcaagcgccaacgagttggccgcgcagcccgacgtcgacggcttccttgtcggcggagcttctttgaagcccgagttcatcgacatcatcaacgccgccagcgtgaagtctgcctaagaagatgctcggtctcgcgcgcccccttggacgatgaaaaggaacttgggctggagatgaagagactctttttttcgttgccgtgtctattatatagtacctgtgtacgcctgtagcaccgtagtaattttgtggtggagccgagcagctactgtggttttcctgctttctcctctccctgacttactttgagctggcaagccaataataaatcttgatgatgttctctattgactgaacctgtatcagctagtttttgttaagctatttcgtcgctggtcatgcgacttgccctctagaaaaaaaa

SEQ ID NO: 2107 - DNA, 480 bp, Avena sativa
tgcacgacgtagcgcggctgcggcggcggaggcgggtaccagtgctgtgggtacaccagcggcacgacctgcttcttgtccgcgctggcgccgtccttcttgtcccctcccccggcgccgggcttcttgtcgtccttcttctcctccttggcgggtccgacggagacgatctgcgcggtggggaagagcttgctgcgcagcttggcggtgatcttgacagggtcgacggtgccgatgaccgtcatcttctggtccttcatgtccacagagatctggtcgatcccatggagacctgatacgagcttgagcgccttctgcttgtgcttgtcgtcgtgcaggtccagcttcagcaccaccttctgcatccttgaacggcggcgaatttgctccgggcggggcggggcggggcgggggaattggaggttgcgatctaagcaacgatgggtgctctgtatctggcggtgagttgggttggacgcg

SEQ ID NO: 2108 - DNA, 946 bp, Avena sativa
tggcgggagacctgtcattacggagattgatgacgaggaagaggaggacggcgagcaggcgacccgccacgaggcctatgttcaggagccagacgatggaaatgatgggatgcgagggggccaggttcagctacggagagatcccaacagggccaacggcggcggtgggcagccacagtcgcgcacgttcagctaccagagctcctctgtgacttatggtggtattaacggagcctactacactgcttccaagacccggaggagcggcagcgacggaattactgtcgaagaaagcagagaagcagacacaacaactaaagaggccactcataggatctccagaggaattcatgacaaggggcactcactaacaaagaagctgaaagcagacgggaaggtggacagtacacagatactgcacaatctcaatgaagatgagctgcctgtgtttgaggaatcctggagggggaatgctggacagcacttaccaggctggaaccaaaatgctggtatatctaatggtgctaactctggtaactcgggtgccaacggtaggcagcccgcacagagctgggtgccgcccagaacgcagcaactccaggacccgaggaggcgggacaacggcaggccgaaatcatcgcggatcatcccgatctcctgaaaggagatctgaggaggcgtggcagggcgtgtcgaaatcttagattcatcctcccacccaaatgtcccgaagagagaaagaatgcgctgtatccatggagttatagatgaataaagcaccgctagcaggtgcaaagcagttcagagtagggatgtatgtactaaaagtgaaggtgatgggaggcctggaggtccgatcgtgaataccttgtcgagtctatgtagcattaccgtctggtctgtataactgtattcgatctactgtctgtagtagtatattgctttg

SEQ ID NO: 2109 - DNA, 1000 bp, Avena sativa
ggaattaatacccaccatattactatgacaagcaaaatggtacaagaatacagtggactccacgtacaacctcataaagctattgttggtgccaatgcctttgttcatgaaagtggaattcaccaggatgggattcttaaatacaatggaacatatcaatttatatcaccagatgacattggtttaatacgtgtcaacgacactggtattgtccttgggaagctcagtggaaggaatggtgttagatctatactactggagcttggatatcagatcaatgacaatgaatttgaggatttttttaaacgttacaaagaagttgcagagaacaaaaagcgtataactgtcgaagacatcaaagcactgctatctgatgaaatattaaagcccaaggttatctggtctcttgttgatgtacaggcaacatgtggtacattaggtttatctacagctactataaaactaataactgtagatggagaggagaagataggatgttcggttggaacatgtccagttgatgccgcttataaggctattgacaagatagtacagattcaaactgtacttcaagaatatactatgaccgttgaaggtgttgatgcaaatgcaacaactcgagtggtcatcaccggagatgtcagcaacaatgaatacgctttgacggatcaacgcgataacaaacgtttcttttgtgggagtggcgtcgcgaaggacgttcttttgtccagtgtacgagcttacatgagtgctctaaacaagatgtccaattttgttgatatccaaagacccagcagcgaagcacctggaagtatgagcgttcaaaagacagaagaatgaagtttggcgctcctcgcgtccgcggcctgtgtgaaatggcctgctaggaagtgttgaaccgaagcaaaagaccttgagtctttatttgattgaatttgaattgtaaattcaaaagacaagtgcacttgccacatatatatatatatatatatatatatat

SEQ ID NO: 2110 - DNA, 803 bp, Avena sativa
tataatgtgcctctgattaattcgcttgttctctacattggcatccaagcggtgcaacaactgcaactgaacaaagcgaatgcatctgcatcagcccagcagatcaaccatggtcaaatggatatttttcagattgaaacagccactgattttttcagaaaccttgtgacaaacttggatacagagggtcgctaccttcttctgaacgcaatcgctaaccaattgcgattccccaataaccacacacactacttctccttcatcattctgtatctatttgcggaaactaccctggatagtgtccaggagcagataacaagggtccttttagaacgcctgatagtgaaccgcccccatccttggggattgctcattactttcattgagctgataaagaaccctcgctacaacttttggaaccgatccttcacgcatatcgctcccgagatcaggttgctgttcgagtctgtcgcgaagtcgtgcgctggaaaagcttcggatgatggccctgatggcagccactaatgtagtttgatgtaaactgttgcctgacaccgtcagaagttcttagcctttttccgttgatatgcagttttttttgtaaacgcctgtcagcgagcctgcactcgtcgttgtatatagtagtaactggatattgtgtttaatgtagcaaacccagtgttaacttttgtggtttcacaatgtagtcttctggttaatttgcagtgaatagtgtacatatattattttggcgtaccttactttttgcagatatatcatttgtccctgtcctagaaaaaaaa

SEQ ID NO: 2111 - DNA, 722 bp, Avena sativa
tatcgctagttgctaagatgctccacaatcagaagatcttatggaagaatccatcgagattgtccttgaaaagctggtgttgatgaccaaagatattatggcaaagatttcaaatgaagctaatcagtgcgtaaatgtcgtgttggcaaaatatgatccttttagatgccttgctgttatcgtgcccttgctagttagtgatgatgagaagacacttgtcatgtgtatcaactgcttgacaaagctggttgggcggctttcacaggaggaattggtggctcaactgccttcatttttaccagcactttttgatgctttcagcaaccagagtccagatattcgcaagactgtcgtattctgcttggtggatatctacatcatgctagggaaagcattcgtaccatatctggaggggcttagtagcacacagctgcggctagtaacaatctacgcaaatcggatatcgcaggcaaggtctggcacaccgatcgatgctaaccaatgaatagcattgcttttgtgtagcacatggacatttgcttggatgggccaggatatcaggtttcattcatttgtgtatttgtatagaacagacaggtggttctcatgtattcaattgcaattgcttccttttcttgtgtgacattgttctttctcctgtttatttccctgtcatgtgacattatgccatttacgctgtacaaagaaaaaccttcacagtg

SEQ ID NO: 2112 - DNA, 840 bp, Avena sativa
gaacgagccaacgggcacgtccagatccttcaaaaagcgtgcagatcccgcttctgctcggcagcacgctctacttcgtcggcggcatcgtcaatcggcatgacatccacagccatcccttccctaccttcaccctgctggggactggctgggcttggttcgccctgttcggaagcctactgttcttggccgcagggctcctgaacctcctcaaggtgttcaagatgcagcagatggacggccgggggctggagaagctgcggggcggcgcgcaggagcggctgagcagggagagggagggcaaggtgcctctcatcctggaggagggccggaggaggaagcgtggagatgagacgtggccggaggcggctcggaatgagccgagggctgcgcccgtcccgccgccgccagaggggtcttacaaggacgctctcgtgagcggcggcaactagcggtttcgctgtgctgcgcggtagcgataagaggttgcccacctcaatgtgcaatggcatagctgctggtgaaacttttgtttctgtttttaagaatgagggaccggagaaacattggcacctactccctccgtttcaaaataaatataagatggtttaaatttgtgaaaaaaaatgaatctagacttcttttggtatgtagattcatcccaaaattgatgaatctacatactaaaacaaatctagattcattttttcacaaacctaaaacatcttatattttgaaatggatggagtatgttcgtgcttctttgtcatgtaaattatctgaacctagcttattgtcagtgctttcttaattgtaatcgattacatagctgaataatgt

SEQ ID NO: 2113 - DNA, 976 bp, Avena sativa
catccatgaccaggaaactggagatcagtactgtccacttgatcatcttgtcatgaaccaaaacgaggaactatttactgtaagcaacagttccctgtcagaatttgccgttctgggctttgagttgggctattcaatggagaacccgaactcactggttctatgggaagcacagtttggtgatttttcaaatggagctcaagtgatatttgatcagttcattagtagcggggaggcaaaatggctccgccagactgggcttgttgtttgccttcctcatggatatgacggtcaggggcctgaacattctagtgcaagaatggagcgcttccttcagatgagtgatgataacccttatgttatacctgaaatggacccaacaatgaggaatcaaatccagcagtgcaactggcaggttgtgaatgtcacaactcctgcaaactatttccatgttctgcgtcggcagatacaccgcgatttcagaaagcctttaattgggatccgaagaacctccttcgtcacaaggactgcaaatccagtctatctgaatttgatgaccttgccggccaccctggatttgataagcaagggacgcgcttcaagcgtctaataaaggaccggaatgaccataaggatctcgaggaaggaatcagacgtctagttctttgttctggaaaggtgtactatgaattggatgaagaaagaaagaaatcggatcacaatgatgttgctatatgtagagtcgaacagctctgcccattcccatatgacctcattcagcgcgagttgaagagatatccaaatgctgagattgtttggtgccaagaagaaccgatgaacatgggggcgtacacctacatcaatcctcgcctgctgactgcgatgagggcgcttggtcgtggctccatagaggacatcaagtacgtcggaagggccccgtctgcagccacagctacaggtttctataccgtccatg

SEQ ID NO: 2114 - DNA, 433 bp, Avena sativa
gtccagatgatcatgtttgtttttcctttttcatttaaagtgagccctcaactgttactctcgacagaacgatacaaaatctggtccagaatgcactgcaatgaagcatcaggattcagggagttttattctggtcatacatctcagtgaccaaacagtacaggaggtcgatacaaaatggccacctgaaacattttatccacgaaaagaatgcatcgacatctcgtataccctcttcaccttcaccgccaccggcagacagacgctaaccgtaaaaattgtggtccgcttcgtcggtgtcagccagtcccagaatcaaaatcacagctacctacagatgaattacatacacagcaccgtgggcaaatctagtatacactattaaacaggaaagcttctagcttccgtagggtgttccgctcgagctagaaag

SEQ ID NO: 2115 - DNA, 640 bp, Avena sativa
ggcactggaacactaggcaagaatacggctcctggcgccggaacaccagccaggaatacggctctgggcactggaacactagcaaagaacgcagctcctggcgcaggagcaccagccaggcttgcggctccaggcactggaacactagcaaagaacacagctcccagcgcaggagcaccagccaggaatgtggctccaggcaccggaacactagctaagaatgcggctcctggcaccggagcaccagccaggaatgctgctccaggcgctggaacactagctaagaatacggcggctgccacgacaggaccagcagctaaggatgtggctcccggcactggaccaccagccaatcgccaacataacccaatggtgaataatggggctagcaaagggaatccaccagccagcaagtagccaggctaacatggtaaatgttgtaataatgctcctaggaaccgtgcgcatcggttaaatgtgaatagggtctcatacccataggcatcattgttgttttttctctccctctctttcatttgctcccttcttttctgaaccaagtaccggaggaacacattagattggattgcccttttctttgcagtaccaccaggaaattagcacaattcagctttcagca

SEQ ID NO: 2116 - DNA, 461 bp, Avena sativa
ctatgttgattaacagacatttcaactggcacatatggcaacaatcatgcctacataaatgatgccagtcacacaagcatccatatattatttatgagtaatacactagctttcattaggacaacataaccaactgatatgacgtttaccctgcaagggttcaacaaaggcaacattgcttattttccccatggtgatactactactagtagtaaagttggaagcaaacatcattacttcatgacaaaaagcaatgcactaaaactgggcagcatggtgaaggagaaaagtcgcccaggctagcttattgcacactgctagatggtcaagaagggtggaacaggaacatatgctcagacgcgcatcctcttcacgtcgccgtgcggcgcagcgtcggttccatttcctgatctacaaacattctcgtcggggacgatcgcgtatcgtgccgatggtttcgc

SEQ ID NO: 2117 - DNA, 742 bp, Avena sativa
attttcgcaaactggctttgttaaaatgataccagtacttattattattattattatttcccggagtgtcgcaaaggaatcagcgggcgcgaaaaaatttactagctgaaacaaacatcagctcaacgggcacggtgatacgtcgccttattctatttatttactagcaatcatgatcccccctcaggctcgatgacacttcccgcggaggcatttttccccctacgctttgccattggagaccttccctccgcttccgccggcgttcttgccgggaaacgacctcccgctactcgtgacgagtcccttgatggctgcttggatctctttgtcctccagcatggactccagcggcacatgtaggcggaatctccagtaatgcctcgggttcgtggggtcattgattgtttcctccactgctggtcttgcggtgtacttgtctttcagcgcgagcaggtcctgtagcgggaagattgcccacattgacggggcatcgaaatgctgcttaactacgaagtgcactacttctggggtgcagcgagatgggggcgcgtcgtcactaccaattactgtcttgtagaagcgacttcgtctctcttcattttcttcccaccaagcacgtaatgtggagcaatcatgacatgacggagcacaaaccgtcatatagttatactgagatgggataccaaattcacagtttggttcacttggcattctctggatacgcagccccatcaaccac

SEQ ID NO: 2118 - DNA, 264 bp, Avena sativa
ttttcatcctgattccgtgctatcatgcacaattcatattattttactatgcccaggacataaggacgagaaattacataatgcaatagctgtaatagaccaaccagccaactggaataactgaatggccattttccaataacgcaacacatactattcttcctaatataacattacttcttaacatatgtggggtgcagtcttaactctgaaatttgacacataatgaacaaatacaagtgtgtttcccgttttgctatcctg

SEQ ID NO: 2119 - DNA, 270 bp, Avena sativa
  modified_base (239)..(239): a, c, t, g, unknown or other
ttcaaaatggctcacatcaatcgaattacattaggttcacattaatacaattcgtccacgacaattgcggaggttcaaattttaactaaaagtattacagtgacatatattaaagatcaataaagacgtactcctatatccggaaagaataccaagacatgagacattacaatagtttctaccaaacaaaccctaatatttcagcaagcacacaagagaacaaaagaaagttttttggngaccagaacattggcaggtttgccaaccaga

SEQ ID NO: 2120 - DNA, 744 bp, Avena sativa
cccgggatgcttcatcacgagtcaagcaggcagcagagcacaacaatccaactccaaggggagcaaaagtaactagtagaatcaatggcggcgaaaaaccccaaggtcttcttcgacatcctgatcggccaggcccaaggcgggccgcatcacgatggagctcttcgccgacaaggtgccacgtacggccgacaacttccgtctcctatgcacgggctccaagggcttgtcctccatctccggcaagccgctccactacaaggggtccccgttccaccgcatcatcccgggcttcatgtgccagggcggcgacttcacccgcggcaacggtaccgggggcgagtccgtctacggcgccaagttcgccgacgagaacttcgatctgcgtcacacgggccccggggtgctctctatggccaacgccgggccaggcaccaacgggtcgcagtttttcatctgtaccgccaagactccatggctcgatgggaagcatgtggtgtttgggaaggtggtggaggggtacggtgtggtggagaagatggagaaggtggggagcagcagcggaaccacggccgagcgggtcgtcatcgaggactgcggcgagatcaccgatgacaaacactgctgagtgctgatttgtagtttttttcctgctatttagtttaggtaaaaaccctgaataaattcatttgcaaggtgtatgattccctactactactatgaggtagtactactgtaacttaa

SEQ ID NO: 2121 - DNA, 729 bp, Avena sativa
ccgccccctgccttggcgcacttggagctcgtcctacccacgacctgcccagcatgatcatcccgaagaagaaccgcaatgagatctgcaagtacctcttccaagagggggtgctctatgcaaagaaggactataacctcgcgaagcacccgcagattgacgtgccgagcctgcaggtgatcaagctcatgcagagcttcaagtccaaggaatacgtcagggagaccttctcatggcagcactactactggtacctcaccaatgaaggcattgagcacctgcgcagcttcctcaacctgccatctgagatcgtgcctaacacactcaagaagtcggccaagcctcctggccgcccattcggatctggccctcctggtgaccgcccaaggggacctcctcgctttgaaggtgataggccaaggtttggtgacagggatggctaccgtggtggccctcgtggtgcgcctggtgacttcgctggtgaaaaaggtggagctcctgcagagttccagccatcattcaggagctctggtgggggctttggccgtggtggcggtgcaggtggctttggccgtggtggcggcggcttcggcgggggcccaacttcatcctcaatggagtgaacttcccctagtttggatgtgacgtttcccttctcatgaggcgtttaatttgcatgatggttatgtagtagtgatttttgcaagatcgatctgtgttgctacacct

SEQ ID NO: 2122 - DNA, 790 bp, Avena sativa
agttcgacaagactcaagatcctctctctactcgatcagatcgtcatcgtcatctggcagtggttgtgcagctgcggcggcaagctcagcctcgtgctgttgctgcatagccaagtcaaaggtcacttccggaggcttgagagccacggcctcaacaaagtgaatgttggcatcgccagccaacttccttgcaaggtaaaggaagggcttctcaaagttgtagttgctcttagcagagatttcatagtactgcaggttcttcttcctgtggaatgtaacttgcttggccttaacctgcctgttcttcacatcaaccttgttaccgcagagaacaatggggatgttctcacacaccctgcacaagtctctgtgccacgtaggaacattcttgtaagtcagccttgaagtgacatcaaacataatgatcgcacactgaccatggatatagtatccatccctaagaccaccaaacttctcttgcccagcagtgtcccagcagtagaaacgaatctttccacagttggtggtgaaatccaatgggtgaacttcaacaccaatggttggttcgtatttcttctcaaactctccagtgagatgcctcttcacaaatgtggttttaccagtcccgccatcgccgacgatgacgagcttgaagctggggtactcgacggtcccctggttcgggagggccatcggagcgaacggaggcggcgacgaggggtgcgtgcaggaggagcgggttggggggcggtgcggcggagcagcaaaaccctagtattcgaattggaat

SEQ ID NO: 2123 - DNA, 677 bp, Avena sativa
ccaaccgaggctgaccgtttctccttttctctctgtgtgcccagtccggctgctgcaagccccccaccagctgcggcttcaccttcgtcaacagcacgcagtggaccggcacccctaacaacacgtcggacccggactgcggcgcctggggcaacgacgcttccacgctctgctacggctgcaactcgtgcaaggccggcgttgtggccacgctgaagacggactggaagcgcatcgccatcgtcaacatcgtcttcctcgtcttcatcgtcatcgtctactccgtcggctgctgcgccttcaggaacaaccgcagggaccaccgcaacggcggctacaagcagggtgcatacgcttgatctgcccgccggagccatccactcggtcgatctggccggtgaccggctgtcatggtcacttgtgctgctttctttgatgtgatcatattgtcattgtcatctactagtagtagtagtagtatatcactaggttggcctgatctagctttgtacagtcgagattattctgtgctctggtcatctactagctggctatttacttcagtatttactgtatgatgatcagtaggaggttgtatattctgttctttgatatggcagaccattatatatctatgtacgtactacctggcgttatttatttcatatatttactct

SEQ ID NO: 2124 - DNA, 695 bp, Avena sativa
cataacagcaagcaagttgatttgaaaaccagttcatgcctactggttcaccaaacatatttgagccgacagtacaacctgcagggctgccctgaagtagcaaaaacaagaaccaagaggcaacgacatacaaccaaggaaaacccctaaaaaaaaatacaaccaaggaaaaataatacagaaatgagacaattttgtatggtccgacaaagatacgagtctcaaattctcggtgtatggattatatcatcacaaagccttggacaccgaaaacacagcaaagctaacactgtcaatgtttttacagaatttattcttccatatctggacatgtataaactacaaatgtccaccggatgcgtccgagacgaggtcaccttcagacatcggaaagtcacttcttgccatcggcaccggacttggccttctcggcctcggccttctccttctcctgctgcttcttgagtttctccatcctctccctctccatcttctggatgtagacgctctccttggcgcgctcctcctcgctgagcatgcggcccttcccgtcgctcaggaggcgccgggcgccgctcgcgaccgccgccggtgaccggaggcgtgcggggagggaagtcagcgcgcatctcatcgccattttggccgcactctctctaggtctctcgcgaatctgtcggggttggggccttggg

SEQ ID NO: 2125 - DNA, 774 bp, Avena sativa
aatgcttttattttgtcctggccggccgtcgtgccgagtttcctgctcccagtactgtactccactactctttttatacgaatggtatcctagtatcctacttttactaatcatctgaaatctgaacaccaagaattcctcaagcaaccgtgtttcgctctaacgacacacggttcgagttgtacactacttcgtgaacttgataaaacatcttggaggataacaatctgtatgcgcctctaataaagatcactgctgccttagcaagttgacaagcttgagcaggctctgatgtgaagaccctccctctgcaatgctcgcgcacgccttgtccttccacatggccgccctcgccttgatctcctcgtcgcccagcagctgctcgaccttcttcttcacctcttccttggtgacgacccctcgctcgtccgcgcagagcttgacgccggtgccccacacgttgcagacgtagctttggttgcagaactggtccgcgaagtagggccagcacaggaacggcacgccgtgcagcaggccctccatggtggagttccacccgcagtgcgacacgaagcaggcgacggaagggtgcgtgagcacgcgctgctgcggcgcccagcccacgacaagccccctcccctcgacgcggctcttgaacgcgtcgaaccaatctcgtccgaccccgacgccggtggtgaatttcgggcggaccacccacaggaacggtcgtcctgagagggcgagcccgtcggcgagctcctggaactgcgtcgc

SEQ ID NO: 2126 - DNA, 789 bp, Avena sativa
agaatatgacgttccatgttgcatccactgccttgtcaacaataggaacgtcatattgttgacaaggcagtggatgcaacatggaagagagaacttcctaagaaggcacccttcccatccacagattcttctctgaaaagcaccactaaggcatccaacgggggatgtccttggatcagattcttccagctctgatggcgtttgtggttgccattgtaacgctgcttcgttcagttaaagatatcgccacaaagagattatctgataaaaatgagtcagaagaacaaagctctgaattatatcatgactccttttcaaaaccggagttccgccccccatccccaagccctggttttgctgaatctgacctgtttccgttagtcttgcaaagactggcagagcttgaagagaaggttcagacgcttcaagaaaaaccttctgaaatgccttgcgagaaagaagagttgcttaatgcagccgtccgccgcgtggatgctctggaagctgaactcatcgtaacaaagaaggctttacacgaggctctaatcaggcaggaggaactacttgcatacgttgacaggaagacaattgccaaggctcagaaaaagaagaagaccatgtcttgctactaggaccaggaggcagaccaccccctgttgagttttctcctttccgagttgccggagaggcagagatggcgtttgagatgatgtaaacgagtgttctgttcgttttcctgacaaatgcgagatgactgagacatcggttgtaaatcaacataacatcctg

SEQ ID NO: 2127 - DNA, 686 bp, Avena sativa
ttttgttgacaaaagctcttactgcggttaccctcagaagacaatccgtggcagaaaggcaaggaactagcaaatacatttctttacaagaaaaagaagattcaactggcaggttgatcactggttgccgtaaccctaatatctttggcaggtgtaacttctacagttggtggcaagttatttgcagcaggaccctttgtttgtggtttttcaccagtcgttaagtcactcacagaaggacttgctgcacgcagttcttcaacagtaggtaagttcctcacaacaggactactaacacctgactctgcaaggctattgctgggttgggcactgttgccataggaacgatcagtaggagtctccttgccagaattaggcaccatgtcactttcctcctgttgccgtgatccattgagagcattacagtgaggacagtaatatgtaatgaatgtgaagtcctctttccttgcaagaccattatgcatatggcagttgccacatattagcgcaaagcactgtgttggatcttcccctacaagtagagcagccacccgtgcaagccaacccccatcatttccagcatggcctctgaagtgctcgacagtcctccgatctgaagtagtggggctttcattaccatcatgtatacttgagccgtctgatgggtcagaggcatgtatcggtcc

SEQ ID NO: 2128 - DNA, 727 bp, Avena sativa
gtcgccgccgaggacgcctacccctacagggcccgccaggggtcctcctgcaacaagaagccggcggccgtggtcaccatcgacgggtacgaggacgtccccgccaacgacgaggcggcgctcaagaaggccgtggcggcgcagcccgtggccgtggccatcgaggccagcgggtcgcacttccagttctactcggagggggtgttcgccggaaagtgcgggacggagctggaccacggcgtggccgcggtcgggtacggtgccaccgccgacggcaccaagtactggatcgtcaaaaactcgtggggcccggagtgggggggagaagggggtacatccgcatgaagcgcgacgtggaggacaaggaggggctctgcggcatcgccatggaggcgtcctacccgctcaagacctcgcccaacccaatgcacgccggggacctccatgacgagctctgaatgtctggtttactatctatttaatggcggaagccctgaatctgcatgatcaggggattatcgtcgcaaggagaaaaataaacaatcactcgatatttgtactagtttatcacaacacatcacatacagtgcagtatgcacttgcaatacttgtaatgcattttttttccatagacaggaggtcacaatactatgcatgttttgcatagacagtaggtcataacattatgcactatctttaaattgctatgaaaaaaaacatacactcg

SEQ ID NO: 2129 - DNA, 853 bp, Avena sativa
atctgccgatgcaagttcttccgagaacacatcaaagggcctctggctatcctttaccattgtggcggtaagaaatacagcctttgagatctttttcagcgcaatgttctaaggcatatgaaacacttgcacctccacagctatgaccgaccaaaactaccttctcattctcagggagttcactgaggtaatcaattagtggcttggagtactcttccagtgtagctatgctatttgcatcagtgtggtctatgccagagcctgcgaggtctaaggcaacaggatcgagaccagcttcctccaagagagagatggtcttgtaccaacaccaagcgccaaatccttccccatggacaagaacaattttcttggtttctaagttctctaaaacaacttggacagccttggcattggtgacggagtccggtaggctgccgtggcggcgggagctggtgttgcccgggccgattcggcgggacatggaggcgccaccggcgtcgatgcggcgcgacatggagccgccggcgtcgaggtgctggtggatggccatggcgagcgcctggcggtgcaggagctcctcctccgccggcgtgagcttggccgccccgccgcgcggcgcccgcgcgctccccatccgcttgctgcgcgacgccaagggcgcgccccggggctgcttgcgctgtatgcagccgaacgcgttgcccatcgcagaagaatcgcgagagcaaagacgcgctatttggcttcgtggagaaagaaaagtgggtctcttttgtaggctctctcgagaacgaacaaatcggcagagcaggtaactcacaatctgagagtggactcgcactgcaagaagtca

SEQ ID NO: 2130 - DNA, 544 bp, Avena sativa
  modified_base (44)..(44): a, c, t, g, unknown or other
gctgaaaattcaaccaaaccgcaacaatggaaataccatttccnctttccacaatttagctaagtctaccgagatccacgtcttaagaggcaattagataggcatgccatttgcaggttctttttctgaagccgatccaaatcacatgtgactgtgagctggtgtggggtgtctgttgctgttggggctgattcttggccattgcaatccaagcagcaaagccaataccaagaatcacccacccacccaaatcataccagaagtcattgtccttctctttttcctcgattgccttccatttgaggacgagggcggtccttgtgcagcttgttgagatgcgatttgccgatgaatctccatatgcagctcaggtgccttcgatgacaattccaatgacttcctgtacagctcatttgctggttccacatcaacagctttctggaaacaaccagttgctttatcaaagcattcattagcagggacagagtctgaagtgaagaatccacgggaggtcagggcattccccaagcaccagagtgatccc

SEQ ID NO: 2131 - DNA, 1000 bp, Avena sativa
  modified_base (171)..(171): a, c, t, g, unknown or other
cgtggacctcttcacgggatccttttcgtcttcggcgcaggtggactgggaggccgagtcctatccggcgtacggcgactacgtcgtgctccccatcctcgtcgccttcttccccgccttgcgcttcctccttgaccgattcgcctttgagggattagcaaggagacttanatttggaaagggatatgacaagcttgccgaaacagaagaaagaagaaagagaaatcaataaattttaaggagtcggcatggaaatttgtttattttctttcggcagaagtgctttcattatctgtaacatacaatgagccctggtttacaaataccagatacttctgggtagggcctggcgagcagctctggcctgatcaaaagatgaaactgaagcttaaggccgtatacatgtatgccgctggattttacacatattccatctttgctcttcttttctgggaaacaagacgcaaggactttggagtctcgatgtctcatcatttggcaactgttgttctggttgttatgtcatatatttgcagattatctcgtgctggctcggtcatcttagctgtccacgatgcaagtgatatattcctagagatcggaaagatggccaagtacagtagctgtgaggggctagctgttgtggcatttctgctttttgtggcttcatggatcatacttcggctaataattttccctttctggatcctaagaagcacaagctacgaagtagctgtgatcctgacccaggagaaaaggaattttacagctcggtatactattatcttttcaacagtctcctgttctcacttctagtccttcacatatattggtgggtactgatttatcggatgctagtcaaacaaatccaatccagaggacgtgttggtgatgatgttcgatctgattctgaaggtgaagatgatcatgaagattaatctgtaggttgttggatgcttaacagaagaactgtataatgtactcctacaggaacatgcat

SEQ ID NO: 2132 - DNA, 449 bp, Avena sativa
gcgctggattgggcgtcgaggggcagtgtcaaatgctgggcagacaaggcggcggcgatcgtctgcgcgggtgcagacttcgggggcgggagggggtcgctccacctccgccagatcggaatcgacctcgacattcacttcatcaacaagccggagctccatgtcagagcatttgacgacccgcccaagttcgacgccgaggggaacctcaccgacgctaagacaagggagcggctcaagaaggtgctcctctcgctccaggcattcgccctcaggcttcaacgcaaggaggagtgatctagtggagatggcattctcgttgatgtggttttggtggtatcctgttctgtattcgtgcactagagtttgtggttctgtaaaataagggcaatgctaatgctaatgtaagtgtgtgctagtaataaatcgccgcagagttgcagaaaaaa

SEQ ID NO: 2133 - DNA, 391 bp, Avena sativa
ataaagggtgaaaggttgtatgatgcagtggattgcttactttctttcatgaataaagatggcactttttcttacatatgagtgtaagagaactacatctctattagaggttctgaacccttcggagacttttctgaacattattgttgattatccatctgtcgaatgtacatcatcggtgcttcaggccctaattatgttcagagagctttacccagggtaccgcaaagaagtgatagcaaaatgtgttacaaatgcttccaagtttattgaggataaacaacgaaaggatggctcctggtttggcaattggggtatatgtttcacctacggaacattcttcggtgtaaaggattaattgcggctggaagaacttacgaaattgttcttc

SEQ ID NO: 2134 - DNA, 743 bp, Avena sativa
  modified_base (718)..(718): a, c, t, g, unknown or other
gaccagatgttccatcagccacaatgcacagagatccagcacacggaacaaccgcgggagacggtgcgaggaagaagatccgggctcacaagctggatggtgcaagagcatgatattcagcacggaaacggatgacgatgcacgaaatatcatccttggtcatcctgtcgagtgcctcagatgttaaccgcttcgctgcagtctgtggatccttgattgacttcaccagatcaacggcttcctggttcttgacgaccttccataatccatcactggcaagtatgacaaattctatatttgagtttatgggtacatgcttaaaatcaggttctgagctcaagtgcgccttcaggctctgatcaccaaacgctcttgcaacagcaagttgtccatttaccctaggaacatcaccaggaaaagtagaaacaaaaccaccttgcttttcgatcctcttccgttcatcagctgtatggggttcatgatcaacactgacctgaatagcggtacctctttcacatacaacagccctcgaatcgcctatgtttgctacccacatgtccctaccatcaactacaatagcagtaactgctgttgaaccacctggtccaagttgcttagaattttcaagaatatacttgtttgtagagctgtatgcatttttattgcttcttgagggttcgtccagaagagaggctcttttagtatgttgttgaaaagnttagctttcaaaaagctggacacag

SEQ ID NO: 2135 - DNA, 624 bp, Avena sativa
ttttttccaagcttgaattataacaagattaaagcacacatgatttttgttcatgccagttcatctctccattaaggaattaaattcatgtgtcttgcaatgtgcaacacaccagtactcacattctcatcttgcaagcaaacacacatgcatgaagctgggaaacaatgtatagagtctactgcagtatcaacagaatttggagacaatgattgtacatggagtgggcgttcatggatttctgatatgcacaggctatagagctaaataaatcaggcaaagagggctcggatgagctcagctatcagctgcccgcaggatttgcatcagcgacaggaacaggttgatgatgtcgaggtagagcgacacagcggcccagatgtactcgtcataactgtagcgcttgatgatgttgtctgtgtcgtagatgatgtagccgcagaagataagcgatgccaggccaccgtatatcatgacagagagcttgcccagtgggaaaaagatctggattagtgagaacaccatcagcaccataagggctgcaaacaggaaggggccgaggaagttgaagtcatggcctctctttgcagcccagaaagtgtaagcagtcaagctgatcaccac

SEQ ID NO: 2136 - DNA, 744 bp, Avena sativa
ggcagagcttgtgcaaatagggtagctgagatttctagaccaggagacaagcagaaacctcttgaaaaaggtgcaggggagaagactatagaatggttggacaagctgagaaatgcaaatgggtcattgccaacttccaagatccgcctcaacacgcaacgtattatgcaaaataatgctgcagttttccgtacacaggaaactcttgaagaaggttgtgagctgattagcaaagcctgggagagttatcatgacgtgaagatcagtgatcgaagcctcatatggaattcagacttgatagaaaccatagagctggaaaatctgctgataaatgcatgcataactatgtattcagcagaggctcggaaggaaagcagaggggctcatgctcgtgaagatttcacgacaagagacgatgagaattggatgaagcactcaatggggtactgggagaatgagaaagtacgattggcatacaggccagtccatatgaacacactggatgacgaaatcgagtcgttcccaccgaaagcacgtgtatattgattcatgtgtcacaacttaggttggtgattgagcaagattgttaagccacagcttggtgattgagcaaggttgttaataaatcacacagtgggcattctctagctgagagcttcacctgaattctgtcctgtattttgtgtaatccataagaatgaatgctaatgcctatctcgttccctttttggtgaccccaaaaaa

SEQ ID NO: 2137 - DNA, 832 bp, Avena sativa
tggtgctttgattggatccgccacggctatttaccatcgcagtattttcttggaagacgcagagtagcttgggttgttgcttctgtctcgtatttggttggagctcttctcacagcggcggctcctaatttccttatcatggtggttggtcgcttcttatatggcataggaattggactggctatgcacgctgctccaatgtatatcgcagagactgctccaagtcagattagaggcatgctcatttctctcaaggagttctttattgttcttgggatgcttcttggttatatagtaggtaatctctttgttgaagtgctttctggttggcgctacatgtatgccgccagtactccgatatgtgtaatcatgggtattggaatgtgctggttacctgcttcgcctaggtggcttctcttatgtgccacacaagggaacggaaatctgcgggagacaaaagaaaacgctacacgttgcttatgtcgattgaggggtcaagcctcacctgatttggtttcagagcaggttaatttgattctggatgaactgtcatatgttggtgaagagaaaaaagcaggcttcagtgagatctttcaaggaaaatgtctcaaagcaatgataattggatgtggcttggtgttctttcagcaggtcactggtcaaccaagtgtgttatattatgccgcgacaatctttcagagtgctggtttctctggagcatctgatgccacccgtgtgtcaattcttcttggcgtactaagttgattatgactggagtagctgttctcgtggttgacaacttggcagagaccattactcattggtggtgttg

SEQ ID NO: 2138 - DNA, 577 bp, Avena sativa
agtaatcaaggtgcatggtaccttgatcatctcgatgttccgtgggaagaagtctatgccgaggagccactcgcaggaataagtgacatggcgcagcaaaagctggtactgggtggagaggtttgcttgtggggcgagacagcagacacatctgatgctctacaaacaatatggccgcgagcagcagctgctgcagagcgtatgtggactccattggaggccatatctgcacaagacctggaaacgacggtcgttgctcggctacactacttcagatgcctgctgaaccaccgtggagtcgccgcagctccggtcacaaacttctacgctcggcgacctccgatcggccctggctcatgttttatccagtgaacaggtattgcaagtgtagatacacatggcgggggtttggcccctacacacctcccatactgtacgaagatggttaccgtcacttgtaccttatcacttctgtaagtccacttgcattacattatcccacatatacttgttaatccgccggtccttgtgtatttcaacttgaaattctaataaaagcggtttcaacggtcawcga

SEQ ID NO: 2139 - DNA, 865 bp, Avena sativa
ctgcaccaaagctctgtgcaaaaaaatttactggtccacaccattttctcgggggcaggtttgttccacctcctatttcgaccaaatatgggcttgaacttcctccatatcctggcacttcaatgtgtgtgagaattggaaaagcaccatcagttgacatttcatcactgagggaaaattatatttccccggaacttcttgagaatcaagtgatgtctgatccatttgaccagttccgtagatggtttgatgaagcagttactgctggcttgcgagagccaaatgccatggctttaacaactgtcaataaagcaggaaaaccttcttcaagaatggttcttcttaaaggtgttgataagcatggcttcgtttggtacacaaattatggtagccaaaaggcacatgatttgtcggaaaattcaaatgctgcgctccttttctactggaatgagatgaaccgacaggtgagagtagaagggttggttcagaaggtttcagaagaagagtctgaaaagtatttccacagccgcccacgtggaagtcagcttggtgccatagttagcaagcagagcactgtcatttctggaagggatgttcttcaacatgcgtacaaggaattggaagaaaaatattcggatggtagcttcatcccaaaacctgattactggggtggctacagattgacaccaaatctttttgagttctggcaaggccaacagtctcgtctgcatgaccggctacagtattcacagcgagaagtcggtgctagcacagcatggcagatcgagaggctagccccttgatcagtaaccctcttaaaagctctggtaataaaggaccgtctgatcgccggagatataatctt

SEQ ID NO: 2140 - DNA, 774 bp, Avena sativa
ggttaaccaatgcctacaaaatgcttgttctgcatcaaacattccatcttgtgaggtttttcgagactgcagacgcggctttaatattgggggcagactgggttaaattggcagcaatggtataatgacccaaattcaacagcttgttttaacactgatggtactagtttccagtatgggatttatcagcaagctgttatgctggctacaaaacgcagtgctattacacgttatatatattccttattttgggggtttcagcaaataagcactttagctggaaatcttgtcccaagttactttgaaggtgaagtcctcttcaccatggctattgttggtttgggactgctgctttttgcactacttattggcaacatgcaaaattttctccaagctcttggaagccggaaactagaaatgcaacttcgacggcgtgatgttgagcagtggatgagtcatagacgtctgcctgaagatttgagaaggagggttagacatgcagaaaggttcacctgggcagctactcaaggagtaaatgaagaagagctcttaagtaatttaccagaagatatccaaagggacatacggcgacacttttttagattccttaataaggttcgattgttcaccttgatggattggccaatcttggatgctatctgtgacaaattaagacaaaacttgtacatcagtggaagtgacatcctttatcaaggtggtcctgttgacaaaatggttttcatagtgagaggcaagttggaaagtatcagtgcg

SEQ ID NO: 2141 - DNA, 455 bp, Avena sativa
cttcttaatcaaatcactgattccaggagaaatcctaggtggcctcttctccaagcagtcctcaaattgggatagagatggcttgattaaagagatcctggcggatagagcctcttcaaacggaacagtccccgtcatcgcctttgctgtccactcagcaacagcctgcccagccccgcagaaatcagctagttcatcaataccctcatccaagcatacagtgctatcgacatcgaagcacactgcatcagcattgcgccatgtctccagaacatctttggatggctggcggttggctaaaccaggagaggagggggccttagagacctccattgctcctgccaccacggcacgagctttagagagtttggcacaagggaagaaatggatttgcagctcttgttgctaactgtgtagcctgtggtgatcgaactgaagatgactgagcaacacgc

SEQ ID NO: 2142 - DNA, 985 bp, Avena sativa
tatataagcagagctcgtttagtgaaccgtcagatcgcctggagacgccatccacgctgttttgacctccatagaagacaccgggaccgatccagcctccggactctagcctaggccgcgggacggataacaatttcacacaggaaacagctatgaccattaggcctatttaggtgacactatagaacaagtttcggtccggaattcccgggatccaagtcttcgcctagtcgtcttccccgacctcgcctccgccgcaagccagccatggcctccgccgccgccgcgtcggatctggagagcaaggcgaaggaggccttcgtcgacgacgacttcgagctggccgccgagctctacacccaggccatcgaggttgggccaccaaccgccgagctctacgctgaccgcgcccaggcgcacatcaagctgggaagttacactgaagctgtagctgatgccaacaaagcaattgaacttgatccttcaatgcataaggcgtaccttcggaaaggctcggcatgcatcaagctggaggaataccaaactgcaaaggctgctcttgaggtgggttcgtcctatgcatctggtgactcaaggtttactcgtctgatgaaagaatgtgatgatcgcattgctgaggaggctagccaggtgccggtaaagagtgctgctcctgctgttgctccagttgcaccttctgggccttcaactgtggctactacttctgaggacaaggaggatggtgcaagtatggagaatgcacaggcaactgtagaagtgccaagcaagcccaaatacaggcatgactactacaacagtactatggacgtggtactgacaatatttgctaagggtgttccagctgacagcgtggttgttgattttggtgaacagatgttgagtgtctcaattgaaattcctggtgaggagccataccattttcagcctcgtctgttttcaaagatcgtcccagagaagtgcaaat

SEQ ID NO: 2143 - DNA, 971 bp, Avena sativa
tagcgacctgtaattaactcaaactcggctagagattccgctctaccaaaattgtcctggtaccggaaagaatattaactggaacaaccaataacgcagatctaacactttcaaagataccttgggggtcggtactcatgtttctctctgggtgaactgaaacatttgacatctatactcttcaagagcatgacagaggacaactcagtagcttcccatcggaggcatcccgtatgctggcatcggaccaggacccataggtggcatacccattccgcccatcggaggcatgcccattccacccatcggaggtggaccgcccatcataccaggcggagcaggcaaggcgagaggaagcaattgggcgtacatgttctgctgagcaactagctccttctcttcgctctccttggccttttcttccttctgtgattcaatcctgtcctttactaaatcgtctaccttgcttgtgtactcacggatgaactgtaacagataggggaaggcaaagtcaagcatgttgttcgtccatgcaagctcaagagcaacatccgcacgaatcaagtcatagcaaatgaagaggcaggaagcaaaacattctttctttccctgttcaatgaaataaacaagcaagtcctctgagagctcacgatcaccagactgtgagcatgtttccatgcaatccttgtacatgttatctttcttcgacaaggcaatagattgcttccacctgccagccttcttgtaaatgtaggcagcaatcctcctcatctcaagcaattcatgcttctcgagcttctgggcaagaccgatctgatcaagttatcatgcatgtcaacagattcacggagcctctcgtagtcctcctcttcaacataaagctcattcaaagcctcattgacggcagagacattgttactctgaactgcaaccatgtacggtttcacaagatgcaactggccagccttgcg

SEQ ID NO: 2144 - DNA, 667 bp, Avena sativa
agaacaaccctgaagatgccgctaaagttccaaaaggcaatccttttcatagtgcaacctcaggagagatggcaatatacagggctaacagccttattttaaggaaggctggtgcacaaatatctgaccctgcaatcactactttcaacggtcaagaggtggaggtttggccacgcataacctggagcccgaggtggggcctgacattcaaggacgtcaagcaaaaggtgcacgggaactcttcagtatcccagagatcggttttggttatcaatggccagaacatcgtaatcgagggtctttccttggacggcgctcttattgtcaactccgtcgatgaagcagaggtcaaagtcaccggtcacgtagaaaacaaaggctggactatccggcctgtcgatcacaaggacacctcggagaaggaagagaccaggatccgtgggttcaagttcgagaaggtcgagcagctggaggtgaattacaccgagccagggaagcattgcttgagctcgtgaacaagcgtgaccggttgacacatggtccctgccaatttcagttttgcagctgggaatagtacaggcgtgggtaccctatcattcctcccaaattgggcggccttcattgtgtaataatagcaataagctgaaaccaattctttgaacttgct

SEQ ID NO: 2145 - DNA, 620 bp, Avena sativa
atcaattatatgctgaaaatatgcaaaaaacttgggatggctgctttagttgaggtgcatgatgaaagggaaatggaccgtgttctagggatagatggaattcagctcattggcatcaataatcgtaatcttgcgacttttgaagtcgatatctcaaacacgaaaaagcttctggagggtgaaaggggacagcttatagcccagaaggacattattgttgtaggagaatctggactgttcacgcctgaccatgtttcgttcgttcagaatgccggagtcaaagcggtcctcgttggagagtccctcatcaagcaagacgatcccgggaaggcaatcgctgggctttttggtaaagatatctcaccggtgagcagtgctgtgtcaaaataggaggaaaataagcgtggaatgctggatcgctcatattttgtacaggaaaattgagctatttgcgcttttggagattggagagtcttggtcggcgattttatgtacctgaccattgtcagtgttctttcccttgctcctgtttcccgaaagttgtaaccaggcgtctttgaacaaaggatggaatggaaataatatatgatcgaataagttgggtgtaattgtcagcgact

SEQ ID NO: 2146 - DNA, 809 bp, Avena sativa
ctaccagaagacttcccttttgagatcatcgataaccctggtgatcaatccatagttctgaaaagagagtttgcaggagagactattaaggctaccgtctatacaaactttgatgctgaagaagatttgaacaatgaagactctgacgctgaaaatgacgaggatccatataagccagcaattcagatggttgtcactgttgagaaaccagaaggctctatcctggaatttgagtgcaactttaatgatgatgaacttgtaattgaaaatatgaagatgctcaatcgtgacagtaacgataaggagaatttatacgagggaccgccattttcgattctagacgagagcttgcagaagtccttgcacaggtatcttgaagcgaggggtatcaagcactcacttcatgactggttgaatgattacatgatgggcaaggatgagaaggagtacgtggtttggttgaagaacatgagagagttcattgggaactgagtactcactgcccttcgttctgttttaacagaaagaacattactccatgtcaaacctgtcgatcataattgtgcaatgctttctggcacgcccagtctttttggctttatatgttgctggacctgctagctgtagaaaagtttcagcattttatttttgctatttgtcctgtgatccattgaggtatgaccattcagttgatgtgttctcagccgtgaggatattgctagtttgctacccattagaagtactagtaagtgacctttttcagctatggaaccagtggggggaatgatttgagatataactgcctgtgg

SEQ ID NO: 2147 - DNA, 548 bp, Avena sativa
ctgtcagtaaccaaattaaatctgttgttgagaaagagaagcggggttctgatcttctctgcactgcctgtgagatggctgttgtctggatacagaatcagcttcgacaaaacaagacggaggagcttatcttgcagtatgtgaatcagctctgtgagcgtctaccgagccccaacggagaatctgctgtcgattgccatcagatctcggagatgcctaatcttgccttcaccattgcaaacaagactttcaccttaacgccagagcagtacgtagtaaagctggagcaatcaggccagaccatctgcatcagtgggttcatggcgttcgacataccaccccctcgtggcccgctctggatactcggagacgtcttcatgggcgcctaccacaccgtcttcgactttggggagagcaggatcgggtttgccgaatccgcgtgaggtctatctttcttcgcggtcacgtcgtctcagggccggtactgtacatactccgatcaggtataacttgcaaagtcaagcagaacctgtggaaatgaatgaaga

SEQ ID NO: 2148 - DNA, 762 bp, Avena sativa
cttcgttaaagaacaactcaagaattataaggatatgtacaagaattttacaggcttcattgatacccttaactcgagtttattggttaaactggatggtaaggactctggtgctgccaagaagcaagatgtcgagaacagttcatcaaacagatcagaaaatgttctgcgggaaaatccaactgctgggactactgaacctgctggcctgatttatcccccggtagctccatttggtcatgatgacctcttccctactcctggtgcaggcttctaccctcatagaggtggaatgggtggtggtggtatgcatgttggtccagacgatctgcgcttcttcccttccaatccttctcgtgccccatttcgtggtcctgggagtgttccacccggtggtcgttacgatccaattggcccgcctgacgttccaggattcgaaccatctcgttttgtgaggcgtccaaggcctcctggcagaggcgcccatctagaccttgagttcttccagcaagacccgtttttctgagagactaatgtttagaggcttgtcgcgttgacgcccatctttctgaataatcctgctttgtctatcgttagggtgcccttgctgaaagtgaaacgaactgttatctggcaaatagtgccaacagactgtgcctgtaaacatggatgcgaacttgtgtaatcacctctagttccaaccatggctttgtcacggtagactgtgcaattgtatatagagctgtcttacgttaaggtaaa

SEQ ID NO: 2149 - DNA, 530 bp, Avena sativa
cgttggtaatgtgtaatcatcagaacggaattttggggagtcaagagcccattcactgcatgagctacatcttcaagcgcatcaacatccaatccagaatcgatctcatcgaggagggctaaatcagcaccaacgacagaaagttgcagtatctcattgcgctttctttctcctccactaaatccttcgtttacattacgatcaaggatctttggttccatctttaaggcctcgaccttttgtgatacaactgaataaaactcaagaggccccaaagctgggagaccatccttctctctgcgagcatttaatgccatgagcagaaaatcataattgctcactccaggaatttcaataggcgcttgaaagctcataaagagacctgcaagagatctttcctctggctccatgtcaatcaagttctcacccttgaacagaatggtaccaccagttacctcgtagtgtggatggccaacaaggacctttgtgagggtgctcttgccggaaccgttcttccccatgatcgcatg

SEQ ID NO: 2150 - DNA, 960 bp, Avena sativa
taggactgagccatttcaggctgcttaagaggctgggctgtggcgacattggcagcgtctatttgtcggagcttagtggcacgaaatgctacttcgcgatgaagattatggacaaggcgtctctagctggccgcagaagcttctcagagcccagactgaaagggagatactgcagtgcttggaccatccttttcttccgactctgtacacccactttgagacggataagttctcatgcttggtgatggagttttgccctggaggagacctccataccctaaggcagaagcagcctggcaagtttttttcctgaacaagctgccaagttttatgtagcggaggtgcttcttgctctagaatacctacacatgcttggtatcatatatcgggacctcaagccagagaatgttctggtgagagaagatggccacatcatgctgtcggattttgatttgtccctccgttgtgatgtgagccctacccttcttaaatcgtctaaccctggtgtagatcctaaccaaaagggcaatcaagcttattgtgtacagcccgtctgcattgagccagcctgtatccagcccgcttgtgttacgacaaccacatgtttcacacctcgttttttctcatccaagtccaagagggagaagaaggaaaagaaggcaaaggcagacattgcaagtcaggtcagaccactccctgagcttgttgcagagcccacagatgcaaggtctatgtcatttgtcggcacccatgagtacttggcacctgagattataaagggcgaggggcatgggagcgctgtggactggtggacttttggcatattcttgtatgaacttcttttcggcaagactccattcaaaggttcggggaacagggcaacactgttcaatgttgtcggacagcccctcaggttcccagaatcacctgtcgtgggttttgctgcgagggatcttatac

SEQ ID NO: 2151 - DNA, 879 bp, Avena sativa
tagacataaaagtcattttgcatggtacagtgatcctcaaaaccagttctcgatgatgacaaaagagagataaactctagacacatctgggttccaataaagtgctgatcaacatagaattacaaaagatacaaaatcaacaattcaaaaaaaaaagtgatcaacttaaaaatcatcgtcgtcctcctcagccatgtgttttgccagctcttcctcctgctggagtctttctcggcgcttctcagcactctccttttccttgtgagaattcgggggaaaccgcattgccttgaccgcttcattatgcatgttgaggcagaatgcaatcctggagttgaatgcagcctggggttcattcgttgagtagacatcgccagtttctttcgacaccatccagccatttgaatggtctatggtggcatcaattgcaccatctcttatggccttggagacgatgcactctgcatcggcaacaggattgacagaatctagccttagcttcttggcaatatcagcaagggagatacgcgagtatgaaatgctgatgttccttagtccagttcgaatcacattgtggcgcagcctcacaatcaaattgtgagtcctgtctgcactgaaagtgcttgcaaatttggctgcaacagctctaaacaattccaaatccccaatcctgacagcgtttgtaagctcaaaatatggtgtcaacgcttccttcattcctttctgcatgaaaacggttctctcagggatctccccaagaagcagccttactatgatagcccatttattgcactgaatacgaaagccacgagctgccagcggtgccttccgagcagcttgcaggaggctttctttagcatcrgtgtactccagctgaat

SEQ ID NO: 2152 - DNA, 602 bp, Avena sativa
agagatagtaagtaggatccgtcggccagctctgtccactaaccaggttgtaactccagtggcaagaacctgaatagcaccaagtgcaaatgtggccaagtcactgtttgtaatacctgcagctttgaagatgctacttgcgtaaaacagtacagcgttgattccacttagctgttgtagtacaagcaggccaatacctagtatcaagggcatgcggaatttcttttggtttaactcttggaaacggattgtagtccttttgtttgctgatgttactgctctcttgatatcattcacttctgaggtgatatcagtctcaaatcccctcaatacttgtagagaggtttcgaaatcatccattttgttcatctttgccagccatcttggagattctggaatgaagatagtccaggtatcaacactgtgcatggcaaggttcctatgactgcagcatcctccaaggaacaaacatgccgagcaagtaggccaacatgataccaattgttacagacaactggttcacagagccgagagcgcctctcatgttctgaggagaaatctctgctatgtacactggcaccgtgtaggatatgacaccaaca

SEQ ID NO: 2153 - DNA, 674 bp, Avena sativa
ttgctcatatggtaggggcacaagtgctttcacaatctggaacattgaacttagatatacaggaagatccacccagtggcacagactctcactcgtcaatgctggatcaagaggatgaagaaacaaatgaacatatgaatagcactgatggttggaaaaatactggagttctgaacactactgaagatggtcatggaaaaggaaatatgactgttggtaaattgatggaaagttatgagagttgcattggcaaactgcggaagtcccaaactagccgtcgcagaatatcccttaaaaaggttcaggaggcaaattttacaaaggcggcacggcgtcaggtgcctgaggcaattctgaagcaaattatctcattgaacagccttgacatggaactctatgatcatgctaagaacatctttacacaagaacatcttatgctaaagggccagcatcccgtggtggggcaacataaagagttggctgatcaaaaggttacacaagaacatcttatgctaaaagaccagcgtccgatggttgtgcaatacaagcagttggcagatcaaaagggctggatggatacagtctgcgagtcatggagctgctctacctgggaaggttgccgcacttggtcttggtattgtagtcactgcttatttttgtgtatttgctagtaa

SEQ ID NO: 2154 - DNA, 396 bp, Avena sativa
ggggctccagagctcgaaatcttgagagatggaattgtgatgtttgtcaaacagtatgtgatggctaaggacacagagaaggactgggctgggaagttcaagattgcaaagaaggcgcttgataattctgctggtgttttgatgtaatctgtccggcattttaaaggtggcttagctgtctgccactttctcggttatgtgacgcacagctctcagttttgtttcatattctatggaaatgaaggcgaattattttgtaagttgcatccacactattagaatgatctcttaaggtcggtgcaacctgtaaggtgactgtaatttaatgatgatgattatacaaactttttgagatgcaatttcctagcaagtatattcgctgccatgcatccctga

SEQ ID NO: 2155 - DNA, 981 bp, Avena sativa
tcaagagagaattgctccaaactacgagcaaccacctgttccagatccttgacacaatcctccagcattaatttctcttgaattgctccatccagatcagctttcagttccttgattgtagtttgtagctccatggtttcagctctcgaatcctccaactccctttgaacttgctcaaactcgataacacgttcctcaagcactctcttctcacttgaatagttttctaatcttgcttgtagatccttgattactttttgtagcttcacaatctcagccgatgaatcatctaggctgtgagatgtttgttcaaactccataacctggtcctcgagctgagatttctcttgcaacacattcgctaagtctcgttcaaagctctgggctgcctcttggagcttgctgatttcagtctcaagagtagatttgtcatgggaatacctctcagatacttgctcaagctcctgcttgcacttctcaagttcaaggtcacgatatgaaagttggtcctcataatgcttagctgctgatgccatctctccttctaattcactgatcttgttcttgctttccagagctgcagcttcaaaatcctcccttgcactgctgacttctttgatactctccaaagcatggaccttttcttgaagatccttctgcaggctgtctatttctgattgcgaaaccagcaacttctcctcaaggttttcacattggcaacgtgcatttttttcctcaagtgcctcaagcttttcatttgcttccttaagctcatcttctagctcattaattcgttcggtcagtgcataagaaatcccattgccatttgtgtgtttctcttcatcagcctcggaatcagattcagaagaagaagatgatgatgatccatcactcccctttttattccttccgttttgtaggttcttttttcgtatgctagactggggagatagggagcttgattgtgcctcagagtcggat

SEQ ID NO: 2156 - DNA, 611 bp, Avena sativa
cttagtaccctcctatatcagtgaagttcgttggatagacgatggtttccgaggccttctcccatttcccttcaatgaaactctgggaggcaccactgctgctccatattatttcaatgacaagaacaaggcctctgacaagcaatatttgaaagacattggagcatgcaacttactgatggagcttgatctgaggcgagcttatccctctcgtgggaatgacctgtcaacatgggagacattggcagcgctaccatttctagacagagagctttctcctgcactgtaccggtcgttcttcataccataccaatggcagcacaagaatatttttggtctgtacaagttgctaaggaggcagcctactgacccagagcaactcaaatccgattaatcaggaggacattcatgtggcgtttgctgttgttagccaaatcgtaggattggccaggatagaactgattagcaaatctagtttcctagattttctctgtgatgggaatgtgttctcccagctaaatatgttctgtgtaggctgtactgtgtaaacttgtccttccgagcatacggcgttgttgtctgactgattctttctgttcccgtgactgatg

SEQ ID NO: 2157 - DNA, 913 bp, Avena sativa
  modified_base (881)..(881): a, c, t, g, unknown or other
  modified_base (885)..(885): a, c, t, g, unknown or other
ccagatgtgcctggtggtgaagaacgaggggtgggagcgcctgtacggcggcctggcgccttcactcgtcggcaccgccgcctcccagggtgtctactactacttctaccaaatattccggagcagggcggaggcggcgtcccttcagcgctccattagaggagttggcgatggatccgtcgggatgcttcagtcgctcactgtcgctgcactttctggatgcgtcaatgtacttctcacaaacccaatctgggttactgttacacgaatgcaaactcacaggaaggcaaacaaacagcaaagccccgagggtccgaattctgctcttgacaaggccctacaaactgccccagctgagaacgtccctcataaaactatcaatgttattcaggatctttacaaggaagctggagtgttgggcttctggaaaggggttattccagctcttattatggtcagcaatcccgcaatccagttcatgttgtatgagtctcttctgaagaagctgaagaagagacgggcctctaatttgaagggtgctcagggactgactgctcttgaaatttttcttcttggagctgttgcaaaactgggcgcaactcttgttacatatcctcttctagttgtgaaggcaagacttcaggcgaagcaaatgattgacgacgacaagaagcatcgctacaaaggcacatttgacgcaatcacaaaaatgatgcgttacgaaggcctgtcagggctttacaaaggaatgggtacaaaaattgtgcaaagtgtttttgcttccgctctccttttatgatcaaggaggagctggtgaagggtgctcgattgttggtaactggtgacactagtctggttaagaagctgccttcaaagccctnaagntgatctagttcttcgcagatgtattagt

SEQ ID NO: 2158 - DNA, 822 bp, Avena sativa
cgcgcagctgctggtctacttcctggttgaggactacctcaactactggctccatcgcctgctgcacggggagtggggctaccagaagatccatcgcatccaccatgagtacacggcgcccattggctttgcagcgccatacgcacattgggcggaggtgctcatacttggcatcccctcctttgccgggccggccattgcaccaggccacatgattacgctctggctctggattatacttcgtcagatggaggccatcgacacgcattgtggctttgatttcccattcagcctgacaaagtatattccgttctatggaggagcagaataccatgattatcatcactatgttggaggccaaagccagagcaattttgcttccgttttcacgtactgtgattacctatacgggactgacagaggttacagattccataaggcttacctagcaaagttgaaggacctggctccaagcgatggtgagaaagaagatgccaatggattcagctacacgaagttggattagatggcgctgtcaaatcgaattttggattttgatggcttaacacagtgcatcctgagggctgccctgatgatcttgttcagttaaggccttgtcaaatagacctgttgagttaggcatgtgtagtgttctgatttgtcatgtgttatgattttttatttgtttcagtgttcttgaaacatctctggaacttgtaatgctgaccaataatatttccaggtaagcttatatgagctggctatctgctatgcgctggctctcaataatagaaagtgtcacagtgacgttatcccgttgaa

SEQ ID NO: 2159 - DNA, 983 bp, Avena sativa
attcgtgcagtgagcccacgcctcatcttaacaacgcctctaaagactttcacattattgtagcaaatagcacatgtcccaattgccattatctgaggtattgcacaaaaccgaaaattagtattatccttcaacgctgacatgtattgaagacagtcttcggcgtggaccaaagcattagtcaccatatcattcaagcactgcactgctttttctgaattttcctcatacttgaggtcctcaagtttatctgcatatttactccatatttctcgaggccaaaacatacggcactttggtatctcatttatgtcctccaaataatcccttattatattggttttctgaagaaacaaacccattgaattcgaaagttgatctgaagccagattttctgtcccagcagcatgaaagagcctggaaagtccatagcctactagccctgctacatagtggcagtactcattatagtcatcaatagtttcaacctcctggcatataaattttgccattcctgctcccattcgcctagtgatttcttcaattgccttttgatatccttcgcccagctccaggaaagccgtggagactaatctgaacttatccatcaacaccttatagtggtttgttccacatgaataacgccagtcggggttgtagacatggcggtagaaatcccggaggatgggcagcttcacgtcgttggggatgctggtgtcgtcctcgacggtgtccagggcccggagcacgaggtagaagatgcacacggcattgcggagttcgggtccgagctgctggatgaccagggcgaagctgcgggagaccttctggagcatgtcgtaggcgaaggcccagtgctcctcgggcgggatctggcgcttgatctgccccgccgccacgcgcagcttgaccagcgccaccacctcctccggccgcgacagcgccccatcgccgaacaaccgaaacaaccgaaacaaagtcaa

SEQ ID NO: 2160 - DNA, 902 bp, Avena sativa
ccgttgtcggactaactgcatcatttggagtctccgtgcctgcaagtgtcaatgaagctcgaaaggcattcactgccatcacggatccgcttgactgctgctccaacttgacttcaaagttaacaaactccattgctaattgcgacccgcggagggtgtcctttcactgccaaagcagaaaatgcacaggccgctggtgcagctggtttactgattataaatgacagtgaagaactttacgagatggtctgcaatgataatgacacttcgattgacgtgaaaatcccggtcttaatgatacctcagtcagcagggaagaatctgaaggacttgttggatcagggagcaaaggttgagctccagttatattcgccaattcgaccagttgttgagctttcagcaggcttcttattgataatggctgtaggaactatagtctgtgcctcactatggagtgaatttgttgtgtgcgagcaggttgacgagcattataatcagctgacacggcaggaaggacctaattctggaacaaaccacagacaagataaagaaatctttgaaatcagcgccaagggagctgctgtttttatcgtagtagcttcagttttccttctcctcctgttctacttaatgtcgtcttgggtcacctgggtgctaatagtgtttttctgcattggtggtattgagggtatgcatgtttgcttggtgacaattctttctaggattttcaaggattggggacaaaaaactgtacaaatcccctattttggggaagtcttgaccttgtctgttggaataataccattttgtacagtctttgccattctatgggtcgtttatcggcattcttcgtttgcttggataggccaagacatccttggtatttgcttgatgataactgt

SEQ ID NO: 2161 - DNA, 617 bp, Avena sativa
atatgattacttctactatcgggaacatttgttgatagtttgtgaacttctgaaggcaaatttgtatgaatttcaaaagttacaatagagaatcaggaggagaggtttactttacaatgccaagattgcagtcaatagctattcagtgtctggagtcactgcagtttctgcatggacttggtcttattcattgtgatttgaagccagagaacatattggtaaagagctatagtagatgtgaaataaaggtcattgaccttggcagtagctgttttgagactgatcatctatgctcgtatgttcaatcacgatcttatcgtgcacctgaggttatactgggcctaccttatgacaagaagatagatatatggtcacttggatgtattctagcagaactttgcactggaaatgttctttttcaaaacgattctcctgcaacattactggcacgtgtgatgggcatcattggttccatagaacaagctatgcttgcacaggggcgtgatacttacaagtactttacaaagaatcacatgttgtatgaaagaaatcaggaaagtagcaggctagagtacttgattcctaagaagacatccattgcggcaccgcctgcccat

SEQ ID NO: 2162 - DNA, 555 bp, Avena sativa
tcgcatcgaacacgtccaccattgattgaatgtgtcggccagaagacaaattctcaagatagaattataggggcacatttttcagccctgctcatattatgcccttgcttgaaattgtccggacggagaagacatcaccacaagctatccttgatctcatcactgttgggaaaataataaagaaagtccctgttgtggttggcaactgcacaggctttgcagtcaatcgtacatttttcccttacacacaaggtgctcaacttctagttagtcttggaattgatcttttcagaattgatcgatggataaacagcttcggcatgccaatgggaccttttcaactccaagatttagctggatatggagtagccttggcagtaaaggatatctatgcagctgcctttggaacacgcaatttccagtctggtctggtggatttgatgacggaaggtggccgacagggaaagatttaaatgggaaaaaggttattacctttatgagaagggtgcaaagccaaagcccgacctagtgttcaacctattattgacgagtaca

SEQ ID NO: 2163 - DNA, 872 bp, Avena sativa
atgggatttgactcaatcatggtggatggttcccacctacctttggggaagaacatcttatacacaaagaacatatcttcattggctcacgcaaaaggcatacttgtggaagctgaacttgggagactatcaggaactgaagatggcctgacagttgaagaatatgaagcaagatttactgatattgctcaggcggagcaattcattgatgaaactggtattgatgctttagcagtatgcattggaaatgttcacggaaaatatcctcccagtggaccaaacctcagacttgacttgctaaaggatcttcgtcagttaaccatgaagaaaggagttagtttggttcttcatggagcatctggcctccctcatgaacttgtaaaggagtgcatagatttgggggtgaggaaattcaacgtgaacacggaggtccgcaacagttacctggaatccctcaagaagccagagaaagacctgattcaggtcatggcgtctgctaaggaagcaatgaaagctgttgtagcagagaaaatacgcctcttcggatctgcagggaaagcatgatgtgccgctgtgaaaactgaagccagcaacactccaccattaggggggttgcatggctattctatcagcttagcggtgctgctgagcttgtaatgccgaactgtgaaaccatggtgcatttgcttcagcaaaaataaaatgaaatcagtgtgcttgatctgagccctcccatgtgtatccattacaactcgtttacaagttcctagtgtgaactgcccactccatgattgtttgatatacgagcagttattgttgactcgtaaacttgtgacatgtgaagtaaattcttcgcgttcatcgacacatga

SEQ ID NO: 2164 - DNA, 535 bp, Avena sativa
gatgtcacagcagtatttgagtgcaacaatgtcaagccagccacaacgtcttggtcgacctgttgtcgtcccaaattccattccagccttcctaagagcatcaccatcctctccaagcagttctgttgggaaaggaccagagccaacccttgttgtgtaagcttttacaactccaatcaggtcaccgataaccctaggggcgatcccaaggccagtgcatattccaccagcagaagggctggaagaagtcacaaatggataagttccaaaatcaatatccagcatagttgcttgaccaccttcaacaagaattttctttttctgccggatagattcatttaacacatgaactgtatccgcaatgaagggatccaaacgctctgcaaacctcttgtacctctcaacctcttccttgagcatgcttttgctgtacttgaaaccttcaaaccttgcagcagcatcttcgaacagaacatcaagcttatccccaaaagtgtccatgtgccttaaatcacaaactcgcagtccatttcag

SEQ ID NO: 2165 - DNA, 508 bp, Avena sativa
gttctacggctacggcgacaacacggacgtccccacctacgtgatgttctacgaccagcagcaggccaactaccccggcgcgacggtcctcgccagcttcaagaccggcgacgtcacggggctgctctcgccggagcaaggcatcagcgccgcccaggagctgcagcgccagaacaagctgccgggactcttcatcttctcggcggacagctccaaggtcagcccctacgggttcgaatacgagaccagggcgcaggagatcgtcgccaaccattaaaaattgaattcatctcctaatggacatggttccttaagatactaatacacgcggtgttggccttatcaagagcctttagaataattgtactttaaatatttcctcgatctcaaaataaatgtcttagagttgccaaaatttaaataaatctaaacaaatctgagacatttattttgagacagagggagtacatgtatttgtgtgcgtgcatggcttgctcaaataaacttt

SEQ ID NO: 2166 - DNA, 872 bp, Avena sativa
taaggacaagagttagtactgtatccagaaaatagggtggatggttctacaaatacagaggaactagtcgaaggatttgaccaggaaactgcagctgttgtgttggcaagatacatctccctgaaaaatggaaatagaggaagagtttgacgcaacacggtggctcgatagatctctcatacggctttgttcacggtttggggattatcggaaggatgacccctcttcgtttagtctacattctaatttctcactgtttcctcagttcatgtttaatctccggcgttcacaatttgttcaggttttcaataacagcccagatgaaacggcttattttcgaatgttactcaaccgtgagagcatcactaattcggttgcgatgattcagccttcattgatttcattctcttttgattcaccaccttcccctgtattccttgatgtggcatcaatagcagcagatcgtatactgttacttgatgcatacttcagtgttgtcatcttccatggcatgacaatcgctcagtggagaaacatgtgttaccataatcagccagagcatcagcaattcgcacaattattacaagctcctcaggaagaggcccaggtcataataaatggccgatttccagttcctagactagtagtctgtgaccaacatggctcacaggcgaggttcttgttagcaaaactgaatccatctgccacatataactcagcacacgatgttccaccaggttctgacatcatattcaccgatgatgtcagcttccaggtcttctgtgagcatctacagaggctggccgttcagtcgtaaggaaatgcattaagttgattactatttaacgttaccaggatcataggttgagttg

SEQ ID NO: 2167 - DNA, 567 bp, Avena sativa
gctatatagtgttcagaggagccaacaagcagaaacatctgttcaagaacaaccctaaagctctcatatggggtaaacctcccaaggttgtcgggggaaagctgctgatatctggctactggggcatcgcaaggcactgcaactaccttggagacctactcctcgcgctttcgttcagcctgccctgtggagccagttccgcgatcccgtacttctacccgacgtacctgctgatcctgctgatatggagggagaggagggacgaggcgcggtgctcggccaagtacaaggacgtctgggcggagtactgcaggctcgtgccgtggaggatcctgccctacgtgtactgatgatgttagttaatcgatcggtcagaaggcggcggcgtcgctgaccgagccatgttgtatttctattgtgaactacttatgttcgtgtagaacccgtgatgtttctgttggtttttggtgtagtagttttgaactgaagctgcgtctcttggtgtaatggaagtactgttgaatttttgtgctcgatgtggtttcttgagcccagattactttcaag

SEQ ID NO: 2168 - DNA, 459 bp, Avena sativa
cggtaccaaaatgtcacaattccagaggcatacgaacgcctcattttggatacgataagaggagaccagcaacactttgtgcgccgagatgagctgaaggctgcctggcagatcttcacccccttgttgcacgacattgatgcgggcaagctgaagactgttccgtatcagcctggcagccgaggccccaaggaggccgatgaactgagcgagaaggttgggtatatgcagacccacggttacatatggataccacccacccttgcatagagtgctgcctccgttcaatcctcgtaggtattgtttagataggaagagtgaaactttcacggatacaagtgttacgagagctttcactgtaccgccgattacatggcgttttaataacaggtctgcttggccaaatgtaccctgctacggtgtgaaataaaaagaaatgcagtgtttcaataaaaaaaa

SEQ ID NO: 2169 - DNA, 984 bp, Avena sativa
ccagttgcttggctgtacaagcaacattatgttcataatgggctgccaaatggtcgggttgtatttacgatccacaatcttgaatttggagcaaatcaaattggcaaagcaatggcacattgtgataaggctacaactgtttcggacacatattcaaaggaagtgtccgggcatggttctattgctcctcactattttaaattccatggcattcgtaatggaattgattctgatatttgggatccatataatgacagcttcatcccggtaaattatacttccgagaatgttgttgacggtaagagttctgcaaaaagggcattgcaggagaagcttggattacatcaaactgattcccctctagtcggaatcatcagtcggcttactgcccagaaaggaattcaccttatcaagcatgcaatttatcgaactcttgaccgcaatggacaggtggttttactaggttcagctccagatgatcgcatacaaaatgattttataaacttagctaaaaaacttcatgctgaatttgatggccgcgtgaagctttgtttaacttatgacgagccattgtcacatttgatatatgctggcgccgacttcattcttgtcccttccattttcgaaccttgcggtttaacacagcttactgctatgcgatatggatccatccccattgttcggaaaactggaggcctctatgacactgtttttgacgtcgacgatgataaggatcgtgcccgtgagcaaggcgttgagccgaacggattcagtttcgaaggagctgacaacgatggtgtagattatgctcttgacagggcgatcaccacttggtacgacgctcgcgattggttccactccctctgcaagcgggtcatggagcaagattggtcctggaaccggcctgctctggactacatggaactgtaccattccgctcgcaagaactgagacttcaactgacaaacgaccaaatgatgttcc

SEQ ID NO: 2170 - DNA, 780 bp, Avena sativa
accctctccgcttccccgaggcggcggcgcgagcgagagagcaaccgtcggcgatggggaaggcggcgaagggctcgcgtaaggggaagaaggcgtggcgcgccaacatcagcaccgacgacatcgacgagttctacgagaagcagacgcgcgacgcccacgccggcgccgccggcatcccctccctcccgtccgactccctcttcttcgtcgacaagcccgcctccgcctccacttcctccgccgccgacccggcaccccaagatgttcctgtcaaaaggaagattgaaaagaacagggagaaggttcttcaccatgagagtgtgttgaagcggaacccgtatgtgcagccagtcccatcttctttggtgtcaaagaaggataagaagaagttcaagaagcacgcaaagaagaaggaattgcaggagtcaagggaagagaagagtgttcccatggaggaggattcaactgaaccgaaccttgacatctggggtggaggtggtgaaggaaatgctttggctaaaaaagggatgaaaaggcttatgaaaaatagatctactacatctgttattccggcagttgaaattgagcctccaggatgttcttttaatcctaaattcgaagaccatcaagactctcttgctcaagccgttgctgatgaaatgcgtaagatctacacgaaagagttaggccccagaccagtgccacttactgttcttggtgaagcagtcgctgaagaagataaattttttcttgatgctgctgatgatggagatggag

SEQ ID NO: 2171 - DNA, 969 bp, Avena sativa
ctcctcctccgctctcgcagcttccgtcttctatctcggtgggaggtcttcaggccggcaggttcccctagatcccccgataccggtccagcccgcacaggcctcgtgtattgtcacacacgactctaccctcgtgtattgtcgaggaaggaaagcgagcgctcaggaggaggcggcgcagatcgaggcgacggtgcggacaggaggcgacggcacgggcggcaacctggcgacgccgctgacgggcacgtcctccggcttcaccaagcccttctctccgatacctaccccttggacgctagtaggagtggatgaaccaccaccttcttgggaccctgtgagtacaccaaacttcggtctttgtaagccgtgttgatctggcttctggtggagagtgaaatggtggagtgtgaagggttgcgacggctcgctggtctactgctcaagtgctgcgatcttgacataccgaatcgtcccaagggccttgaggatcctgagcgtctggcaagggaaacagtttttagcgtaaatgagatcgaggcgctgtatgagctctttaagaagattagcagtgctgtggttgatgatggtgtgattaataaggaagaattccagctagcgctgtttaagactaacaggaaagatagcatgtttgctgaccgggtgtttgatttgttcgacacgaagcacaatgggattctcgaatttgaagaatttgtgcgggctctgtctgtgttccatccgaatgcaccagttgatgacaaaatcgattttgctttcaaactctatgatctcaaacaacaaggtttcatcgaaaaacaagaggtaaagcaaatggtggtcgctacacttgctgaatcaggaatgaacctttcagatgatgttatagaaggcattatagacaagacatttgaggaagcagatacaaagcatgatggtaagatcgacaaggaggaatggcgcaatctt

SEQ ID NO: 2172 - DNA, 647 bp, Avena sativa
gtgaacaagggtgtccgtccagccataccccatgactgccttcctgctcttggggtgatcatgacaaggtgctgggatccgaatcctgatgttcgtcctcccttcaccgatgttgtcaggatgctggagcatgtggaggtggaggtcatgaccaccgtccgcaaggccaggttccggtgttgcgtctcccagccgatgaccctagactgaagcaatccagaagaagaagaagaaaaggcaacctggagaaaagttaaatcctctgtatttatcatattaatagactcgtgccgcataagcagaaagcccacctgagcatgcacacctgtgtgctggggcgtaatctgttgtgtctttacatatttatcttagaccatacctagttcctgtcttcgtcgtcgtcgtcgttgtaagactgtcgctgtgttagagacagctttgtccttaacatcatcgaaacatcgtgatgcaggtttccctttggttgtaaccgccgcatggtcctgcctgcctgctactgttgttcatgtgttatatacaatcatcctgccggaacatgtgcaaccaaagctttggctcttgatagtatatactagtatgtatgtataaattacctggcctgtgtttgttcatgtctactaaaaaaa

SEQ ID NO: 2173 - DNA, 1009 bp, Avena sativa
gatgtgattactttgtgaatcccgagaagcaacaaaagacgaagaaacctaaaagtggatagaaaatagaaaaactaagatgttttgttagtatccctaactgttgaatagagtttcgtacgtctggtatcgtttacttcatcctggctacttaacacggtactatagaaaatatcacaacaaatatgaaatttccagaagctcaacccctgcagatacaatattgtactccgtgcggattgcactacacagctgtgtgctcatactagaggggttgatttcgatattctttgtgcctcccctaaatcctcaagaaatctccaaggaagaaacgaactccaggatctgctgcattgtaaagggctactgatcttgcttcctcatatgttgtcccaccaacgatgaatatcaccacatcttgaggcctgccctgctggaagtgattgccaacaggtggatagtcagcatcccgtaatcgccccttcacaattccttccatggtttggaagagcagaggctggtgttgggtgtatacattctcaacacccttaagtccacgagccatgttgcgagcaatatttaataggtcacggtttccatacaagtcgcctgttcttttgtcaacaccagcctgtttaagcaggaactgaacaagccctgacttgtatttagcagaacgagaagccaatttgttgaaaagctgcatcagctgaactggactctctttttcataccgcaaagcatagagcattaccagccgtaaacggtcaatatcagatacactttgattgtttagtaaggaagtaacggcctcaaaggctgctgcttgtccactcgtacatgctagctcttgttcagtctgtgaaacttgcatgagcttcctttcctctacaattcggctcatctcgctcaccaaagcaacatgctttgttacatttccatgcgtctttcgatattcagggtagttggtcacaaattttgccatatcacctatgctctgaaaattctg

SEQ ID NO: 2174 - DNA, 693 bp, Avena sativa
ccaacattgaaaataagaggctccttacttctgataggagcttcgtaggagtcatgcttctttatgctgaagtgaagaactgaaatttttgactcatgctgaagaagaccagaaacaaccacaggtggtctcctagatggatgacaaagtttggaggcaacatctgtaggaacatttttcacatgaagcataacatatgatcctattcgagcacaatcctttgagcttccttcatctagctcagcagttttagcaaggacaagcttttgtgtccgtgtgaacttatcgaatgcaaatattcttgcatattcaggtggcaacgattccttaggatcccaggatgatgtcctaaatgattttagtcctctgtactttgcaaaacgctttcttgccgggacatctaaaggtgtctccacctcatcaggaaattcttcatcgtcagcattagattctttgattttcttaatctctgcctctatctgctctttggtcagatttttcatcatcgcccatctcagtacccccaatagtttcttgatcaaatttctctgtgaagtgagatactgcatcttcatctgaactatcactgtcatgctctgagtgatctttctcatcaattaccattccagcaccatcttggttgtcatcctcagaatcatcaccgtcatcatctatatcatcaacaatccaagc

SEQ ID NO: 2175 - DNA, 631 bp, Avena sativa
ccagtgaagcaagaagacttcctctacctgcatcacttctccaaacagcatactcactaacaaaagccttgggcccagtacgagaggttctatcaaatgtacccttcatgttaaacaaagtcttagaatcggtgtagacatgaaagtcatacagatcagcaggatggtcaagtggtttagatgaaccatcacagtttgaaatcatctgaatgtctggataggctactcttatagcattgtagaacttgagataattgccgaggtagtattttttcccacaatcttcatttccaattgcaacatacttgactgggaacggttcaggatgccccattgcagctctaacagagccccatgttgagtttgcatccccccttgcaaattctagactgtccaatacatcctttacaaaaggggcaatagcagcggtactaacttcatcattgtggctgattccattattgaatacccagattggagcagcgcccaggtcttcagaaagctgaagaaactcataatatccaaggccatcgtcagtccagtaatgccagacatctccaaagtgtccgggcctctcttcccatggaccaatagattccctccacctgaatgcgtttctcaacatcccggg

SEQ ID NO: 2176 - DNA, 900 bp, Avena sativa
agcaggatgactatgaaattgtcaggaaagttggaagaggtaagtatagtgaagtgtttgaaggcatcaatgttaacaatagcgagaagtgtgtcataaagatactcaagcctagtaaagaaaaagaagatcaaaaagggagataaaaatacttcagaacatctgcggaggtccaaatatcgtgaaactgcttgatattgtcagagatcaacattcgaagactcccagcttgatctttgaatatgtcaataacacagatttttaaagtgctctatcccacattgacagattatgatattcggtactacctatacgagctactaaaggcattagattactgccattcacaaggcattatgcatcgggatgttaagccccataatgttatgatagatcatgagcttcgaaaacttcgcttgatagactggggcctggctgagttctaccatccaggcaaagaatacaatgtccgtgttgcttcaagtattattttcaagggacctgaactgcttgttgatttgcaagattacgattattctctagacatgtggagccttgggtgcatgtttgctgggatgatatttcggaaggagccattcttctatggccatgataaccacgaccaacttgtgaaaattgcaaaggtacttggaacagatgggctgaatgcttatttaaagaagtaccacattgagcttgaccctcagcttgaacgtcttgtcggaaggcacagcagaaaaccctggtcgaagttcattaatgctgataaccagcatctagtatcccctgaggccatagattttctcgataagcttcttcggtatgatcaccaggataggctcactgcgcgtgaagctatggcacacccgtacttccttcaagtgaaagcagcggagaaca

SEQ ID NO: 2177 - DNA, 850 bp, Avena sativa
tactattcattcatcaaacgacataaacacgtacacataaaaacaggggcccacaacagtgcacatgcccacctgttgcccttctctagcgcggggacagacctgccggcgggagagtccaccctagatcaatcgacagtgatgctcgtgctgccccgtcttgcccgcaggtcacggccgtactgctggtgagaaactgtctgtgttcgtccatccacctcttcacttcctcatatgttcaggaatgatccggtggagtagctcaacagggaggccttctagctcagctccggagaagttgaacaatggcggtaaagaccgtccatttggcaagcaggtcttgggatcccgaagttcgtcgaagaatggatgggcacaagcatcaacagctgtgcagcgcagatttggtgagtactgaagtagccttgacacaagatcaattgcttcaggtggcatgcgcttaacaaaaagcttgtgccagggatgagcttttatctgagggaacttgaattcagagtagtttgggttcatgcatctgatttcttctcttgttggggtacccaaaatctttattatttcaaccaattgatcaacaccactttcaccaggaaatagaggctgaccaatcagaagctcagctagtacacagccaacagaccagatatcaattgccgttgtatactctgtagctccaaatattagttcaggagccctataataccgcgagcaaatgtatgagatgtttggctctccagggaccaattttttagcactcccaaaatcacaaagcttaagttgatgggtgtgaggattgaccaatagattttgtggcttaatatctcgatggcat

SEQ ID NO: 2178 - DNA, 711 bp, Avena sativa
aacattaacttggtagaatgtagccctacatgcaaaaggtgcagtacaatactctgagttgtgaagatgaacatgatggtgatgagaaaaggacagtcagcaagctgtgcggagcccctgtttattggcatgcctccctcgaacaggttccgtcaggattgcccaccataattgttgctcatgaattctttgatgccttaccaattcatcaatttcagaaaggatcacatggctggtgtgaaaagatggttgatctcgcagaagactcgtcgtttcgctttgttctatctccgcagcccacagcctctttaattttcctttccaagcgttgtcaatgggctagttctgaagaacttgagaaggttaagcaaatcgaagtctgcccgaaagcaatggagatcaccgaacagatcacagatagaattacctcggatggcggaggtgctcttatcattgactacggcaaaaatggaatagtctctgacagtcttcaggcaatccggaaacacaagttcgtccacatattagataaccctggctctgctgatctcagtgcctatgttgattttgctgcaatcaagcactctgccgcggaagtttcagatgatatttctgtccatggaccaatgagtcagtcccagctgttgggttctcttggtataaacttccgggtgaagccttatgcaaaactgtgacgagaagcaggccgag

SEQ ID NO: 2179 - DNA, 577 bp, Avena sativa
cttctcctatcgacctgaaagggaaggcatacgagttgctgcggggtaaagcttcgagctttctcctcgacgactactacaggactcctggaggtattcaatatgaaggacccggttcagatgcaaagcccatcacgctgaccatcgaagaccaggactacatgggcgacatcgagctgctaaaactgtatcttgacaaggtgaggacaattgtgaagcctggttgctcgagggataccctcaaagcagcgataagctcgatgatctcggtgacggacgtgctgacagtgatgtcccatcctctcaatgctgaactgcctctctaccatttcaactgagcgtgaatcgctgcatgagaattgttgtgagcccagttttgtttcttctaccggaggcttgcttcttgagctatactgttttcctttctgttccttctctgaaggacaggcatgtgaaagtattgtactagtttatgtcagaaaattgaaagaaaagtacttgtagtttgaagaaacctgaacttgcactgggtaaagctgggtaatgaagaaaagtgagcttgagagatcaaaaaaaa

SEQ ID NO: 2180 - DNA, 846 bp, Avena sativa
cggtaactgcagcctaatccttgtacttcatgtcacgcactcggaagccaggcatctcgaacgagattgcaaacttctcaacctgcgccctgagctccttgatgtccttgtttttctccgggtcgacaatgaagtcggcgtagcgcttgcctcgctgcttctggacgtccaagcagatggccacggcctggtggaggtactcggcgatctgcacaaagtccttctcgaccaaacctctcgaggtcattgctggtgtgccgattcggacaccaccaggcgacaatgcactgctatcaccgaagacggcattcttgttgagtgtaatgctactcagatcacatactttctctactttgttaccagacaaaccaagagggcgaagatcccagagaacaaggtggttctctgttccatcagtaaccaacttgtagcccttgctcatcagatgatttgcaattgcaacggcattggccttgacctgctgaatataagccttgaatccaggtgacatggcctgtttcaggccaactgccagggcagcaatctggtggttgtgagggcccccctggagtgacgggaacactgcaaagttgatcttgtcctcatagtcataaagagcaccctcgggctggcctttcttgggaggcttcgggcccttcctgtagaatatcataccagatcttggcccccggagactcttgtgggttgttgtggtcaccacatcagaataatcgaaaggatttgtggcctcctgcgcggcaacaagaccgctgatatgagccatgtcacacagcagcatggctccacacttgtcggcgatggacctaaacctggcgtaatcccagt

SEQ ID NO: 2181 - DNA, 481 bp, Avena sativa
acgcaagcgaccaagagagggagtgggtggaggaagaccagcctggtgtatatattaccatccgggccttgcctggcggcatcagagagctacgtcgtgttcgattcagcagagagaagttcagcgagatgcacgcgaggctatggtgggaggagaaccgagcgaggatacacgaacagtacctctgagacaggcgaagagcgcatgaaaacagaagagagaactgggtcgttgacgtgagctagctgggcgatccatgttgtacatttccggttggagctaacactactccctctaggcctctcttgcatgtgaggtttaaggaggcatcgtttctaccatactgatctggctaggttctggttatgtggccacccacatgctttcctgtgatgtttttggctctagattgggcaggaagtttgtgttgggtagctaagagaggggtgtgtatcgtgtagtctagaacaccgtctgtcct

SEQ ID NO: 2182 - DNA, 939 bp, Avena sativa
gcgcgcgaggcctcgccgccgtcactccgtcagcggcggtttgggatccagccatgtcgactagcaagggcggaggcggtgccggaggcggaggggagggaagaagaagaaggaggtgaagaaggagacgaaactggggatggcatacaagaaggacgataacttcggggagtggtactccgaggttgttgttaacagcgaaatgattgagtactatgacatctctggttgttatatcttgaggccttgggcaatggaaatatgggaattgctgaaagaattcttcgatgcagaaataaaaaagctgaagctgaaaccatattatttcccgttgtttgttactgagaatgtcctgcagaaggagaaagatcatattgagggctttgcacccgaggttgcctgggttactaaatcaggaaaatctgacttggaagctccgattgctatcagaccaacaagcgagactgtcatgtatccatacttctctaaatggataagaagccaccgggacttacctttgaagtgtaaccagtggtgcaatgttgttagatgggagtttagcaatccaactcctttcataaggagccgtgaatttctctggcaagaagggcatacggtttttgcgactaaagaggaagcagatgaagaggtcctccaaatattggaactctaccggagaatatatgaagaatttttagcagttccagtgtccaaagggaggaaaagtgagatggaaaaatttgctggtggactgtatacaaccagtgttgaggccttcatcccaaacactggccggggtatacagggtgcaacttcacattgccttggtcaaaattttgcaaagatgtttgacattacttttgagaatgaaaagggcgaaaggtccatggtgtggcagaactcttgggcatacacgacccgctcgattggggtcatggt

SEQ ID NO: 2183 - DNA, 633 bp, Avena sativa
gtttggtcaggctcctggaacatatcattttagatgtacgatcttgccacaggaggacaaaatacctgcaatcatatccaggtttaaggaattccatgagaaattcatggatgaataccgtgatggagcacccaccagttctaaaactgaaagcgtaagcgataaaactggaagtggaggagataaagctactggaagtggaggagataaaactgaaagtggaggagattaagcggcaaactcaaagcttttatacaatgaactcctgtcgaaataatgaagatcatgccatcgtgccacactgccacccccattcatggatgaagcaacctaacttgccccagctttttttgcataaaggtcctcaataagaccttacaaaatccttagaaacgtgcatctgcaaagccatgtcccttttgcgttgtgaggaatgtcttgggcttgggagatgtaaaaggataactctctagaatgttatggggaaatcttactgtgcagatgttcatttctgtgatgggagcttgaccttattctgtcaatttacaagtctacttgtaataatcatgctgcacatagtctcaaaagcaaccccatgttaatggaactggtactaacatatttgatcaaaaa

SEQ ID NO: 2184 - DNA, 362 bp, Avena sativa
ttttttggttcgtctagggcaccatgatgctttatttcacactagctgacatggagcacagatgagttcaatttacaggggagggagagagagaatgcaaattgctgaacaccagaaggccaacacgaagtatgaaagtattctcttttttttacaacaagtatgaaagtattctcaatttcttgctacacaaagtggaattaaacacgacaggactaatgtcgaaccaacacaaggagaggtgtgacaccaaagctttatttatttctctggactcctaggaacagagagaccgtcctcgaaaataagccgtcagaattcggcggtctaggactcaagagttactcgaccaccatgctctc

SEQ ID NO: 2185 - DNA, 749 bp, Avena sativa
ttcctactctttcacatgaagttgtcaaaggaatacaaggaggagctaagccaactataaacttcaagggctacatggtcgggaatggtgtctgtgacacagtttttgatggtaatgctcttgttccatttgcacatggaatgggtctaatatcagatgatatataccaggaagctagtatgtcgtgccaaggaagttactggaatgccagtgacactaaatgtgaagcagcactatcgaaaattgattcgttagtcgccgcactaaatatttatgacattcttgagccgtgctaccacagcaagagtatcaaagaagcaaccccacataacagtaaattgcctaacagtttcaaagatcttggtgtaactaacaagacctttcctgtaagaacgagaatgcttgggcgtgcttggcctttgagagctcctgtaagagctgggcgtgttccatcatggcaggaagttgccagtggggttccatgtatgagtgacgaagttgcgacagcatggctggataacgatactgtcagatctgcaattcatgcccaatcagtaagttcaattggcccatggcttttatgcacagatgtacttgattttgatcatgatgctgggagtatgatcagttatcacaagaaccttacaagccagggttatcgtgctttcatatacagtggtgaccatgatatgtgcgtgcctttcaccgggagtgaagcatggactaaatctgtgggtatggagttgttg

SEQ ID NO: 2186 - DNA, 707 bp, Avena sativa
ggaaagccgtttcacggcagcaggtgatactgttgttgcggtggatagcccttttggacgattgggtcttacagtttgctatgattttgagatttccagagatttatcaatgtttgcgttttaagcaccaagcacaggtcttgcttgtaccatctgcattcacaaaggtaaccggggaggcacactgggaaattcttcttcgtgctcgtgcaatcgagacgcaatgttatgttattgctgcggctcaagctggaaaacacaatgagaaaagagaaagctatggtgattctataattattgacccatggggagtagttatagctcgacttccagatcgactgtccactggatttgcagtagcagatattgacttgtcaaaagttgaggctgtgcgaaccaaaatgccaatttctgagcagcgcaagttcgacagcatcttgaaatcctcgccattgtaattgttgagagctggtcttgcacgctggactctctttccatattccagtgattcttcttctgtgtaactgccattttgtttagaagatgatccaattatgtcggacacttcagtgtgatatgttgtggaacaaaataagatacaattatagtactcctagcatatcttataatgtaaacatagcatccacatttggctcagagcacgttattatctaatagcttaagcgtgatgaaaagcagacgttttc

SEQ ID NO: 2187 - DNA, 847 bp, Avena sativa
aactacgcttccgctggctgcggcattctcaacacaacccggttggcgaagtgcttttcaatggccgagcaggtggagttcttcgcgaacaccaagtcaaagatgactgagtacaccgggggcgcgggctccgtcgccatcagcacactgttgtccaagtccctcttcctcatcagtgccggcggcaatgaccttttcattaccccccttataccggccctgtttccgatcttctacaatcgcctcctcaacagttttacgaggcatgtgcaaaccctatacgacctcggcgcccgccgcttcgggatcattgatgtgccgcccattggctgcctgccggtgatacgctccctgtccccgaccggcgcgtgcgtgggcatctccaacgagctcgccaaggggttaaacaacttgttggtcgagaggatggcgcagctcgctgctgaccccgaacgacccgggatgacgtactctgtggggagctccttcaacctggtgaccaacttcacgacggacccggaggccgccgggttcaagaatgtgaccagcgcgtgctgcggcactggacggattgagttgggagccttatgcctgcctgactccaccgtctgcgacgaccgtgccgactatctgttctgggacttggtgcacggcacccaggccaccgctaagaagggcgctgccatcatcttctccgccccagtggaggagggatttgccaaacccatcaacttccaggagctcgtttcttcaacacccggttttgttggagttagcagctcttaaattaatcgcgacttcattgaaaggtagtcaagattgtcgtttattttcttcagtttatcag

SEQ ID NO: 2188 - DNA, 551 bp, Avena sativa
ttgagtttgccgagcgggatgaggaggcggtcaagtttggcgtcgaggaaatcaagaagaagctggaggcattcatgaagagtgtcgaggatcttggggagcaggcggatcggtgtagccgagacattcgtcgggcaaggactgtcgtgctacaaaggatcatccggcaccctaactgagagaaaaatatgatgaaggaatttggtgatagcgatgcatatgaaaaaggtctatttagtctgtagcgtagacaggcaagcaaaggaagtgatcagtatcataaagcaataaatggtgcactgcttgcagacttctgtgaagaaatcgccattagtaacctgattgttcctggtgtatctggatcgttcatcgggcgacgggcatggcatattggcattcagcttatttattctaataaaagaatcttatttgttagaaattcagtgtgctcacctctgggctacatgcctgtgtcttagagccaataatctcaccgagaaaaatgggtgtatgtattatacaatgttggtatcaattttgaaacgtatggt

SEQ ID NO: 2189 - DNA, 748 bp, Avena sativa
ttgttgaaaaaagatcaattaacttctagatcaattaactttgtcataggcttctcaaaatcaatcttgtacagtataccatttagtcaatctttgccggatgattcatgactccacattacaagttccattgtacaacttttgtgtactaccatatactatagtaaataaaaatgttctgtaaacggatcaaacacttttttatttcgacgtatacaactcaaattaaggcaagataggcttttcaagtgacgatgttgtattgacaacgtgaagatgttgtattgacaacactctgttctgaacaacgaattcaggaagatttcttgctgtcctgcagtcgctcgaacaggctgccatcgaagagggccctgacggtctcgcgttgcaacagcccttctttatcctttcccactttgtacagtatcttccattcgacagtggcagcgacccagccgagaaaatcatacatattacggttgtctttaagcatggagttcatctcatcttctgtcaaagcatttggccgagttcgaccaaacttgctgaatatagcatcaaatttcgatggatcaaacctcccttcagtatcatatgtttcggaatcactcccatgcttgcccttgtggatgttctttatatgaattgagagcagaggggaaggtatccatcccggttgagtgggataactgaggatgaggttgatgaatatggcggcaccgatggatacagggtacccaagcccaat

SEQ ID NO: 2190 - DNA, 938 bp, Avena sativa
tgcttcagatgagaaaattgcgttgctcggagccatacagtcgttgtttgagggctcgatgtacacttttgtcttcctctggactccagcgttgagcccaaatgaggaggacattcctcatggattcatatttgccactttcatgctgtcatctatgttgggtagctccattgcttcacgcctattggcccggaaaatgaaggtcgaaggttatatgcagatagtgttttcagtatcagcagttaccctgttcctccctgttgccaccagcttcctagtgccatcttcagtgaaaggaaacggcatctcatttgcgggctctctacagcttcttggtttctgtacctttgagtcatgtgttggcattttctggccatccatcatgaagatgagatctcaatatatccccgaggaggcaagaagcacgatcatgaatttcttccgcatacccctgaacctgtttgtctgcgtggtgctgtacaatgtgagcgcattccctatcaccgtcatgttcggcatgtgctccatattcctcttcatggcagcaatcttgcagagacggctaatggttgtcgccgacctacacaaactatcgacaaaagcacaagagatgactggggaagacgagccactaaatccttgaaaggccaagagaatcgggagcaaatcggacgaacaatgatgccatcggttgatattcctgagccttttccacctggcggctgaataagatggaagtgagaaaagcctggagtgggatgatttttcttgtaacttggtttctgtagtgtagatcgattattgttaggtgcgaggacgatacgtatacctgagcaagtattaagctgcacgggctgtgaagtgataagggaagtttctgagtgaactggtggtatatgctattcatgttgtcattcatcagatggcattattgtaaa

SEQ ID NO: 2191 - DNA, 715 bp, Avena sativa
cgcatctccactgcagcaggttggatctcgagccggccgccggcgatggcgattccgtcgcatcaccgcaccgacgtgcgcgcgctcttcgagctcacgctcgtcgaccagatcggcaagggccaggacaaggtgcacacccgcggaggtcgctcgagggcggcgctgtacaccctcaagtaccggggcagcatctggggttacaaacgttttttcaaacgatctggcctggaaacatcagattatcttaaagatgattgccttttagtaaactgcaccgttggtgttgtccaatcacatactgaaggaccaaagatatacaggataccagtgccacaatcaaacatgtcccagcatattgggcatctgctgactagtggaaagagaactgacatcacatttgaagtcaatggggagatgtttcctgctcacaaggtggtgcttgcggcccgatcaccagtatttagggcccagctttttggtcccatgaaagataaaaacatgaagtgcataacaattgaagatgtggaggctcctgtcttcaaggccttgctccattttatgtattgggatgagttgcctgacatagaagagctcactggtctcaatacaacttgggtgtccactttgatggcccagcacttgcttgctgctgcggaccgttatgctttggagagactaaattgctctctgactcagctttgtgaggatgttg

SEQ ID NO: 2192 - DNA, 865 bp, Avena sativa
aagacaatgtatcttgaagacagaactgtgagacttcaactctgggatacagctggtcaggaaagattcaggagtttaattccaagctacatcagagattcttcagttgctgttattgtattcgatgttgcaagcaggcagtctttcttaaacacttcgaagtggatagaggaagtccgcactgagaggggcagtgatgtcatcattgtacttgttgggaacaaaactgaccttgtcgacaagaggcaagtctccattgaggaaggggaaggcaaggcaaaagacctaggtgtgatgtttattgaaaccagcgctaaagctggttttaacattaaggctctgttccgcaagattgctgctgcactgcctggaatggagaccctttcatcagcaaagcaggaagatatggttgatgttaacctgaaatccggcagcgcgaactcatctcagtcacaggcgcaggctgggggatgcagttgttagctccagttccaaactttttgcagctcatgatgtcaaggaccccatgcccatcaaacaaaacatctacattactgcttctctctctcggtttcagggggattgactgtcttccagcagtgagtccatgatccgagtcaatgaacgagaaacatttccgttggaaagatacgctttaagagtttctagtattttgtcagtggcctaagctagcaacagtgtatagttgggttggcactgtgaactcccattgctcgagctgagtattagagttagtgattggtttatgtttcaacctatatttctgtcgcccatcttgtttctgtcagcccaagtctgtgttttctatgtgtactgaatatatatatactggattttttcgcaa

SEQ ID NO: 2193 - DNA, 350 bp, Avena sativa
ccaaccttttgaggttcggattgctcggatcttcaacacatatggcccgcgcatgtgcatagacgatggccgtgttgtcagcaactttgttgctcaggcgttaaggaaggagcctttgacggtttacggtgatggcaagcagaccaggagtttccaatatgtttctgatctggttgaggggttgatgaagctgatggaaagggagcatattggaccatttccaacttgggtaaccctggtgagttcaccatgctggagctggccaaggtttgtcctaggacaccatcgacccaaatgcgcggattgagttccgtgagaacactcaggacgacccgcacaagcgcaagcca

SEQ ID NO: 2194 - DNA, 685 bp, Avena sativa
ggtctatcgagaaactggcctgttgaccaacaagagtgatgtgtatagtttcggtcttgtgctctatgagctcattaccggtagcagagctaaatgtggtaatgattgcagcttggtaataaatcacctggagacttacaaaaagattagcacaacaaatgtaaggtcttacatacaactcaaacaagacaaagacactgagcttctccaaggccttgctgagattgctagagagtgtttataccgtgatgtgggtcaaaggccagagatgacggatgcagccgaacgtctccaaaatataaggaaatggtatgctaccaagtcgccatctccgtagttgattgtgtttgataaacttgtcaagtagattcggacttatttccatttttattttttctattcccaagtttgttttaccatgtaatcgttgcagtgctccttctgggattctactacctccgttccataatataagtttttttagcaagctaaaataactttctaaaaagacttacattatggaacggaggtattatctaacatgtctcctccattggtacttgggtacatcccttcacgtttatttgcatttgtttgtccccacaaacatcaacccatgtttgtttggcaactctatgtggttttattagatgttcatatttttactaaataaattggtatgctt

SEQ ID NO: 2195 - DNA, 667 bp, Avena sativa
cctcactctctctgcgggcgggcttcaccgaagctcgcaaggatgagtttcatttaccccaacgcaatgcagaagagggagatccgcaaggggaagcgcgagctcgagtcggagaagaaagagcaggagcgggacctaaggtgcaagacgagagaaaaggagaagaagctcgcggagcaagagaaggacctaaaggaccgtgagaagaaagtgaggcaagccgagaaggagctcgtcaaggagcgggagaggctgcgcctgctcaaggaggagctcgacaacaaggccggagaccccacgcacggcgagctgcccaaggaggatgctgatgccaagggcccggctgcagaccactacgatgaggccgatctcggcgagttcggggacggggagggtcctaagcctgttcgtggtcaggttaatcgtggtgacacaaagtgaggagcgagcccgtcacccccgaaaatctccaaacaattcttgtttccgttagctgatgatatgttcctgtgttttagtagttgattatcgcctctgagaacttgtatgtcagatttagtttctctgtacgtaccctctttcatgattgggagtcttttgaactcgtggcatcgaatcactggaagtgatatcaagttgcagtaagcttgttggaaattacaaaaaa

SEQ ID NO: 2196 - DNA, 734 bp, Avena sativa
gggcctgcaactgacatagctcaaggatctaaaccaagagtaaagtcgacccgtcagtttggcaagtacgagagggcgaatatgaagaatggtgtaaacggtgttgatggccctgtccctatctctgttttcctggttgctagtgttctgaaggagaacagccagaagctcctgcaggaagcccgagggttagatgaccttattaggatactgaacaatgttaatgggaacttggatgcaaagaaggcttgtgaggctgcactgaaacttcacgcgaagtaccttagaaagatgcagggaaagaaaccctaacatagcacacacacggtgatccggcaaggaaggcagagcagtagttgttgtatgtagatttggatggcagcacattgctgtgccgacgtgaaaaatgtgtataaccgaagcgagtgcattgttctctgagaattaacagcttttccatgtatattctttccgctccaaagaagaaaagtgtaagattcattttaacaaaacctgtatgtgtgaatcttaaaatgaaaaagacttgtgctcaagttgggcaaaagagaaatagatagtactaattaatattctggttggtatatatagtggtacattgttcttttcgttgttcttgttctgtatccccaagttgggcatggactcggctctgtctggcgatgagctcaacttgccttgtgttaagcctggacttgtgctgaagtttagaaaaa

SEQ ID NO: 2197 - DNA, 674 bp, Avena sativa
ctggattaggactaggagacatcttgaagcctgatttggtattgccactaattgaatctttgcccattgagcagttggcatcacatcttcctgagggatcatggactgcaggtgatattcttgaactactgcaaagtcctcctttacgacagcaactagatgcttttacgcatgtgctacggactggccaaatagatcttgctcaatttggagtggaccctagtaaatataaattcacagttgcttcattccttgaggcactggaagactctgttgcaaaagcatctacaggaggagacaaagattcggagccccagagaggtggtggaaatgatcccatggatgaaagttgattgcacatcgcatctaggtgtgtagcctttatatgaattgcccatgcgtggcgaaaattatggtgttcgcacagcgggacgtgttattttcggtacccactcaaaatctatatgctagtttgactgcgaatttactagatatactgtaccggttgcttgcataggttcctgttgattccattgagtgacatgagcattctgacaaatgatttcataggttccagttgatacagttgggtgacgtgaatagtttatacaattgcgtcacatgaatattttaaaatggttctgtatgtaccgattggtaccattgcgcaacat

SEQ ID NO: 2198 - DNA, 563 bp, Avena sativa
catagttccctggggcatgttcaatctgatgaaacatgttaaagagaagtatggaaatccacctgtgttcattactgagaatggtatggatgatgcaaacagccggttttcaaggttagcagatgtcctgcaagatgataaaaggatacagtaccacaacgactatatgtctagcctcctagatgctataaggaaggaaggttgcaatgtccaaggttacttcgtatggtcgctgcttgataactgggagtggaactcagggtacaccgtgcggtttggcctttactacattgactacaacaacaacctgacaaggatacccaaagcgtcagtccagtggttcagtcaggttctagcccagaagactgcgatcatgtagataataatacagtgtttcgtcactggtcattttaagtgtgcaactgtgcataattaacatttacacacgctcacatatcttgggtgcaaaaatgtaactccaggattcctgacacgaccgtcaaccatgctgttgagcggagtcgctgttgtcgttcttgtacattgatgttacagaaatagaa

SEQ ID NO: 2199 - DNA, 680 bp, Avena sativa
tatgggctatgtcagcagcgtcttcgcgagcattccgtctgcatggtgaaatcccaatgttgttgccttctgttgatatgtgcaaccatagttttagcccaaatgcccggattgtccaggttggagacatcgatagccctgatatgtcagttaaggttgttgctgagacgcaaattgatcaaaatgctgcagtaacactgaactatggttgctaccccaatgacttctaccttcttgattatggatttgtagtaacatcgaatccatatgatcaagtagaactgagctatgatggtaatcttctggatgctgctagcatggcagcaggagttacctcccccaacttttcaacaccagccaagtggcagcaggatatcttgtcacagctgaatctacatggagagggtgctattctgaaggtcagcttaggtggtccggacattgttgatgggcgcttattagctgcactgcgggttcttctcgtggctgacccagaaactgtgggtaagcatgatctgaaaactttgatgtcacttagcaataatgctcctttaggtcctaccgttgaagcctcagcgctcagaactgttcttgcactttgtgccattgctctccaacacttccacaccaagataatggaggaccaggctatcctaaaaggacgaaccccctcttactac

SEQ ID NO: 2200 - DNA, 768 bp, Avena sativa
caagaacaggagaaggaagctagcttttaaagttgtgatccaaatagctcttgaccttgctaggggattaagctatctgcactctcagaagattgtgcatcgtgatgtcaagactgaaaaatatgcttcttgataaaacaagaactttaaaaattgcggattttggtgttgctcgcctcgaggctgcaaaccccagtgatatgacgggcgaaacaggcacccttggttacatggcacccgaggttctcaacggcaatccttacaacaggaaatgtgatgtgtacagctatgggatctgcttatgggaggtatactgctgcgatatgccatatgcagatttgaccttctcagaggtcacatctgctgtcgttcgtcagaatctgaggccggagataccacgctgctgtccgagctccttcgcgaacgtgatgaagcgctgctgggacgcgaaccccgacaagcggcccgagatggcggaggttgtgtccatgctggaggcgatcgacacgtccaagggcgggggcatgatccccatcgatcagccgaaaggtctctgctgcctgtcattgttcagaccacgcaggggcccctgaatcctttatgactaacggatcaagcagcgaggtggtggtgtaggagtagtattctctctgcatcgcctaagttgattgcatttggtttagttttattatggtaaacagactggttaatggtggtggtgtagcacctctgatgtaaattcctttgtctaccccatccgtctatcaa

SEQ ID NO: 2201 - DNA, 727 bp, Avena sativa
atactggcaagacatattcaactccagaggaaatgaaagcggcagctcttgcaagatacgagaagatgaggggtaatgctcctgaaagacttgtttctggttctgatgattttacgatgtttctttgggaaccgacaatgagtaaacagcccaaagctcgcatgactggtcatcagaaggtggtaaaccatgtctacttctcccctgacgggcagtggctggctagcgcctcctttgacaaatccgtcaagctgtggaacggtattaccggcaagtttgtcgcggccttcagagggcacgttgcggatgtgtaccagatcagctggtctgccgacagtaggcttctactgagtggtagcaaggattcgaccctcaaggtttgggacattcgtgcgcgcaagctgaagcaggacttgccaggtcacgcggacgaggtgtacgcggtggattggagccccgatggcgagaaggtggtctctggtggtaaagatagggcgctcaagttatggatgaactgagagctattattattatttatcttgtaaaatgttagggagcagagagagagagagcaggcgacagtattaagtattattattctcttcttgtagatgtggtacgtgagacttggcaatggagaagtccatgagtattttgataacaagcatatggagtaccttatatcttttcatgaatgaatgaatgaattatgacatgacaaaaaaaa

SEQ ID NO: 2202 - DNA, 736 bp, Avena sativa
gttcgggaaggcgaagaagaacacggacttcaagacgtacagcggggagggtttcaagctgttgatcccggccaagtggaacccgagcaaggagcgtgagttccccggacaggtgctccgctacgaggacaacttcgacgccaccagcaacctctccgtcgtaatcaaccccaccaccaagaagaccatcaccgagtacggatcccctgagcagttcctctccgaggtcggcttcctcctcggccagcagtcctacggcggcaagaccgactccgagggtgggttcgagtcagacgccgtggccacggccaacgtgctggagagctccgcgccggtggtggacgggaagcagtactacagcataacggtgctcaccaggacggccgacggggacgagggagggaagcaccagctcatcaccgccaccgtcgccgacggcaagctctacgtctgcaaggcgcaggccggagacaagaggtggttcaagggcgccaagaagttcgtcgagaacgcagcgggatccttcagcgtcgcataaatatgaccgatcgatcagggaatttaatcaaatttgctcggggtcggggatgcaccgtacgtgtagaagagggcatgtgcatgtgtgtgtttctttgattgtacatgaggaatggatgaacacgaggtcgatttccctcaagcattcatgtctggacagcgattaagaaatcttagtagtactaataatttttacaaa

SEQ ID NO: 2203 - DNA, 762 bp, Avena sativa
tgtatgtctattgaatccacatgtatgtcaaaatgacagtgtgtacgtattccattagatttgttttcggcataggccatgaaattctgactgactcttgaatttgagaatacagtgatcgatgcacccggaataggagttcatgaagacgaactagcgacgtagccgacaaaggccaccacctctatacagtcgaggaaggcgaagaaagggctcccaacagtagtgcttttcaccgatgtcgggccgtggtggatgagctcgtcaccttttcatgcaggaacgtcgcagaaccagcagcctgcctggaagctgatagtactactgataagaaaattaattagaatgataattggtgagtttcagtctatagtacggtgtgatagcttcaaagtcataatcgactgcattctagtaggagaaaatgcaatgcagtatgtggtgttctagtaggagacactaatgtattgatctcctcatgttcccacgttgtcatttttcaggcatctcaggtacctggttatggataataagtacctggttatggataacagaaagaacaatcagtaaataattaacctagagggaaatagttatatatcaccttggagaaaggaaaatatcagctctagttagtacacaacgatagacaacggttacacacatgtcttgcttctcttgaaattttgtacacatgagagagacaaggcaaagatcacattacttccctataattgcaccattatcatacacacacctttt

SEQ ID NO: 2204 - DNA, 740 bp, Avena sativa
accacttggttaatcagcttgctagacaccaatttctgaagattgcttgccagcttgaaagaaagcacatagccagtgctcactcattgcttagagtcatagaatctgagttacagagctacctttcggcagtcaacgcccgtctgggtcattacagttcattaattcaagctgcatctgaggtacatgaacaaggagcaatcgatgaccgtgacagtttcctccatgcagtgcgagatctactatgtattctctcaaattcccaagcagcagtaccaacatacatgtcagcacatgctttagttcagcagatatcggcacttcaatctgacttgctttctcttcagtctgaacttgaaaatactcttccagctgacaggaaaagatgtatcaatgagctatgcactctgattcaaacagttgaacagcttctatttgcaacgtcaacaactgcagaaccagtattgacaccttggccactgatgcgtgcgcttgatgatatggaaaatgccaatgctcaagttgaagttgctgttgaagaagtaaccaaggcccgtacacaaaagataaagatctttgaaaatcgtgctcacgaggtggggagggaaagacaggtgtttgttgatttcttcagcaaccatgagcgtctcaagaatcaagtcagagagttgacctcccgcgtgaaagctctccaggaatagggttttctaggccgccttctcgtgccaggtctctcgggt

SEQ ID NO: 2205 - DNA, 679 bp, Avena sativa
ctttctcggagacgtggatggatgcgcattttgctagatagacaaaggcctgcagttagtctggacttggggcataatggtgtacagaacagtgactatgtgccaagagctgaactagaccacatgaacttcttcgcttcatcagaatccaactcgttgcagcacagtggttatctatcaagaattgaaccaagccgcaggaattttcatgcaccttcggaagccaacagttcacaattgctccttgatgacattcgggatcaacattatttttctccttcagttcagactcagagaaattctactccatgcatatctgtggatggaaacaatttccaacaaactgaaagtgttcagcacatgtgcagtataagtccccacttagattgccatctgccttgtgacacacagcatctcacccagtatagcttggctgtggtgctccaactcatttttcagtgatgtagtctatgacagaaaaagcagaaaaagaagacctttcattttagcttagccatttttttattttcatattggcattcattcagtcctagataccacctcaaatcctcacagttcacgcgatgaccagatgtgaccaagatttttctgaactattggacagcttcatgtatatacattgttgtattggagaagccagatccatacgaaaaaaaaa

SEQ ID NO: 2206 - DNA, 687 bp, Avena sativa
gatgccaacttcagtaccaagcagctgcttgtctgccaggtcctggaattggaatctaatgaaggaaaccaaacgacatggaagaagatccagaggaaatggcagatgtctacaagacggtcctgattcatacagactatttaaggagcagatgcatcacattatccagctatgggatctgtgtcatgtatcaatcatacacaggacccagttctaccttctattccagggggatacggctgatcagatatacatcgaagttgaagttcggcgattattatggttgcagcagcatttggatgaagtcgatgatgcaacatgccctgctgcacctggtgatgaccttgcagtttctcgagccgcgagcatgaaggctttgagaaacgagcgggaatttctcgcgagacggatggggtcaaggctgacggatgaggagcgggagcgcctgttcatcaaatggcaggtcccactcgaggcgaagcagcggaagctgcagctggtgaacaagctctggacagaccctgaagatcaagtgcacattgaggagagcgccgatatagtggcccggctggtcggtttctgcgagggtggcaacgtcagtaaggagatgtttgagctcaacttcgcggtcccggcgagtaggaggccatggctgatgggctggcagccgatctccaacatgatcag

SEQ ID NO: 2207 - DNA, 776 bp, Avena sativa
ccgcagcgtcgtgcccaacatcaccaagatggacaaggcgtcgatcatcaaagacgcgatcgagtacatccaggtgctgcaggcggaggagcgtcagatatcggcggaggtgtccgcgctcgagtccgccgccggcgcggaggaggtggactacgaggacggcctcttcgcggagcaggtctcctcggggcagaggaggaagaaggtgaagcgcgcgctgtctgtctcgtcgatgaacgacgcgctgctcgccgcggctgccgaggcggcctcgccgcccgtggaggtcctggagctgcgcgtgtcggaggtgagcgagaaggtgcttgtggtgagcgtgacgtgcaccaagcagcgcgacgccatggccaaggtgtgccgcgtgctggaggagctccgcctcagggtcatcaccgccaacatcacctccgtctcggggttcctcatgcacaccctcttcgtcgaggcagatgacatggaccgcttccagatgaaggagattgtggaggctgctctctcgcagcttgacgctcccggaagcccgccacttagctccatgagctattagggatgaagatcatgctacgctcgctagtactcggctcacctatttcaccttaccacctagtctctcttttgcaaggccttgatatattgttatgcaatgtactatgtgccgtaattttgccgtctgtttttttttgctaacacccctttatatgtgtgcatggagaggtgattgttttagtacgaggcaataactactcaaggataga

SEQ ID NO: 2208 - DNA, 529 bp, Avena sativa
ttgatttcggtaatcggcaagggatcaatgttgtctaccagtacctccccatctaccaatttggatgagtaagttctgagttttttctcccattgtgcatcattttggttaacatttgttcaactttactcggtgtaaccttgttactgtaaaaatgaactaggctatggttgactcacggtacaccgtaggatagcatttggttgtattttcaaactccttccactgatggtgactggtaaccgctgcagctccgtggctgctcgtgaagccgcagtctcttttctccctgcctcatcagtgagttccaccaaggccatcaaatgctcctataaatgagaatgttgaaggattgtgggttgatgatgatgattccgttggtgatcctccaaggccatcatcgtgtttatccaagggttactatagttgctgttcagaagatcaaaatgttgggtaaagagttgcaggcaactgaactaagcttttcagtccggttttgtaaacatatttttaatttgcaacaaaaaaa

SEQ ID NO: 2209 - DNA, 601 bp, Avena sativa
ccgggatctttagagatgaaatgcttgatgctgtgaaaggttttccgggtcagggcagaatggggtatttattaactcatgtttcgcccattgccagagcgagagacaggatacatggtactcaggcaactctcctcgccttggtaacaagagaatcgctgaagcggtcggtgactggtacttcgagaggggcaacgccaagttcaccgactgtgcgtacccttgtgatggcacgtgccatcacattgtgttcagagggggcagccatctttaagacccatcattttttcacaccataagtttaggtgttgaaaacccagtggttacaacaaaaaaaaagtatagatagaagatgggtgcaagttcttggcttgcccggtgtccatcgcttgatatgatagggcagggcctcgcacgccaaatgcggcgaggcctccgtgttattttagtttacgcatcaattcattccattgccaattgctattccctcgatgtatcttaatatttggaccatactggtgtataccctttacatattcatttactgaatgtgataatatgaataatgtgctaatgataaaatccagccaaaaaaaacaaa

SEQ ID NO: 2210 - DNA, 818 bp, Avena sativa
aatcaatagatgatattatctcgtttttaaacaagcaaacatcagaagatggtgatggtggcatgtgccttcttattcacaatattgatgggcctgcactgcgtgacgctgaatcacagcagtgtctagcacaagtttcttgctgtccacaagtatgcattgtcgcatcggtagatcatgtcaatgcacctttattgtgggacaagaagatggtgcacacacagttcaagtggagttggtaccatgtcccaacatttgcatcttacaaagttgaaggcgtgttctacccactgatacttgcaagtggtggtcatgcacaaaccacaaaaaccgcacttgttgttcttcagagtctgacaccgaatgcacaaagtgtctttagagttcttgctgaatatcagttggcaaatgaaaaagaggaaggtatgcctgtcagcagcttgtatacaaaatgccgcgagcgcttcctggtgagcagtcaagtgaccctgaactcccacctgacagagtttaaagatcacgaccttattaagatcaaaaagcactctgatggccaagattgcctccacattccccttgttcctgatgcactgcagaaattattacaggaactggcctagtattctggatttggaccatctcaattattatttgattgagcaaaactcctcagagaagttttatcttctacatttagttaccatggaaagaactcagctgagtgtttgatcctgtaattgtacatcaattattcatcacttagatttatgaattgctgactgtcgcttgattgctcttgttgttctctgtttctgtgg

SEQ ID NO: 2211 - DNA, 661 bp, Avena sativa
ctgcagggcccgctgccggagtccatggccgggttgcgctctcttgagcagctcgacgtggcgcacaacgagctgtccgggcacatcccggagggcatctgcgcgctgccgcggctcgccaacttcacgtactcgttcaactacttctgcggcgagccggagcggtgctcgaccctgcggcgcaacgacgatcggcagaactgcatcgccggcaagcccgaccagcggccggcggaccagtgcatggcgttcctgcaccgaccgccggtgcactgcgacggccacggatgcttcgcgcagcactagtgatgtcaccgacagcatctcatcgatcgctcaatcgcggcggtaactgttactactgcgcgcgcttgcagtgggtggctagattgtggaattggtttggtggtggtgtaatggatcgatccatccaacagggtacagagatttcagtcatcgtatatatacatacacactataatttttttggttttgtttctaagattttacagagaggatggtacgtaataatggaattgtagacatacaaaatacactatcattattgctagcatagtatttttttaatgattgacacatggatgaaaaaggaaattcactgaagagttaacgggtggattattgtttggcttacaaaaaa

SEQ ID NO: 2212 - DNA, 816 bp, Avena sativa
gagtcatctgcacgattctatgcagcttcagttgttgtttgctctagaagaacttcaccggaggtctattctttacagaggtgttttcggcagatatcctcatgctcaaccgatcaggacatctgcagatagttgacttcaggtttgcgaagaagctggaaggtgaaaggacttacacaatatgtggcattgctgactctctagctccagagatcgtttttggcaaggggcatgggtttagtgctgactggtgggcacttggagtattgatttatttcatgctgcaatgggacatgccatttggatcttggagggaaagcgagctagagccgttcgctaagattgcaaaggggcgcctagttatgccgtcaacgttcagcgtggaagttgttgaccttctaaccaagctacttgtggtagatgaaaatgcacgccttggaaccacaggagcggacacattaaaaaaacacccttggtttgatggtattgactggaaacaaacagcagctggcacttcaacagtacctcaggaaatctcggaccgcatcgacagctatgtagaaactcttcaggaggacttaactgtctccccttccatgccaagtgaagatcccactgatttgactgctccagaatggatcaaagattggtaatctcggtagctggatgagggctgacagactgcttgctccttaagaaagcttctttgatttttgctaggtatgttcatatcttatgaaaacaagatatccagatgattaaacctagataagttacgatgaatgctcaaggcagaagcatttcattggtgccatc

SEQ ID NO: 2213 - DNA, 600 bp, Avena sativa
ggtgatggtaatgttcatattacaagtaggaaaagacaagtaccctaaccatggcagtgctcattctccgtacccttctggtcaccatgcactcgctgatgacatgtagtgtttattttctgttctactcgaactcctatccgttagtgcattttgaagagcatatggactagagtagctcgcccctttttatctatatataagtgggactccgaaacagtaatttgaagtgtccagagtcaagcattttggccttgcacattctcctgtcgaaatcttcgcatggatctgaaaggatacagatgtgcaatgattagcttgttggagcttctcacactgaacttgtttcgtggtcaagttttgcgtcgtatcggttaggaaagataatagccacagttgttgggagctgtctgcgcccagctccactcttgcgatcgttttgctcagttgtggatcacaaggctgtaggaagctggcgactgaagacaagggttcagatcttcttcgtcttgatgacattttgtggatcaaaagcttgatgtccttgaaatacttgcagctcttcctgcctgtaaaatttgaaacgtttcttttgaactt

SEQ ID NO: 2214 - DNA, 1021 bp, Avena sativa
gcgaagaactgccctcatgagggaggcaatacgtatacgctattcattgctgccctactattacactctgttccaagaggccagtacaactggtgttcctgttatgcgtcctttgtggttggaatttcctgatgacaaggaaacatataataacggtgaggcttttatggttgggccaagcattttagcacaagggatttatgaagagggtcagaaatcagtgtcggtttaccttcctggaaaggagttatggtacgatttgagaaatggatctccatacaagggaggtgtctcacacaagctgcaagtttcagaagatagcataccaagcttccaaagggcaggtacaattgtgccaagaaaggatagattcaggcgcagttctacacagatggtcaacgacccatacaccctggtgatagccctcaatagctcgggttctgcagaaggtgaactttatgtggatgatgggaaaagttacgattatcagcaaggggcattcatccatcggcgatttgtatttgccaacaataagctaacttcgatcaacgttgcccctgataacctgggcaagaaggtattttcgactgagtgtgtgattgaaagaattatagtccttgggttatcatcgggagcaaagaaggctattattgaacctgggaaccaagaagtggaaattgatctgggaccgattagtttaaggagtggttcgaggtctgttgcaccaacagtcaggaggcccaatgttcgtgttgtagatgattggacaataaggatagcatgatatgcagcccattcacatctggagcctgatttctcggttgtttgcagccaggccatagaagtgggcagtgttagaagggttgtttggtctctaagtgttttctgtggacacccaaattttattgttttggtggcatcaaaactgctgcatgtacctggtacgcatgctgtttctactgccatttttgactataagccgaggcataaagtgctgatgtatacttgtagctttaatact

SEQ ID NO: 2215 - DNA, 716 bp, Avena sativa
gttcaagggagcttacactggaacaatacatagctagtagagtggattggttcagtcctactgtatggcctcatatttgcagatattggtgctcaaatgagttcaagcaagaaaggtctagagggcaggcatctcgcttaaaatctctagatgttgctcaaaatcgtggaggttcacggccattcacggaacaaggcagattgggaacaaaggtttggaccagagaaggctaccataatgaacacatttgctgcaatgaaatctggtatgaagaatctagatgaaaatggctgtagtggtgcaatcagcagcgagaaagcacaaaaacgcttgatgcgtattgtgatggtcttaagcaagcacatccagaggattggcaagccattgatttggatgaaagtgtcttgtacaacacctcgggtggcatgccccatgggcgcttatcaattgctactggtgctgtcaagaaagcccacattatctctgctgcacgggcaacaaatctgaagccctcaagttctgttgcttaccgtaatgtcatccaagagaatcaacagttacgatatacaaatgagattctaacaaggaaaactgaaatgcatgaccaaatgtttaggatgatttttgctgagatgggaagagacctaccagaatggttccaacaaggtcaaacccaagctcatactcagaggaacacgcacttggaggattctgct

SEQ ID NO: 2216 - DNA, 710 bp, Avena sativa
cttccttcctattatgaattcaggtggtgctagtatctcgctaacatacattgcatctgaaagaacgattcctggatatggtgggggcatgagttctgctaaagcagctcttgagagtgatacaagagtactcgcttttgaagctggacgcaaagggaacattcgagttaacaccatatctgcaggtcctctgggaagcagagccgcaaaggcaattggattcattgagaagatgatcgagtactcttatgttaatgcaccattggagaaggaacttcgggcagatgaagttggtaacgcagcagcattcctggtgtctcctttggcttctgctatcactggctcgactgtctatgtcgacaacggacttaataccatggctattgcggttgacagccctacggtggcatcataaaagctgttctggtagctagatccactttcctgattcactgcggctcgattcttgaataaagaggtaagttagttagtgccaaaactgagggcagggtaaagagaggaactggtcactgagatgactttaaaagcctgctggtaagctctttggcccatttctgatattgtatctttgaatgcttgtcgttgataccccattcaatgtggctgattagttccttatcaaagtgtgttatacatcggaaatcacattcaagaaataaatcaagtaatgtttgatggtggacaaaaaa

SEQ ID NO: 2217 - DNA, 801 bp, Avena sativa
actcggagactaggcccgcgtcggcgggaggagaggagagggaggagggggagatcgcggacgacgaggactcgtccttgggcccgcgcggcggcggggcggtgagccacccgctggagcacgcgtggaccttctggttcgacaacccgcagggcaagtccaggcagcaggcctggggagcaccatccaccccatccacaccttctccaccgtcgaggacttctggagcctttacaacaatattcatcaccctagcaagttgactgtgggagccgaccttcattgcttcaagaataagattgagccgaaatgggaagatcccatttgtgccaatggcggtaaatggaccatcagttgtggcagaggaaaatctgacacgttgtggttgcatactttgctggcattgattggtgagcaattcgactttggtgatgaaatatgtggagtagttgttagcatccgtcagaagcaggaaagagtagccatctggactaaaaatgctgccaatgaagctgctcagataagcattggcaagcagtggaaggagttcctggaatacaaggactctatcgggttcatcgttcatgaggatgcaaagaaggctgagaaagcccccaagaatcgctacacgacctgaagctcgctgctactggtggcacgtctatcttgggagcacgcaggatttggtttgcttggacggctgctgctagcttgctgtgttgggatgcaggccgtacgttgctatgaattgcttgaaagacatatataatctaacatgtttggtttgtgtggccttgatgt

SEQ ID NO: 2218 - DNA, 675 bp, Avena sativa
cagagcatcgagcgccatcctgacatggccactaaaatcttatcagatctctttggtcacagtggcataacaattgacgccaatttacccagcaagaagattcgagcacatctaagatctttgaagcctggagatgcttgcaaacttctagagaatttagtatatgcatggagatcaagatctggcagcgccgagtttgttttgcggtggatatactgcctattagttattcatggtcgttttatctactcagagaaaccaagaaaactaattagcaaccttgagaagatgtgtgcagaaagatacgcagcaacagaggattttctcaagctttctggtcgtcttcggttgataattactcaggtcaacaaggatgcgcaagatgtatcagtggagaagcaggattcggtcgctgccccatctgatgaagaagaggaagaagttgatgaattggtgtatggcgaagacttgggtttgtcggaaaatagtgatgatgatgctgaatagaagcaccttcgacagtcttgctataccgtattgtagttttgcgcattcttacccatagagtttgtaaaagtaagcaacgccgtaacagaattttgccaacatctggaaggcactttataattgtatcactttcccccaccttttctttacaaaaaaaaacaaaaaaaa

SEQ ID NO: 2219 - DNA, 677 bp, Avena sativa
gtggcatacaagtggggaaggcaacaagctccagagatttcatgttgccatgtcgggtttcgcattcaacagcaccatgctctgggactccaaactgaggtcccatctggcctggaattctatccggcacccggaaatggtggaacagggtttccaaggaaccacgtttgtggagcagctagtggaggatgagagccagatggagggcatacctgctgactgctctcaaataatgaactggcatgtgccatttggatctgagagtctggtctatcctaaaggatggcgagttgcgacgaatctggatgttcttattcctctaaaatagtagtaccaacagctctgttcatcaaagcactaactcgtttgacaggcatttacatagcagttaagccttgaagattgggcttaacgagcacagaggcgtcgagaagcaggtcttgacacaggacggtgttagacaagacgggtgctacatatctcggtccgacttttgggagatattttgtaggatggagaactagttgggcagctcttggctcttcgccatgtaaatgtacatgttgtcgtgatttgtattcatttgttgagttggaaaaggcaaaaggttgcatatataaaaaattcaaatactacctctatctcgaaatagatgtcaatagatttataccaaaaaa

SEQ ID NO: 2220 - DNA, 700 bp, Avena sativa
caaaagttcatggcagtgaggatgatgcccggagcaccttgacatcaaacagatcaatgacagatgacctgacaaggacatgtagatcagagactaactactccaagggcgccagtgagcagggtcgtttcgataccatccaggagcctgaccttcaaccgaattgcttctcacgaacattgaagcttcaaaagaggttcttctcatcagatgcagctcacacaatctgtttcaggattcagccacacaacaaaatgagtttcctgcctaagaaagaattcgatacgtatttctgcgcatacgagccctatgagcagtgtccgagatcaaattcacgagctacttacggttcaagagatgatgacttgtccatcaagacttcagggtttggttcaaatctgctctgctggagggggcctaaacagtcaatctaacagaaacggatgatcaaactagatggatcacaatagcataaattctgccaagtcaaaaaatttgcccgaagatggatataaagacaccctttggcagcaattttcagggaagtcagcatacatgattcagtgtagacaactgaggcattagcactgatgaaacttgtctgtaggctggatttagtccgatgttttagctatgcattatttgaccagagacctgaagaggctgttccagttcttccatgaaagaatcaaatatgcta

SEQ ID NO: 2221 - DNA, 608 bp, Avena sativa
ggtctccgaacctgtatccagaaatccggcctcatctcgacactgatcagcacacatttctccacggcagcccagaagccgatgccccgccctgctgatgtgaacatcaactcggcggtgtaccccggcggccctcctgccccggtgcaggccccgaagctgctcaagtttgttgacaccacagagatgatgcgtgggccacaggacctgccgggctactgggttgtctcaggcgcgaagctgcacatggagaggggggaagatatccctcagagtacgatactcgctcttgacagccatgctgccggacgatgaggaccagctcgatgacgagttttagaacatgggaaaaacaatccattctttttaacgtgcgggtaattgcgaaagcgcaggcagatgaaaggtttatgattttcatttcgtctgcgctctccttgttcggttccgttgtatacacatgcattttgtggtttggaaacatgtagtcgtgcagaatggggttctctgtagttgagagaaaaaaaattgctgttgtggcgtgaacttgagttgactagagtcagatgacagataaaattatttgtatatacaaagtggaacatgat

SEQ ID NO: 2222 - DNA, 841 bp, Avena sativa
gacgtctgcgagcgcagcctcctcgacaccttccgcttctgctccctcggatgcaaggtcagtcaacacgcctcttccttcatgccaagaacctttcttcttcacttcagttcaaagttctttccagcggcattgcgatttttaaactctgttgattgtgcagatcgttggcacatccggcgagtaccgcgggcggaagaagcacgccgccgggcagaagcggaagctgaagaagagcacgggcccggcggcgtcggactcggacgactcgtccaccatcaccagcggcgggagcgacaagagcagcgtggtgcagagcttcaccccgtcaaccccgccggccgccaccgctaacagctaccgctccgccaagcggcgcaagggcatcccgcaccgctcgcccttcggcagcctcatggtggagttctagggcactcccaacaaccggagcggcgccctctcgccggagggcgattcagcggtacacctccactgtagcatacgcatccaaatctacctctctactatagtttggtctgttctgttctacacaaggagccgaagcaagcaataacgagcttcccccgccattgccgtcgcacctgtgcgcttctggacgaggaggccggtgcggcgcaatgcgggatggcatggcaggggtagttactactacttctttcatacagtactaggaacggtgtgtggggtttgtgttccgtcgtctccccggaagggcgggcgggcgggaggtagtagctagtactactactgctaagttttgcaactttttttcattcgtaggtgttcgtagcttgtgtttgatactggagtaccatggtag

SEQ ID NO: 2223 - DNA, 933 bp, Avena sativa
tgccactgcctgccctggatggttgggaaacgtatagctggccatctcacactcaggctgcagcagctggatgtgcgctgtgagactaagacaaaggataatgtgtttgtcactgttgttgcatcaattcagtaccgacctctggctggcaaagaaagtgatgcattctacaaactgaccaacacaaggtcccagatccaagcttatgtttttgatgtgatcagggcaagtgttccaaagctcctcctggacaatgcttttgagcagaagaacgacattgcgaagtctgtggaggatgagctcgagaaggccatgtcagcatatggcttcgagatcgtgcagacactcatcgtcgacattgagccggacgagcatgtcaagcgagcgatgaacgagatcaacgcagctgcaaggatgagggtggccgcgaacgagaaggcggaggcggagaagatcgtgcagatcaagcgcgcggagggcgaggcggaggccaagtacctgtcgggcctgggcatcgcccggcagcggcaggccatcgtggacgggctgagggacagcgtgatcgggttcgcggagaacgtgcccggcacgagcgccaaggacgtgatggacatggtgctcatcacccagtacttcgacacgatgaaggagatcggcgcgtcctccaagtcctcggcggtgttcatcccgcacggccccggcgcggtgagcgacgtcgccgcgcagatccgcgacgggctcctccagggccactccgccgccgctggccggcactagttgggcttcttcgccggcgtgcgtgaacatacatacgacagacggctgatgagatggtggtgtgtggtttgctagctatatatatgccttgcctttaccttattgtaagtagtggacttctctgggaccgtgtgtgtgggttgtggcggcatgttg

SEQ ID NO: 2224 - DNA, 775 bp, Avena sativa
attatcagacttattgagacaggtcccaagatatgccaaaaatatattgagcatcctgcgcttttccaaggaaggaagtttgatcttcggtacattgttctggtccgcagtatatgccctttggatatatttcttactgatgtttttgggtcaggttagcaaacaaccagtacactttggagaaaactagcttttttgagtacgagacccatttcactgtgatgaattatacaggaaagatgaaccatatgaatactccagagttcgtcaaggagtttgagaaggagcaccaagttaaatggctggagatccatgaaaacataaggaatatgataaggcgtgtctttgagtcggcctcggctgttcatcctgagatgcagaacacattctctagggccatttatggcgttgatgttatgcttgataatacattcaagccaaagattttagaggtgacttattgcccagactgcacgagggcatgccagtatgacaccagagcccttgttggaagccagggccccatcagaggcagtgattttttcaacacggtgttcggctgcctctttctcgacgatttgacgaatgtgtcaccactgtaatcatcttgtcaaagcctgttgtaacaccattgttcttgcaccatgatatgtacaagcgggaagctgtaattgacaaccaagagctgttgtacgtttatgcatcatgaacggtgatactctgtatgatcatttgaatgaagcttaatagtttgctgatgttggttgactaaaac

SEQ ID NO: 2225 - DNA, 533 bp, Avena sativa
cattcatgccattacctggagaacctacaccaggatcatttccaaggtcttatgttgagcagcgggtgccgaggcctgggtacggattccagcccccgatgagtaatgacagatcaaaccctggcatgcgggatggttactacggttctcctccatactactccggaggcagcaatgtcatcgatgctccagcaccagtaccagcaccagcaccggcaccggcaccagcaccgacaccgacaccagtagcagaagaaagcccgttccagcgccgctgggttcccccacagccaccgggcgttgccatgccggaggctgctgccgccattcggcagccaaggtcccttccaagacaagaatcacaatcagctgctggtgctgccgatgcttcggggccatctgactctgcagggaatgagcagatggacggtggaacatccggtgttttggatgccgagtcgccgagtagcagtgctgctgctgtaaccatggacggagcagccaatggtgtgaatggtgaagggggccrgagc

SEQ ID NO: 2226 - DNA, 368 bp, Avena sativa
ccaccgaccttgccctctggcctataagaagcctcccgaagccaaaaccctaaatcgtctagcctccagccacgaaaagttccgcagcgccgccgccaccgaaggggagattcgggggacagaaagtctctgttccggcaccctgccgggacggggaagtgcccccggagccatctccatcgatctccaccaccatctccatcaccatttctgattcccatgatgaggagggagtagttctctctcgaggctaagggttctaccggtagctatgtgttcatctctctctatgcatgatcttattgagatcatgagcttgtaatctatagatctaccttgctactcaagtgctttaatagatctctact

SEQ ID NO: 2227 - DNA, 722 bp, Avena sativa
acaagatggtagagagcagacagctatttgagagcctcgcccttcatccaacatttgaacagatggatttccttgtactcctgaccaagtttgatctcctggagcagaagataggcaaatccccactaactgcatgcgactggttcagcgagttcaccccgttggtaagccgcaacctgatcaacggaagcagcagcagaagcacacgcagcagcagcaacaccggcgcgtcgctggcgcagatggccgcacactacataggcacgaagttcaagcggctgttccactcgctcacggagcgcaagctttatgtgtcctacgtgaacgccctggaccaggagtcggtccgctcggcgattcgctatggccgggagatcgtcaagtgggaggaggagaagcctgtgttcaactccagcgagacggtgtacagctgcgacgagcccagctcctactctcactgactacggtgaacctttgcttgcgtatcacgaagacgaagaagaggtgtaaatagttgtgcattttcctctccccggcgatgacgaccttttgttagagctttgcccattttcgtccttttctttcttcttagctgatcatcggcttgtattgtatggtttgtttgttttatttgttcacgagtagaatgaagtgcaagaggcctgcctgatttacgattcttgtatgtattaattatcatctgatttatatggtgagcagat

SEQ ID NO: 2228 - DNA, 528 bp, Avena sativa
tgaagtgacacccggataagcaccaaggatcttcacaggtcagttttcgattgtccttgcttgcaacctctagcacattgggcgcaaactctgatgtagagacctcttttgagtttgttgattctcaacacatagtgtattgcagacagaggcagaggagaagtttagacgctgcgtagaagcatacaacatgttggattgtgctttcaaatccacagctaaatgaccaccagttttattcgagaacaagcgtgcacgggaggagaaaatttcttcttgagaactcatagtgccgatgtggttttaacaccaaaaaagaaagtatttattgttgaagaaagtgcaatagttcatctgcatacatatatctcaagatgagttcctgtatgaacaagaaatagatgaatctagtctttactcttagtttccaatgagtttgatgctctggacaataaatttttgaactgggttagtggcagccaatgtacaatgttactcataatagacggccaataaagcttggttgtt

SEQ ID NO: 2229 - DNA, 588 bp, Avena sativa
agcagcaaatggcgaggaatgtgaaaacgaatgagctgcttggtaagttgacaaaagcgcagagtgaggatgatttaaggcctttccttgatatcatggcgcagctgtttggaaaggagaatgcttcctctgcgggaacatcaaacaagctaagcaaccaagactcaactgcgattgtaccctcgtattcctttccagagctcacgactaggctggaggttgatgagaacatggtgtctaagattaatgagttatcttccttgagtcatgtcgttcagctataatctggaatcttgactggccctacgcctcgaaaccccagaggcatgtcatggatccaaaatctggactggattcttgctgtctagtaacctcagaatgtaacttgtactagtatctagtgttcccttactgctttgtctaatgtaatctagtgttggcaagcaagtcaaaaaccatgagatcagtgcagtgcagtgcagcgtttttgtttctcttctctggaactattgtaagccaaatcaggagggaacaatcagatgccatcttgtattttcattacagaaatataatactccctcccaaaaa

SEQ ID NO: 2230 - DNA, 659 bp, Avena sativa
cccgggatagatgcttggtagttgatggtatatcagtttcatcttccgcatggttgatgtcctttgatattgttttccagctgcttgacgagctgttggagattgctcagagttactcaccaaaggacttcagaaacatggaggtctccctcttgcacgccgtaaaactgttatgcaaggtgttcttgcagtcactaaaagacctgtccgcacagagcagttttggtaagctgtggatggaagtcctcgacatgatagagaagttcatgaaagtcaagctgagagggaggaggactgagaagctacacgaggcgatccccgagctactcaagaacatactgctggtgatgaaagcagatggtatcctgtcaaatacaagcgccagcggggagaatactctgtgggaagcaacatggcttcaagttaacaagatcgtgccgtccctgcagttagaagtcttccctcccaacgaaggcgattccgcaacgagaggccagcagagtagtccattacaggagggccaaactgctgagcaatccgccacagtacaattggtcgccgcctgaccaagataccgagctgaaaatcggacctgacaagtgacaaggctggcgacctgactttcagccttttttggctagagatatatacagaatgca

SEQ ID NO: 2231 - DNA, 497 bp, Avena sativa
aagacatgactagtacaaagagcaacacttatggaatggttaataaaattgccaacggatgggatattcttctgccttctcgtcggtaagcaagaaggaaggcgagcgatgtttgttcatgttgcttatataactgttgctattaattaacgggcgtccatccatctttggttggacggatgtgtagcgtgtctctatagaactttgtagctattatctttcgctgcaattgcgtcaccccaggtcgttccctttagatgcattaagacttgttgagtacccctaaggactcacacgataaatatttgatttagatggacatgtatactcctaggaaggctactgggtcgaagagacagatgatggtggcaacgactgtccggtgtagagattccggggatagagatccatgagagttgtggctaggatgcttattttcagggcattttatgccaatttgcttcttatctgtactcggatcatgttttccgcttccg

SEQ ID NO: 2232 - DNA, 615 bp, Avena sativa
cgaaactatgctggcagagagatctagctctgcatgggttctgaaggcaattgaagagatgaagaattacgcaacggctttgatacaaaattcccctcaaggtgactattaccaaaaggcactggagtgctttgttgctctgcggaaggcctgcataatcgaacaggagccgaacgagttcaaccagtttgtgacgacgctttacaagaggttgaagaatgtggaagatgttgccaagttctttcagattcttgcatccaagaatgttttacttataagcaaagaagaagcgtccgacagcgatgtgaccgaagagatggcaagaagcttcttcttgaaaaccgaagagtcctctcagtagcagctgccgtggactctgggacgggttttaacagaattgggtgagaacattttgtagtttgaaatcctcccgcaccaccagcatggacgccggcgaggaaataggagtagagcagggacacctcgtgtgattacctcggaatgttcgaccggattcagagacccaagctgctgaggggattgactggcattggatctaacacttgtaaattgtcatgttcatgatttcttatctattaagacatattcgtaaaa

SEQ ID NO: 2233 - DNA, 768 bp, Avena sativa
tgagatgggatctgcctattcccagcatgctctttgcgttttcttcaagggactcccaagaggtaaggggagtggttccatcgatttgtcacacgagttgttgtttgccagtacatctgccagatctcttggtaaacttattaggtcagatatcagcagtcgtgatggatttgggaacatttcccacatggaaaatccaacaaggtgtatttctaaggggagggagcaaataggacatctcgctgaaacactgcttccagtagtcccttccaagctatctctttcactgagaggatctgcttttgttgattatttaacttcgacgtgtcagatatctcagttagaaaactcacgactttctgaaaataaagctggaaacaaccaaagaaggtgtcgtcggccaagacattacttgagttctggtgcactttcactatcacctgagggcatcgaactgttagcacaaagtggccgttttggtgacagacgccagaaggttatgaggcgattgactagatacaatacaagttattattctggtttggataagaagcggcagcgtttttttgctgtaggttgattggagttggccgaggtggacccatttttattttcacaaatcatatcagtagtagcccaatggtaatttctccattttgggcgaagctgacaatgtagatgtaaatgtagtcaatgttgtcatcctaatttatagttcctgtaactttctagttgatgtgattctaacagtaaacaaacatatacatt

SEQ ID NO: 2234 - DNA, 831 bp, Avena sativa
tctgtaccctcctgctcctaggtctcctaatctgttgcatcctgtgccattcttatccaccatatagtcaaccacagatggttccaaacagcacattcccatgaacactactatatttcgccctaaccattatggatggcaaccttatatgagcccagctacacctgagtttgtgtcaggaccagcatggtcaaacagtcatccagtcgcttacaccctgagcccacatgttgccgacactatttctcaatctttagcagataaacatgttctatctgatgcagctgttgttagtataggaccttcactggacagcaatatgattgcagtaaaggaggaaatgaaggtccctgtggtggtagacagtggaagtttgatcagcaacaaaattttggcagaggaacatgataaagagttaaaggatgctgctaaaaatgaacttaatcctgacatgccaggagacagcacacctgatattggtggaacgaagctgggaagcaacatgaagaacgaagatgaaggtagttttaggattcttttaaaggggaaaagcaggagaaaacaaactctcaggatcccgataagtttgcttaacaagacatatagctcgcgttctttcaagcttgactacaacagagtagtcagagagaatgacatcttcatgccatcgagtgtctcttttgctgaagtggtttcttctggcaactgaggaatattccaccaaaaagtcgaatattgaaatttgatactcttatttttgtctgagcatttggaaggcagcaacaatgctccttcagtgttccagaactgaaattcatcaatccaagctac

SEQ ID NO: 2235 - DNA, 925 bp, Avena sativa
  modified_base (813)..(813): a, c, t, g, unknown or other
  modified_base (827)..(827): a, c, t, g, unknown or other
caagatgggaacttgaagaaccacgtggatcttttgcataatgcttgacattgtagctttggagaagggtgctgatgtagctggtggaagaggatacttcttgaagggtgacggtgtcctcctgaaccaggcgttgataaatttcgggctagcattcctgagaatacgaggcttcacaccaatgcaaactccgtttttcatgagaaaggaaattatgggcaaatgtgcccagttggcccaatttgacgaggagctctacaaggtaacaggtgacggtgaggataagtatcttatagctacatctgagcaaccgctatgtgcttatcatctaggtgatcgaatttatcctgctgatttacctatcagatattctgggttttccacctgcttccggaaggaagctggttcacatggaagggacacagctggcatcttcagagtccaccagtttgaaaagatcgaacagttctgtgccacaagccccaatgacaatgattcctgggagatgcatgaggagatgataaaaaattcagaagatttttataaggagattggcctaccatatcaagtagtttcgattgtctctggtgctcttaatgatgctgcagctaaaaagtatgatttggaagcatggttccctgcatcaaaaaccttcagagaattggtgtcctgttcaaattgcacagattatcaggcaaggagacttggaataggctatggccagaaaaagatgatgagcaatccaagcagtttgttcacatgttgaattctaccctgactgcaactgagaggaccctttgctgtattctgganaactatcagaaggnggatggtgttgaagtgccaaaggcattgcaaccattcatgtgtggaatagatttccttcctttcaagcggcctcttgatagcaaacaagctagtgacg

SEQ ID NO: 2236 - DNA, 700 bp, Avena sativa
cctctcccctccccccacatcttaaaccaatccgacgctagaatccttcgcgaattcgccgctccgtcgattcaatcgccgccgtcgctgctcccgccgggatcgacgatgtcgtacgcctacctcttcaagtacatcatcatcggcgacacaggcgtggggaagtcgtgcctgctgctgcagttcaccgacaagaggttccagcccgtgcacgacctcaccatcggcgtcgagttcggcgcccgcatgatcaccatcgacagcaagcccatcaagctccagatttgggacacggctggccaggaatcatttagatctataactagatcatactacagaggggctgctggtgcccttttggtttatgatatcaccaggagggaaacttttaaccatctggcaagctggctagaagatgcaagacagcatgcaaatgccaatatgacggtgatgctaatcggaaacaaatgtgatctgtctcatagacgcgctgtcagttatgaggaaggtgaacagtttgccaaggagaatggtctggtctttatggaggcatctgcaaaacagcacaaatgttgaggaggcattcattaagaccgcaggacaatatacaagaaatccaagatggtgttttgatgtgtctatgagtcctacggatcaagtggctacgcagtccccaacgcatccggaggtggtgctggct

SEQ ID NO: 2237 - DNA, 913 bp, Avena sativa
tcattcagaaccatttgctgcaggtcttctgtttggtagccatggaaaagcccgtcactcttagtcctgagcacataagagatagaaaagtcaaggttctgcaatcagtggactctataaagcatgacgaggtagtccttgggcaatatgatggctacaaggatgatcctacagtgccaaacgaatccaacacgcctacatttgcatccgttgtactgagggtacacaatgagagatgggaaggagttcctttcatccttaaggctggtaaagcactgggctctaggaaagcagagatacgtgtgcagttcaaggatgctccgggtgatatttttagatgcaagaaacaaggaaggaacgaatttgttatacgccttcagccattggaatccatgtatatgaaattaactgtaaagaaaccagggctagaaatggcgacggaacaaagtgaactggatctatcctacgggcaacggtaccaagatacgaagatcccagaagcatatgagcgcctgatcttggacacgataagaggtgaccagcagcattttgttcgccgggatgagctgaaggctgcctgggagatcttcactcctttgttgcacgacatcgatgccggcaagctgaaggccctgccataccaacccggaacccggggtcctccggaggccgatgagctgagcaagaggatggggtatatgcagactcttggctatgtttgggtaccaccaacccttgcaaaattttagccgttcaagcacagaagcattctgggtatacagacaaatacttcgggggaaatcacttgggcatgtgtgtaatatggaagggcatttttttacatgtatggaagagcatttctaacaagcagtttctgcttgtgaaaacagtgtaccattcatcacgattataa

SEQ ID NO: 2238 - DNA, 530 bp, Avena sativa
gagttacacatgtgatctgtactactgggactacagcatttccatcaaagcgctgggaaggggataacacacctgaacatgtagattgggatggcgtccgaaattttgttagtgccttgccacagacaatcaagagactgattctggtgtcatctattggtgtcacaaaatacaacgaaataccatggagtatcatgaacctgtttggtgtgctcaagtacaagaagatggcagaagactttgtccgcaattcaggcatacctttcaccattatcaggccagggagattaactgatgggccctacacttcctatgatcttaacactcttcttaaggctacagctggagaaagacgagcagttgagataggccaaggcgacaagcttgtgggagaagctagcagattggtggtggcagaagcgtgtatccaagctttggatattgaatctacccaaggacaggcatatgagattagttcggtgaaggcgaaggactggaatgaccaggagaaatggaaggagttattgcag

SEQ ID NO: 2239 - DNA, 511 bp, Avena sativa
gctcatgccccgtctgccgccacgagctgcccaccgacgacaccgactacgacagccaccgccaggcagctgcctctgccgatgctgccgctgcttccaccgcggcgccggcatctccgggaggcacaccttcgcccagggtcatggagagaaggttcaggatatcgctgccttggcctctcagggctgccttaggtttaaacaccgagaccagtgagcaggatgctgatggttctggggacaacaacgatgcccatcgctcctacgatgatctcgactgaagccaccgcaacaaagaggggaacagagggatgacgagggcgggtttgattggaaggatgagaagaagatgatttgtggagaagtagacctgaaaagaagcaaggaagatggacctttttgatggcgctgttgtctgaccctctttgtgtagtagttgtgtgtgtagagaagacccagagattctattctttgttgcaccttcctgactggaagctcctagtatatgtta

SEQ ID NO: 2240 - DNA, 454 bp, Avena sativa
cagctatgagagaagctaaaatgtcaaagaaaagacgagcaccagaatttgcttcaaatagtaaagccatgaataacgctgtggacatgttcaagtatttcggcagcaaaggtagcgtcatccggaaaaggaaggagtggtacctgtacgcgcctgttgttgatgtcatgcctagcgaggatgctgtagcttcgcaggagttttaaaccctaggtcaaaagaagagactagcggagagaaatgaaggggcttcccttcagtctctttgaccccctagggccgcccatgacgtagcggcaactgcaaactctgaggaggaattttgctgagctgactggaagaagcccctttctgcctggcaatgagtcctaggtaggacccgtccctgcacgttgtacaccatttgggcagtgtgagagcttgaggtagaatagattagctctgtagatgtgtt

SEQ ID NO: 2241 - DNA, 538 bp, Avena sativa
accaatttgtgaagtttgtgggacagcgaaacctaaaattgcaaaagccaagtacacaacttggtcctgtaaattctgtactctagagaacatcgttgagcttgagaaatgttcggcatgtgatcaatggagatactcatatggagcacctgtagccacatatggtccaagctatgattgacattcagtgaaggctacaacaatacggattgcattcttggtcaggcaccagctgcaatgtctataaatttccttatcagcagcagttgcctctgtcaccacggcatctcaagtctactgaattgcagaaaaagaacatcaggcgccaaaagctttgctacttactactatccaggtagcctgactacaatctagagcattctgcttgcggatcactggagctcccggttcccttttggtagcatcgagtcatgggcactgtggagtttgtcacgctgtatgtgttggtgtctttcactctcctaactcgcttttgtgtaagaatgccgacaatatatcttcaatatgaaatgctgtg

SEQ ID NO: 2242 - DNA, 594 bp, Avena sativa
gatgaaaagcagaaaatgcgtgtagttaaggaaaagaatagtgtgctcacctgtgtggctgttttgttttgcttgcttcatccaggagcacaagatactgaagcagatgctgggaggcctgcttcaccagaacggcatcctgaagcgagccttcctcatccagcacaaccggctcaaggagtaccaggagatggtgcaggagcggtctcagttcaaggagatagtcgacaagtaccagcagcagataaaggcgctagaggataggaactatgtcctctcgcttcatcttgcgcagtcaaaccaacagaacaacatatcctggcggagcaacccggacgtcttctaggccccgaaactcatgctgatttcgatctagtataatgcaagagatcctgaagctgcatcagccaacggaaagatgtgatacgcaggaacgtctcctgtacaatttatcgtggttcagttatgtctgtcttgatcattcaaatacaatctttgttgtcatacttgtcatatatagttgagagaaactccggtgaacctttttgtagctatatgctgcattgtttccagcctcgaatgggctatttgctc

SEQ ID NO: 2243 - DNA, 595 bp, Avena sativa
gcaggccaataacctgctggaggaccagagccaggtggagtccggctcgctctccatggccgaccccggaccgcagggcaccttcgtcggcgtctatgacgggcatggcggcccggagacgtcccgcttcatcaacgacaacatgttccaccatctcaagagatttgcatctgaacacaagtgcatgtcagcagacgtgatccggaaagccttccaagcaaccgaggatggcttcctttctgtagtcaccaaggaatgggctaggaagccccagattgcagcagtaggctcttgctgcctagttggcgtaatctgcgcaggcaatctctatatcgcgaatgccggcgactcgcgagcggttctcggaaggattgtcaaggcgaccggtgaggttgtggcgatgcagttatcggcggagcacaacgtgtgctacgaggaagttaggcaggagctacagtcatcacatcctgatgatccacaaatcgtggttctaaagcacaacgtttggcgtgtgaagggtctaatccaggtacccaagaattctgtactgttagatgcgtaagatcaagtaactagcctgtcactggagatttag

SEQ ID NO: 2244 - DNA, 587 bp, Avena sativa
ttttttttttttttttttagcgcaagccatcacctgaatgctcaggtttcaagctaaggacccttaaagagtattcaagattcttattacaaagcatacagtacacacatacatggtacttgaacaaacatagagcagcacagtatcacatgcaaatagcagctggcggattattactattctgtttacataattgcaacgacaagaggcaacacgccaacattataagcattttagcacgctgttcacactagcttcagcagtagaacatgacgttcttcacactatccttaagagctggaagaggcctaacagctgcgccgccgggggcccgagtactgcgtgacgtcgaggaaccagacaccgggccacgtcctccaggtccactcgtcacagagccgctgtcagaggactctggctccatgtagaaacgggcacgaaaggcggccagatgagcatagtatgcaggcggaacaatcgacaccgaacgagtgcacctcgcataggtgtagcagaggttgttggtaagggtctgcaatccatcagccgtgaagttgttttcatcccacaagacgtgataatgaatc

SEQ ID NO: 2245 - DNA, 875 bp, Avena sativa
gcccagtgtcttggaagatggaaatatcagtgctggaaactcagaggatatggtgtctaaatgtcttttagctgcactaccacctgaaaaggctaattcctgctcagatattgctggtatgttgcaaagtgttgaacccttaagttgtcaaagtacccctgtggcttcattgaagaacacattgagtcagaatgcagtaccaaatgaagagacatcaactccagttcattcagatgcgcactctctggaacaaactgtaggcccagcggagaagcaaaaatctgcacagaaactgttgagggcccctactatgtcgccaaggaccagaagtcctaatttatatgcacatcatgctccgtttactcgtgcgagggcccactcattatctatttcaacacctgaatctctcaaaatgaaaagaaccaaatcaggccgagtggtagtaccagcattggattcaggaagcgaaaggattgtctataacatcgatggtatgatttcaggcatatctcctgtgcttcaatcacctctcaaagggaatcttgcgaggaagagaaagagaaaggctatctgagcaagttctggacacacacttgtttctgttcgttcagaagatgctgatacccggggacaacagcattctgagaagggctctctgagactcctgggcttggtgctgttcgttcagaacacgctaacacttggggaccgtgacatttctctgatgtacatggagtctataatatctggactgtcgctgcagtgtatgtgtatgtatgcaggagcttaattggcaaccagaccagatagatagcttttcgtagctttgtttgctctatgtccgacacctattttaacaagtatgctgcgataca

SEQ ID NO: 2246 - DNA, 540 bp, Avena sativa
ccagctcctactcactgagcaagactgggaggcgcggaagaaacaaccgcggggaggcggaacaagcggcaaacgggatggccccggcaatggccgaaagggcgggcaacctcaacagcaggccctgccaacacgaggtcccggcaacgacatcggcagggacaaatgccggtactgcgggaaaaagggccactgggcccgttaatgccgcaagaagcagcgggatgaggcggcggtgacggcggcaccatcggccgctgccaatcttgtccaggccgaggaagacgaatgcctgctggctcgtggttgatgtagagctcgttgggaaccccaagaggaaggtatgatgagcacagcagcaagttttccctcagttatgagaccaaggtttaaatcaaaaccagtaggagcaaggaaacaccccaaaggtgttactagctgagctttggcagggcgcactaccggtgctagtagcaacgtggagacttgcacaacacaaccacagaactttgtccccaacttgcgatgaggttgtgaatc

SEQ ID NO: 2247 - DNA, 641 bp, Avena sativa
gctgaagttcgtggtttccaacacgatggatctcttcaactacaagcaaggagtcaaaaatatggaaagctcaagaggggtcagttgctcacagtacctgcatatttggtaaaacggcggaagcagcatttccatcacctggagcagtatgatgtcgacttgatccttggctgcaacggtttcatctgggtcggcgagcatgtggtggtgcgtgaaattactaatccgaacgaagagcaagagaagccgagcgctgaagtggagacttttacctcaatggaaactagaaaacatatctgcaggctcgccaatgccgtgcgtgtgctctcagccctaggattcactctgaccatcgagttggtgattcagaccgccgaagcaagcctatcatcaaatgtcgagataaacgacatgcttggagctgagttttatgtccagacagcagagagggaggctaagcggcgagctgaccccttgggaaagaagggtggggcgaggtaaatcctgctgcccctgcctgcctgcctgcctgatttgcagagcaactgtgccttacctgtacgagacttgtaaacgaaaatagtgacaatcagtgccgcctagtctgaaaatatagagatgcaacgattttgagacaatca

SEQ ID NO: 2248 - DNA, 327 bp, Avena sativa
agagtgaatcgtgtgtgcagattctttaattcttttgtcagcaatttgcagtttgtaaagcatcattggtgacgttcatatggcaggagggatgcctgcaagttcctagtataatttttagttctccttggtatatcacttccatacggcatggttcgatactagtacatgtatgtacatagctagcttaactgccgttcttcctgttcttctgtgaattatagctcattgttcatagataccccaactcgatcctttatcgtgtatacaactgtacattgtatattaaaatttgcaagactagtttaatttgttgcttcaaaaaaa

SEQ ID NO: 2249 - DNA, 459 bp, Avena sativa
cttttaaatccaatttgaaccaaaagggaaattttgaatgccattgcatgcaggacttcagtttgtgatattgatgataatcctctgcatttccagtaagccatgctaccgaagatttagctttcaaaagaagatttaaagaggttgcacatgttcaatgtgagactaaactttcatggtacatcaatgatacaatagttaggactttgttctttctctaaaaatggagccaccgcccacggggggatgcaggcgtgcaacgtggtggtcggcgcttcccttctctgcctcatcttgatctgggacctgcagttttctccctcctctctctcttgatcccccttcttacacttattgatctattgtgtaggrttgtaatttatctctatttttgatatatggagcctaacttgaacctcgagaagactgtgttgtcgaacaagagtaagtgatgmtaaa

SEQ ID NO: 2250 - DNA, 926 bp, Avena sativa
taagcaagatatagagaatgagctgaaggagtttcttggagtcacaaagatcatttggatacctcagggactttatggtgatgaggatacaaatgggcatgttgacagtctatgctgtttcattagacctggtgtggtcctcttggcatggactgatgatgagaacgacccacagtacgagatatcggttaaggcactgtcaacactcactcaggccgtcgatgcgaaagggcggcaaatagaggtggtaaagatcaacttaccagggcctctatatgtcacaaaggaagagggggatggtgttgatgcaacggggcatgctgtagcaagggaaccaggcaagagactgcctgcctcatacgtgaacttctacccgacgaatggcgggattatagcgcctgctttcggcgataagcagcgggacgacgaagcgcgtgaggttctccagaaggcatttcctgatcatgaggttgtgatggtggaaggcggcagagagatcgtgctgggaggtggaaacatacactgcatcacgcagcagcagccagcgcgtccgtcatagttaagaacgaggaacggccaggagaggcggctgtcaaacccagtgcgcctcacgacggtgagaccacaggagagaagacggttccgcggaaggcgtcacctgaagagagtaacggaacgggtgggaggagtgcgttgggtgtgccgtgtggtgaaccgaggtggtcaggctaggctagccagtgtaagtacgatgaattacgagctaggacgatggacgagctccaaatggagttttcaattgtggcgcatgtttttcgccaatctactttcgcggctttaacttcgctgcagaatatagaaaatgaattrgtaaaagcacacaaattgatatgacatttcgtgttcaaatcaaaatttccgcatat

SEQ ID NO: 2251 - DNA, 638 bp, Avena sativa
ggcgatcgttggcgaagctctgcgtcgagccctcatggtggtggctgggcgttggtggcggatcgagcgaggccatcttcaataagcggtgtaagcttctcctctggcgctggagcacgaagcttcttcttccccttctgactgtccatggtggagtggaggaaggtgggtggatgctggcgttctatagtggtggaggaggttggggtgtgtgtgatactgcaaattcctggagtatcatctcgggagcacaagtttggctaccgaatcctgttgctaacggacaacacctccagggcctggtgccgacgacgcgccaggtgatcttcaacctccagtggaggcccttttctggtctcgcggcgatgctccttttcccctcggcgtcatgtggcttcgatggcgctcgtggtgtagctcgtggcttgaggccggatctcatcgccggtggtggtggacccgatcgcgttttctattatctttctagggtctggtttgcatattgtaaggacctatattgtattgttgtagctttgacaatcttttctataatttgtacccaccgtttatttaatggcagtatccaggcctttctgggccttttccctgttcaaaaaaaaaaaagttaaattaatcgc

SEQ ID NO: 2252 - DNA, 750 bp, Avena sativa
caagatttacaggattggtctggacagcgccgaattattagagtaatgccaaacactccatcggctgttggacaagcagcatcagtgatgtgtctgggagagaaggctactgagaaagatgaagaccgtgtaaaaagcttatttagtgcgattggaaaagtttggacagccgaagagaaatattttgatgctgtaactggtttgagtggtagtggtccagcgtacattttcttagcaatagaggccatggctgatggtggagttgctgctgggcttcctcgggatcttgctcttggtcttgcagctcagacagtgcttggcgctgcaaccatggtaagcgagacaggtaaacatccaggacaactgaaggatcaggtcacttcccctgcaggaactaccatagctggggttcatgagctcgagaagggttctttccgtgggacactgataaatgctgtcgttgctgccacaactagatgccgagagctctcaaaaaattagttatcttattatgctggtagcagatattaggctggctacaattccataataaaatggtgaagagacgtttttatgagatattttaatctcagactccaaagaagttctcaatgtattttccggtctctctggatatcttgttggagttggtagcatgagatccatattgttgttcagagtgatatttcattccgaaaacaatgttacagtcattattttgttgggctctttgcgactgaagtatgatgc

SEQ ID NO: 2253 - DNA, 691 bp, Avena sativa
ggcaacaagcccaggagcgaggaggagtggcgagccgtcctctcccccgagcagttccgcgtcctccgtcagaagggcaccgagttgcctggaacaggtgagtataacaagttctatggtggtggggtgtacaactgtgctggctgtggaacgcccctgtacaagtccaccactaaatttgactccggctgtggctggccagccttcttcgaaggacttcctggagctataacccggacggccgaccctgatggtaggagggttgagatcacatgcactgcttgcggcgggcatttgggccatgtcttcaagggagaaggcttcaagacgcccactgacgagcgccactgcgtgaacagcgtttcgatcaagttcactcctgcctcctgaaccttatttccgaagtcatttggatgtactcccaaggtcttaagctgtcggaacaaaaacacaataataatgattatggtcctagaatccccttttcatgaacttccttaatcagaaactctggaaagtggatacgcaatgtggatagggtcctgcgaaaacatctgcgtgactgtaagttacatcgccgacatgtacatgtgcatgttccaactgtaagttatgactgaaagctttctgcatttcatatgaaatgctttactggtttatgtatctgcaaatggcgtcttagctaactaaa

SEQ ID NO: 2254 - DNA, 793 bp, Avena sativa
ccttggttgttggaaaattcctgcaagtttttatgctgaagcatttaaagttgctgatgtttcaccttcacgaggatatgcacaatattctctcattggcttcctttttgaaggctgcccctctcgttgaaaaatttgagattgatttcaatatctttggcctaataaacgacttggagaccgattcgcttaggagccttccgagttgtccatataactatctaagggacgtgtgcattactggatatcaaggtgacataggccagctcgaacttgttgtgcatatcgtgcaaaatgctcccgcgctggaggttttgactatagacagaacaacaagaagaggtgcccatgtgaatcgacactccggagagaggcctggtatcgctgttagaagacaccttgaaggcaaaaatcttacccacaacgaaacttgaaattatctaatatccctttcgtagagggacaactgcaggatgtgcagtgcagtggccttgcatcatgtcaagagggcagctcgtgtctttatgccgtataactgattgtgcggttcatgttattacttttttcccctagaaaatattcagttcatgttctgaaaaacaagatatctatctgggcagtaaggtgcttgtactcatacattgtcatgggagcttagcaagtttaatccagtgtcatatgggctccagattggtatcagacatattgcagaaggcttgaggttggataccaatccagtgtcatatgggctccagattggtaatacagacatattgcagaaggcttgaggttg

SEQ ID NO: 2255 - DNA, 771 bp, Avena sativa
aatcaaagtcgggcaaagtcggcagaggtgtacttaatgtgggtttgccagcatatgttattcttaatgcactcctacggtctgcgaaagcgaactctgacggcctaattctaagcgatggctgtgaaataacatctgacaacaggccgaagagtacaatattcgattggttcttcgaccctctgatggtgatcaaagatcaaatcaaagccagtaattttacagaagaggaggaagtgtaccttcaaaaccgcgtgctgttgaccagcgacccaaagcgcaaggcaactcttccacgtttgccatcgctaaacgagagaaaacaggcagaaatagacgcatttgctcggagattgcaagggatcacaaagtcgatatcgaggtacccgacatccaagcgtcgtttcgatgacctggtcaaagcactctcggcggagctcgagagggcgatgggtggcggcaaccgatctgtcagtggatcacaggttaaaggggtgagcagcggtgtcgttcgattgcttagccagagctcgatggagagaccaacaggcatcgaaggtgatgatctagaggagcaacttacaagagatgctcctggtgcataatatttctgaaaagaagtggagagaagattgtctatatgtattttcctaagctattttcactaactttgaacagagagttgatactgatatatgagcagtatgttgcaaacttgcattatactgatatatgagatttatttatttattctccgaagtaagcgagaca

SEQ ID NO: 2256 - DNA, 448 bp, Avena sativa
ctcgccttctccttcgacgccgacgcccccggaagcataactgtttacttctttgcacaagaagatgatgactctgtcctgaaggttacaaaggaaaattttctccaacctgtgagcgtgacttttaaggaaggcaaaaggtcaggagttcaagcaaccaagtggaacaggaattgacctctcaatgtttgaggaatctgagctcactaaggttggggaggatggtgtatttcctgtcgcattcaaagtggaaatggatgtgtcaagcaaccatgaattagaaaggggacaggacgcagaagtctcgaagtcgttggctaaatttgctgtattcgtgaagagagacaacgctgaatatgggattcaagttgtgcagcagatattgtgggtgaatggaactagatacgtcttgcaggagatatacggtattgggaacaggaacacagct

SEQ ID NO: 2257 - DNA, 615 bp, Avena sativa
ccgcaacaccagcgcacgtggcgccaagaagatggggttcacggggatgccccccatcggctgcgtgccctcgcagcgcaccatcggtgggccccaacgccgctgcgaggcccgccgcaactacgcctcgctcatgtacaacaaggccctacaggagctcatcggccggctaaacgccgaccccggattccacacccatgttgtctacttcaacatctacgacatcattgaggagctcgccatgcatggggaacgctgggggttcacggagatgacgcgcgggtgctgcgggtccgggctcatcgaggtgacacagctgtgcaacacccagtacatgggggtgtgcgatgacgtggacaagcatgtgttcttcgacagctaccaccccacacagagggcgtatgaggtcatagtcgaccacatcttcaagtactacgtgccactcatgcatctctgatcaatccatttatttgttcttgttagtaatttggttatggacttgtggtgtactatccgagatgctattgtaccttctgtggaacacaatgatactacttcttccgtctattaattagctataataatgtggatttgagaaatggtgtgaccaaaaaa

SEQ ID NO: 2258 - DNA, 741 bp, Avena sativa
attttcacacctactccatcctctggaaccccaagcacatcatcttgatggtggacgacatgccgatcagggacttcaggaacctggaggggaaggggatcgccttccccaagaaccagcccatgcggctctactccagcctgtggaacgccgacgactgggcgacccagggtggccgcgtcaagacggactggtcccacgcccccttctccgcctcctaccgcggcttcaaggccgacgcctgcgtggtcgtcgcgggcggccggacgcgctgcggcgccaccgtcggcgaggaggtcgccccgggcacaggcgctcccgcggtggccggcgagtggtacaaccaggagctggacctgacgaggcagcagcggatgcggtgggtgcagagcaactacatgatctacaactactgcaccgaccccaagcgtgtcgcccagggcaccgtccccgccgagtgctctatgtagaccgtggcgtcgatcgagcaaatcaatggaccgtgtgtatatgtcgattcccggagcaagacggacggccggcgatagggaagatggggccgggggcttctgtataaatgtcggaataaattaggacgggaaatgtgtaatgtaatgtagccaggcccgtacgtgtgctgtgtaatctgtgccctcttgttgttcaccatcggcattgtgtgctctctgttctacgttgcaacggcgtaaatattttgcaaccacgattcacgatcgaaaa

SEQ ID NO: 2259 - DNA, 497 bp, Avena sativa
ccaatggaagctcattggttgtcatgtcaaaaggaactccatatacacagcagtcatacaaagtcagtgagtcttttccttataagtggattaataaaaagtggaaagaaggttttcatgtaacatctatgggtactgctggtaatcgttggggagttgtgatgtcgaggaacgcaggctactctgaccaggttgtagtttggattttctgtatccaagtgaaggacttcacaggcgatgggagactggttacagaataacttcatccgcaggcacacctgaccaagctgcttttatcctgagcataccaaagaggaagcctctggacgagacccaggaaaccctccgaacttctgccttccccagcaaccatgtgaaggaaaaatgggctaagaacctgtacatcgcctcaatctgctatgggcgaaccgcgtgctgacaggcagcggtcagctcgtcttcgagctccagggtgaagtcacccaccgagttaccag

SEQ ID NO: 2260 - DNA, 895 bp, Avena sativa
tgcacaagtatatcctaaacgtagaccagtttctccatcaagagtagctgatccaagaccaggacttgctacctgtgacacaggacgtttttcagaatttgcatgtgccggtggcgttaatggagtcttttctgaggcttgctgaggcaaatactgcaaataatttggaaacatgtgggattcttgctggttacctgaaaaagagaactttttatgtgacgacactgataattcctaagcagacatcaacgtccgattcatgtcaagctacaaatgaagaagaaatatttgaagttcaggacaaaagctcacttttcactcttggctggattcatacacatccgacacagacctgcttcctatcttccattgatcttcataatcattattcgtatcaggtcatgcttcccgaagcaattgcaattgttatggcgcctacggatacaacaaggaaacatggcatattccacctcacagatccaggtggcatgggggtgatccacgattgccaggagagtggattccatcctcacgaggagcctctagatggtacttcaatctacgagcattgctctcatgtgtacatgaatcccaatgtgaagtttgatatggtcgacctccggtcgaggtgaggggcccgactagtaaaatttggcatttatatctcatggagatacaaatagcaaattattttactgtctaaaagaaacagggcgcatgatgtaacagtttgagtgtagctatgtggagccacatttctgtgtgtatatctctctatattaggtaggaaagtggggcttgccgtggcggcaggcaagcagatataaaaacagacattatggaaaaacttaaatttcagaagtattcaaagttcaatggaaatagcgtgcaacca

SEQ ID NO: 2261 - DNA, 534 bp, Avena sativa
tctatgatgaaattgaggaagcctattctgaaacaaggatattttcttatgaactctaaaggagaaatattattggaacaaaatggtgtcgttaggtccaactgcatagattgcctggaccgcacaaatgtgacacagagtttccttgcaagaaaatctttggactcacagctgcagcgaatgggggcattgccatcagctgaaagtatttctcaatccaatagcattaatgataaatttaaaaaattgtgggttcagcatggggatgagctaagccttgaatatgcgggttcttatgctttgaaaggagaccttgtgagatatggaaggcagacattgcctggattaattaaagatggtatgagcgctctttcacggtattatttgaacaattttcatgacggagtgcgacaagatgctctggatctgatcagcggctactacacggtcagcaaagcagctcttctcctttcaataatcggatttgaccgtatcttcctgtggcgtcagcaatcatagttggtgggattactg

SEQ ID NO: 2262 - DNA, 499 bp, Avena sativa
cacctttcaggtatatatggcatctttggttggtcgcaagtataaggtccttacgcggtatggaaacaatgtgcaagaggtgatggtggagacatcattggacaaagaagggttgaaagaggcgattttaatgtgtacgaatagggtgagctgatcatcagggtctttgtgctgggattgcacgcgaccatattttcacgaggtcattttgagaccgacatgaaagcctatactcgactcgatctcgccagagaggaattaaccctgggaagaactctgcggcaggatgagatttttctcgttttctgacatgtctgtaaatgtcaggttcttttccccctgggcaaactcttatggagcttccatggtccgaatggggcctcgggattgtgatacatgtatccgagacagaagctgtggttggagaatgttgtgcagaagtaggccggtgctaaagttgggttcaaattgtgagatgttgtgtctccagcccttaaat

SEQ ID NO: 2263 - DNA, 711 bp, Avena sativa
aacaagaacatgtgagatattcaaggcgggagggctggcggtggcggaccttggcgttgcacaggacaagcagttccgtctgatcagcgtgacagcggagaagtgggtgccgatgatggaggtgccggtggagagcgtgagggcgttcctggggaggaagcgtgcggaggggtacacggtggtggggctggagcagacggccaacagcgtggcgctggacgagtttgtgttcccagagaagacggtggtggtgctggggagggagaaggaggggatccccgtggatattatccagcaggtggtggatgtgtgcgtcgagatcccgcagctgggggttgtcaggtccctgaatgttcatgtcagtgccgccatcgccatctgggactacactcggcagcaccgcacctcccgaagaacactagaatctcaatctcctcctcagtagtagcttatttctactcaacaagagaatgtttgtgttgtaacttgcaccttatacatgacatgacatgatgggattgataggtttttcatccccagtccagctgaacaactgagagatgcggaagtaaaagttctccacatcttctgattgtcttcaggaaccggatctgcatgatatccaggcagtttttgtttgctaaagaaaaatactacctctgtcgagaatttgtctaaatttagatgtatctacatacttactaaatagtg

SEQ ID NO: 2264 - DNA, 902 bp, Avena sativa
ctacctggatgtcggcaccaaatacacatccatcctggccagggcagcatgtgctgcgttcgtctttggattcgtcaccttcatgtccattggaggattcccttcattcgtggaagaaatgaaggtcttccagcgggaacggctgaatgggcactacggtgttgcggcgtttgttattgccaacaccctctcggcgatgccattcctgatcctgatatgcttcttatcagggacagtgtgctacttcatggtgcgccttcatcctggtttctcacactacatcttcttcgtcttgaacctctacgccagtgtcactgtggttgagagcttaatgatggccattgcaagtgtcatacccaatttcctcatgggcatcatcataggagctggaattcagggaatatttatgcttgtatctggatacttcagacttccgtacgacatccccaaggttttctggagataccccatgcagtacatcagcttccattactgggcgctgcagggccaatgccagaatgacatggatggtctcctattcgaaaaccaatacccagaccaaccgaagatccctggggagttcatactgaagtacatctttgagattaacgtgaagcggtcaaagtggatcgatctttcggtcatcttcagcatgatcttcatctaccgcattttgttcttcgccatgatcaaggtaaacgaggacgtgacgccatggattcggggttacatcgcgaggaaaaggctccagaagaaggtgcctgccatcggcaagacaccttccctaagaggctacgtcgtggatccggagcttggtcctaacgaaggctagagatgataagcttggttgctgggtagcagaaataggcaaatttcctaaccggttcttggcgtcatatgta

SEQ ID NO: 2265 - DNA, 866 bp, Avena sativa
tcgatgcgcgacgccatcgagggcgatgaacggccaggacctcgacggccgcaacatcaccgtcaacgaggcccagtcccgcggctccggcggcggcggcggaggtcgtggtggcggccgtggctacggaggtggcggcggcggctatggtggtggtggcggcggctacggaggtggcggcggcggctaccagcgccgtgagggcggtggaggctacggtggtgccgccgccgtttccaggttcgccgcctcgccggccgctgagatccgcctgcctctctcagcagcagccgccgcctccgtgtccttcgctgggcgccgccgcttcggccccatcgccgcgtccctcgctacctccgccgcagttacaaaggaggctgttcaaactgagaaggcgccagcagcattaggcccctattctcaggccatcaaagcaaataatctcgtgtttctctctggggttcttggcctaaaccctgagacagggaagtttgtctctgaaggtgttgaggagcaaactgagcaggttatgaagaacatcggtgaaatattgaaagcaagtggtgctagctatggttcaattgtgaagacaacaatcatgttagctgatctacaggatttcaagaaagtgaatgagatctatgcaaaatattttccatctcctgcacctgcacgttcaacttaccaagtggcagctctgccactgaacgccaggattgagatcgagtgcattgctgctctctagttaccttgtggctacccatcgagacctcaataagcattcgatgccattgcagttggccagtgttctttagcacccaacatgtcggtgtgatcttgtagtaccaattaagctcttgaactgc

SEQ ID NO: 2266 - DNA, 725 bp, Avena sativa
tctagcatatgctgaagttgcatttgcacaatgtccgacagacatttcagtaaagcatttaagccgtttaagcagtgtttggtgatgatctcagaatgaaccacactcataatcattactttgctaatataacaatctgtactgacttcacttcttgctcgatagctttgtgctgctctaaacatcaacaaaaaaagcgtggatagagacctcgacgtgtaccgcaacttgctctcaaaacttgttcaagccaaggaacttctcaaggaatatgttgagagggaaaagaagaagaggcaagagagattggagacaccgaaaccgaatgaagctgttgcgaaatttgacggataccctatcgcatgatgcattaactcggcctttaccagaggagagctttggacggataacagatattaacagttacatctggacagcgtagagaaactatcaggggcatctttggctgctctttgtgtggtgtagtactctgccgtacaaaaagatccagattattcgtagtattgagttcgatgttttgtaatttcttcgttcctctgttcaaatgtaccgtttttcttcacttatttgacaatgtacgaagaggcacaagctgagaaattatatattgtggtgaaaaaaaagaaatcagtttgcctggcctgtttgtctgaatccgttcaaggctcagtgaacatctgaggtggaaataatcatgctcggat

SEQ ID NO: 2267 - DNA, 539 bp, Avena sativa
gccatcctgcccgacgggcctgcaaccgggaacatgcacgccaacggtggtgtcggctctggcgggtcgcttctgacagtggcgttccagatcctggtcgactccgtccccgacgcgaagctctccctcgggtcggtggccaccgtgaacagcctcatcgcctgcaccgtcgagcgcatcaaggcggccgtctccggcgccggcagctctccgcagtagcctcgctggattgaaacaatctttctatgtctgtatcagaggagcaataaaattttggagctttcatcagtgggaagtcaagaacgcacctcagactgtccttgccatgtggtgctcatgaatttgggcgattgttttccgcaaattcttcgaccgggaaacttattcagtttttggcgaaaagaaatgctgtcaccactatgcaagggcggttggttcgggtattgactttcctcttcgtgttggcctctcggatgctgctgcctctgaatttagggttcttggtgtagtacaaaaccataattcgtgcagtctctgtc

SEQ ID NO: 2268 - DNA, 895 bp, Avena sativa
actggtgccgagaggatgtgcatgcctgcacccccagtcgagcaatttgtggatgcagtgaaacaaactgttttagcaaacaagagatgggtgcctcctactggtaaaggttctttgtatattaggcccctacttgtgggaagtggtgctgttcttggcctcgcacctgctcctgagtatacattcattatttttgcctcccctgttgggaactactttaaggaaggattagctccaataaatttaatagttgaagataagtttcatcgggccactcctggtggaactggaggtgtgaagaccattggaaattatgcctcggtcttgatggctcagaaaattgcaaaggagaaaggctattctgatgttctctacttggacgctgttcacaaaaagtaccttgaagaagtatcttcgtgtaatattttgttgtgaagggcaatgttatttcaactccagcaataaaaggaacaatattgccgggcatcacaaggaaaagcataattgatgttgctctgagcaaaggcttccaggttgaggagcgcctcgtgtccgtggatgagctgcttgatgccgatgaagtgttctgcacagggaccgctgtagtagtgtcccccgtgggtagcattacatatcaagggaaaaggattgaatacgcgggcaaccatggagttggcgctgtgtctcagcagctatacacttccctaacaagcctccagatgggccaggtggaggattcgatgggctggaccgtgcaactgaattagcaataatccgcctttcctcgcatcgatgcttgcagaaaggtcccagcctagattaaacatgatcatgggctcacagggtcctccatctatctagattgaaagaaaacatgctcatgacggccgtcagt

SEQ ID NO: 2269 - DNA, 675 bp, Avena sativa
cggtgttgcgcgtgtgaaagatcaatccggagtgatgactgcagagactggaacttaccgttggatggcacctgaggttcgccatcacatgcatacatctcaatagtttataacaaatcggtttgttctcatctattttttacatgtggattattgcaatttcaggttatagagcacaaaccgtatgatcacaaagcagatgtttttagctttggtattgttatttgggagctgctaactggcaagatcccttatgattacctaacaccactgcaagcagcaataggtgttgttcagaagggaatcaggccgacaattcctaaagatacccaccccaagctaacagaactgcttcagaaatgctggcataaagattcagtcgagaggcccgatttcatccagatactggagattctcgaaagactctccaaagaggtgggagccgatggtgatggtcgcctgaaaacgaagtcaggtttcctttcagcacttaagagaagccactgaagggaagacagtcaccattcaccaagcaatcttccttttacgttcgtgctcaaagttaatcaattctgcgattgttgcagcatacgactagaggaattatcattgtagtttataattttgttatgtaatcagctscctgtatgtgctccatggtgggcggccgcaaat

SEQ ID NO: 2270 - DNA, 633 bp, Avena sativa
ttctcacggtgcagctcggcgttagagctgctcaaggtgtgcaccaacatcctcgaggaggtggagaagtcctacacgtcgcggatgcaggactggaaccgtggatcgctgtcctggaggaagaagctgcagccgaaccaccgcgtcgacgagttcatctggcaggaggtcacgctgctcaaggcgacgttgcgtggaggacgagggcgaagcttctgctccggggcgggctgttcgacaccggcgaagagctgtgcaggacctgcatcagcatcaggacggtgatgctcgggcacggcgatgcccagacggtggctgctcaggagacgctggcgaagctggtccgaaacaggagtaagatatgagatgatatactactacaaaaccctttcgagctgttggtcagatatacagggtttcctgaagttctcgatgtttctgaacctgtgatgccagccacagttttgttagtgatcagtgcaatagccgagcttcttgatgccacgtgtaaccggagttgttgttatgtacagtacagttcagttgctatttcataaagcttttattatgttctcattgttgagtttcttagtagcttaaacttccactttctgatatgaaagtaaccttctc

SEQ ID NO: 2271 - DNA, 730 bp, Avena sativa
gagaaggaggactgctttgcagatgttgctgcttcagactcgctgtcggcattgtttaaggtgggggctgcatccggtgaggttttcatggctgacttgaggagacttagcggtgatggcagtggcgtcgagccttgggtgtgcatcggagacgaacaaagggcaggtgcagccacagcatctcgcagaaaggatggtaacaattgtagggttgagtgctaccgcagttgggtgtttgtgacacgcggggcagacgttgaggtgtggtcacaggtggagttgacatcggaggctggtaagaagaaggcaatgaggaagaactggcttgggaatgggccatccatgattactgcaggcagcgtggacgggatggtggagaaggccaagatcgtgagctgggccttcggaggcagcaggatggcattggctagagtcgaccagcggtctatcgaggtgtgggatagtgcttcaggtgcaatatcagtgaacctctgaataaaggtacaagactacacatgtaagagatctcaaattcgatcgatgttcttgctcacctctataaatgtagtttatgtgtttggtgtacttgtatgatgttgcattaaggtccagcacaatctatgttgcattagactgacaacatctagaaggtccatgttaattgcttgttgttctgcacattggtgttgcctgtggttggtaaatgaacacatcttatacgatgaaaaaa

SEQ ID NO: 2272 - DNA, 807 bp, Avena sativa
ctcaagtcccacacggtggacgaaatcagggaggcggtcaggcgggataacaagcagaggtttagcctgttggaggaagatggcgagctgctcattcgggcaaaccaggggcacaccgtgacaactgttacttcagagagcttgttgaaaccaattttgtcagctgatgaagtctcagtttgtgtccatggaacttacaggaaaaatcttgattcaatcttgcaatctgggctgaaacgtatggcgaggttgcacgtacatttctcaagtggcttaccctcagacagggaagttattagcggtatgcggcggagtgctaacatcttgatatatttggacgtgagcaaggcactgcaagacggaatgaagctctatgttttagacaacagggtgatactgacggagggtttcgacggcgtcgttcctgtcaagtactttgagaagatcgaaacgtggcctggacgagcgccgataccattccagagatagatgggccctatgccactactgaggtttctgtgtgcttcttatcgaggagttttgattagctgactttgctggatttcattgcggcgagcctgtgaaagggaaatgtactgcttgttgtctgaaggagctgtagtgtgtgtacttgcgggaggagactatctctgatgcccttgcggttgtaccaacctacaagttgtggtcgataactgaattcttgtgtatgatgcatgtcaattccattcactatataccatctgatgtttcattgccctgttggacactggatgttaatatcctgcagcgtcaggtgtaggacag

SEQ ID NO: 2273 - DNA, 764 bp, Avena sativa
aagaaaagagaggaacagaagggaatgcatggaaatgtgttgcacaagtttaatgccgaggctgtgaggctgaatgctttactggccgagggtcgtgttttctcagatttgcctgctttggctgacagagatagcatcttgatgaaggatactcgcctggagacctctcttatctgccagcctcaacaaaggaacttgcatggacggatatttggaggtttcttgatgcaccgagcatttgagcttgcgttctcaactgcttatgcctttgttggccaacgaccatgttttcttgaggtcgaccatgttgacttcttaaagcccgtggatgtaggagacttccttcgattcaaatcatgtgtcttgttcacccagcttgagaataaatggcaacccctggtaaatgtcgaggtcgtcgctcatgtaacaaggcctgagctccgaaaaagcgagatctccaacacctttcacttcaccttctcggtcagcagcgatgcgttgaagaatggattgacgatccgcagtgttgttccctcaaccgaggaagaggcacgccgtataatagagcgcatggatgcagagggtttgcttgattgatccttcggcagagtcactggtttcagccatttgttagcaccttttttcactggccatagtactaacttgtcggaaatgtaccccatgatctgtacatcaccagataagtatcaacctatcatgctggcaatagagcggcaaaaaatgtagccgtctggtaccaccat

SEQ ID NO: 2274 - DNA, 651 bp, Avena sativa
caagacgaaaatctgattttcttcaatcactctttataagcatacatgtatatatgcagcgaaaaggtgatgatcaataacctgcacaatatctactctcagtccactcccagcccgaagatctctgtctgcatccccccatgggatcagtcagtcaagaaaaacaaaacaaaaacgaaaagctactacatcgcatcgaggcagaccgatcgatatgcttttcgtgtgtgatcaggtcactaagctaatcagcaaaagggcgttcaagccttctgtctagcgcctagcaagttagctaacctcaccggcatcctcccggcgaagctgcgcgaccgcacgtagagcacgacgcacagcagcgtcccgaccacgcaggtggcgccccagacggcgaaggtctcccggtagcagctggcgccggcgcaggtggcgccgccccgcgacgcggcctcgcgctggtacaggaacgccgagaagtagccgaagcagagggaccccacggggatgttggacaccaggatgttgtggttcacgccgaagttcttggacccgaacagctcgctcgtcgcggatacggctaccgacgtgatggcccccgtgcaggtgccgatgatggccgtgctcgcgtacaggaagaagttgctggggttg

SEQ ID NO: 2275 - DNA, 723 bp, Avena sativa
tttgacatcaagaacttttcagaagttccagggatcacttcaaaagcgcctttgaatttgggttcatgtgatatagtagtagcttgcagtataacacgtttatccttctgaacatatattcaaaagaggacacatctaatgcagacagcactacctaccattcaggacagtgattgacaaatcattcagggagaaggttccttcagggacatcagcttcaacgggaagcagcatggagagaaaaccaggttgttttgggtcaggtaaggtggcattttcgttcgtaatcatagagatgacttcggacatggagggccgatcagcggcagcctcctgaacgcacaacaggccggcgtgaatgcatcgtagcaccatattctcagggcatgcaccgagcaatgttttgtcaatgagctcgtgccatctgccttctttccacagctcccatgcatgaccaaggaggttatgagagttgccacacccgtgaggtcctgcatttcttagtccactgacgatctctagaagcaataccccatagctaaaaacatcggacttgacagagaaaatacctgccatagcatactcaggagccatatagccatatgttccaacaactcttttcgtgttggctagtcctcctttgggatcaaatattcttgccatcccgaagtctgagatcttagggttcatatccgagtccaacagaatgttgctgggtttcag

SEQ ID NO: 2276 - DNA, 869 bp, Avena sativa
tgaagataagcaattccactctttcaaaaagattgcacggtcaatgggatacaccgatgatgatcttcctttggtatcgttccagtcagtttcgaaaggttactatggggaatgtggaaaacgaggcggctacatggaagtaactggatttagtgccgatgtgagggaacaaatttacaaggtgacatcagtgaatctttgttccaatgtctctggccaaattctgtctagcctcataatgaacccaccaaaggcgggggatgaatcctatgaatccttcatggtagagagagatggtattctttcgtcgctggctcgacgtgcaaaggccttggaagaagcattcaatagtttagaaggcatcacctgcaataaggctgagggtgcaatgtatttgttccctcgccttcatttaccccagaaggcggttggagctgcccgagcagctggtgcttccccggatgcatattatgctctccgccttcttcatgccactggaattgttgttgttcctggctctgggtttggtcaggctcctggaacatatcattttagatgtacgatcttgccacaggaggacaaaatacctgcaatcatatccaggtttaaggaattccatgagaaattcatggatgaataccgtgatggagcacccaccagttctaaaactgaaagcgtaagcgataaaactggaagtggaggagataaagctactggaagtggaggagataaaactgcaagtggaggtgataaaactgaaagtggaggagattaagcggcaaactcaaagcttgtatacaatgaactcctgtcgaaataatgaagatcatgccatcgtgccacactgccaccccattcatggatgaagc

SEQ ID NO: 2277 - DNA, 433 bp, Avena sativa
  modified_base (377)..(377): a, c, t, g, unknown or other
atggctacaggtggcgaaagtatggacagaaagtggtgcgaggaaatcctcacccaaggagctattacaagtgcacttaccaaggctgcgatgtaaagaagcacatcgagaggtcttccgaggaaccacatgctgtgataactacatacgaagggaagcatatccatgatgtacctgcttctaggaacagaagtcaagctacaggccaaccctactgcacagaacaggcttatacagaccaatcatcttctagcttctgcagtagctctgaaaaaaggaactacagaacaatcgctctgaatcatgttgctttctagcttaatgtgtttgtgactgcttcaatgccccacatcgattgttaacaaatgaagaaaacncaatccgattgcatgctctgtcatgcaccatgttgctcatgttctgtctgctgcaa

SEQ ID NO: 2278 - DNA, 502 bp, Avena sativa
gacaggatcatcaccgtccgtcgtaattgcgctcggtctcagggctttcctgacagctaccagtttgcgggtacaatccagaccaagcacaggcagattggcaatgccgtgccacctcctcttgccttcgcacttgggaggaagctgaaggaagccgttgatgcaaagcgacagcaggcataactgtgttcaggagaagcatctctagatgatcagcacatgctatgagcttatcttgattgctcctggctagcattgtagcctactgtcagatgttagtggtctgactaatatgaatttcttgagttgattgtgatttttatgggtcttattatggatgccttgttgtctactatcttagaggtgtggtcactggcaccctgattcagggttgtctggttgtattcaaacaaatgcacaagttcatattggctcgaggcagccacctgttctgtaacttggtatggagatagcttttaaaacaaatatatatcttctatac

SEQ ID NO: 2279 - DNA, 443 bp, Avena sativa
  modified_base (424)..(424): a, c, t, g, unknown or other
caacactggaagtaactcaacaggagaggctgttcacgcaacagagcagggatttgctgttggcatgcatgcagctctccatatcaatccttactatgggaagacctcgactgaaggattgatctctcatttcgagcatgtcctcccgatgggtccaaccatcatttgcaatgtgccatccaggacaagccaggatatacctcttccagttatgaggcagtttcacgtcacacaaacatggcaggcgtgaaagaatgtgttggacatgagagggttaagtgctacaccgacaaagctataacagtatggagtggtaatgatgatgaatgccatgattctaggtggaaatatggtgccactggagttatttctgtagctagcaaccttgttcctggtctcatgcggaatctcatgtatgaagggngaatgcagtactaaatgag

SEQ ID NO: 2280 - DNA, 518 bp, Avena sativa
cccgggatgaagatgtaaaactgtccatatggcgagctgttggacgtttctcagcgcttgaagacggcaagtgaagttaatgctgccattcttacaagccaaagtcacgagaaagatccaaagctccccagcctgttgaagatgttgatttggacccagaaccagctgaacgagaaagcagcgtatccccgaatcaacaacttctccaccgccgcactggaagatccggctatatgagctgctgccgaggtgttgactacggagcttaggcaacagcagccttgtctgcctctgtagtctgtacacactctctgtcttaggtctattacttgttcgttccctgcagtctgcaactcccgaacacgcttctttcatcagtgttcgagctcattgtaaaaaaacgacagtcatccgactcacctgttgtatatgatgcagtcatgcagatgatgttctcatcacattttaatcagagataaatgttgcattttgttttttttattggaacaaaaaaaaaa

SEQ ID NO: 2281 - DNA, 555 bp, Avena sativa
cctcgccggcattatcgccggacattttcattgctgatttcttctgccatgtcgccctcgatgttgcctcggagcttggcattcccttctacttcttcttcacctccggcgccgaggtcctggctgtccttttgcatctcccggtccttcactctcagaccacagcgagcttccaggacatgggtgaggagctcgtgcacgttcctggaattccctcatttccggcgtcgcactccatgctgccaatcatggaccgtgacgacgcagcctacatggcattcgtgaacgtgtgcagcgacctgtgccgctcccagggcatcatcgtcaacaccttccgctcgctcgagccgcggggcatcgaggccatcgccgccgggctctgcacacctgctggactcccgatccctgcagtctactgcatcgggccgctgataaagtcggaggaggtgggcgtgaagcgtgccgacgagtgcatcgcgtggctggacacgcagcccaaggacagcatggtgtgttagcacacgcccctcgtcgctgactgctttccggcgacca

SEQ ID NO: 2282 - DNA, 711 bp, Avena sativa
ggaatagacgtactgaaaagataagacgctacattgttgtggaatctatctatcagaattctggtcgaatcgcccccttggatgagattgttaaattgaaggagaaatatcggttccgtattattctggaggagagtcattcttttggtgtgcttggagagtctggacgtggccttgctgaacattatggagttccaattgacaaaattgatatcatcactgctggaatgggaaatgcattagctactgacggtggcttctgtacgggaagtgtgagggttgttgatcatcagcgtctaagcagcgcgggctatgtcttctccgcttctttgccaccctatcttgccagtgctgcggtctctgctgtaaactacctggaggagaacccatcagttcttgcaaacctaaggagcaacattgctcttttgcacaaagaactgtcagatactccagggctcgaaatttctagccatgttctgtcccctatcgtcttccttaagctgaagaaatcgacaggctcactgaccactgacctagatcttcttcaaaccgtggccaagcgggtcttgaaggaagattcggttttcgttgtggcatccaagcggtcaaatttagacaaatgcaatcttcctgttggaatccgcctgtttgtgtcagctggtcatagcaaatcagatatatccagggtgtgtttatcgttgaagagggttt

SEQ ID NO: 2283 - DNA, 798 bp, Avena sativa
ttgaaatatgggtaccaaattgggatagtattttcatacctcttcctgcggtcttgatcatatcatcactaattcaccaattgtgtgcagaacttgctctgaaatatcggtcgattgtctctacggatctgctgaaggttttgcaagtcacttgaaacatgaaggaacattgcgacttttcttctgcacgtgtggaactgtggatgctatctaccagcaaactcttgccccaaagcgttgtgcaaaggtggaaaagaggaactttcctttgctgcagcccctgactatagtttatcttctacaacttctaacattcagggcaaatcacggcaacctctggtgccggatctcgtcgacttcggctatgctgccatctggcttccacatgacgtccttcagtccattcgagatgtcatggtagaaattgtggaattctagggtgtccccgttcgacttgcggatctcgaccatgtagagtgaaggggtgacttcaaaaacctctgtcgcaattgccagctgacctttccttccaggattctctccttgcaacttcaacttgtagttgcgcttctgtacattaaatcccatgggtcctgccgctgcttcaattttcgacagtatctcgtttgcaggaagcctcgaagcaaaccgtgtctctcgcttaactgaacccgtttgcttctcaaagagagtgccgagattgaggccctgagaggtagaaatcaactcaaaagcgttcatcactgctggtctttcttcacgtctttcgacgacaagctgcgctgggtccccgcccgg

SEQ ID NO: 2284 - DNA, 856 bp, Avena sativa
gtctggcagaacttaccctttcaacacaccttggaagatggatctgttgccaaagttttgcttttgatctacaatggccagataaaaatgaagaatggtgttcaattcaaaaggacgatgttgattttctgagtgttatcttggagttgagatcagaggtgaacaagattctggagagcgctagaacaggaaagctgataggggctagtttagatgcgaaggtttatcttcacgctgaaaatgctgatgtggtatccaagctgaaggagctagcttctgcaaccaatgatgcagatgctcttcatcgcctatttatcacatctcaggtggagatcctcccatccctgagtgaagaaactacatcaggtgtatcctatgccggaaagttcagtgacccgcgcactggggagatatggattggtgtgactcgtgcagatggtgcgaagtgtgagcgctgttgggcttacacccaggacgtaggatcgtttgttgaccatccttcgctatgctcgcggtgccacggggtcatcgatctgcaaccacaaccatttccagctgccgctgctgtcatttgaagagttgtgacctggatctaaccttcgcttcattctcaagatgattggcagaattcattgttttttgttgcacggagaaaaactttgactgttatactgatcaaaatagaagagaagatttttaggggcatccaaaacctggtctgaaccccatttttgcatgtacaactacacacaagctttaccattggtgttaaagttttgaccttcctgtaaatgtattgcagaaccagaacacaacaatatacagtaggtgttttgtcggaaaaaattatactatg

SEQ ID NO: 2285 - DNA, 745 bp, Avena sativa
gcaggcacccctgatcctactttaaggagtgctaacaaatatttacaggactccattgttttgatgaggaagctgcttcagaagcaagagtctggttccaagaaacccaagaagggagctgcacctcctccagcagaaagcaagcttaccgttggcctgatctacgtcaacgagcactacgatggatggaaagagcaatgcttgagggtgcttcaatcaaattttgatagccaagcacggtcctttgcccctgacgaggagatcaacgaagcgctgaagaactgcttcatcgaccgcgagacgaactttaaacaggtccagaagctgtgcatgcctttcatcaggttcaagaaagacgaagcaaggaacgttggtccccaggctctgaacttgaagcttccttttggcgagatagatgtgcttgaggagaacctggagctgatcaggaggcagctgggtctcgagcatgtcgaggtcctttcagcgttcgatggagctgctcgtgccaaggctgggaagcatggtcctgtgctggacaagaacccaccttcccctggcgagccagtcgcgatattcatgagcaaggaggagtttggagcccaacattaggctcaggttacactagcaagcaggagtaatgtctctgttaacagaacttgttgagatgctctgccttacatttttggacatgttaaagttatacattagcttgaaccttttacaatacctccatcgttcaaattaa

SEQ ID NO: 2286 - DNA, 689 bp, Avena sativa
ggtcacgcagctcaatgcgcccatcagagggatcgcccgctgcgtgcagcaatccgcaagatccagccgtcgtcggagcagctgacctcgctccacgccgaataccttaccctctgcctgctggcgaagcagtacaaggctggcctctgtgtcctggaggacgatgtatttgaagttgatcagccaaaggacttcttcctctactgctactatggggggatgatttatatcgggctgaaaaagttccataaagcattggagcttcttcacaatgctgtcactgcccctatgtcgtcattgaacgcaatcactatcgaggcttacaagaagtatgtcctagtttcactcattcagaacgggcaggttccatcattccccaagtacgcatcttcggctgctcagaggaatctgaaaaatcatgctcagatttacgccgatctgtctacatgctatggcaatggtagctactctgagttggaggcgttcatccagtcaaacaccgagaagttccaagctgataacaaccttggacttgtaaagcaagtgctctcctcaatgtacaagcgaaacatccagaggctgacccagacctacctaactctctcacttgaagacattgccagctctgttcaactacacccaaagaagctgagatgcatgtacttcggatgattgaagatggtgagata

SEQ ID NO: 2287 - DNA, 650 bp, Avena sativa
cagcccccaccgatgcctgccccggacatggttcctctctcaacctttggcgcttcagccacaaccaagatcagtgttgatgcttcccttgctggcgccattattggcaagggtggagtcaacacgaagcatatatcccgaatgactggggccaagctagctatccgggataacgaggctgaccctaacctcaaaaacattgagctggagggaacatttgatcagatcaaacatgccagcggaatggtgacagagctgattgtccgcattggaggcaacgcccctcctccagcaaagaacccagtgaggggttctcacgctggcggcggtggaaacaacttcaagaccaagctgtgcgacaacttcaacaaaggctcttgcacatttggagacaggtgccactttgcccacggtgaaagtgaactacgtaaatcggctgcggcttgagagatgctttgtcgtgtctcgtcatgattagtagtgatcagcaagtttgagctccagatctgaggccgttcatccatggtgacattgagttgcacaagcctgttgttgattgggagatattgccgtggcttggtgtgctcatgttgctgtaactctaaaacagatatcgagaatgacttgtcttttcagtatttataggtctt

SEQ ID NO: 2288 - DNA, 678 bp, Avena sativa
ggaacctgcaaggcctcgatcatctttccagggtgttgggagaacccttggcggtggatcttcaactgatgacagtccagccccagctcctgtcacgcaagcgcccaacagtgctcccaggtcaattggcatagttgtggatgactcacagccgtttacatccatacagctaaggttggcagatggcactcgcatggtcgcccggtttaaccttcaccacaccgtgggcgacatcaggtccttcattgacgcatcccgcccaggagctgctcggccatatcagctgcagactggcttcccacccaagcagctgacagactctacactgacagttgagcaagctggtcttaagaactccgttatcatgcagaagatgtagggccctcaccaagctggggctcgtcgcacagaagacataaacacattgttgaacggtttatcatgttgccagatactgcatttgcatgcaacctgtaatctgctagagtattggttgttttgtcgataaacgtattgtcttctgcagtcgtcaatgaagtctacgggtactcatagctactatgaatacaaagtgctatcaaaattatgcatactagctgaatgcccgtgctgaatgcccgtgcgttgctacggaacatcactgtaatttataaacttttgactctcctaccgacaaaa

SEQ ID NO: 2289 - DNA, 627 bp, Avena sativa
acgctcctcctattgagatggtgggtgtgggatgggtgccttccagcgttagcagttcagatgtaccaggcttggttattattcctctacacaagttttgctttgcgggagaatgtgttgcttgtaaatggaagtgatattcgtccttggtggatatatcaccactatttagcaatgctaatggctcttgttagccttacatgggagataaagggacagccagattgttcaagcaagcagagaggggtacaacttttcttgcgttgggcaatcatgcaaggtattgcaatgcatctacagaataggtaccagcgtcaaagattacgcacccgaattgctctaggaaaggctaaaagaatggatgttcttgctggagaaacagctggtgttgaagggcagctactgctgctatatcctgttctttttgtactgcagggttttgaagcatatgttggagtattgcttcttcagacggcttggcacgggctcacctctgaatggcaggttgcagtctgtgggatcttgctggtggtgatggcggttggtaactttgtcaacacggtggagactttggtcctaaaactgaggttcaaagcaaagatgaagaggacaaggcacacaggggat

SEQ ID NO: 2290 - DNA, 864 bp, Avena sativa
acctgtagtattccgctcatataggcttagatacgataggacaggacacttttcctactgttttttcttacacagacgtcttggtccagacattatgctaactcactgatcaagtgatcaacatgaatcacgaattcaacacataacaaaatatccagtacaatccagcttgatgaatacagggtaccagatacttttgaattctcgcaattctcgaagtttgtgtgtctatcagcataagataaactgaggcagcagaacagggagagccatatgacaaagcagggatcacttcctaaaaggtagacatccagaatccagacgggagttcattagatcccaaaaccgaacactgcacgtatcctctgaaagatgagctctgtccagcctctctcggtgttcaccacagttgagttcccatacctgtcttcctctggcacgtcagtttgtttgagctttatgattgtaactcctgactcgggctcatcaaataccaacctgactgtagaatacacgccatcagcccagctcccaaaccgccacttctgaacgatcagcttcccttcctgcagctcctcgttgacgccggttatggacccatcaaagaggctaaactgcccaccaacctccttgctgatcctcgcattgctctgcgtgaaacccttccatctgttctcatccatcaagatctcataaatgtccttggagcggcagttgaacttctctttcatctcaatagttttgaatccttccttctccttcccctttgccttcttctccttagatacaggagcgggtgcaggcaccgccgcctccttcactgctggagcaggggcggtagccgtgccaccagtcgctgctgcc

SEQ ID NO: 2291 - DNA, 638 bp, Avena sativa
acagccatttcatcattcaaatatctcctattatcccgttgaaggcacatacatttagctagtgaaaattaaaataaataactaagcagctacagggagcaggccgttgtgcctgagcagtggttcgggcgaaggctcgcgtcctcggaaagaaacgaaaacctcgagtggagattttccacctccaagtgcaagaacagtgtctctgaatcgtctgcccgtctcctcaatggccttctcattgtccagaccggcatcttcgaatgctgagaatgcatcggctgacagtacttcagcccacttgtaactgtagtaccctgctgcatagccacctgcaaaaatatgactaaatccacacaggaatctgtcctctggtagaggagcaagaacctgggttcgttctgcaactttccggtcaacatcatataccgacactggtccactgggatcataagttgtatgcagctccatatctacacttgcgaaccgtacctgacggagactgaaggagccagcacggaaattctttgcagccacaagcttagcataaatttcctccgggagaacttcaccggtttcataatgctttgcaatgctcaaaagagtctccttgtgatagcaccagttctcatcccggg

SEQ ID NO: 2292 - DNA, 492 bp, Avena sativa
tctgcaccagctgcttctgcagcgagtaatggtggaggtgacatgtttggcgagatggatgattgggtggacgtggagtcggactatgttgctggtggtgatagtggcggcacaaccacagagctggacggattaccagcaccaccgtctgggttgacagcatctgctgctaaggcaaagggaatggataattacaagggtgggcagtatgctgatgctattaaatggttgtcttgggctgttctgctcatcgagaggactgggaaaaatgctggcattgcagaggtgttatcatcaagggcttcatcttacaaggaggttggcgagtacaagaaggccattgctgactgttcgaaggtactagagcaagatacggagaatgtgtcagtgctagtgcagcgggctctcctatatgagagcagtgagaaatacaggcttggggcagatgacctgcgttggtctgagattgaccccagtaataggcttgccagg

SEQ ID NO: 2293 - DNA, 814 bp, Avena sativa
cccgctcctcgtgcggaaggtgagctacaccgagggccggagtaacgtcatcgtcgagtaccccggcaccgtccccggccgcgtcgtttccttcgtcggcatgcacatggacgtcgtcccggccaaccctaacgaatgggacttcgaccccttctcactaacatttgatagtgatgacaaggaaaagcttaggggccgtgggacgactgactgtcttggtcatgtggctctggtgactcagctcatgcggcggcttggtgaggtgaaaccagcattgaaacattccgtaattgcggtgttcattgccaatgaggagaactcatcggtcactggcattggtgttgatggccttgtcaaggatgggttactggataagctcaagactggaccgttgttttggatagatacagctgataagcagccatgcattggcactggtggaatgatcccgtggcatctgaaggcaacagggaagctgttccacagtggcctcgcacataaggccataaattccatggagttaaatatggatgcacttaaagaaatccaaactcggttttataacgacttccctgcacacgagaaagagaagctctacaagtttgctactccatctacgattaagccaacaaagtggagctatcctggtggaggtctgaatcaaattcctggagaatgtacagtttcaggggatataagattgactcctttctatagcacgagttttgtagttaagaagttgcaagagtatgtaaatgatataaatgataaccttgaaaagctccctgtatgtgctccatggtgggcggccgca

SEQ ID NO: 2294 - DNA, 838 bp, Avena sativa
cgacgactacaaccctgagagctcatatggtttggttctggccaaagaggattcgtcgacaacttcctcaacagacactggcaaggtttccaacgttgcagattgcttctcttgtggctgatgttttctccaacgtggaaattgcagagaacaaggttgtggaagtttcaactagctcatcgggaacattcaagccaacagtggaggcattgacaggtatccccgaggacattagaagaaaagagtacaaggaagcagctgcaaaagcacaggcagacgaggaagacctggcctcacagcgagctggagatgcagaagaacccaccagtaagctcaaaagccgaagggacctcagaagtggcaggtgcaagtccagtgaacgaggcgcaagcctcactggagaaccttctgaccagagccaaaggtctgaagctcagcacagacttctcctgggacaagttcagcacacagctagcagccgcaggagctgctgcacggagctcggacgaggaagaaccgaaagcccagatcgccacggttagaggccaggccagggccaagaagctggcaccacagagggccgtcgtgaagcccgtggcacaggtgaagcaggcgacgaagcagccagctcccaaggaggtgaggcccgtgtttgggggactcttcaagcaagagaccatctttgtggacgaggactgatcatctcaggaaggcatttttcttttttctttgttgttttgtgaaggcctttggcgtatctgaaaggaaattatgaagagtaacagttgaatacaattgtctgtaattggctctctctgtcggagatatttcatgcctc

SEQ ID NO: 2295 - DNA, 892 bp, Avena sativa
caagtgatcccttatttcattcgcaatatataaaattctaggtctctctaaacagacgaacatgtgcgctgctggtctgcgttgtttgcattatgtgtttatttcctgaatagtaaggtaatcagaagacatctgaacagtgactacacaacttttttctagcatctgatcattcaaaatttgatagaaccaaatacatgtcatcacaacccagtatgcaaatcaaaaaggccacctggctatttgtatgttgtatggcattactatgttttctcccattagtgccactgtaaccaagcaaaataaagctttttcactaaattaaatgtcacttgggtccagccttcccataagagtcgcgcagggtaacagtcctgttgaacacgagcttctcgggcgtcgagtcggtgtccacagcaaagtaaccaagccgctcgaactggaacttgtcacctagaactgcggtggcaagtgatggtacagcataggcgccctttacaatctctttcgagttggggttaaggtcacccagccaattttccaattcggcaggattctctgataggaataatttctcaaataatcttatttcaacctttaatggctcaactccaggtgctggctcggcgacccagtgcagaacacccttaggtttagaagtctttgaggggtcatactcagctcgaatttcgacaatttcatctggattatcaccataaacaacctctgtgcactttatcgggaacgcataccttagcagggcagatttaccaggagctagcccatagtaatctttcgagtccttaaggcgaaaatcagttttctcaatgtagacagttcttgagaaaggaaccttgtagtaggatgaagcatcatcagcaggagcatcagg

SEQ ID NO: 2296 - DNA, 889 bp, Avena sativa
cctctggtcatgctcgtccttctgatatcgaagaccatagccgattgcttcaacaaaggggtttatgatcagattgtggtgatgaaaggtttgccattcatggaggctcacgctgaaccatacatgaggcacttggtagctggtgacgtcgtgtctgggccactcatctccttttcaggtgtcgagagggtgggcaacgttgtgcaagcgttgaagatcacgggccacaacggatttccagtggtcgatgagccacctctaacagaagctccagagttggttgggctggtgcttagatcacacctgttggttctgctgaaaggcaagaccttcatgaaggataaggcaaaaacaagcggtagctttgtgttgcgaagatttggtgcatttgactttgccaagcctggttctgggaaaggtatgaagatcgaggacctggatttcactgacgaagaaatggagatgtatgtcgatctccatccgatcacaaatacttcaccctacacggtggttgagacaatgtcgcttgcaaaggctgcagttcttttcagggcactggggctaagacacctcctggttgtgccaaagaccccagggagacctcccattgttgggattctcacaaggcacgacctcgatgccggagcatatccacgggctgttccccgatctccacaagtcgcattgaggtgcgaaatcagagcactcatagcagatcatacaatttttcttcgtctccgtcatttctcatgaagatgcctcattggatcgtggaataatcagcagtttgagtggatttccttttggtagttttatcatacccttgtgtgtaacaaacaatagagtcttgtcagtacatgcgctctactttttcctctagctgtgcctt

SEQ ID NO: 2297 - DNA, 806 bp, Avena sativa
atacggagtttaaattcccacagattaaggcacacccatggcacaaggtattccataaaaggatgccacccgaagcagttgatcttgtctctcggctccttcaatactcgcccagcctaagatgcactgctgtggaggcacttgttcaccccttctttgatgagcttcgggacgcgaatacccgccttccgaatggtcgctttctgcctcctctttttaacttcaagcccaacgaacttaaaggaatccctgtcgacatcgtggcaaaattgatcccagagcatgcaagaaagcagtgctcccatgcaggattgtgagagtttgcctcatgactcacgttggaatttcattgacaagtgcgcatttcccctggaacgttggttgggcagcatgctgagcatgatgaactgatggttgttgaagattgtgaagttccgttcttgtatgaccgctccactttgttgacttgtgtagctgagtagtatgctgcgatgcaaacttgacaatgtaacttgttcaccctccctcctaaccctcgcctgagaattgagattgccatagctgatctgtaatatgttctagagcagtatgaatgtatttatggtagttgatccatatatggatcctcttcgattttcctagtttcttgatcgtcaggctgttagctggatttagattgttataatagtactgtgtacttgttggctcctgttgagtcgttcgttgcaatgtgagacaatttgtttttcacaaatgttttggtcatgcgaataattgatttctgctgtgtagctgtagaaaaaaaa

SEQ ID NO: 2298 - DNA, 826 bp, Avena sativa
tccagggtaaaaaaagttcaaatcgacgagagccacgattggtggcaaaaggtttcaggctgtcacgtgacccggccaaagaacaacatggcacatgcaccagaaactcacatttccatttgtgtgaccagcatgattaggccatgtgactcaatcaagagactaatcaatcattgtaagctgcatataatttcacaacaagaacaaagttggggggcatcaacgaatgcagtgatccaactgcaggtcggcagctaaaagaataagatgccatggcacatctacaaagattcgactagcttcgagtttgggtaattgtggataccattatggaacacgcgttttcttggacgggcgacgggaaaatcgaggagaaagtaaaatgaagaatcttgatcaggcagttgccgccatgggtaccgctctgtagcaagctcgcctcgctgcacggacgatatcctcaatctgtggaacagccaatctctccaggttggcagcatagggcatgggtacatcggctccagcaatcctctccaccggagcatcaagatactcgaaactttcttctacaacagacatgcatatttcagcaccaacaccatgctgggggaagccttcttcaagagtcaccaatctatttgttttcctaacagatgcatttatggcagccctatccagtggtctaattgatcgaaggttgatcacctcagcactaattccttccttggacagtatctcagcagcctgaagagcataaccgaccatcttggagaatgcagtaattgtaacatctttaccttcacgttcaatcttagctttgccaatt

SEQ ID NO: 2299 - DNA, 940 bp, Avena sativa
ccacgcgcgcgggctccggcgtctccaccgcctgggacaccgccagcaccagccaccgctcgctcacctccgaggagcagttcatgacgatgagccgcgagttcacagccatggtcgcagccggcgccggcgcaggagccggggcgaccaccccaaacaacaacaacccaggcagcggcgcctacgacggcgccggcgccgaccagctcaccagcatcggcgaggacgagctggaggagcacaacccgctggccatcgtgccggacagcggccgtcccttcgccacgccgggcagcagcagcaggaacgacggcagcggcagggcggccaggctcgacctcgaggtggtccccgcggcgggcccgcccgtggaggcgaagcaggtgaggaaggaggaggtggagaccaaggtgtcggcgtggcagacggccgaggtggcgcagatcaacaaccgcttcaagagggaggaggtggtcatcaacggctgggagactgagcaggtggacaaggccgtcgcctggctcaagaagatcgagaggaagcttgacgagcagcgcgccaaggctgtggagaagacgcagaacgacatggcgaaggcgcgtcgcaaggcggaggagaagcgggcgtcggcggaggcgaagcggggcctgaagctggccaaggtgctggagctggccaacttcatgaaggccgtcggcagggtgcccaccaagcgctcattcttctagcacccaagcagagctctgctctaccgggtcaccggtgcctccaccttgctgccttctctcccttctgaaccctgtccgttttgctcacggttggtgtgtgctgcctgctgcgtccgatacgatcgagaacctaattgtaaaaagatttggaaatttctgttcgcgttgtgtactacagtagtagtcgtagctgccggtgatgttgtgatcac

SEQ ID NO: 2300 - DNA, 719 bp, Avena sativa
gctacatcctcgagaggatcacggaggtcgccggagtggtcctgtccctggacccgaagccgatccccggcgactggaacggcgccggcgcgcacaccaactacagcaccaagtcgatgcgggaggaaggcgggttcgaggtgatcaagaaggccatcgagaagctgggcaagcggcacacggagcacatcgccgcctacggcgagggcaacgagcgccgcctgacgggccaccacgagaccgccgacatcaacaccttcaaatggggcgtggcgaaccgcggcgcgtccatccgcgtgggccgcgacacggagaaggagggcaagggctacttcgaggaccgcaggccggcctccaacatggacccctacgtcgtcacctccatgatcgccgagaccacgctcctcctctgaacaccaaccaccctacacctacacctacacacaaacggcaacgatgatgatggttgctgcgtcctcgactctctcgatcgagggtggtggtgatggttgatttccgcaaaattgtcaaagttcgcttccttgtattttcgattccttcgcgtaccttacaaaggtctcatttagcggccattgtctgtttttttcttccttcggtgtactctttttctgtaagagtctccagtgtactctgaataatgcttatgtttccgcattctgataaatgaatttacggaaccggttgtgtttcaaaaaaaa

SEQ ID NO: 2301 - DNA, 675 bp, Avena sativa
accatggatgaggagtgcttcttgccattgaactccagcgcagcgaggacacaacaagatatcgagatgcattcagtagtgcagccttcgtggcagcatgagttcaccggggtgatgaggaagtcttctggaccagcaactgctgccaagtctatttacgaggatgatcatggctacttgataatggtcagcttaccatttgttgatcagcagagggtaaaggtttcatggaagaacactcttactcatggtatagttaagatcctttgtgtgagtacatctcggatgcaatacataagaagacatggtagggtcttcaagctcactgacgcaacccccgagcactgccctcctggggagttcctccgtgaaatacctctagctacccgtatccctgaagatgctaagctggaggcatgctttgatgaggctgccgcagttcttgagatcatggtccccaaaagaggaaccgagccggaagagcatgaagtcagggtctccatgcgccctcctcaccttggagttaacgacctacttctgacttaggtaatgaaagatctccccatcatgttggtatcttgtttgtggtcaccagatcagaggctccaagaggtgaaaaggttacctgtattaatcttgttttgagggtgtttgctcctgcttaccgcattaggc

SEQ ID NO: 2302 - DNA, 698 bp, Avena sativa
  modified_base (330)..(330): a, c, t, g, unknown or other
  modified_base (342)..(342): a, c, t, g, unknown or other
ccgcctgccgcgccgcgcacgtcaaggccatcgaagtgctcgtcgagctcgcatcgctccagacctccttcctcaccctcgacgaggccatcaagaccaccaaccgccgtgtcaacgccctcgagaacgtcgtcaagcccaggcttgagaacaccatcacctacatcaagggggagctggacgagctcgagcgtgaggacttcttcaggctaaagaagatccaggggtacaagaggagggaggtcgagcggcagatgatcgcggccaagcagttcgccgaggagcagcttgcggaggatctggcactcaagagaggcatctcgatggganccgcggcaaacntactggctgctggtggcgacaaggacgacgacattatcttctgatcatgcgtctttatccaattattcaatcgtggtgtagacaataagttctggtgctggatctccagaatcgtatttgtttatagggtggcggaggtttttgtttcaggcggtagcctgatttctggctatccaagacctgaaataatttgtacttgggacccaaacattgtggatgaactttggcagggaggggagctgtgttagcaaattcatttgtaccgtattttatttccatgcacgctcgatttagttacacatgtttattgaggaagactcaactgtgaagctgcactgctgcagacttgtgtatta

SEQ ID NO: 2303 - DNA, 857 bp, Avena sativa
aagaaaccaccacgaaggagcgacgactcactgattactccctggattttgttccgttacctggtcattggcctttatgtggggagttgccactgttggcatctttgtcatctggtacactcatggatctttcatgggcattgacctcactggagatggccacacccttgtcagttactcgcagctctcaaactggggccagtgctcaacttgggacaacttcaccgttgcgcccttcactgctggggctagaactttcaccttcgacaacccctgcgagtacttccaagccggcaaagtgaaggcgacaacgctctcgctgtcggtgctggtggcaatcgagatgttcaactcactcaacgccctctctgaagacaccagccttctcagcatgcctccgtgggtcaacccgtggctgctcctggccatgtctgtgtcgttcgggctgcacttcctcatcctctacgtgccattcctcgcacaggtgtttggcatcgtgcccctcagcctgaacgagtggctgctggtgcttctcgtggcgctccccgtggtgctcatcgacgaggtcctcaagtttgtgggcaggtgcacgaccgcttcgggtcccaagaggcgattaaagaagcagaagggcgagtgagggtggctaacagcggttctttcaggcatcgcagaaactaatcaatttgttccggaccatgtaacagtggtcgccaaaggatgtttattcagccgataatatatatatccgtccaatacaggaaactgaagtagataaagtttctcaaacaagatcaaactttagcagatctgctcttgttttttagtctgttaggttgcaaccttaattatatata

SEQ ID NO: 2304 - DNA, 873 bp, Avena sativa
cacaatgatagtgacactggcgatgccagcagctgggaaacgataagccgtgaggaaatgcagggctcaagtggttcacctgagggaagcgagtcgtcggtcaacaagatctttgacggtagcatttcttggacaagcagaaccgattttgagtacggggagatcgagaagctaaaggatgacttggccgatgcatacctgacaaccatgacccagcccaagaagaaagagtcagccatctcaaagctctggaagtcgtcgcgtccaaagacagtgatgtctccaagaaagacgccaatggaggcactaaatgctagagcatcaaatgtaaggctatcggtcgggacgcattccaccatcgaaagcggcattcaggagattggcctcagtccgccgagcgccgatcagtggagctcaccggactcgatgaacatccaattcaaccgggggttcaagggctgcatggagtacccgaggacgtcccagaagcacagcctgaaggagaagctcatcgaggcgcggatggtgagccagaaggtgcagctccgccaagtgctcaagcagaagatctaggaactgccagaaccccacgaggtgaaacattccaagcctagaacttaatgcaagaaataatctgtagaagtacttcgatgcttcatttttccttgtcgtaggttcacttgtatttttcctgtcttagggtcaaattgtaagttgtaattgttgtaccaaagaactgaaatagatcaagtcggcctttgtgggtcggtctggagccctgctgcttctgtatcctgccgtagttctggggatatggttcctattacggtgagatacatcatgatgtaatatagacataaacaagcagcaatg

SEQ ID NO: 2305 - DNA, 438 bp, Avena sativa
gaatcgagcaaggagcccaagccgtcgctcatccctcgctcgccgcttgcgacaatcaactgagatgatggttgtatacgcctctgtgtgcagtgtaatcttatcttatttgttattaccaggacatcagatttctggctttgatgtccttgttgtgctagggtttcctgggctgcgagctgtcttagcttcacccgttccagttagtagaatactagaatgtatcattttgttgtgtgatactgtggagcagcaaatatttttttattgttccctccgacccaaattagtttgaatctactcaattttatcaagatacggatgaatctaatactaaattatgtctagatataatcaaatctaaagaaatctaagtcaactaatttgggttggagggagtatcgaaattcagtaatgaaacttcgagcttgtattaaa

SEQ ID NO: 2306 - DNA, 670 bp, Avena sativa
ggtgtttggtccgatgctccagccgacggtcaacgccagcaaccagttcctcatctacttcctcaaaggaggtcctgatctgataagggacaagctgtggcacctcgtcgacgtccgcgacgtcgccgaggcgctgctcctggtctatgaggcgcccggagcggcaggccggcacatctgcgcgccgcacttcatcaccgcccgggaactgctgggcttgctcaagagcatgtaccctgggtacccatacatagccgaggagagcatctgtgacatggatcacccggctccgatgacctccggcaagctggagaagctggggtggagctgcaggtcgctgagggacaccatcacggacgccgtcgacttctgcagggaggctgggtttcttgaggacggcgcgccatgccgtttccccctcttctaaacaaatttagggcaggaagagagaagttcagtggtcaccgtgcgagaaactctgctgctgctgctcttctattaccgctacttacaaggtttatttattaataaccgcgcgtgttgctatatataatgcgggcggaggtattgtattgcttaacttggtttgctatttatggatgtttgcgtcgccaagatagtaataaaaatttatgtatgaacacattgcttaattaatttggtttgctac

SEQ ID NO: 2307 - DNA, 626 bp, Avena sativa
aagatagtttgaaacttcttcaattggggtgcacatattctgctcattggatttgctagtggagatgttccagttattcgagcaaacattgcacttattaagaactggacaattcatggtctttactggggaagctacttaattcatcggccagcagtactcattgactcacttaacgaacttctgtcatggctttcaaagggtttgataacagttcaaatctcacacacctacaggctccctgaggctcatctcgcttttgctgcctttgagagataggaaggccgttggtaaagtcatgcttgttatgggctcgtcaacaaaatcaagactttgattcccctcgaatgggtttcccaggaaagcctcgacatctattgtggaatacttgtgctctatcgttgtctgatataaaatcatccaagacagcggtagtgtgcatgccaataatttggtgtacaggcgtacagccattctcgcataaaagccacaagacagcgaaatggttcatatgtatacatcatgtattcgtgtggacaactcactggtgcgtgtgcaggcagtggtccgactaaatgtgtaaacgaacgaaataaatatcatcacaagttgttaagaaaaaaaaa

SEQ ID NO: 2308 - DNA, 743 bp, Avena sativa
tcccgggattgaagtatttaaaaaagctgggacatacaatcctaagcgtttgttgggggtgacaacacttgatgtagtgagagctaatacttttgtgggggaggttcttggtcttgaccccagagatgtcaatgtacctgttgttggagggcatgcgggagttacgatattaccactcctttcacaggttaatccaccctgctcgtttaccccagaagaaattagttatctcacttctcgcatacagaatggtgggacagaagtagttgaggcgaaagcaggagcaggatcggcaactctttctatggcgtatgcggcagctaaatttgcagatgcttgcttgagaggattgcacggtgatgctgggatagtggagtgctcttatgtagattctcaggtgacggaactgcctttctttgcatctaaagtgcgcctaggtcgttctggcatcgaggagatcttgccacttggtccactcaacgagtttgaaagagctgggctggagaaggcgaagaaggagctgtcggagagcatccagaagggcgtctcgttcgtcaacaagtgagttacgtacatagtacacatgatcatcatcgtcgtcttggggatgcacgtacgccctcaaaatcgaaatgcatatgcatatgctgtgtgtgtgcttttgcttcattgaaaacagacacccgtgtgtgttatatatatacctgtagaactatcacggaaataatcttcacggctgtaac

SEQ ID NO: 2309 - DNA, 733 bp, Avena sativa
cacgagcatatccgaagaagcgaattggcagatctttttcttgacacgcccctttgcaatgcacacacaactggtaccgacattctatgggctggcttgccgatgatcacacttccactagagaaaatggcaaccagagtagctggttccctgtgtttagcgactgggcttggagatgagatgattgttagcagcacgaaggagtacgaagacagagcggtcgaactggcaacaagcccagcaaaactccaagcactgaccaataagcttaaagaagcccgtttaacgagtccattgtttgatacggctcgatgggttcggaaccttgatagggcgtatttcaagatgtggaacctttattgctctggccatcatccggagccgtttaaggtgaaggaagacgacaaagagttcccgtatgatagatgagtgggcgtgagaaatctcggctgtgtagataaaagcagagtttgtagcgtagtacaatcatgtaactggtatgtctgcgccctgtcccgctgtatcccgcgtgtagtcctacatattgtaccaaacggagaagcattctaggtttagccgtctatttatgtgtgccgacagaagattatagttctgttggtgcctgattgttgtatactatgaaccgcatctcctgctgctttgtgtcggatgttagaaaaacttagctgcaagtctgcaacgacacaagatgagtgtttgaaatctatatcat

SEQ ID NO: 2310 - DNA, 758 bp, Avena sativa
tatgcaggttgctcatcttgagcgaactggacattacttgactgttaaggataatcaggttggtgttctgatctcactctcaactgtttccccagagtgttgcattgcagctattaacccatctttccttgccaggttgtccatcttcatccgtcgaattgtatggatcataagccagagtgggtcatctacaatgaatatgttttgaccacaaggaatttcatccgcacagtcaccgatatccgtggagaatggtaagtccttttctgacaaaaccctgttggcatgtgaaaatttgatacaaaatattgacttttcctgtacttcacgcaggctgattgatatagctccacagtactatgatctgaccaatttcccatcatgtgaggcgaagcgtgtcctcgagaggctacataacaagcgtgagagggaaagagctgccaatagaagctgatctgatgatattctcctggttgcttgccgttgggacatgggcagagctgccagcaaactttgggcaatcactgatatgcagttggcctccaccatgtatcatgaatcttcaatgtcgtaatttttcagtatcgtggatggtgaaatcactatgtgacccctctgctactgcattgcgactatagaagtaatggccttagaattatatgtttgtttttccttcgttatagaaggggtgtaggttgtcatgtggattaagtgtgtactagtctctggtgaaacgaacattgttgttttctttagaa

SEQ ID NO: 2311 - DNA, 643 bp, Avena sativa
gaagataaaagagtctacctggttccgaaaaggtccaaggagcaaccatcttgcagtgaaggagagaactcacagtgagaatgtcaccacaaatgccgcagctggtgtgaggcccaggaagacagctcctgaagatgtgaagcccatgacagtgacaaacttaaatgcctttgagatcatctccttctccacggggtttgacctgtccggcctgttcatccaagaggagtgcagaaaggaggcaaggttcacttcagacaagcctgcttcagacatcatctcgaagctggaatgtgtcgcgaaggcgctgaatctcagggtaaggaagaaggacaatggcgtggtgaagatgcaagcgcggaaggaggggaggaacggtgttcttcagttggacacggagatctttgagatcacgccttcccatcatctcatcgagatgaaacagacaggcggcgatccgctggagtaccggaagctgatggaggacatccggccagcgctgaaggacatagtctgggcctggcatggagatgaccagcagcagcaagattaggttttggaagtgctgagtatttagttttcgatcctcaagtttgttaccttttcagctagaacgattcgttctacatgcgtgtgttctttg

SEQ ID NO: 2312 - DNA, 552 bp, Avena sativa
acacgctcagcgccgtgcaggtcctctgcctcttcgatcggctcgatgtgcttgatgcagacaaggttgctgattatgttactggacttcagaatgaggatggatcattttctggtgatatttggggtgaagttgacactaggttctcgtatatttccttatgcaccttgtcgttactgcatcgactgcacaaaattaatgtggaaaaggctgtagagtatattgttagctgtaagaacttggacgggggatttggagctatgccaggaggggagtctcatgctgggcagatattctgttgtgttggtgctctcgcgatcaccggctctttgcatcatgttgatagagatcttcttggatggtggctttgtgagcgccagtgtagagatggagggctcaatgggcgacccgagaaacttgctgatgtgtgctactcatggtgggtgttatcaagcttgataatgattgatagagtgcactggattgacaaggaaaaacttgcaaaattcatattgaactgtcaggacaaggaaatggtaggaatttcagata

SEQ ID NO: 2313 - DNA, 535 bp, Avena sativa
tggagcagcagcgtgatatgggagacttgctcagcatgatccgttcgggaatgagcggcagagaattcggagtcagcgaaggtgaagagggtgtcaccgagagaaccttgcatggctcgtccttcaccatggttgtcattatgcgagccgggttcacggacggggaaatctcaactcgtcgtcgacagagaacttttttccttcttacttcaggaggggcggctagcagcagtgttgatgctgaggccgctgctgccaccgacaatgaggaggctgacgacttggcaatgtccacggaggcatctgccggttctcagcaagatgcgggagaagatgacggtgaccctgcgcaatgatgatgcaagcctatgccagcaaagccattgttgacgctggcctgcagtggaggagagcatggttgggaaagaaacatccgtttcagcttcgttcgtctcgggggcgtagtcaggacattctgtctacgaaacaagaagaaactagaggaggaggaggaggaggaggggcgaggttagga

SEQ ID NO: 2314 - DNA, 671 bp, Avena sativa
ggatttggcaatagagacacagatgagcttagttacagaaagatgggaattcccaaaggcaagatttttatcatcaacccgaagggtgaggtggccataaacagctctgttgatgtgaagtcctatacctccttacatacccttgtgaatgacatgttccctccaacaactatggttgagcaggaagactacaattcctggaattactggaaggtgccgctgccagacgttgatttgtaatgtagcttttgacaaatacagcactagacacaagtagagtccgcgacagcatgtcaggcaagcaagtcggtgtacactagttcactcaatcgttacagctgcagagttggacctgtaaagcatctcgagagttcccagagatatactgtttcgatcaccgttgcagaaagtcccagttttcctctgctccggcgcgcgcagctctatcacgatcattcatcttttaggtagtgatctgatcgtcatcatcgtgactggttgctgctgctggatctagtagaggccaaagactctctcgtcggcatctcacgaggtagcccgagcttgttaatatgttatcagcaacttgctttccattgttcccattagctgtagcttatgtgccaattagaatactcctcctggtgcaggaaaggaactgtgaacataga

SEQ ID NO: 2315 - DNA, 612 bp, Avena sativa
ggcttgatggagagattggttgcatggtgaatggcgcaggattggcaatggctacgatggacattattaagttgcatggtggtacacccgccaattttctcgatgttggtgggagtgcgtcagagggacaggttgtggaagcatttaagatattgacttcagatgatagagtgaaggcaattctagtgaacatttttggaggtatcatgaaatgtgacgtgatagctagtggaatagtaaatgcagctaaacaggttgatcttaaggtccctgttgttgttcggctcgaaggcaccaacgtagaccaagggaagaggattcttaaggaaagtggattgacattgatcactgcagaggatcttgatgacgcagctgagaaagccgtaaaagcatatatcaaatgattaatgatttctagcatatcagtctaaagttccattttcactgttacaagagtggtgctcttactgatttcacaagctgaaatcttgaaatgcattttttttgtaagtggagtgattccacttttgtagttttcctttaaacttgtgacctttatgttaataaatctatgtgggcacaaaaatgagcagctacggtttgtgtaaaaaa

SEQ ID NO: 2316 - DNA, 756 bp, Avena sativa
gataaggttttctccatcagagaagctgctgcgaacaacttgaagcgcctggcagaggagtttggtccagagtgggcaatgcaacacataatccctcaggtattggagaagataaacaacccacattatctgtatcgcatgaccatcctgcaagctatctcattgcttgcacctgtcatgggtgcagaaataacatgtcaaaagcttctccccgtcgtaattaattcgtcgaaggacagagtgccgaacatcaagttcaatgttgcaaaagttttgcagtcgcttgtacctatccttgatcaatctgtcgtcgagaagactgtgaaaccatgccttgtcgagctcagcgaggaccctgatgtggacgtaagatactatgcaaaccaggcccttcaggcgtgtgatcaaaacatgatgtcaagctaactagctactgtcgagtgtttagaagataattcttcttagtcgagcttcggagtacatgtaatttaccctctagagtgggaacttccttctagccccagtaaccgacctatggttctgttcccattttattgtccttattgttgtaattgagcaagacaacacccacgtggtttacatggcagtttgaacctggtttctgtcaatttggatgtagtgtgcctggtgtcatttttttgaatgtaattgttattcgttgattttggctgcctccttgaatattgcaaagttaatatatcggcagttgtattgttagttcttctggtgcttcgg

SEQ ID NO: 2317 - DNA, 301 bp, Avena sativa
cgtggtgcttctcgtcgtcaggatgaacaaggccgccgatagtctgtttcaggatttagtacttctcccattatgatgttgccctttttctgaccagaaacttgacaagttactgtgtagaagaacatcgctgaggcactttgttgcccttctgtagtgtttttttccaaatgagaaagaaaaccttaaatccttttcatctttgttacaacaataataaacacacggcagattacccaaacactagcagagccctgcgttgctatggcataatatgaaatcaaataaacaattcttcata

SEQ ID NO: 2318 - DNA, 852 bp, Avena sativa
tgaccctggaggatttcctcgccagggaggaggaggctagggttacgggcgtggaggtgaacatggcggttgggttccctgatgcggcggaggccgtggcgggagggcggcgacgagggggtggtgccggcggcgcgagggggaggaagagggcgctcatggatcccatggaccgcgcggccacgcagcggcagaagcggatgattaagaaccgcgagtctgcggccaggtccagggagaggaaacaggcttacatcgcagagctggaggcacaggtcacacagctcgaggaggaacatgctgagctgctaagagaacaggaggagcaaaacgagaagaggcttaatgagctcaaggaacaagcattccaggttgtcataaggaaaaaaccatcgcaagatcttagaaggaccaattcaatggagtggtagacgtaacccgaaagccctgttgttactgtcttacagttacagagtttcttctttcgctttctgttaccccagtcgtcggtggtggcggcgatgtagaagactaagacttgttaggtgaaggactcttatcttagcccaaaaagagaaagaaggatgtagacaagattctgtgcgtgatccaaaaagtcgcgccgctcagaattgtgtgtgatcagctatttattttttctgtcattgtggctcgtatgtatgtacaaaccaaaataagcatgttttgcatgaaacttagactaggacttgttacaaagacattttgtagagatttgagctaaagctgtttacttgtgttcagttttcagcctctcatgcagtttcagtttgacatggtccacggtcaatcaggttgctgatttttgagcct

SEQ ID NO: 2319 - DNA, 534 bp, Avena sativa
cggcaaatcctggatgagatcgaagccaacgactacaacaacttcacgaagagggcctatgtcggaaaggcgaaaaaagtgctggcacttcctgtcgcgtacggtagatcgctgctcctaccatactcactgagaaatagccagaaatagaggaaacgcaggcagagattatgatcaggttaggccagatagaaacagggcaacatctgccttcgagcccttcctcgagttaagacgatgtggcagatcgttccatttcacggccgtgcttgtcgcctggagtgctgggagaagggggaaaaacaccgcagccaacctagacggagactgaaggatcttctaaaaagatgcagactgaatgttagcatgtatattattactagaaccatatgaatttgtgcacagaacagcatgtatactactggttgtctgtccccgatttggggaaaacaggagtgatcttgtgtaactgtatatattaaagcaatggcttgtataataacgacgatgtcttccattttaattctacaatgg

SEQ ID NO: 2320 - DNA, 555 bp, Avena sativa
ggaagaggctgctgtacaaagagaaaaggaacggcaacggatgatgtccattcctgggctcattgccccgagcgaattgcaagacgagatggtagattcatagtgtgcctgctgattctgcctttctaatccagtggcctggagagggcctcgacatcatccccccaaaagccttagtgatcttccatggtggtgaaaggtgcctgctgtaattttattctcggttgcctccacttgactcttgatagggactcaattttgtcgcaagagctgctttggagtggtattggtttgcggcattttgcgctgtgtgggttagatttggtttagcaagcagctcttgtgctcctcgtgggttgtaacatttggttgggtgctgtgtgatgagccatgattgatgatcacggtgcaacatttgtatggtgctgcttattgctagtttagcctatagtttgactgtatgatgtaccaagactgatgatccagactgataggaaccttataatcctgctattgtactgttatatgtgaaatatgttttttaacctacaaaaa

SEQ ID NO: 2321 - DNA, 790 bp, Avena sativa
aggtttcatctgttccccaaaagagggatcctattacaaaaggctgcccaagtccagtgaaataaaggtgattgattttggcagcacaacctatgaccagcaggaccagacctatgtggtttctaccaggcattatcgggcccctgaagttatcttgggacttggatggagttacccatgtgatatctggagtgttggctgtatactagtagaactgtgcacgggagaggcattatttcaaacccatgaaaatttggagcatctggctatgatggagagggtgctcagcccgttgccttaccacatgcttaagagggcagatcgacatgctgagaaatatgtcagaaaaggccgtttaaactggcctgaaggatgtgcttcacgggagagcatgaaagcggtcatgaagctgccccgtcttcagaatctggtgatgcaaaatgtagaccattctgctggggactttattgatcttttgcaagggttgcttaggcatgatccggcaagccgcttaacagcccatgaagcgcttaagcatccattcttgacggaacagagtgagcggagaagatgacactccttccccatgcagcgcttaagcgtccactcttgacggggcagagtgagtagagaagacaacggtttagagtgagtgaagaaggtgctcctttagtagaaaacactgacagccgttatggccctaacttttatcttctgttccaaagtggcttcagtgtctgctgtactgcacagagcatttgatgtagaagtcagtgacttgtaatgtagt

SEQ ID NO: 2322 - DNA, 714 bp, Avena sativa
gattctaaaaattaccatgcttggtcccataggcagtgggttcttcaagcattgggtggatgggagagtgaattgcagtactgcaaccagctgcttgaggaagatgtcttcaataactctgcttggaatcagagataccttgtggtaacacaatccccaattcttgggggtcttgcggcaatgcgtgactcggaagtagattacacagttgaggctattacagcaaaccctcagaacgaaagctcctggagatacctcaggggtctatataagggcgataataacttgctggtggctgacgaccgcatttctgatgtctgcctcaaggtcctgaataatgattcagcatgtgtgtttgctctgggcttgctgctcgatcttctctgcttgggtctacagccttcggatgaactcaagggaaggatcgaagcaataaataatcctgatcctggagcgggacatgctgatcttgcgatagctgtctgctcgatcctgcagagatgtgaccccctgcggataaactattggtcatggtaccagaccactctttcttcttagacatctccgaaaattcggctggagatagtttttagcagcgcgatttaaactcaatcgaatgggttgaaagtgtatgagaaacctttatgtgatcctggcattgtgcaaaatgtgtactaattttactcgatcagtgacattatgcaacaatgtctt

SEQ ID NO: 2323 - DNA, 609 bp, Avena sativa
  modified_base (609)..(609): a, c, t, g, unknown or other
gcagcggtctcttgcagttcgagaagatggtctcctcgtcaccactctagtggctctcgagatagcttgctcctctcggccggctatggtggcgagggagaggccgagtttgcctcggggctgactgatgggtgaggggagaaggggtcgggaggtggtgctggttctgctttctcggcaccagccagtctcagtgaagctcaagttgcggaagttcccaagcgatggcgaggagcgccgccgctatctttggccaagggggccactccgcacctcgagagttgtggctccgaggatttttctcctccaagcagagctgccgactcggaggtcaatcgatctcaacacggcgatccatcctgacggcggaccaagtggcgtagtccccggcgtcgccgccagcggccgtgtagcgagatcctggaatcgactcggtggagacgaatgacgggattgcttttcctttttctctttgagggtcctttgtataaaagttgaggacaagcttgtatttcttgtaatttctagggtcctcttcgtaattctacccaccgagtaatggagcttccggggccttcggacctcttacccgttaaaaaaaaaaaaaan

SEQ ID NO: 2324 - DNA, 496 bp, Avena sativa
tagagtctgtttaagtcttgggcactgcaagctcattgaagagattatgattggggaggacaggctgatacatttttccggggttgcaatggggcaagcttgcaccattgtcctgagaggagcaagtgagcatgtgcttgatgaggctgagaggtccttgcatgatgccttgtgtgtgctttctcagacagtaaaggacacacgtgtcatatttggtggtggatggcctgagatggtgatggccaaagaggtggatgaacttgcaaggaaaacccctgggaagaaatctcacgcaattgatgccttttcgcgtgccctgcaagccatcccaacaatcatagctgacaatgctggtttggacagtgctgagctgatctcccagctccgagctgagcaccacaaagagaacagtactgctggaatcgatgtcatcagtggcggcctggggagacatgcaaagcgtggatctgcgaggccttcaaggtgaagcaagcca

SEQ ID NO: 2325 - DNA, 778 bp, Avena sativa
gctcagcctcctcttcatcggcctccgcctcgagcagcagttcggatacgtgaggatcggcgcgatctacatgctctcgggcctgggcggcagcgtgctgtcgtcgctcttcatccggggctccatctccgtgggggcctcgggcgcgctgttcggcctgctgggcgccatgctctcggagctgctctccaactggaccatctacaccaacaaggtggcggcggtgctcacgctgctcttcgtcgtcgccgtcaacctggtgctgggcatcctgccccacgtcaacaacttcgcccacatcggcgggttcgtcacggggttcctcctcggattcgtgctcctcatgaggccccacttcgggtggatggagcgctacggcctccccgccggcgccacctgcacctccaagaagtacctcgcctaccagtgggcgctcatggccgtcgccctcgtcctcgccgtcgcaggattcgcgaccgggctggcgctggtgttccggggctccaacgccaacgagagctgccactggtgccactacctcagctgcgtccccaccaagagctggacctgcaccaactgaactcaacacacaacacgagcagcagatcgagtttttccctgtctgtcacgcattcttcttctccttcttcttcttcgtgccccacgcaacccgttcatgtatacgtacaaatctgtagatagagatgggaggattggttgcttacggtagacagatacagacatggctccttggggcggtcttatcccttcttcttgt

SEQ ID NO: 2326 - DNA, 790 bp, Avena sativa
tgatgggctcctgctgttcacgcccatcgcgttcctcgcgtggttcccctttgtgtccgagttccagacgaggatgctgttcaaccaagcattcagcagagggttgcagatctcccggatcctcggtgggcacaagaaggacaaagcaaccaggaacaaggagtaggttcagggcttgtgccagcagcactgtccatcctagtaactcgaccacggctcttgtagtaggttctgctgcattgcactgagttttcccttgtaggctctgcttcactgaggtaccctgtgcgattttgcaccagactatgttagcggattcagagaccgggtggtcgtacagtaggctagtattctcgattgtagatgtagattcagaactgttgcgctgtaccttgtgtaaagctgctgctccttggctctgcaggtgactcttaatggtatgtaaagctctactgctccttagctgaaccttatgtagttatggtggaagtatgtgacaaatgcggcaagtattgggatcaggatatccaggtccaggcatctgggttgggtatggaatctcttcaaactgtttggtctgatcaatcctgttgtatctctttaaaccatgtctgtttagtacacagcgatgttaaccattgctgtaacatgatagatgagctttcgttgggatttttattgtactccagaaaacagaaagcgaaagaactacacaggtccttcaggacatcaacacagattcttcccttgctgaactaaaaaaaaaaaaagaaaaaaaaaaaaataaaaa

SEQ ID NO: 2327 - DNA, 570 bp, Avena sativa
aggcatatgagaagaaaactagtccacgttggatgtacgatcttggtcggaagaggaattttgcgcaggtctttggaaatgacaagaagtattggttcatccccgcatactcagaagaggacctacgaaggatgcctgctctgcagggccttgattatcctgtcagatcagatttggacggtcaagaattgtgacaacacggaattttccagggcccctgactgacatagcagtttggtcgggcaaaatatttgatgtaacttcgatagtttccttaacaatatgcctcggtgctcaacatcttgtacaacacacaacattgctggatggttatgtgaggcatctatccagttttcatgggatagccggttaaaccatgcatggttcgctcctgctgttggaaggggtcctataccccggatgctgtggtccactggtccaatatgcatgcgatgtaaattatttgtgctgtatgaattctttcttagtgtttttagtatgggctttgagatgcacatgatgtactgttactgagagaagccgattggtaaatgtactactatttgttga

SEQ ID NO: 2328 - DNA, 636 bp, Avena sativa
cttttgcattcggtctcattctttatgagatgattgaaggattgcccgcttttcacccaaagcctcgagaggaagcagccaagatgatttcttcggaggggttgagaccgttattcaagaataagcccaaatcatatccggaggatgtgaaagagctaatacaagaatgctgggatccaataccttcagtcaggccaacgttctcagatataatcgtacgcctgaacaagatatctgcaaggtgttctaagcaaactcgctggagagacaacttcaagctaccatggaaacaaggtgcacatagatagccctggacttcgacgagaccgtcgccaagatttcgcccttttttgcgtatatatcggtaaaagcacggcgaaaattacatcggtatatgggacaaaagctgttcctttgcaagtttttttctacacgtccgattataatttctcgcttgtttgtatacctcgggtcaagctgtctcctcgaggacaatgtactattaagtttctgaacgttacagatatgcctgcacgctatgcgtctgagcggtataatttttgcttgtttctccgaacaccaaactacagtgaccgtacatggtttttgtttatatgagatagttaccaaaaaaaa

SEQ ID NO: 2329 - DNA, 971 bp, Avena sativa
tgtctgctggtgcctgaatcaatcgatccaaatgggccacacagttcctcaagtggcgctgatggttgtggcaggaatatttatctggacactgatcgaatacacgttgcatcggtacctcttccacatagatactaaaagttactggacaaacacagctcattaccttcttcatggatgccaccacaagcatccaatggatggacttcgacttgtgttcccaccaactgctgccgccatattgtgctatccgttctggagtctagtcaagctcttcactaccacgtctaccactcctggcgtgtttggaggtggtctgttgggttatgtgatctatgattgcacacactactacctgcatcatgcccatccctcatttgatccagcgaaacatctcaagaaataccatctgaaccaccacttcagaattcaaaacaagggctttggaataacatcaaccctgtgggaccatgtattcggaacactgccttcaacaaaagccgctgacaagagcacctgagtttcaccgtatctacctctttgccatacaaaacaccaaggccagattctccatcgccgatgctgaattccagattcttcatcaccaattctttgacgtggaccagttaagtggagatataaggcaggtgccaccgaagtgcttacttgtgcgaatagtcatatgagtcctcggtcgtccagattatgtctcatttaattcttcttgttagaccgcccatgtgtacagagtttgtttttcctagtatagcaccagtattgcattgatttctggctgttggtggccaagtagtataattttgagacaaagtaactgctttgcttgatatgtttgtaagtttcctgttgagtgaaccgttcagttcagttgttcctgttgatggcccttcctgcttttgttgaacaacaagaagactgtatatgtagaactggaattcttgaagtgcacacgg

SEQ ID NO: 2330 - DNA, 687 bp, Avena sativa
agaggaaacaatgctcagctcccaagtggaaggagatgacagggagtggcatatttgcagctggaggcgaggttgaggaagatgaatctgcgtccgtgacacccatccgaccagctttgaagaattaccaggcaatcagtaccataagtcacatctcctttgcccaggaagaaagtgtttctcccaaaaagccaacctccatcgccgaggtggcaaagcagcgagagctaagtggtacgctcctgagcgaggacgacagcaagatggagaagcagctatccaacgcaaaaacaaaggagctcagcggccatgacatcttcgctccaccagaggatcccaggccacgcaactcggagaacggctcgacctcgcagacgccggggaaaaacgcacaggtgagcagcttcaaattcggagaggacgacatggacagtgtggtgaagacggccaagaagatcccaacgaagaaattcaatgacctgacaggcaacgacatcttcaagggcgacgatggtgcggaggtgacgcctgggacggcagagaagcagctgagcgacgcgaagctgaaggagatgagcggcagcaacatcttcgcagacgggaaggcgccgtccgggatttcctcggcggcatccgcaacgcccctggcggcgagagcagcatcgcgctggtctaacagctagcgac

SEQ ID NO: 2331 - DNA, 703 bp, Avena sativa
accactcaatatcttatccagttgttagggctgtgtctgaaatgcttggtggacctgttgacattcttcatcttgacgcacatccagatatctatgattgttttgaagggaacacttactcacatgcttcctcatttgcaagaataatggaaggaggttatgctaggagacttctacaggttggacttcgatcaattaccaaagaaggacgtgaacaaggaaagagatttggcgtggagcagtatgagatgcgtactttctccagagatcgagagaagcttgagaatctgaaacttggggaaggtgtaaagggcgtgtacgtctctgtcgatgtggactgcctcgaccccgcattcgctcctggtgtctctcacattgagccgggaggcctctcgttccgcgacgtgctcaacatcctccagaatctgcaaggcgatgttgtggcgggagacgtggtggagttcaacccgcagcgcgacacggtggatgggatgacggctatggtcgccgcaaagctggtccgggagctcagcgccaagatcgccaagtgagcccctgtcgggctcgggcagcaatagaattttcaggccccttggtcgatgatcttgtttcatacggagtatatatgtatcagccgtgccacatttttgtcatgtggcttaataatttctataaataatgggagtaaaaggcttgctggaaa

SEQ ID NO: 2332 - DNA, 634 bp, Avena sativa
ggtctgcaacatgagccagtacctgtgcatcgggcggttctccgcaacctctttccaggtcctgggccacatgaaaaccgtgtgcgtgctgatcctcggctggattctgttcgactcggctctcaccatcaagaacatactggggatgttgctggccatcatgggcatggtagtctacagctgggccatggagtctgagaagaaggccacggccccgatcccgcggaacaagagcgacatgctggacggggaggacgtgcccctgaagtccagactgagtgggctgccatctgagcttgatgacctcgaggaaggcccgatgaagagctagcctgtcaactattattcattcaattcttcttggttcttttttgtatgtgtatggttcacattgttgggcgagtcgtcctcctcgaagctatcgacagtcttgttaattttgcctcttgctgtgccgaggggtgttcatcataggtgatgacgaccctggctggtctggtggacgtagatgaccacttagaagaatttgtcaaggccgatatgggcccgagccatgccaaaccgtgatggcgtgttgttttataggtgaatgacaatatactttataatggaatacaggtgttaccctaacaaa

SEQ ID NO: 2333 - DNA, 660 bp, Avena sativa
gctggccaagctaattacagtgctgccaaggctggggtcattggcttcacaaaaacagttgctagggaatatgcaagcaggaatatcaatgtgaatgcaatcgcacctggattcatcgcatcagacatgaccgctgaacttggagaggagatcgagaagaaaatcttgtcgactattcccttggggagatatggccagccagaggaagttgctgggttggttgagttcctggccctgaatcctgctgccggctacatcaccggacaggtgcttaccattgatggtgggatggtaatgtaaagtccttgagcaagcctgatggaggttgatatttgctccacctagcgtcatgttttatgtatcgtgcaccgaacaattttggactgtagattagtttctctttcctatttcgtactctgaacctatgcggaataaataatgtgtgaggaagttgaggtctgtgctatatcttcagctcttttttcttaaaaaactacagtaccatttcaccgggggtcttaattgtactctgcgatagaagggaccagttggtacttcaagtggttgtttggataagtagaattagacttgggttctcagagaacatgttttagcaggatttttaggaaaacgagtttaagttggtcattctgttacaaa

SEQ ID NO: 2334 - DNA, 796 bp, Avena sativa
acccaagtcatcagcttctagagaaaaataaattccagcaacaaaggtacaataagttcaaaaatcgatgcatctccgaacgtaagaagttaggaatcggtttgagcgaggaaatgaattcgctctatcgtttttggtcatattatttgagagagagttttaatgaagatatgtacaagcattttaagaactttgcagtagatgatgcagcagcaagttacagatatggacttgagtgtctcttcagattttatagttatggtttggaaaaaaacttccaacgtaatgtatatgaagattttgagcagctgacacttgagttctaccagaagggtgatctttatggacttgaaaaatactgggcatttcatcacttccggaaacagggtagcaccccaatagataagcatccagagttggggaggctcctaagggatgagttccgcaccatcgaggacttcaaggcacggcgtgcggcagagaaagaaaccggcggtagtagcagcaagagtggtgcggcggcaagccatagcaaggctgaggctaagtaggttctacctgggcatggaattttggtggtgatcctacaaaggagaatgtagcaaagattttgtttcctgtaaaccgaggatttgagtagactcgtccctgtgcagattttgctcccccctgcaaatacttgtagcctgtccaggaaatttcctcttctttttttacatcttcctgggatctgtacataaagataaaataattgccttcattaaatagacaaattatagagttaaagaacaaaaaa

SEQ ID NO: 2335 - DNA, 879 bp, Avena sativa
tgagatggcgcaggttccaacattcccagcaaaattgttcttcttctgtgaagtggagccaaagagtggtggagagactccaatagtgctgagccattatgtttataagaggatgaatgaaaaatttccggagtttgtagagaaattggagaagcatggccttatatacacacgggtcttaggagagggtgacgacccatcttctccaatcggccgtggatggcactctacattcctcactaaagataaatctgtcgccgaggaaagggctgcgaagcttggaatgacgttggaatggaccgacgacggggtcaaaacagtaatgggtccaatacctgcagttaagtgggacgaggtccgagtgaggaaaatatggttcaacagcatggttgctgcctacaccgggtggaaggatgctcggaacgatcctgtcaaggccgtcacgtttggcgacggctcgccactgcctgctgatgtcatagacgaatgcgggaagatcctggaggaggaatgcgtcgccgttccgtggcagcaaggtgacatccttctcattgacaactgggcggttctgcactctcggaggtctttcgagcctccacggcgcgtacttgcttcgctttgtaaatagactgtaaatgcgttgtgaggcgtgaggccttgctgaagaatctgtctgcagtatgtatgtatgtgtgacgtctgttttgcagatacgaactgaatgagccctggtaattccaagcaacaccaagtttggtagcaagtacacaaaggctgtcggttttgtctttgtttgtcaatttctctgttggtgtatatttggtaactgctattgtagttccatgagttatatattagttgcatgtttctcttaacaaa

SEQ ID NO: 2336 - DNA, 802 bp, Avena sativa
ggatgatggggatattcataacaagatggagaagctaagtgaaagactagagcatgaaaagaaacgcctggaagagctgagtggagagctggtgaagaaagagcgtgaaagtaacgacgagttacaggaggcccggaaagaactgataatgggtttggaggacatactaagcgggcggacagctatcgggatcaaaaggatgggcgaacttgatgaaaggccttttcagaatgcatgcaggataaagtatgggaatgatgattatgagacaagggcagcagagctggtctcggcctggcaggaggaaataaagaagccggcatggcatccttataagattcttcaggtcgaaggtggaacagacaaggaagttgtaaatgacgatgacccaaaactgcgggaattgtggattgagtatggcgacgacgtttgtaacgcagtgaagaccgctctgagcgaagtaaacgactacaaccccagtggaaggtacgtggtgtcagagctgtggaacttccacaagaaacgcaaggcaacgatgaaagaggtgttcaggtacatcttcctgcagatggagacaccgggcaagcgcaggaggggtcgggtgatgtaagttccagtagggtgtaggcaactggtaccaggagtcctgacatgggagttgcattatctgcattagattcttttctgcatgtgacgttgttgcttcagaccgctgttcgtgctgcgctgttcgttcgtaagcagatatatgatgggtgaaccatgaactcaataataagtcttcttcaggctactaaaaaaa

SEQ ID NO: 2337 - DNA, 618 bp, Avena sativa
tgctgagaggaggctgttgaaggatggctggcctgagtattatgatgggaagcttggaaaatatgttggcaaacaggcaaggaaatttcagacttggtctattgccgggtatttggttgccaagatgctgctggaggacccttcacatcttggaatgatagccctcgaggaggacaaggcaatgaagccagttttgagaaggtctgcctcgtggacaaactaagatatcgacgaaaattcttaggggagcaaagttcgggttggaaacacgaattcttcgggtagcacttctctgctcgtcccttcctttgactttcctaacggaaaggtttgttttcacctgggttgtacaatacctcagctcatttgttgagttggaaaagaagcaattgtggaaatgggcgttttgttttgtttttccctttcaatgtcttgttgtaagaaatactttctcgattcttccctgggtcatcctgaagttatgggatccttttggttggactcaaactttgttgtatgagttgactatatagatgagtaggctgattccagctccctgtgatgaaaaaaagtgctactctaacgaataaagactgctccattttctgcattagtaaa

SEQ ID NO: 2338 - DNA, 632 bp, Avena sativa
agcccaccaagctgtactgtgccaccgacgggcgacatcggctgcagcccccgttgccggagggttacttcggaaacgtcatcttcaccgccaccccactcgctgaggcaggcaaggtgaccggtgccgtggcagatggagcagctgtcatccagggagcactggataggatgtccgacgactactgccgctcagcgttggactacctggagacgcagccggatttgtcagcattggtccgcggagcccacaccttccggtgccctaacctcggcctcaccagctgggtgcgcctgccgatccacaacgccgatttcggttgggggcggcccgtgttcatgggtcctggtggcattgcctacgaggggctggcgttcgtcctcccgagcgcgaacaaggacggcagcctgtccatcgccatctcgttgcaggccgagcacatggagaagttccggaagctgatcgccgacgtgtgagcaggctgcaactttcgtgttgtcagagaaaagatacagggcaaggacatgttcagggttctttttgtcacatatgttaacaggttttgttgctggtatctcttccgggtaaattgtacacttacaatatgtgatattccaatcaacaaagagtac

SEQ ID NO: 2339 - DNA, 858 bp, Avena sativa
gtgctccttgaataaatacgccggtctcgctctagtggtgccgagttgcggcacggcggacgctctcctggccggctgtggtagcggggggaggggcgaagtggcgcttggtgtggtgcgttgttcttcctggtcggtcgtggcggcgaggaggaggagcaacgcggcgcaactgtcttggcatcctgcagcgggtatctgaataattttttgtccgcgttcttctctgggccgctcttcttcgcttgcctcctcccacccgtggcaggtgtggtgactatggcaggtctgtttgcacggatgacgccggtgaagaacctcctgatgcaggtttcttctattcatcacgtcttcttcgacctccagttggcgcaatggtcgcggtaaacggaggcgaggactgggtgagcagcatcgttaggcggcagtggagttgggaagcaattttcttgagcttcacctcggcggcgggtttcagccgtccgacatccaaggccaatgttacttggtctatccagaagccggcgaaaggtttcggccaatcttcaacctcctttgtgaggcccctctcgaggttagctgccgcatacctcgtctgcgtgagagcaagtggtttcgtccccgctaccgcgcatgacggcggcgtgcctggcctccggctcggtggtggagaagaggaaggactggtttggattgtttttttttagtgaggtcttttctacaaatgccagggacctatgttttattccctattttatgaggtcttttgtgatcttttgtaacctccccgtttggattatatgtgatgcttccagtcccttcggggacactaccgttaaaaaacctctgttttcaaca

SEQ ID NO: 2340 - DNA, 749 bp, Avena sativa
tcaggttgttctagttattgctggagagaatgttgatttgggtgccatcgaagcagaagttagcaagcagtgtgatgctcttcctagaggagaattcgcttccaaagcacttggccacagtttcagtgtttttgccagagatatggttgaggcaatatcattctcaaatatgtatgctcctgagcatttgatcatcaatgtaaaggatgctgagcaatgggaggagctcatcgagaacgcagggtcagttttcttggggcaatggacaccagagagtgtgggcgactatgctagtggaacgaaccacgtccttccaacctacgggtacgcaaggatgtacagtggtgtatcactgaactctttcctgaaatacatcactgtccaaaccctgaccgaagaagggctgagaaggctgggtccttacgtcgcaaagatggcagaggtcgaagggttagaagcgcacaagagagctgttaccctcaggctgcaagagatcgaagccactgtaactgtgtaattgttgacgatggtctgttgtaccggtaaatttgatgcgctgggaactatatatttcagatatttttccttcttactcgggaaaacaccccagacccagagtccaggagaaaaatgtgtagttggatggaataatatggtcgttatttctgataattcgatccattgaacgaataaacttgcgagcttattttgtcatcatatacttttatagaagcggttttgttaattaa

SEQ ID NO: 2341 - DNA, 852 bp, Avena sativa
tcatcggcgaggacgcggcgaggcagcgggtgaaccaggcgctcgtgctcatcacgctcggcggcaacgacttcgtcaacaactactacctcgtgccattctccgcaaggtcgcagcagtacgagatccacgactacgtgcccttcatcatctccgagtacaagaaagtcctcgcgaggctgtacgagctgggcgcccgtcgcgtgctggtgacggggcacaggggatgatcgggtgcgtgccggcggagctggcgctgcacagcctggacggctcctgcgcgccggacctgacccgcgccgccgacctcttcaacccgcagctggagcggatgttggcggagctcaacggcgaggtgggccacgacgacgtcttcatcgccgccaacaccaacagggtcagcttcgacttcatgttcaacccgcagcagtacggcttcgtcaccgccaaggtggcctgctgcgggcaggggccctacaacgggatcggactctgcacgccggcgtccaacgtgtgcgccaacagggacgtgtacgcatactgggacgcgttccacccgacggagcgggccaaccggatcatcgtcggcaacttcatgcacggctccaccgaccacatcagccccatgaacctcagcaccatcctcgccatggacgacgacaccaggaactagctagctaccggtcctcctcctcctcctctgcgcgccatcgtctcctacatatctatatagactcccacatatatatatgcttattaaaccccatttgttcctggtctagaaggttttgattgatccatggtcctttattttcttttattacggtttattattaggtgtagagatctagt

SEQ ID NO: 2342 - DNA, 910 bp, Avena sativa
tctcacattgcaacgaaacgactcaacacgagccaacaagtacacagtactattatagcaacagtactattataacaatctaaatccagctaacagcctgacgatcaagaaactaggaaaatcgaagaggatccatatagtaccatatatggatcaactaccataaatacattcatactgctctagaacatattacagatcagctatggcaatctcaattctcaggcaagagggttaggagggagggtgaacgagttacattgtcaagtttgcatcgcagcatactactcagctacacaagtcaacaaagtggagcggtcatacaaagaacagaacttcacaatcttcaacaaccatcagttcatcatgcgccgcatgctacccaaccaacgttgtcaatgaaattccgagtcatgaggcaagctctcacaatcctgcatgggagcactgctttcttgcatgctctgggatcaattttgccacgatgtccactgggattcctttcagttcgttgggcttgaagttaaaaaggggaggcagaaagtgaccatttggaaggcgggtattcgcgtcccgaagctcatcaaagaaggggtgaacaagtgcctccacagcagtgcatcttaagttgggtgagtattgaaggagccgagagacaagatcaactgcttcgggtggcatccttttatggaataccttgtgccatgggtgtgccttaatctgtgggaatttaaactccgtataatttgggttcatgcatttaatttcttcccttgtaggcgtaccaagcaccttgataatttcaacaagttggtccacaccactttcaccggggaacagaggctgccccaacataagctcagcaagaacacacccagcagaccaaatgtcaatggctgtagtgtactca

SEQ ID NO: 2343 - DNA, 759 bp, Avena sativa
agcccaaggccaaggccgccgccaagaagaagcccgccaccaagaccaaggccaagtcgccagccaagaagaagcccgccgccaaggccaaggcccccgccaagaaggccgccaccaaggcgaaggccccagccaagaccaaggccgccgcgaagcccaaggctgcagctaagcccaaggctgcagctaagcccaaggccgccgccgcgaagcccaaggccaaggcccctgcaaagaaggccgcccccgaaggccaaggcccccagccaagaccaaggccgctcccgccgagcccaagggccgcccagccaaggcggccaagacctcggccaaggacgcgccccgggaagaaggcgcccgccgctgccgcccccaagaagcccgccggaaggaagccccccaccaagcgcacgacgccggtgaagaaggcccccgccaagaaggcggccaagaagtagagcgctccagaaggtttccattagcagtttttatgtcctgttttcttgctagttgaggcgaaaggtattggtaggatgtaaatttgatatccgggtgggggtacagtggccatcctctgcacccattggtggccatgcgtgtgtgttgttggaaaacggtgatgatgacaagagagagcggtcatccatcctgtatgtctgtagctgattgaggtaatttgagtccttgttgtagctgaatcagccatgtttgttacatctgtggaaactgataatcttatttaccgaattaaaaaaagaa

SEQ ID NO: 2344 - DNA, 910 bp, Avena sativa
agattgaaggggaatgtagtgggtatctttgcattaagaaatcatggccgtggggcttttcgtaccctctatggagatcatgacagatatgagaccacgtacttcaagccatttgctggctacttatttactggtgatggttgcagcagggacaaagatggttaccactggcttactggaagagtagatgatgttatcaacgttagtggacatcgaattggcacagcagaggttgagtctgctttggtttcacatccacagtgtgcagaggctgctgttgttggtgttgagcatgaggttaaaggtcagggaatatatgtctttgtaactttggtggatggtgttccttatagtgaagaactacgaaagagcctcatagcaaaagtccgcaatcagattggagcatttgcagctcctgacaagatccactgggcgccaggacttcctaaaacccgcagtggcaagattatgcgcaggatcttgcgcaagatcgccgcaaagcagttggatgaacttggtgacataagcactcttgctgatcctggtgtcgttgaccagttaattgccctcaaagattgctagactgtaaagggttcagatggcagacgcgctttcacggatgcttacaccttccagtttttttccccttgtggttgtatggtgggatgtttgatcttagcgtacgtccactagtctccttttatacagtaatacctgttctcctgaggctagtgaactaaaacgtggtgtaatgatcttcagtttggtgttccgctattgtgaacctctgtatctcatatcgagagagctccattatgtatgtattgatcgactcaataaagatgtgtcaatagaaaaagtgtcgactgtgttagttttctgtatctaactgatagtcgtttgttaagac

SEQ ID NO: 2345 - DNA, 499 bp, Avena sativa
tatcggaccatgtcaacgatatcgacttcgattaccaggagtacgcaaggcagagaggttcgaggcagtactggcagaagaagccgtctgtcctaacttcatgaatataaacccatatggcatcaggaactccctgatgcatgcatgggctattgggctgtgctgtgtgctgcacgtaatcctgtgcagtgttactcacacacataattacatcacctggctgagatatgatactaggaaagattgtgaaggaagaagatacagagaagtagaagctcgtttcataatcaggaattctcgttctgaacgtcataaggttcagtttcaggaaggatactgcctatgggggctttggctggtattttatagcctggaggcagcgaggataaagcctcatagttgcattttgtctattcttaatggagaatgtgtgtataacagatctcgtaggaaaggtatatataatggagatctggtatttagtagtgtcttggagtag

SEQ ID NO: 2346 - DNA, 792 bp, Avena sativa
gcccggcctccaggcagtccccttcaacgccctccagtaaggcattgccggcgctggcaaggaagaaaagcacaacaccgaagaatggctcgtgcgtgccagggggtgacgaagacgcgaaaagcgtgttcagtgtccagtccgaacggccccggaggcacagcatcggcacatcttctgtgcgtgacgacgcgagcctgtcgggttcttccccgtcggtgccgagctacatgacgccgacgaaatcggccagggccaagacccgtctccagagcccggcggccgaggagagtgctactgaaacgctggagaaaggatggtcgtctattggttctgcaaagaagaggctgtcctttccggctggagtagcgccatcatcggcaccgatgagacggcattctggccctcccaaggtaccgcaggcaacggtccaaagcaaccaggaatgaggctcatctgatgcaatggaaattaaggggtgggccggaggggattatactttggatttctgaagatatctcaaagaatcaaggtttacaatttctaccaaggaaaggaagaaagattgtttgttgtgttgatctgtccatttgattgtatgatgtcacttgattgtattcattgaataattactgtaaccaaaatcaagaggggagagtatgaacatcattcagtgggttatactacacttaaacatctggtgtcttgattgtatgtttaggcttctccattccatcttgtaagctgaggacaccattgttttgactattaatgacgattgaaatgggcagt

SEQ ID NO: 2347 - DNA, 664 bp, Avena sativa
gcttgccatatctgaaacaaattgtggactctgttaaagaaacacatcctgacttgcctctgatattatatgcaagtggatctggtggattactggaaaggcttccattgacaggtgttgatgttgttagtttggactggacggttgatatggctgagggccgaaaaagattgggatccaacatagcagttcaaggaaatgtggaccctggtgttcttttcggatcgaaagagttcataaccaagcggatttatgacactgtgcagaaggctggtagtgaaggacatgtattgaaccttggtcatggcattaaggtggggactcccgaggaaaatgttgcccatttcttcgaggtcgcaaaaggaatcagatactgaaagaccttggctctcgaatttgttactttctcagtcttggcagaatttgtagattccattgcactgcttgaggatagattcaggaagccacgtctctagcatagggtgcctgaagaacatatcttgttgtgactgattctgtgttcgattttcaattcattgtaagcatacactaattgaggtgtaagaaagtgcctacttgtttataccatgtatactactttaggcttatctgcctagtcgagattatcgatttatatttagtaaaagaaaaaaaaaaaaaaaaa

SEQ ID NO: 2348 - DNA, 619 bp, Avena sativa
ggttgacgaagatgtcggtggcttgcaagttcagagagatggtaaatggtacaatgttccagccaagccttacacgttggttgattaacttaggagactgcatggagataatgaacaatggaatctttaggagcccagttcacagagtggtgacaaatgccgagaaggaaaggctttcactggccatgtcttataacgtggatggggaaacggtgctcgagccagcgcctggtttggtggatgacaagcgaccatcaaggtatatgaaactgaagaacaaggatttcgtagctggtctcattaagcatttccttcaagggacgagattcatcgagaccctgaaaatataggttcaacccttaagtttcccaagatgcttgttcaaaaaaaagttgctcaagatgatgaatttcaaggggggcgacaatgagatgaatctagtaaggtttgtgttgagaaactctactagtctcaaccaatttctactatttacatcgaagagtgatcaaccagaatggttcaagaaaaatcatgtggatacatccgatattgttgaaaataatattgcctcttgaaaaaggcttggccaaaatgcctagataattctaggtgagtctga

SEQ ID NO: 2349 - DNA, 843 bp, Avena sativa
agaggcatgagtttgacccggagtatgataacgatgctgaacaagcacttgcagagatggaatttaaagaaactgattcagaaactgatcgtgaactgaagctacgagtgttgcgaatttacttgtcaaggcttgatgaaagaaaaaggagaaaagagttcatattggaaagaaatttactgtaccctaatcctttggagaaggatcttacagatgaggacaaggaagtttaccatcggtacaaggtcttcatgcgtttccttactaaggaggaacatgaagcccttgttaggagtgttattgaagaacggaaaattcgtaggaggattcaggagcttcaggaatgtcgttctgctggatgccgtacactggctgaagccaagatacacatcgagcaaaagaggagaaaagagtacggcgtgaatgctcaaaaagccaaggaaagtggccagcttattccaagtactaaagcaatacataaaacacatcggcctatgaaaattgagactgatgggaatttggatctgaagaaaggcagtacaattttagattctccaaaaaccacaggacacacaagcgctaaaaattgggatgattgggatattgttggtcttcctggggcagagctattaagttccagtgaaaaactcctgtgctgtcaaaacagattgctacctagtcattatctgaaaatgcaggaggtgttgatgcaggagatgtttaagggtagtgttgtcaagaaggaagatgcccatgtattattcaaagttgaccctgccaaagtggacacagtctatgatatggtgacgaaaaagctgggtaacaatgaagaggctccgaccg

SEQ ID NO: 2350 - DNA, 722 bp, Avena sativa
tttttctagaatcagcagaagctctaccaatcaaaatttacactcagccaaaaggcttgaagatacaggcatctctgtttacatgataagtttcttaacaaaacattattccaagattgttacaaacctgagccataaaccagatgacaaaagacaacaagaaaactgtaggcttctgtggctatagtacttgcccagaaaagtcgtccacagtttattgctaaatattgatttcaccataacatctaaagttgaattgtcttgcatccaacttattctaatttaccgaatcttctatatagcccggagcaggaaggtgtggtgacaaaaggaaactgtgtaactaatcacgagatatgtggaaggcatcaatttgttttagctacactttcgtagaagagtatgtagccgttatcggtgttaccactgaactcctgtgctgagccaaagaatgtctgtaccatggactcatcagtcatctcaacattctcatcatcgaagaacaaccagtggttgtggctcttcaccaagctgatgtaatggccatgatttgggccacttccgacatgaactagcacagcaaaaagggaatattccaagtctgaattgtcgacagtgttgatgagtttaagctccagtgggaaaacaactcgatatgatagctttttatagcggccgagctgttcgatgtacttgaagcgcttgagatgaatcaccaggat

SEQ ID NO: 2351 - DNA, 673 bp, Avena sativa
gaagttatgaacgctcagtacaaagctgccaatcaatatatggctgctctccagcagcaacagcagcagcagcagcagggcgataactctgcgatgtggcatcatggggctggttcaagagcagcatcagcactcactcctacccaattctatggctaccagggacagactcaacagcagggtggctttcgccaggcgcctcagccccagcagccatcccagtttggggggccatgggtacccggcattctaccattcccagggcaacatgacccaggagcaccacccccagaacccagcggagggaagcctgaacggctaccaggcggccccatcgcagcaggcatctcaccagagctggcagcagcacacaaattactgagccccctgcactctttgttctggtgctggctcactgttgcgggccaagttcggcaagcccgcacgtgtgttccctacttgttgcggagtaaagcagcttggagtagccaagcttgtggctcgagcgcagagaggggtccacgtctctggcagagtggtttaacatgttttgtgtgtcgttggactgatgatgatttgttttcggtttcgttatatgtgcggagcatcagtcttgtaactcttgagacctagttacctaacatgttccatttctgatttttaccaaaaaaca

SEQ ID NO: 2352 - DNA, 188 bp, Avena sativa
gtgagcagggcaaggttcgaggcaggcagtgaaaatgcttgctgctaccagatgctgaatcgcgttcgagtttagccttttttcatgcttaattgtattgtgtcagtttgtggtcctgttactagcttgctgtgacttcatgatgagacccaacttgcttcttgaaaaatttgtgtaccgtggtgact

SEQ ID NO: 2353 - DNA, 913 bp, Avena sativa
tataccatgggtcatattgtagccaagatgtagcaatcaaagtactcaagcctgagcgggtttagcgtcgatatgctgcgtgagtttgcacaggaagtatatataatgaaaaaggttcgtcacaagaatgttgtgcaatttattggtgcatgcactagaccacctgttatgtgtatagttacagagttcatgcgtggaggaagcatcttcaattatatttacaaccatagaggcacttttcagctcttagatgtgctaagaattgcatctgacgtgtccaagggaatgaactacttacatcagattaacattatccacagggacttgaagactgcaaatcttctcatggatgatcaggttgttaaggttgcagactttggggtagcaagggtgaaagaccagtcaggagttatgactgcagaaacaggaacttaccgatggatggctcccgaggtcattgaacactcgccctacgaccacagggcagatgttttcagttttgggatagtcctttgggagctgatgaccggaaagcttccttatgaagacatgacacctcttcaagcagctgtagctgttgttcaaaaggatctgagacctaccattcctgctgatactcatcctatgcttgtgggtctactccagaaatgttggcacagagatccagctctaagaccaacctttgcagaggttttggatatactacacgcaataaaggaggtacttcgaagttccaggcatcacaagaggcgtccaggacgatctcactcggggcagagttgaagtagtttttgcagcagttttttgtagtgttctatgcccttcattttgtaatccttctttgaatctttggtaggagtggttattttttagacctttccacgaggaaaaaatgtgttctttgttgtaatga

SEQ ID NO: 2354 - DNA, 682 bp, Avena sativa
ttgatgattatcgtgaggcatactattggcttcgtcagaacactcctactgatgccaagattatgtcatggtgggactatggataccaaattacagccatgggcaacagaactgttattgttgataataacacatggaataatacgcacatagctactgttggacgggcaatgtcatcttacgaagatgaggcatatgagataatgcaatcattggatgtgaattatgtacttgttgtattcggaggtgttactgggtactcctctgatgatatcaataagttcttatggatggtgcgtattggtggaggagtatttcctgtaatcaaagagccggattaccttgttaatggggaatatcgtgttgacaaaggggcatcaccaaaaatgttgaattgtctaatgtacaagctctgttattatcgatttggagagctgactaccgaatatggaaaacctccaggatacgatcgagtgcgaggagttgagataggcaataaggatgtgaagcttgagtacttggaagaagcattcacaacatcaaactggatagtgcgtatatacaaggtcaaacctccaaagaacagatcgtgaggtttcgttctgggagagcagcggacggatctatattacctggacaaatctatattacctggacaaatgagaatgttcaagtagacaga

SEQ ID NO: 2355 - DNA, 825 bp, Avena sativa
attttgaattggggagaggataaacggtttgatgagatgcgcagcaactttggaaagttagcagtcttctggattttccaggctgtctgggtttggactgtcagcttgcctgttacaattgtgaattccagtgacagaaacccttcgattgaagctcgggatatcattggttggataatgtgggtcatcgggttatctgtggaagctatagcagatcaacagaagcttaagttcaagaattctccaagcaataagggaaagtggtgtaacgtgggtctttggagttatactcgccacccaaattactttggtgaaatgttactttggtggggtgtgtttgtagcatcagccccagttctctcaggagctgaatggcttgtaatcttgggacccatcttcctgacattgttgcttcttttcgttagtgggatcccacttcttgagtcatctgctgataagcgcttcggtcggtcagaggagtaccgcacatacaagaatactacgagccctcttatcccgttgccacctgttgtgtatggagccctgcctgattggttcaaggttgcattcctcctcgagctccccctctacaaccctggacctgaacgcgaccctgtcagctaagcgctgaatgtgcattgttctgctatgctttagcttgattggttatacatgtacacctgttattgtggatcggtgattgttttccatttgatttcaagggtttagacagagtttgtccatatgtattccctagattgttcgaaagatatattgtgtacttgtgttaacagtgtaaaagtttgtattttcttttgttatgaa

SEQ ID NO: 2356 - DNA, 721 bp, Avena sativa
gcgcatacgttcaccgagcacaagtcctttgtcaactccatcgcgtgggcacctcacgagcttgggctgtgcttggcttgcggttcgtctgacgggaacatttcagtcttcacggctcgctctgatggtggttgggacacttcgcgtatcgatcaggcgcatccggtgggggtgacctcggtttcatgggccccagcaatggcccctggttctctgatcaccacagggccttctggccagtttgagtatgttcagaaacttgcatctggtggctgcgataacacggtcaaggtatggaagctcagcaatggaagctggaggatggattgcttccctgcgctccagatgcacagggactgggtgagggatgtagcctgggctccgaacctcggccttccaaagtctacgatcgccagcgcctctcaggatggaaccgtcgttatctggaccgaggcgaaggaaggccagcagtgggaaggcagggttctgcacgacttccaaacccctgtgtggagggtgtcgtggtcgctgaccgggaacattctggctgcttctgatggcaacaacaacgtgacactgtggaaggaagctgttgatggccaatggcagcaagtgaccactgttgagccctaggcgttccgattgttcagttttgctacctattacaatgattattattgttttcacttctctgcatggtagttcaagcattgcgcttggt

SEQ ID NO: 2357 - DNA, 797 bp, Avena sativa
tacttttctacttttgtctcaggaggaatggtaactaattttcacaccatatcacttattacatgaacattcgccaccaagggaaaaagttaggcgtgatgacaatattcaagaaaaaaggacacctattccaattaatcgaaccacattgttcctgtgtggataacaggcaaataatgttcttctccggcaccattagtagtgcaaaattaattctccagtggggtgaggaacttgaagatgtgaaatctggcttgctttatttacggatgagctagtaaccacaggctagaaaccaaacaaagtggcaacctgaacacttcgagagaaacgtaacaggatgctactaatcagaagggccaatcattttctctggaacaactagttcatggaattctttttccgtcaaaactccaaggcttaaagcagattccttcagtgttgttccttccttgtgagctttcttagcaacggctgcagcattgtcatagccaattttggggttcaaggatgtcaccaacatcaaagactcgtgcaacaattgagaaattctcttgtggtttgcttctattcccctgacacaatttttctcgaaggatacagatgcgtcccctaataatctcaacgatcgaagcaatccagcagcaatcattggcttataaacgttcagttcaaaatgcccatttgaaccaccaattgtaacaccaacatgattacccataacctgagcacaaaccatggtcaaagcctcacactgagtaggattaaccttcccaggcataatgctgctccctggc

SEQ ID NO: 2358 - DNA, 970 bp, Avena sativa
ccgggatgaataacagatacattcaaagattttccacaatcagcactgtgtttgattgaaacactacttgcaattgatccagctgatcgtttaacagcgtcttctgcattaagaagtgatttctttacaactgaaccttatgcatgcgaaccatcaagtctcccaaaatatcctccaaccaaagaaatggatgcaaaacgaagagatgaagaagccagacgctctagaactgctggtggtagggctaatggtgatggagctagcaaggcaaggacacgcgatcgacctagaggagtaccagctccagaggcaaatgccgagcttcaagtaatattgataaaagaggttagtaagtcatgcaatgcgaaagcaagagtgaaagtttcctccccgcatcaggatggtgcggtcggtttccctttgggttcttcaatcaatggacccactatatgaacccccagatccgacttccttcagcactgtttttgctcatgagaaaagctctgtacctacttggtccgggccattggtcaattcttccgcagttggggaccaaaagcggaaacacaagtcccgctcatcaaaacaaccagccactgcccgcgctcggtgacatcccaagaagtggtattctaagagaaaacgagccttcagtgtggagatatactctgcgggttgcctacagaatgttggcaaacaaggcatctgaggataaattaatttgttgcttcatgaattattttgatgcacttttttccgctgaacatcattgtatagactggagaaggaattcaagtagttacttgtgtacattaggttctccttttctgttcttataagcacgtgcattgatgttagaatcatttgagtggaagcttagatctctagcatttcaggacatcccctttccattgtaacattttttccttacagttgaacctatatataatcatttctcattaattccagt

SEQ ID NO: 2359 - DNA, 801 bp, Avena sativa
ccattcctacagagtctcgccttgctccacttgctccagagtctcgccatgctcctattgtcccagagcctcgacatgtcccatcagcgtactaccaccatttggctccttcctctgatgatccatactaccgctctcgtgtggatccagtgcatgagcgcattactgccagaacatctccaagggattatacatcacagcatgggggattgtctgctcgtgctgaccgcttagaggagccgtacaggactggtaacattgttgtccgtggtgctcgcctggaggatccttaccgtccaagagagattgatgcccgtggtgctcgtgtggaggatctctaccgtccaggagaggttgcctctcgtggggctcgtgtggaggatcactaccttccaggagagattgcttcgcgcggtgctcgtgtggaagatctgtaccattcaggagagattgctgtccgtggtgctcgtgttgaagatctctaccgtccaggagagattgctgctcgtgatgcttatggggagctctaccgttctgaccgacttatcactcgtgctgtggatcccctgcatccttatgagacttccagccatgcttatgctgaaaccagccagagacctgtccctacaacaagggctaatggacctggggttccagtctcctcgctctattcctttgctggagcaccagcctatcgatgattggctctctgtgacgtgcccttgagccgtctgtagttggatgttttctttgggtaaaactatatctcaactgtaacaagtctggatgttgtctttatgt

SEQ ID NO: 2360 - DNA, 602 bp, Avena sativa
acgagatctgtaaccctcactttacgaaaagaggaagctggcaacactgctgtagcagtgtataactttcttgcaaagttccaactgagctttctttatctaataggactgatagtgatggggtttgagcatatgaggaacattgtgagagtaatgaagcctgtgagggttgcagcaatcgagtcataaagaaacagagacatgtaaattattcccggacccgtcgaggagatcatatttcatgtctcctccatataccgtggagatgattttagagtagcatctccaaaaaggctgaacttatttttcccctcgagaaagcctctgctctcagcagaagaccagtaccgagacgaggagctacgtacagtgtgcatgcacctggacagaagtgtcccagggcgtaattgagatgtactgtctgtattagtagctcggagcgagcaaattgatgtaccttgtatgggtgtgatgtaagctgtaaccatgtatatgacggccatttgttgtgccggtgactgtcaccgaagttcttgtgtaccatactgtgattatctcttgaaataaatcaactcgatcttctcgttgttgacaaaaaaaaa

SEQ ID NO: 2361 - DNA, 956 bp, Avena sativa
catccgctccgtcgacgttgacctccccgacggacacctccgaggtcgcgctcgtcgccgaggtccaccgcctcaacgccgacccgccgtccacggtattcttgttcagcttccattacccaagcatatcaatgaagaaaatatattaaacgagatctccattgagaaagatgtcgatggtttccatcctttgaacattggcaagctcgcaatgaaaggtagagatccactgttcctaccttgcacgccaaagggatgcatggagctcctatcacgaagtggagtcactgtaaaaggaaaacaagcagttgtggtagggcgtagcaacattgtcggtttaccagtatcgcttcttcttctgaaagcagatgcgaccgtgtctatcgtgcattcacggacccctaaccctgaaacaatcgtgcgtcaagcagacattatcattgcagcagctggccaggctatgatgatcaagggagactggatcaaaccaggcgctgcggtcatcgatgtcgggacaaattccattgacgacccaaccaggaagtccggatacagacttgtcggtgacgtggatttcacggaggtgagcaaggtcgcaggtcacctgactcccgttcctggaggagttggcccgatgaccgtggcaatgttgctgaagaacacagtggacggtgccaagaggggtatggtctcatagatttttcatctcaccgcaacccatgcgctatctgatgtggggatgcgaggatgttgtaactgagtggcctagacaaatttgttcttcgtctcaccacaatccatgcgctgtctgatgtggtaatgcgaggatgttgcaactgagcggcctagacaaatttgttctttgtttgttctgtcttgacaattaatttacaagaacaaacagcactcactagtccgtagctaacgtcttgtttgataaataaatgcagtaccta

SEQ ID NO: 2362 - DNA, 516 bp, Avena sativa
agtcttcaaacttctttggagaattaggaatggacagtggatatcaaaagaaatcttcctctagttcatccaaagtgcaggttgaggaaagcagcgaagcaagaaagaaattctcaaatgcaaagtcgatttcgtcatctcagtttttcagtgataaggccaatttggaaaaagagggtcaactctcgctccaaaagttttctggatcatcgtccatttcaagtgctgacctatttggccaccaagcgaataattctaatgcagatttgagtgcttcggatttaatcaaccgaatctcctttcaggcaactcaggacttgacctccctcaagagcatggctggggagactgggaagaagctgacatctatggcatcaaacatcatgtctgatcttcaagaccgcatcctctgagcttactttacagtcaagactcttgtcacatttcttcagttggttggcctctgtcctgattgttattacattcttgtaacagattaggtggtgcttgcatgcc

SEQ ID NO: 2363 - DNA, 595 bp, Avena sativa
gagatgtccaatatcttctgggtgcccccaagatatacaaacaatacaggacgatcgcagcgaaggatttccttaccgcggtgcggcaccatctccaggagcaacacgagccttcccccttgctgcacgacgtgatcacgtgcaagagggacgacgcgatcaaggacatcatactgaagctggactcggagaagatccacaggatctacgtggttgacgacaaggggaacaccgagggggtgatcacgctgagggacataatctccaagctggtgcacgagccgcgccactacttcggggacttcttcgacggcgtcgttcccctccccgcgaacagcaccgtatgacgctacgccaatcaggggcggcactgctgcatcgtgtaaagaatgtacattatctcaggctccccttcccttcttttttctcaggttgcagttcttgctggcgtgtagttccttcctcgatctccttgggtggacagataagtgtccaccaggagaactaatggttgatgacagtatgcggctaaataatttgagaattacctgggctttgcgacgagaacgatgcttcttctttcttggtgacggtt

SEQ ID NO: 2364 - DNA, 553 bp, Avena sativa
caagggccttgcatggctcttcctgggagtccccaccagcagctctttgctctacaaggaggagtttggtaagatgaaggcgaaggcgccggagaacttccgggtggactacgcgatcagcagggaggagaccaacgcgctaggggagaagatgtacatccagactcggatggccgagtacaaggacgagctgtgggagctgctgaagaaggacaacacctacgtgtacatgtgtgggctgaaaggcatggagaagggcatcgacgagatcatgatcccattggctgccaaagaagggatcgactggctggagtacaggaagcaactgaagaagtcggagcaatggaacgtcgaagtctactgattcttggggtttttgctccccaacattttgttgtgcatatgtacgcacgattatttgttcgtgcgatcaaggtgtctgtaacatatataaagtagataaaggtgtatttctgacattttctgtcatgttggtttttctcaagatccgaacatacactactataagtactattcctttctgctcaaaaaa

SEQ ID NO: 2365 - DNA, 903 bp, Avena sativa
cggaaggagtatgatgatgccagctcaaagctgtccaacattcagtctaggataacatctctgacagataagctaaagcaagacttcggcaaggagaaggagttctattacttttatgaccagtgctttgaggggaaggagggcaagtacgtttacaaggtctgtccatacaagaaagcttcacaggttgaaggacacagttccactaacctagggcgctgggacaaatttgaagaatcctacaggataatgcacttctcaagcggagacaaatgctggaatggccctgacagaagcctaaaggttaggcttagatgtgggctgagcaacgagcttaacggcgtggatgagcccagcagatgcgagtatgtcgctgtattgtcaactcctgcactatgcgttgaagagaagctgaaggagctgcaaaagaaactggacgccgtgtcttcagacctgtccggccacgacgagctttaaatcgtctcacgaggaaacagcgactccaccattacaacaaccataaccatacgaagggctaatgaggagtacatggatagaaaagcctggaactggagacggagcttgtgagtgtagcctcgcggttactgccagagcaacgttagtttggtttagggagataatattttttagcaaagcggttggacggttgaaattttcacatcaatcctggtttgctagtagaggcaaaactgcaaccgtacaactttcttttctcccttttggcgttttctctaattatttatctagatcatctgaaagagactacccttatcctggatacttgatctggatgcacactgttcctaagcatttctggatgcctgtaactgtaagtcgtgtgaatcatccgtgtttttcttccggggtatgaagtgtggactg

SEQ ID NO: 2366 - DNA, 572 bp, Avena sativa
tgcacggtatgcgtttgatggcattgaacaggacactggggattctagagcttcaaacggaagcaaggtttggggaagatcttcagatgcggatctatattctcatttggatggaaatcaatcggaaaaacatcaacccagagaaaatgctcttgttctttatgaaccgggcaacactcctgcagcctctgttgatcatgatggttcagatctgtccccaagcatacaggaggctttgcaccggtcaactatggacataagtggtgcagagtatagaaggaaggaagtgccactgtatgtattcccaacaagacatctgctgaagctggagagtacaatggcttcgtattgtgatatgcagcgtgtcctttttgaagaggaacaatcagcatataatcaagccatgcttcaaaatgtttgtgatgggaagatgcacccgcttacatctatgcaccatacatctacgtacaattcttccctctgcaaactaatggagtattgcttgagcccagctataactgtacttcaggaccgatgacggacgaatgaaggcgctcgtacgctgccactgt

SEQ ID NO: 2367 - DNA, 832 bp, Avena sativa
gaccatcttagactaaaggaataataacccattttccacaaaagaacctggtatttatgcaacatacatttagaatcctctagtttctttgcgccttcttttttggcagtgttggatctaagtgcgtagtacagcaaacatgagtaatctagtttctccttgcatttcccatgaaaaatgaggattttatttgcttttttcagtggtcagggtacagtgtcccttgaacttttggagcaagtccctgagatcgacacaataattgttccaattagcggcggtggtttaatttctggtgtggcactggctgcaaaggccataaatccttcaatacgtattctggcagcagagccaaagggtgctgatgattcggcccagtccaaggccgctggacgtatcatcaaactagctacaactgacacaattgctgatggtctacgagcttttcttggcgacttgacatggccggtggtgcgtgacttggtggatgatatcatcgtcgtggacgacaatgccattgtggaggccatgaaaatgtgctatgagacgctgaaggtggccgtggagcctagcggagccattggccttgcggcggccctctctgacaagttcaagcaaagctctgcttggcacgagagcagcaagatagggatcattgtttctggaggcaatgtggatctccgcgtgctttgggattctttatctaaatgacgaatgggccatacaaatttgtattgaagttgaaatccgcgaggtgatttcgctgcaaacttgtaacccccactgatttctacagggaactgtctgttgagttactgctttctacaacgat

SEQ ID NO: 2368 - DNA, 979 bp, Avena sativa
catagggcagctactgttctgcagagaaatctaagaggttggcttgcacgaagatatttcgttaagatacggaaggcttcattggtaatacaatctggtatccgtggttgtcttgttagaagatgcgccggcaatgttgatctactgaatgtgttacgagaatttgaatcgaagaaggaggcagagggtgaccaaattttgatcaaggcatccttcctggctgagctacaaaggcgaatccttagggccgaggcgacagttcgggaaaaggatgaagagaatgagatgttacaccagcggcttcagcaatacgaaaaccgatggttagaatacgagcagaaaatgaaagcgatggaggaaatgtggcagaagcaaatgcgatcattgcaatcaagcctgtccgtagcaaagaagagccttgctctggatgacacacctaggatgtcagactcatccgtggagcagagttgggagagcaacgggaatcatgtcggtgggggttcccagctggcccctcgtatcactgggcgtgagatgaacgccagcatcagcgtcattggccgcctagcagaggaattcgagcagcggagtcaggtcttcgctgatgatgccaagttcttggtggaggtcaagtctgggcaggcggatgccagcctgaacccagacatggagctccgcaggctgaagcagagcttcgacacatggaagaaggatttcagctcccgcatacgggagaccaaggtgatcctgaacaagctcgcgactgggagcagcgggggcaacgaatcttccccaaactccgcaaagcgaaagtggtggggcaggctgaacacctccaagttttcgtgaatttatctagaatgatgtagtagacgcgccgacattttacatgtcagtgctagtcctagagctttgagtgctgcgaagtccagtgttttggactggatatgtaatttgttgagggcgagttgtatagttc

SEQ ID NO: 2369 - DNA, 632 bp, Avena sativa
tgcagagttggtcatgcttgcgatggctataattgcaaacgacgtctcccatttcggcttcctggctatcctgtctgtatcatctgttgctggggcagcgtggatgttctgtcggtggttgggaaatccaacagatgaacagagggaactcttcattttcgatcctcacttccaacttcaagcaacatagaagtgggagcagagcagtgtccgattgagggccgagttggcttgctgtcgctcgtgcttgggcccaacatctcagtagaacgaactgccgctacattgaaaaagcgacagtttcatacagcctattccaatctcttactggggcctgcgccattcatttgcttgtgctcagagtcgaaactggggcctgcgccgcaatgatctgaagacgtggttctttgactgaatacacaatacacacacttaggacttaggacacccattcgttcctgctagtctgaagccatcagcaggatccacttgtacacttcatttttttctctgcatctgttgtatagttgcatctgctatcagttacgtcagcgttgcttggtctagctgaggcagaacgaacgtgactgtccatattagtaacatgaaatgtgtacatcttccgttcttgg

SEQ ID NO: 2370 - DNA, 882 bp, Avena sativa
tcaattcaggtagaacatcctattcatcaatgaatttagtgcaaatgacagcatcacaaggcaggatacaagaaaatgcgaggggggaaaacacaaaatgtgaactcttaatattcgatccataatacctccaaatccataggccacaattgacatcacagaacatcatccagtttcgccatataagtggagcaaaaaactgtccttgaaaacagttacacagcacaaaaggtaaacagcacggtcagatgttaaccaccaccacatagcaaaagcatttgtttcaggaaccaggaccggtctgtccaaccaatcagtcaatcacaagatcgtttcgcttgcgctttgtcacggtaagaaacttagctgcctgagatactactaatcttttgttatgcacaataactctgacctagcctgtataaatacatgcgaacattgccttgcacaacctcgcagtctgaacggataaagaaactgtttcatgggtcatggacagcagttgatcattggaactgtgggttcatagcaccaaaccttgcccctgctccaagcccggcattgactggccgtgccacaaccacattgtcgtcagcaaacatcgccttgatgaacgaaggagtcttcagaggacgtcggccagtcatccgagggtacacatcttccaggaagtaatacacatggccagcaatcatacccaaaagatccacccatgtgctgctccccaccagaatagaaaaccccagaaggacccaaggtaagtaggcagcagtgaaggtgaacaagcccaagaagctcatgtggatgaagggattgtgtttgctccagacataaaccatcataaacgtcaatgaattgctcaggaacagaattctggcaaaa

SEQ ID NO: 2371 - DNA, 885 bp, Avena sativa
ccacagaagatatagtgactggcttccgcatccatgggcaaggttggcgctccatgtactgtacaatggaacgtgacgccttctgtggaattgcaccaatcaacttaactgagcgcctccaccaaattgtgcgttggtccggtggatctttagagatgttcttctcacgcaataacccactcattggcggtggtcggctccaaacccttcagcgtgtctcctacctcaacatgacagtctacccagccacatcacttttcatcctactctattctctcagcccagtgatgtggctaatccctgacgaagtatacattcagaggccattcaccaaatatgttgtgtaccttctcgttatcattctgatgattcatataatcggctggctcgagataaaatgggctggaatcacatggttggattactggaggaatgaacagtttttcatgatcgggtcaacaagtgcatacccagcagcagtgctgcacatggtggtaaatctcctcacaaagaagggtatacacttcagagttacttccaagcaaacagccgccgacaccaatgacaagtttgccgacttgtatgacatgcgatgggtaccaatgctaatcccaacagcggtagtcttgatttgcaatgttagtgccatcggtgtagccatgggtaaaacgatagtatacatgggagcatggacaattgcacagaagacacatgctgcactgggtctgctcttcaatgtgtggatcatggtgctgctctatccgtttgcattggcagtgatgggacggtgggcaaagaggccagtcatcctagtcgtcttgttgccagttgcctttgtaatagtttgtcttgtatatattactgttcatatcttacttggtggtt

SEQ ID NO: 2372 - DNA, 908 bp, Avena sativa
gcagtacagcttgttgacgagtcgcattgggatgatcttgttattatcatagcagtggtcagttcaaagcagaaggaaccagtagcaccagcgggatgcgagacactgttgaaacaagcccctcttgcagtacagggcccagactgtggtgccaagtcggatattaaaaatggaagaggctatcaagaatcgtgattttgaatcctttgcgaggttaacttgcacagatagcaaccagttccatgctgtatgtttagacactagcccgcccatcttctatatgaatgacacatcacacaggataattagccttgtggaaaagtggaaccacgtggaaggaacgccacaggttgcgtacacctttgatgctgggcctaacgctgtcctaatagcccgaaaccgcaaaactgctgctcttctccttcagaggctgctgtactgcttccctccacaagacaatgatttggagagctatatgctcggcgacaaatcgatcttaagcgacgccggagtgcaatccatagcagacgtcgaggcccttccagcgcctccggagatgaagacgccaaaccaaaagttcaaaggtgatgttagctacttcatctgcagcaggcctggggctggacccaaagttctcacggatgagagccacgccttgattgattcagccacgggacttgcgaagggagtgtagtttaggtttacgtgatctctggcttccatgtttggacatttacgtgtagacatttcacgtgtgttgtacactcttgtagcaggtgtaattctgaacgtgtatgtttccacaattttgtcaagactgttgtagtgttgactgcgttgttgctgcccaaagagcatgattcttaattttccaataaagctgagtggaataagtttawcatatcgtt

SEQ ID NO: 2373 - DNA, 717 bp, Avena sativa
tgacagtagtttcgagagttcaacagaaaatggtaatgtgctaaacccggaagcaaaaatcaaagagggagatgcaggcaccttgaatgggactgtgcatattgtggatgacctgagcaaccttagcgtgaggtaaatgctccaacaagtcgcagcctggttacagctggaatataacacattttaaaactggagccagtgtccaattaaccaaagtgcacaacaggatatctaaatgagaaggtttttcgagggcagggatcaacttctcgatgcattcatttgaagagtaaattattggttgggagctgagatctcttcaatccctggtgattatctcagttccatcttgtaccttttcgctgtcatcttgcatctggtgaaaggtcaaaccttttatcccagttaatatgaggctttgccacggtctgttacctggcagcaatgggtttgatacgattcttttgttgaagcctatcttgaattgttgcctggttggttcttttgtcaaagtgtcacctgagcacttgttagactacaacatttttggcataatacagttaatcttaaatttttgtcatccataaacgtgttatttgcagtagttgggtgtacttggggcccctgccttttcaacttttggtcccagtagttgtaaattagtcaagttgatcctggacattaatattgtatttcggcatgtccagacaaataatc

SEQ ID NO: 2374 - DNA, 592 bp, Avena sativa
caaatccgagagcctccggagcctgcagtcgtcctacgagcaggagtccccgagcgtgggacggaggcgccgcgtccgcttcgagctgccaaatgaggacaccatggaccaacaggtgaaggacgagttgctggcgctcgtggaggcgaaacacgctggtgtcgcttacatcacgggccattcttacatcaaagctcggaggagctccagttatgtgaagaagattgtgattgatgtcggctactctttcctccggaagaactgcagaggcccgtcagtctcgctgcatattcctcatattagcctcatagaagtcggtatgatctactatgtgtagtaggctgatgtgatcttctgttcacatgtggggatcgatccggtggcaacaagcatgtgctacctatgaacccccatgctttttgtctggagttcatgctgcaatctgtagtatggaatgctgcgtccagccatccaacttctgagatgaaggcgctgtgcatgttaatatcaattctcagccccaataaactgtcagactcgtatacttatttagtttattgttttttgttttgggtttttgtcatccatgata

SEQ ID NO: 2375 - DNA, 779 bp, Avena sativa
gccaagttgatcggctttgtaggcttgccacccatcggatgtgtgccatcgcagcggacggtgggcggcgggctccaccgccgctgcgaacccaagcgtaactacgcggcacagctctacaactcgaaggtgcaggagctcatcgttgggatgacctcggagccagggttccacacccgtgttgtctacctaggcatctatgacatcatactcgagctcacagagaacggggagaagtgggggttcacggagacgacccttgggtgctgtgggaccgggctcatcgaggtgacacagttgtgcgacacaaggttcatgggggtatgtgacgacgtgtccaagcatgtcttctttgatagcttccaccccacagaaagagcgtacaagatcatcgtcgactacatgtgggacacatatggccatctcctgcaaccttgaattgagttcctttacatcgacgatcgatatacatagatcaattgagaaggaaatgttaggaaacatgtataattgttgatacatttcctttactatatgagatccgctcatgcatcattcaagtgatcactaggtgggtctgtcggtccccaaaacatggtgaaatgtataggaaaatggtggtgtactccttgaagtgaatatgtactatcaatgactcaattatatatcacttatacatatacatacctgtagtacttctttatcactctaaacattctcaacatgtaactaatagaccttttagtgagttcgttaaagaagttgatttcagaatttaa

SEQ ID NO: 2376 - DNA, 516 bp, Avena sativa
ggagaaagctacctttccgtggaaaccgaggattatgttgacacgggtagtcctcatgtggtcaacactgcatgggcgatgttagctctaatttatgctggacaggctgaaattgatccggtaccactgtatcgtggagcaagagtattgatcaacatgcagctagacacaggagagtttcctcagcaggaatatactggaactgctaactcagcttttttctttaactactccaactatcgcaacatataccctattatggctcttggagagcttcggcgcaaacttactgcgagcagaaagtaatgtaaaataattgctacggacacatgctgtccaagtttcattaacttgaaacttgggttactggtaatcacatgctgtccaagtttcattaacttgaaacttgggttactggtaatcacatgctgtccaagtttcattaacttgaaacttgggttactggtaatcaaggcttgccaagatcactattgtgttgattcatgcgaacaaacc

SEQ ID NO: 2377 - DNA, 684 bp, Avena sativa
gcctgcgtctcatctcttgcgaatggatctacgacgtgcctctggcgttaacgataacgaagtttactctcctagaggagctagagctctcaaactgccgcggcgacttcccgaagacgagtgcagctgctggcaaggcctgcccactcctgaagcgtctccggctgagcagcaagcgattcatcaaacacagcccagtccccacggatggggaggccacggcgatcgccacgacgatgcccgggctgcgttcgctgcagctcttcgcgaaacgcctcagcaacggtggcctggcggccatccttgatggctgcccgctcctggagtcgctcgacatccgccactgcttcaacattgtgatgaactacgagatgcgcgcgaggtgctcccgggtcaagacgcttaggcgcccccacgacccgacggacgactatgatctcaagttttcatcaccggacatgaacgatccctgggcgaggatgagaccgcagaccgaatactacgacgaatgggagttcagttcacgctagtgccatttggtacgggttccttgattacgtttaagtgaatatgtacaaattggcatgcatgattctgagaataatgtacggtcaaattattatgctctaaatgataattgtcattgttagaaacaaattaatttaaaggttgttaggctcatcc

SEQ ID NO: 2378 - DNA, 719 bp, Avena sativa
ccttgttagatttggaccagatgttgaatggttagatggtggaattgacgacatatcatgtttcctgaatgggttcgattactcggtcaagcccacccgatgttctggattttactctgtgataaggaagtattttccaaatctcaaggatggatctctggagcctggttattctgggatccgaccgaagctttctggccctggacagcgtccttcagattttgtttattcagggggagggatgtccacggtattcctgggctcgttaacttgtttggaatagaatcccctggtttgacgtcaagcttggcaattgcagaatacattgtttcaaggtataacaacacttgattctcaatcaatcgcgagggcttgtgaatcacattgctgacaaaatttcatgatcaagatcttgggatttgccagcctgtattagttgtttattccttctctttgggagagaataaggtgcagcttgtaaaggggtgacttacagcctgctgaataagcagaataactgtaagttgatatatggaaaagcgggtgcttatatatattaaaacataaattgtacacctattggcataggtttttttttctcgagggtacaatactggcataggttttgactaagaggatcctctgcactgtcaacttgtaactcagacagcaaacatactacacatcagatcactttagaccatttgatcaagaaaaaa

SEQ ID NO: 2379 - DNA, 936 bp, Avena sativa
gagtttatgacacactgggacggtctcctgtcaagaccggatcagaaaattcttgttcttgctgcgaccaaccgtcctttcgaccttgacgaggctatcatcagaaggtttgagcgcagaatcatggtcggcctgccatcagcgaagaaccgggaaatgattatgaggaatcttttgtcaaaggagaaagttgatgaaggactagacttcaaggaaattgcaactatgactgaagggtacagtggcagtgatctcaagaacctgtgcacaacggcagcgtatcgccctgtaagggaactgatccagaaggaaacgaagaaggaattggagaagaagaaacttgagcaaggaggcactccattagatccttcaaagatgaaagaaaaggacaaggagatcgttctacggccgttaaacatgaaagatttgaaagaagcgaagaaccaggtggcggcgagttttgctgctgaaggttccataatgggtgaactgaagcaatggaatgacttgtacggcgaaggaggctcgaggaagaaggagcagttgacatacttcctctgaacgccaagtgtatgaatataatttggaaactagaatagacggcaaacaaccatgagaacataggcctggggtcttgggtgtaagctcatcagtcaaaacagagaatgttagggaggaaaggaatatcatcaggctataaaagcaggattttctttctcggaacatgaaagaacagtctctccacctgaactgtagtttgcctgtgttgtgttgtattacactaataatgaatctgcagagcagattatgttgtgtttttttcttttaggtatttgctccttcctgtgcatagccaccaatctcccatgtttcttgtataggtagttcatactacttggtaggttgtggttggccacaaaatggtactgtatggtt

SEQ ID NO: 2380 - DNA, 818 bp, Avena sativa
aggaggcttagagaactcttgacaaccaagctacctacaggcacatttccggtcaagattgctatccctattgtcccaacaatacgggtcattgtaacattcacaaagtttgaagaactacctcctttagatgagtttgctaccccacctacgagccctacgcagttccaggacgccaggtgcaaagattctgaaggatcagcctcatggtattcatgggttagagggggtcgcggtgcacagtctagtgacagcggcgatagcaagagctttaaagatgaggttgatccattccacataccttctgaatacatctgggtcgacgccgccgagaagaaacggaggatgaaggcaaagaaagccaagaacaggcgcggtgcagctcggaaacagtcatcgaaaagcaccacctcctctgaagggggccaacgacctatgatggacggctttgagtagaacactctcacagcatagcaaagttgcccctgcgtccatacgacgtttaggtgtcgatggtggctgcccacctagcacagatcggcaatgtgccaggagagcacatgtggctcggtgatcgattctgagccaaatctcctagaggaaggaagtacaggatggttttataccctgctagtctgtaattcaattctattttttttttgtcccagccccttttccttcttgttggatgtatgtttgatgatgatgatgatgatgatacggccctgctgttgtttaaaagatgtgtttgacaggtcaaaggggtctgtagtgttcgccccgtcctgctgtatgaatactttggaatatgtagtcat

SEQ ID NO: 2381 - DNA, 880 bp, Avena sativa
cccgggatgatcggaatcggcacttccacgccacgcccgcttccgccatggcgccgtctctgctcggggggcttaccaagtcgctggccatgacggtgctctccgaggtcggggacaagaccttcttcgccgccgcgattctggccatgcgccatccccggaaactcgtccttgccggctgtctatctgcattaacagtgatgacggctttatctgcttctctaggctgggttgcaccaaatctgatatcacgaaaatggacccatcatgtgaccactctgctgttctttgtgtttggcatctggtcattgtgggaaggcttcaaagaagacggagagtcagaagatttggctcaaatggaagcaacgctggacgcggactttaagagtaacaaaggggattcaaaaactaaatcaaaggcaactgatgacaagaagaaacagcaaagaccattcctcatgcagttcttctcaccaattttcataaaggcattttccattactttctttggcgagtggggtgacaagagtcagattgctacaattggcttggctgctgatgaaaacccatttggtgttgtcatcgggggagtcatagctcaagcactctgcactactgctgctgtcctgggagggaagagcctagcctcgcagatatccgagaagatggtcgaattgtcaagcggagtgctattcctgttgtttggcataatgtccttgttgtcaggaccagaagggcaactgtaatgtctccaggaacttcatcagaagcagcatggcatcgtgtctagttaccaagctttgcttttatttgacttaccttatctgatggcgagaaaagccaggcgtccttcacgaactggatgccgattcattagttt

SEQ ID NO: 2382 - DNA, 659 bp, Avena sativa
aaatccattctatgtcggaggagactcctatgctggaaagttcgttccattcctcgcacagaagatctcggaagatattgaagatggattgaggcccgtaaccaatcttaagggctatctggtaggcaacccggttacaggcgaaagcaatgacttcgaatcgagagtgccatttcttcatggtgcgggaatcatttcagatcagctgtatgagacgataaaggagcactgtcaagcgggagatttgttcaaccccaagaatgtgctttgcgctcaagcgttggacaagtacaaccaattgtatgatgaaatctccgacgaacacattttgcataaaaagtgcgtttatgtgtctccccgaccaaactatgggaccacagaaagaaagatcctcaaggagaaaactggagtactgaaaagttcaccacctcgtcccccaatggattgccatgcctatggtaactacctgtcatatttctgggctaacaacaatatcactagggaaattctcgggattaggaaggggagcaagaaagaatgggtgaggtgccacaatggagatctaccttactataaggacatcaagagcaacataaagtaccaccataatatgacaaagtaaaaggttttcgttattttggtttacagtggagaccatg

SEQ ID NO: 2383 - DNA, 732 bp, Avena sativa
ggaacatataagaaattgtcgaagcttgctttggccttggagaagacccttctggtcacgtctactataaccaagtgtaccgacccataccctgctgcacatggtctaaattctgaaggaactgcagcgatcacagaaaagacagatcctgttgatatagtgcctgaaacggtgccggagcaccctgcagcagtgcccaatggagcagagcatgcagggggtgatggtgatgaagagatggccgatgcagaagccgaggcagtgcctattagccatgatgtcgagatgcaggaggagaagattgatcagattgctgatgttaactcagataccaactcaggtgctgcagttgctcgtgaaatggttagtactagtgaacaatctccggatccacaaagctgagcttacttgcagcgaaggccagatgacctagtgcagttctcttaagcaatccagatactgctacaactctcgtgattcactcattgtgctatgtgattctctcctggttcacatgtatacaggatatgattaggtgattgtgctatgtgattcaaggtgtagtgagccgtggatggacatgggtatgttgaccgtggctgagacaacttaaattctccaagaggaaaaatgtgctcaggatggccatggcacactttcattagtagaaacctgaaagtatatgtcatcccatattggagtggccaaaagttatgatggatatttggataa

SEQ ID NO: 2384 - DNA, 788 bp, Avena sativa
cttacaggttgctctgctggtggtctagccgcaatgctgcattgtgatgattttagcgcaagatttcttcaggaagtttcagttaaatgccttattgacgctggattttttcttgacgtaaaggatatatccggagaaagatccttttggtcgctctatgatggagttgttcatctccagaatgttagcgaagtgttgcccagggactgccttgccaacaaggagccaaccgagtgtttcttcccagctgagctcataaagagcatccgcacccccacgtttattctgaactctggatatgattcatggcagatacgcaatgttattgtaccaggatcatctgctcctgataagtcatggttgagttgcaaggacaacattcggaactgcacttccacacaaattgaagttcttgatgggttttggaatacaatggtgaatgccttgaaggtcgtcaaagataaggaggactggggcatgttcatcgattcatgcttcacccactgccaaacgctctctcgcatctcttggaattcaccaacctctccgaggcttgggaataagaccattggagaggccataggagattggcactctggaaggagacatggagtgaaagatattgactgcaagtatccgtgcaatcccacatgcagcagtctgttaccttcatgattgtttactacattggacaacgtcgagattactatttaaagaataaagataagtagggaaagcacaaccattctggtattgtatatctccatcaaggtgaaaataggattcga

SEQ ID NO: 2385 - DNA, 683 bp, Avena sativa
ggagacaatgatttgttcgcgatgtttgccttcactgaaaagaaggtccctgcaaagccagcagagagtgtcgacttcctccttccagtgaagcctcttgttcccgctgagacattcgggatgaacatgctctctgatcagagcagcaactcatttggctctactgacttcgggtgggacgacgaggccatgacgccagactacacatccgtcttcgttccaaatgctgccatgccgtcatatggcgagcctgcttacctgcaaggcggcgcgccaaagaggatgaggaacaattttggtgtggccgtgctccctgagggaaatgatgggatcaatatcgcacaggatatctgtgcttttgaccatgagatgaagtattcattgccttacgtcgagagcagctcagacggttcgatggacagccttatgctgaacagtgtcatggaggatggcgctagtaatggggatctctggagccttgatgagctgttcatggcagctggtgcttattgaggggccatagcaaacatgtccaatgcccattgtccaagatgaagaagaaccggtggcatctgctacgttttgagcggatcaaaccgtagttatgctaagaactaataattagactagactagaacaagtaggaacagtatgccgtgtctatattccgttatgatgcaagt

SEQ ID NO: 2386 - DNA, 800 bp, Avena sativa
cgctccgcggatccctctctggctccggccgccgccgctgcaaggacccggttgacgcctctgaggccgcaatgggcctcctcctccacctcgacgggatccagggaggcgacccgatgatccgggaggggaagcgcgccgttagtcgggagctcagccggatactggagttcgtcgacaaggtgctggtcaaagaccacgaggagatggcgttggacaatggcgagtatcctgatggttgccatggtcgtgcacccgcggcgaatcgcccgaccgtgatcaagaaggtgagcttccgtaacgagcctcagaatgagtccgatgacagttccgaaagctcgagttccattgaggcagatgagaggaagggcatgggtaacaagaacattgccagtggcaaacccgggcttgcggcgccagcgcctgtgcacatggagtccaggagggctcccggggaaatgagatagctcggcttttgcatcttgtattgcgacctcgtatttagaatcctgtggattgtgctgcccttacgttgccacggtttattttgcaccgatgtttcttgagacaagattggaacgtttttagttcgtagagtttgcgctgcgattatgatctgttgtagtatgctccagttacccctctgttacatttgttactgcattgtactactgatagttttgagcactgggattctagcttggatcgttttgttgcactaaacaggtcatgcttcttgtggcaagcatgtgtaggtgttcttcagttatgctgattttgaccaatgaattataattccg

SEQ ID NO: 2387 - DNA, 758 bp, Avena sativa
cgtcctccggtccaaccgattacccaaaggcagcgaggtcgggctggtgccgtgcgcgcagggcggcacccccatcgccaactggacccggggcacggacctctacgaccgcatgctcacccgcgccagggccgccggcaccgccaagatcgccgccatgctctggttccagggcgagacggacaccatcaagaaggaggacgcgctggcgtacgccgggcgcatggaggccatggtccgcgacgtccggcaggacctcgccattccaaacctgctcgtcatccaggtcgggatcgcgacggggcagggcaagttcgtggatctggtgcggaaggcgcagctggaggtgaagctgcccaacctcaagtacgtggacgccaagggggctccccatcgccaacgacttcacgcacctcaccacccaggcccaggtccgcctcggcgccatgctcgccgacgcatacctcgccgccacgctccactgattcattcctacagcatcacgtctgattacttagtagtagtagtttggtttggtacaccgaaacaccagtgctcaatcatgagcacatctgcatttcatcgattgatcccagggaagagttcaggctgagtttggtgattactagtagtagtatgctgcccaagtaagtaattggtaaactgttcgggatctatggtaattggtaaccaaccttgtattctgtcctggctaccaaaaaggtaatgccgggctacatataaattcataatctcaa

SEQ ID NO: 2388 - DNA, 743 bp, Avena sativa
tggctctaccaggatttgtgtctcagcaacaacctggtctcagcaattctgagatggcttggctaccaatattggctggttctgctggaggttttggaccaacttatggctcgccttatattgccatgaatggcagttattatcctcgaccttcagaacaggcatcttcgccagtttctcctagagaaccaagtgcaagtaatgcaccttctcagatgaagttgccagaaataacagaggttgtaaatgatgaatctagtcgacgccaaaataaacctcgccgatactcggagatgaactttggacaatgagcattcgatgataatcaatgcacattcatttgccagctttgggtctttgcaagatttgtgccagacctatcatgtcacaagctcttcctgcaaccctgaaacacttcagtgtctgatctgtagcactttggactatctactatccagaaaatgccaggtttgacggttgaaggtgttcaaatcctcactgcaatcacttgtggtgagtattccatgggctgctgctgcggtggtgccatcactttatgagatggtacccccatgccgttgagacttgttgatatgttgttattgggcatcccattgactggcaatacacgagtgaatgtgaaggatgtgatgaagagtacgactggcctccgctccacaagctctttccacggtacaaaagaggattgattatatggtgttgggtttgcttatgtgcttgtc

SEQ ID NO: 2389 - DNA, 760 bp, Avena sativa
gtcgtcagcatgtcgtccggcccgcgctggacggtggagctcggccggctggacgggctcgtctccaaggccagcgacgtcgcgggcaggctgccggggccggacatgcggcccgaggacctcgccgtgatgttcgccgacaacaacctcaccgtgccggacatggtcgcgctctcgggcgcgcacaccgtcggcttctcccactgcgcgcgcttcgccggccggctctaccgcactaccggcggtgcggacccttcgtactacagggcgtcctacgcgcggcagctcaaggcggcgtgtccgcaagacgtcggcccgaccatcgccgtcgacatggaccccgtcacgcccaccgtcttcgacaacgcctactacgccaacctcgcccgcggcctcggcctgttcgcctccgaccaggcgctgcacgacggcgccgcgtcgcggccggcggtcgaggggttcgccaggaaccagacgctcttcttcgaggcgttcaaggaggccatggtcaagctcgggagggtgggtgtgaagagcggacggagcggggagatcagacgagactgcaccgccttcaacaggtagagcagaggccagaggaggacggccgctgcgcgcggtgttacgcttgtaatccaaatgtatacattttctcagaatggttagaaagttctcttgacgcacgattggaaaaaaccgatacggagcagcgaacaggcttgtcatatcatactatatagagcagccgcagattctgcat

SEQ ID NO: 2390 - DNA, 923 bp, Avena sativa
tcatctttggctgaaacatttgtcttcatttatatgggctttgatattgccatggaagaacatagctggtcacatgttgggttcatcttcttctcaattatattcataattgttgcaagggcagcaaatgtgttttcttgtgcatacttggttaatgtatcgcggccagaacatcggcgtattcctctaaagcatcagaaagcactttgttttagtgggcttagaggggccatggcttttgcgcttgctctacaatctgtgcatgaacttcctgaaggacatggaaagacgatactaacaactaccacagcgattgtcgttttaacggtacttcttattggagggtcaacaggcaccatgttggaagctttggatgtaattggtgatgaaaacacttcaatcgagatttatgaggataataacaatgggtatattcccccaacttatgaggaaggtacatcgtctggaggaggattgagaatgaagctcaaagagttccacaaaagcacaacatcgttcaccgcccttgacaagaactatctgactccatttttcaccagtcagactgatgatgacgacgctgaggatttcggtgatcaaccccaaaaccagagacgaggattctatgatcagtagcagagtctgggctgctgattgacacgttatacactgtgccaggtgctaactggaaccgtcaaaacatataaccatttgccttgccttagctgagtagcatatggcagagcacactgtaggatagaaatcataagcctaatcaagatagctgcctcctgtatatatttacaaggctcaaaggctcaagtggtacatggtggaccttcaggtgaaaaagcgaggtgttgtgatgaactttgtcgacccaagtcctcatctcacatcagattatatacggaaatgcccgt

SEQ ID NO: 2391 - DNA, 882 bp, Avena sativa
cgcggggcatcgggcttgagttcgtgaggcagctgctgcggaggagcgaccagggccgtgtcgtcgcgacttgccgcgccccggactccgccgccgagctccaggagctgaggcgggagcacgcgcggcgcctcactgtgctgccgctcgacgtcaccgacgagagcaccattgaggctgctgcagccgcgatcggggagacccacggatccctggacctgctgatcaatgccgctggcatcctttcgatcccaaatgtcattcatccagagacctcactgagcaaagttcagaaatcatccctgcttctggcatacgaagtgaatgctgttggacctattctagtgatcaagcacatgcgtccgttcctgaagattggtgcgagcttggaaacaggaaaaggtttctcgttggttgcaaatatgagtgccagggttggctcgataggagacaacggtttgggaggctggcattcatacagagcttctaaaactgcactgaaccaattgacaaagactgcatcagttgagttgggcaagaaggacaacatcgcctgcattttgctacatccaggaacagtcgacaccgacctctcaaggccattccaaaaaaatgtggccaaggataagctcttcacgagggagttctctgtacagaagcttctttccatcatcgacaatgccaagaagaccgacaatgggaagttcttcgcttgggatggtcaagaaatcccatggtgaccactgttttcagtcagtgaccattccaccacccccacccacctgctattttgtgtttctgcttttaacattcttcttttatcttcagtagttgtttgtgctctttttagccttaaattcaaaaagcttgaatcaagctcta

SEQ ID NO: 2392 - DNA, 697 bp, Avena sativa
aaccttcgagcagcttcgagttcttcacaaatgcatagcaagggtctcagaggaaattcaagaaacaaggtttaatactgcaatttctgcaatgatggaatttgtgaatgccgcgtacaagtgggacacccagccgaagtcagttatagactcctttgttctgctgctcgcaccatttgcaccacacttggctgaagagctttggtttcgtcttggacactcacaatcattggcctatgaacagtttccagaggcaaaagacgagtacttgaaggaatcagaggttgtactcccggtccaaatcaatgggaagacccggggcacaatccttgtcgacaaggagtgctccgaggatgacgtgttcgagaaagcagcctccgacgagaaactctccaaatatttgaacgggaagggcatcaagaagaggatttatgtgcctggaaggatcttgaatgttatactagaccaacaaaaagcaaagacctgattactggtctggttttattcgttgaatcttccctagagtcctggcagagtagttgatagagactgttgagacgcaacaaatctgtaaatttccattcttttgtaacgtttgatgctgttgacatgcatctttttgagacagtcctacataacctagctcaatatgttggaatataatttccagttaagatcagtagaaggctttcaagaa

SEQ ID NO: 2393 - DNA, 751 bp, Avena sativa
ccgacttagggtaacaggacgtgatgcgctatatcctgtccatgtgtttattacccttacacagggtgttggtttctccagaaagacgaatggtttcaggaattaccaatctagtcatgattcttctatgttttacattggaatgaggatactcaagacgcgtggttgtcgtgctgcttacaatatctacatgcatgaatcagtcggcgggacagattacgttaactcgagagaaatatcatgtgaattggtcttggagccttatccgaaaggatacacaattgtgccaacaactatacatccaggggaggaagcaccttttgttttgtcagtttttacaaaagcaccgatcaaactagaagctgtttagtgcaagattgagaatccatgtgtttgctaccggtagctgtgcctcacagctgctggcgcaggagtgatgcagagtcaagttgtgggttcaagaagaccaggaaatgggtatttgctatagcgatatgcctgtagctgggatttatgatgcagcagctctgcatttggacctgaaaatgctggaatccatcgggcctcacctgcaagtgcttttgagctgataagaaaaggcaatgcttttgctaaaaaagaaaagaggttggtggtttcacttcactgttgaatcaccgttgagaagaatcgtggctgtttgtaagtccattcttgtagatagtggtggcagctaacatttagacctagtagccccgtccggtgtatagct

SEQ ID NO: 2394 - DNA, 830 bp, Avena sativa
tcatggcacatagttggacgcctaggtgggtgcaattctatgaatatgcagttatcgcagttggatctagattgtaaaagaccaacttatgatgctctggaagcagcaaagactactccgacatcctttgacaacattggtgatcttgagattcaagataatctatcacgtgtctgggtggacattggtattcaagatccgttgcttctggatatccttcttaactcattaaccaccataaattcagatcatctgggcattaagcaagtatgttttggtgggtcggagtttgagagctggaatggcaacttgaataccgaggaagctggatacagtgtccacaggatatagggaatcggagtcctgagaatgtagaagcagctacagtacctttttttggatacgaaaactatgcctggaatggctcgccaagcaatggtgctacgggacaccaagaacttgagctggacaccctgcaatatgtttgcatgggtactctgtgctcctccactacctggatggccggatatgatgattgagcatggggcgccgacagtacagttgcttaacaagcaacatcatgtatttcatcctgttggctgtagtttgattccacctgtgcaaatcttggatattcactaggttggttaatttggtcttcaatttcttactactttggtcacttcactttcaaacggtctttaggtatcatcaaacttgtaagtttgggccaaacatgtcgcctggacagcttggtgctacacgttgatgtatagaataaaatccattttatggcacgaattttgtgaaatgcctcgttcccccttaac

SEQ ID NO: 2395 - DNA, 898 bp, Avena sativa
tctattttgaccacggaggcacgggagctccaatctcgacttcagaggctgtcagaagagaggaatagttatctagttgttatcgaagagatacggcaaactctcgaggaaagattggctgctgcacaactggaatatgaagcagctgagaaggaaaagattgaaaaggaagcttccgctcaggcactccttagcaaacaggaaaaggagatgaatgccattgttgaagaatcaataaagctgcagaaagaagccgaggagaatttgaagctgaaggacttcttggttgagcggggtcaaattgtggatacactgcaaggtgagatggctgttatctgtgaggatgtatcacaacttaagcgaatagtggatgggcggttatcatggagcaaattgcagcgatcaacaatttcaagtctttcctcttcgctgcattcttcttcgcttcacaagagtgggagtttgtcagataggactgtggaagcagttgagtctacagataaacatacagtcgctgaaggtgcaaggccagctgttgaagatccggatgttgaaatgctggatggctgcgataatgaaagtgcaagttgggtggttgaagacaacatcaagcagcagcggcgttctaatgaggatggctgggaattttgctgggctgaagatgcctgaagattggctggattgtctgagaatcctccataaatagcttatcagggataataatcatttaataagtcgtcttctgcctttgttttggagcaaatctagcagatttgcacttatcatatcatagaatggcagttggcctttttgtggggtgaggaagcagcagtatttgagataagttcagatgacgctgacgtgatatgtatatatacgatttcagcttagtatatat

SEQ ID NO: 2396 - DNA, 722 bp, Avena sativa
tcctcttgctttcgtacaagctgcctcttagacctgaaactcatgcgacgtactatgaatatactggactgtggcacatttacgggctcttggccatgaattcgtggttctggagtgccatatatcacagctgtgatactgcttggacagagaagctgtatttctcatctactgctgccttcctgggttactccctcattttggccatactgcggacttcgagtctaagggatgaagcttcacgggtgatggttgcagctccaattctggcttttgtgacaacccacattttgtacctaaacttctacgacctgaacaaaggcctgaacatgaaggtttgcactgttattggcattgctcagctccttgtgtgggcattgtgggcagccttcacaaggcatccttcacggctgaagatcatgtttgttgctcttgggggtattctgtcggtgttcctggaagcccaagatgtccctccacgatggggatatgtagatggtcatgcaatctgcctcgccatggctatccccctgtcgtacctttggtggagttttgctaaggaagacgccgagatgcgcacgtcggcaatcatgaagaagaaacgataacgagcttcagtagagcaaatacgaactgggggtggttaatctgtgaaaacttgtctgcagtgcactcagcttatgtaaagatgagttttttcatgtaaatttagggttatttcc

SEQ ID NO: 2397 - DNA, 885 bp, Avena sativa
catggttgcagtagcgttgtaaatctggagctctaccaaaccaccaatcaagagagctgctgacaatccctggccgcagtggccacgtgtcttccgcgtggactacgggcatcaggaagcatctagcaagtttggaaaggacccaagaacttatgaagtcttgaccaagcgtttcattggtgatgacaatggaaaactgaaggctcttgaggtggtgcgtgtgaagtgggaaaaggtagatggaagattccaactgaaggagatccaaggatcagaagagatcattgaggctgaccttgtcctccttgccatgggattcctgggccctgaagcgactatcgctgagaaactgggtttagagaaagacaaccggtccaacttcaaggcccaattcggacacttcgcgaccagtgtggacggtgtctttgccgctggggactgcagacgtggacaatcactggtcgtttgggccatcaccgaggggcgagaagctgctgctgcggtcgataagtacttgtcaagggatgaacaaaatgctgctgaagacatcactgcctcaggtgcaggtcttgttcaaccaattgctgcataaacaacacaggccttatatagatttttgggtgctgataccaacgtaattagggtcggtggttttatcttttgatgatcatagcaaattgtgctgtagttgcatgataaagccaggctcaatagggaaagaaagaggggagggccctttcatactttggtagacaaacaattggaaattttggttggccattgatttcatggctcctcattgtttagctataatgtttttgtgtgctgaaatgcggttttgtagcctgaataatgtacagtatttttggttaattaatagatgca

SEQ ID NO: 2398 - DNA, 895 bp, Avena sativa
cgccgccagcaccggcgcctcctccgcccaccccggccgccgtcagggtgtacctcaacatctacgacatctcccccatcaacaactacctctactggttcggactcggaatcttccactccggactcgaagtgcatggcatggagttcgggttcggagcccatgagtacccaaccagcggagtcttccaagtggagcccaagagctgtcctggcttcatcttcaggcgctcggtgtgcgtgggtaccaccgacatgtcccgctccgaggtccgcgctttcctagaggatcttgcagaggactatcacggggacacctaccacctgattgtcaacaactgtaaccatttcacggctgacgtctgcaagcgtttgacggggaagcccactcctggatgggtcaaccgacttgccaaatttggttctgtctgcaactgtgtgcttcctgaaaacataaaggtttcagcggtcagagatgaaactgcagacctcgagttttcagacgatgatggtctggagtcaaacgcgtcgatcgtcgacgacagcgacctggatgatctagaccaccttctaacaacaccaaacagcgacattgtatcttccaaagacaagacattgactcccggacgggatagcttataaaattcgtttctgctgttcatgaataggatttacatgcctttggggttgttcgctgagattgaggttttagtggtggcggtgctctcttgccaatgccaatggcgttggcatggcggcagcagcctgatgatgatggttgctgtagagagaggtagtttaaagttgtgatttgtctaattgtggcgaaggccgagttaaccgaccgacatgtgtgatgtataattgtaactgttgttttggagagagtagcgtgt

SEQ ID NO: 2399 - DNA, 701 bp, Avena sativa
agtctcatcacgttatcgtgctttctatttttgtgtgctggtatcaattataggtgggcgccgagtacgagatggtcgacatcgacttcaaggtcatggagcacaagagcccggagcacctcgccagaaacccgttcgggcaaatccctgcatttcaagacggggatctgcttctcttcgagtcccgcgcgatctccaagtacgtgctccgcaagtacaagaccgaggaggtggacctgctgagggaaggcgacctggcggaagccgccatggtggacgtgtggacggaggtggacgcgcagacctacaacccggcgatctcgcccatcgtctacgagtgcctcatcaacccgatgatgcgcgggatcccgaccaacgacaaggtcgtggccgagagcctcgagaagctcaccaaggtgctggaggtctacgaggcgcgcctggccaagagcaagtacctggccggggacttcttcagcttcgccgacctcaaccacttcccctacaccttctacttcatgggcacgccccacgccgcgctcttcgactccttcccgcacgtcaaggcctggtgggagaccatcatggccaggcccgccgtgcagaggatggccgccaaaatggttccgaacaaggcttgatggtggtttgatttgaatgcaggtccaggggagatcagtctcatcacgttatcgtgcttt

SEQ ID NO: 2400 - DNA, 826 bp, Avena sativa
gatggaggaggaggaggagcaggacgtccagatcgtgctcctgggcaccgggaagaagaagttcgagcggatgctcaagagcgtcgaggaggagttcccggacaaggtgagggccgtggtcaagttcaacgcgccgctggctcaccagatcatggccggcgccgacgtgctggccgtcacaagccgcttcgagccctgcggcctcatccagctccaggggatgcgctacggaacgccttgcgcgtgcgcgtccaccggcggactcgtcgacacgatcgtggaggggaagactggattccacatgggccgtctcagcgtcgactgcctcgttgtggagcctgccgacgtgaagaaagtggcgaccacgctgaagcgcgcagtcaaggtcgtcggtacgccggcgtaccaggacatggtcaagaactgcatgacccaggatctctcctggaaggggcctgcgaagaactgggaggacgtgctgctggacctgggggtcgccgggagtgagccagggatcaccggcgaggaaatcgcgccgctggccatggagaacgtcgccgctccctgaagagatcctgcaagcagaatcgagcatggatgatgcggaatggagcatcggtctgcagggttctcgtatatggtgacagacagccgcttgttgtagtgaaggacatatatagatatatatagccagtgcaataagtaagttttgttgtgctgcttgctcctttgcaaaaagggaggtttcaggtcgtgcttgtgaagtgtgtgttgaaccaaaccgtgcttgcattttgttgtggtatattgggaataactcaaggat

SEQ ID NO: 2401 - DNA, 746 bp, Avena sativa
cttcattccgatcaagtgtcggagcatcccctccaaggccaataagccgacgtccttcagcgcagtcgatatctcatatctactccgttaccggcaccccacattcccccaacaacatccaaagacctttcagaaacacatctgccatgagtacaagcagaagcagcgcaaacattgcaaacatgtactctcccctccctcgccagtcgcacctcggctccacgcactccctggttggcaaccacctgtcgccaccggtcaacataagctacgcaccagtgcacgcgcaccattccggctacggatcgcccagcccgcatctcggctcctcctacatctctaattctggatatggatcatcaggccaccactaccttggttcgtccagccagcactacctgggttcatccagccagcactaccttggttcgtccagccagcactacctgggttcgtccagccagcatcggtcgtcgtacttgcggcgctgcggcgagtcggggcccagcttgtccaccatggcccctcagtcgccacagtcccagctgaaccacatggcaggcgcgtcgtccgggcagtccttgcggcagtcctacctgaggcactgcggtgattcagacgcgagcctgtccgccatggcgtcgtctggccagtcactgccagggtgctgatggtgttcagccaagctcgcttccttctccgcgcgtgaagagatgcgtgacttgtgatataatacatcgaggcat

SEQ ID NO: 2402 - DNA, 487 bp, Avena sativa
  modified_base (472)..(472): a, c, t, g, unknown or other
  modified_base (481)..(481): a, c, t, g, unknown or other
gattactgccgtgagcttctcagaggccgcagataaggttttcactggtggcctggacaacgatgtcaagtggtgggatcttcgcaagaacgaagtcacggaaaatctcaaaggacatcaggacatgataactggaatgcagctcagtcctgatgggtcatacctcctcaccaatgcaatggacaatgagctgaaaatctgggatttgcgcccttatgcaccagagaaccggaacatcaagacccttacaggccatcagcacaactttgagaagaccctgttgaagtgcagctggtcacccgacaaccgcaaggtcactgctggaagtgctgatcgcatggtctacatctgggacacaacatcgaggcggatcctgtacaagcttcctgggcacaacggttctgtcaacgagactgctttccaccccaccgagcctatcatcggatcttgcggcagcgacaagcagatttanctcgggganctgtag

SEQ ID NO: 2403 - DNA, 572 bp, Avena sativa
tctgcaatggacgtggatgatgatgatgacttggatctgttcggtgatgagaccgaggaggacaaggcagcagcagcggagcgtgcggctgccaagcctgccaagaagaaagaaagtgggaaatcatccgttcttatggacatcaagccttgggatgatgagaccgatatgaagaagctggaggagactgtccgcagtgttcagatggagggtctcacttggggtgcatcaaagcttgttgctgtgggttatggcatcaagaaacttcagattatgatgacgatcatcgacgatcttgtgtctgttgacactctggtcgaggaagtactccaagagccgccccacaacgaatacatccagtcctgcgacattgttgccttcaacaagatatagaatctcggtacaatcagattgctgctgctggattcttggtactgggattggtctttctggaagcattttcatcccattcagttaccctcttacagaagtgctattagttttggttttgagtgatgcctggtcttgagtatctgttacctttaaatagttgaacgaattgctgagcggtt

SEQ ID NO: 2404 - DNA, 767 bp, Avena sativa
cggttcccaacacggcacccgtcatccggtcatccccctcgcgaacgaactcgctccgaccaacccatcaaccaccgcagctcgaactctccgcggcctcgatccgattcggccgcgccccgctaactcgcggcggaaccaggcgcacccacgtgcgttcttgcgtagcgagcagcagccatgagcgaggtcttcgagggctacgagcggcagtactgcgagatctccgcctccctctcccgcaagtgcgccgccgcctccgctctcgacggcgagaagaagaagcagaagctgtccgagatccaggccgacgtgcaggagtccgaatcgctgatcaggaagatggacttggaggcgcggagcctgcagccgagcgtgaaggcggggctgcttgccaaattgagagagtacaaatctgatctcagcagtgtcaagagcgaggttaagaaggtctcggcgcctaatgcccaccaggccacccgggaggagctcctcgaggccggcatgtcggacacgctcgcggcgtcatctgatcagagaggaagattgatgatgacatcagaaagattaaaccagtcttcagatagaattagagagagccaaagagcagtattcgagacagaagaaattggtgtgtcaattcttcaggaccttcacaaccaacggcagtcactgctgcattctcacacaacattgcatggcgtggatgactacatcggcaaaagcaagaagatcctggcgtccatgtccaagaggatggacaggaa

SEQ ID NO: 2405 - DNA, 913 bp, Avena sativa
ttcgagttctgggccatgaagaactggaaatgcattcagtttctgcttggaaagaagcaaaactgcagtattatggggggcctgatgttgcagtcatgcaaagaaggccattagttcatgttaaggattcggataatttaagggctgtggcactgactataatacaaaacgaaatatcttcagtccctatctttaagtcctcgacggatatatcagggataccattacttaatcttgcaactcttccggggattttgaaatttctttgctcaaagctccaagaacaaccagaaggctatgccattttgcaaaatcagatttccagtattcctattggtacatggtcgcagcatactggcagggcaagtaatagacagcttcgaacgtcgcgattgaatgctcctctaattacttgcctggattttcttctcgaagatagagtaagctcaattcctatagttgatgataatggatcccttcttgatgtctatgcactcagtgatatcatggctctggcgaagaatgatatttacactcgcattgaacttgagcaagtgaccgtggagcatgccttggagctgcagtatcaggtgaatggacggaggcagtgtcatacctgtttgagtacaagtaccttgctcgaggtgctggagcaattgtctgttccaggggtgcggcggcttgtggtcattgaaccgatgactagatttgtgcaaggaattatatcattgagagacgtagtaacatttctccttggttaacatttgtgtagccatttcatacatgaaaaaggctgttgtatttgatcgggacaaaataaagaaatgttgtttcagcagatgcagcagttcaagtcgttttgctctgaaacttacaaccatgttccagcaaaagaaaaaagaactacatagaa

SEQ ID NO: 2406 - DNA, 734 bp, Avena sativa
  modified_base (692)..(692): a, c, t, g, unknown or other
agagaaatgagattgcaacagtattgttgatgcaaccaagagaagtgaggaggaggcaaacacggtcgcagccgatcttgatacaaccaaggtaagcgacgagcagagcgacaaggttgtgacagaaaatggacttggtacagccaagtgttgcgtagagggagaccaccagtattgctagggcaggctgatggcacacaggggccagggcgtacaaatcggagcaacaataaacttggctgcgtggtctatcatcctggaagctcttccattttctcaagcaaatggaaaatgaaaaagaatgaaagcctcggagctgtcttcccgtgagaatcattcgatgactgggaaaaaggtccgaggcatatctttctagagatgtgcccatacttactacctctgttgccgaggcaagcaccctccgtttctaattttcagctaggaagagggtatttctatcctctatgttgtcgttgttttttcttatcttgtgttcttttcgtgtgtctagtatctaactctgccgctaagttattgggaagcaaatcgtttgcgtgtggattttagggacttgttttaggtactagcaaggaagaaaaaaaaggaaaaaaagtgttagccgcttgcattaattctagcagtgtgtagattcagtttgtatcaaaaatttcttgcgttaatgagaaaaaggngaagctctgtctgcgtactctctgctcagagcctgcctgcac

SEQ ID NO: 2407 - DNA, 674 bp, Avena sativa
  modified_base (651)..(651): a, c, t, g, unknown or other
acacctgttcttcaaagaagaagatatggaaagtttcaagcagatgctagacaactacctatctgaggcttctatgctatgggcttcgaaaaatgaaggcagttctcttctggacagtatgactaaagctattgatgaggttatcaaaatcagagagtgtgacatctacagctacaacccagactctgacggagatccgtttctagagaaaggggccatatggtcgatcaactttttcttctacaaccggaagctgaagcgagtagtgagcttccgctgctgttgcactagcaaattcgcaggagatgactttctcgccggcgtgctctcggatggcgaggaggacgcgttgatcgacatggacatatgactgacccggttctgctagtaacatgaccaaccaaccagtgtgacctgttccttccgtgtattatatactagcacgttatccttgtcggtaggactcggtatggcagcagtttccctctagggaacttgtagagcgactttgtctgtctgtagagaatacactttgatctctgttatccttgtctatagtttcaagatttgaactcggaaatttgaatcttccaaatttgaactggcaagtctgttgtaatgtctaaatttgggtttgagtttgtgcaaacnctgtgcacaacgaacctggtaaa

SEQ ID NO: 2408 - DNA, 711 bp, Avena sativa
cattgcggcaggatttggccaatgctcttgatataagggccttcgagaggacgacaaagcttggtcactgtgatgcagagctgctgaggaaagagatgaatgagactgatgtccccgtgtcctattctggcactggcatcccagagaagtcgatcaggaaagcagctcttgaggttattctgcgcaggctcctatctttcctcaagccagataccttccagggcgctgtcaaggctatgaacgaaagaattctctccgtccttgatgcatctggctctggccgtgttgatcttgggatgttctttgctatcattgctccaatctgttctggtcctgtggataggcgcaagcgtgtcgtcttcgatgcgctcctttggcgtcccgcaagcgaaggcagcaggggccaggttaggaggagtgatgcgctaagctacatcaaacttcttcgtgctgtttacatccctatccacggggctagtgacatgcttgaaatgcacggggagtctgaccctaccatggtatcctacacggagttccttgaaatgttcaatgatcctgactggggatttggaatcctcagcacattagtgaagcttgaagagagcgatcacgtccgtcatggcagccacacctgctccgtatgccgatatcctatcatcggctcacggttcaaggagacgaagcactcgtttagcttgtgtaaccgatgct

SEQ ID NO: 2409 - DNA, 677 bp, Avena sativa
catatgctggcttgcagtttggttcatatgacactttcaaacgttcgatgatgtcatggaatagatacagacatggaagtgaggtggatgactcagcgtcaagcttccagctatttctttgtggatttgcagctggaacattttccaaagctgcgtgtcacccacttgatgttgtaaagaaaaggttccagatcgaaggattaaaacgtcacccaaggtatggggcgcggattgaaagcagcgcgtacaagggcatgtaccatgccctaaaagagattgttgtgaaggagggggtcggaggcctttataaagggcttttcccatctgtggtgaaatcggctccagctggtgccgttacgtttgtggcgtacgaatacatctcggactggatagcaagcaaggctggagttgagtaagtccttgtccgatacaggagctaacatacccacattctggtcaccagtgggaacttcgagctgttttgggaccgcaaggtcaatggagaagttacaattctgattattcgttgagagtttacttgtaaagcgtttacttacagagcgatctattttgccgtttcatctccctcctctctcacccaattgccttggtgatagttcatctgttgatctgagctttaacagtgaggctgagtaagactaatataggacatgtga

SEQ ID NO: 2410 - DNA, 866 bp, Avena sativa
tatggccgtcctcgcgggcgacgcgctcttcccctcgcctacacccacgtcatctcccacaccccctccccggaccccgtgccgcacgccgtcctcctccgcgttctcgcggagcttgcgcgcaccgtgggatccaccggcatggctgctggccagttcctggaccttgccggtgccactgccctcggcgaggccgaggtgatgcaggtcctgacaaaaaagttcggcgagatggccgagtgttccgcagcctgcggcgctatgctcggtggtgccagccccgacgaggaggccgcattgcggcgatatggccgcaccatcggtgtgctctacgagctcgtcgacgacataaggagcgcgtcgggaaatggcaagatgaggagcaacgctagcgttctgcgcgcgctgggcatggaccgtgcgctgggcatcgtggaggagctcaaggcgcaggccaagacggaggcggacaggttcggcgacaaatacggtgatcgggtgctgcccttgtacagcttcgtggactacgccgtggagaggggatttgagctccaggatgcagcggcaaggccttaggcgtcgacggacgaacatgggagcaggtgacatctagagtatctgcactataagtttgtactatatgtgtttagaacattattaggtgcgtggttgatgtttctgttcaaaacttagcaagttcctgaaataagatgtgatcaattgaaaaaccttattcgctaaatgtcaatttttgtgtgtctgcactagggaatacctattatatgattaatagctaactgaaaagttccactgtgctgtaagctgtcgaattgttcagactgcttggttcattcgttacaaaaaaa

SEQ ID NO: 2411 - DNA, 668 bp, Avena sativa
ctgaagatcaacttccacgtggtggagggctccaacgcggtgtacctggcggtgctgatcgagtacgaggacatggacggcgacctgacgcaggtggacatgaaggaggccaactcgcggtcgtgggcgccgatgcgcgagtcctgggggtccatctggaggatggactccaaccaccgcctccaggcgccattctccatgcgcatcaccagcgactccggcaagcagctcgtcgccaacaacatcatcccagccaactggaggcccaacaccgactaccgctccttcgtccagttcagttcgtgagccacaccgaccccgaccgatccagcagccagccaccgagccacgtgcgcatgcatcatgcgtgcacgcgctctggccctccccggccggctacgatccatcgatcgatcgaaatcattggcctattttatttgcattttccgatgagtgatcccggagtttgagatgccctctgtctggtgtcatgtgtgcgtgcgtggccgtcgtttagcgtcttcaacatgtgtggcaaatgtaggtggcgaagtttgcatgtgctctctcccgcacactgaccccatacagcagtgcatgacattaccagtgtgtaaccaaattcaagttataaattatatatatacatacagtttgtgactaaaaaa

SEQ ID NO: 2412 - DNA, 880 bp, Avena sativa
cgggattggtgtgcccctgttgcggccatcactgcctcttgaggcggacgacgaccatctcgtcgtaccggccactatcgacgatgcctctttggagatctccgaggttgtcgcccctggtgtggtgcttaccgacgagctccgcgacaagatcgtcaagcaggtggagtactacttcagcgatgagaaccttccgactgacgagtttatgttgaactttgtgaaaaagaacaagcagggctttgttccagttggagttattgcatcattcagaaaaatgaagaaacttgttcaggaccactctataattgaagctgctcttaggacatcgtcgaagttggttgtgagctctaatgggaaaagggttagaaggctacatcccttgccatgcagtgagttgaatgacgcgaagaaaaggactgttctggtggaaaatctacctctgggtttctctatggagagtatacaggagaagtttggaacagtgggcaaagttatgaacataaccattcatgatccacacgcagtaggggaatgtgcaggatcaaagaagactgacttcatgctgagtaacaaggtgcatgccattgtggagtatgaagcagtggaagcagctgagaaagctgtgaccaccttaaatgatgagaggaattggagaactgggatgagagtcatacttctggctaaacgaagtgtaatggtatcaggaaagcatgtccagtcttcaaaggaaaatcatggaacagttttcaaaaagaagaacgagggccgagtcttcaaaagaagtacaacagttggtatcagaaaaaatagctggcgctgattcaggagaggttgctttggataaggagaacgtgaactctgacgttaacaatgagga

SEQ ID NO: 2413 - DNA, 840 bp, Avena sativa
ggagatatgaaaactattataacaaaactatcagaaaaagaaccaagagtgcttcttgacgtactgaagtcagtgattgaaatgattgagatgagggacgtcctcgagcataaaggtgaattatatacatgcctgccagctgagttgtcaactatgaaaaacttgtgctccctggttctatggattgtcacaagcataaaagtgttgaaggattccggccgtattggacttgtccatgagataggagtactctcttcggacaagaacgcggtccctcgtttctgtcttgcaaagcttctgcagaagttcttgagtttgtcggttataggtgaaagatgcattgcagatgcagcacaactgctgattgagatggcaggcaataataacgtgaaggagaaattgaggaagcttcctacattgtccctgcagaagtcaccaaaagatcgtaccctcattgaatccagaatcattaccaatggccaagaatcagttgaaagcgcatcagagaagctggaaatgttcaagttgcagctgaggaaaccaggtaatgtttgtttagcacaagatggcaccgagggaactttaaacacgagcatgtcagtgaaacgcaatcggtggtctatagcgaagtcatggaccccctgtccactaggcatgataccttgctcatatagttcaactgctgttcttccttccttcgatgtcattgatcacgaactgaaggatgtgatggtggaacatggaaatcctgagcatgatggtcagactgaaatgcttgactgttattcgctccctgagaagcagctggataatgagggcgttcaagaaatatcaatgtca

SEQ ID NO: 2414 - DNA, 485 bp, Avena sativa
cgcccctggtgaattcattcctgatccatggtggatcaagtgggattggcacatttgctatacagattgcaaaagcaccttggaattaaggtgttggttactgcagggagtgaagaaaaacttgctgcctgcaaagatttgggggccgatgtgtgtataaactacaaaaccgaagactttgtagcacgcataaaagaagaaactgatggaaagggtgttgatgtcattttggacaatatcggcggatcttatctccagcgcaatctgaacagcttagctattgatggtagactcttcattatcggtttcatgggaggcgttgtaactgaagtgaacctggcagttatgcttgcccgaagattgaccgtacaagctgctgggctgcggaacagaagcattgctaataaagctcagattgtcagcgaggtggagaaaaaatgtatggcctgccgttgtgtcgggcaaggtgaagccagtggtttaca

SEQ ID NO: 2415 - DNA, 732 bp, Avena sativa
ggcgcacagcggcaagttctgctccgggttcgacgtgctcaccgcgaagctctggcagtgccgcaccagggcgctcaacctggagcccgacgccacggtgaagctctgcttcttcgccagcgtgcgccacctgctcaagctcgacgcggggtactacggcaactccatcttccccgtgaagatgtccgggacgagcaagcgggtgctggaggcgtcggtgatggaggtgatcgacatgatcagggaggccaagcagaggatggcggtggagttcttccagttcgccaaggaggagacgcagcaggacccgttccagatgaccttcgactacgagtccatctacgtctccgactggagcaagctcgggttctcagaggtcgactacggcttcggcccgcccatgttcgctggcccgctggtgaacaacgacttcatcgcctccgtcgtcatcctcaaggcgccgctgccactcgacggcaccaggatgcttgccagctgcgtcaccaaggaccactccgacgagttcgtccgcggcatgaaggaggacctgccatgagctctactttgctggccatggcgacacagagcccggatgctgatacagttgtttgattcatattgtcgctgttgtatttctatgtgttctaatgtactactactccttctgccggttgtatttattttgttcctacatcatcttggtcaatacattactcctattttagaataawa

SEQ ID NO: 2416 - DNA, 827 bp, Avena sativa
aaagattgtaaagaactgggagacaagcaaaccatggcttccaaaaaagagaatagatgaggtcgtaagtgaagcagataaactgaaaacttggctggaggagaaggaagccgtgcagaaaagtacccctgtctacagcccaccagccttcacatctgaagaggtctatgagaaagttttgggcctacaggataaggtctcaagtgtcaataggattccaaaaccaaaacccaagattgagaagaaacctcccaaggaagagtctgctgacaaggagaaaactgcttcttcagaatctgcatccagtgagtccgaatccacggacaagccatcagaatcagaggccccggaaaagactaacgaatcagaaccagaatctcatgacgagttgtgattatttgagtcgaccttttgagaaccctgtaggactggttcggactccatatactccgagaatacagtgtcaccacagttttgtttgacggccaaaagatgagattgtgtaggaatgcgaggcagactagatgctgtatgggcgaagaatttgatataaatccgctgtttagcagttattatggccttgtggcatgctgtcaagatagtgcttcaaaaggcttagttgtcgggacttaaggactcgactttgtagttgcattgttgtattgaacttgtctatttttcagtagctttagggatttcacatgaagtatcaatgtatctttcttttgcccttttatatcttttgtctttctttttactacggtgaaagagataacatctgaaggacttcgtattctatcttgtctttgtaaagtaacacctacagt

SEQ ID NO: 2417 - DNA, 690 bp, Avena sativa
ctccgtgaagccgacgggcgtaggcgaaagagctgccaacgcgcaatccggcggcataccccacctccatcttcacgagcccgtgagacgacgctcttgtctaggacgacagtcgtgaactcggcgtcggaccgagacgaggtgtcgaccacgtcggctgcaccgacttgtaggcgcgcgtcggttttgcaccgacgccgatctccaccaacacttactcctgcgaggcataccccttgcgcatcccgacaaggctgctggtcgtcgagaagtcccagctgagcggacccatgctactccaactccaactacatcgacgccgtcaagaccgacgaggcacgacggcgagggcgggcgtggccggagtaaaggccacgctactcgcggcgcgtgtatcgacgaggacacgggctctgccgcctcccacacacacaccaccaccacatcatgcatggagaacgcgaagcgaagacgacgaagacgaccacacggcttaatcggaggtgtctcgcggtgtaacccgcgggagtaattaaccgggtgctttccgaggccccgggaaccatgagatcgcaatcgccctagtcaggttggccgcacaagcaggccacggagcgcactgtattagggatctgtactttgtttctccacgcgagattaatgaaatgcatcttccctaaccaaaaaaaa

SEQ ID NO: 2418 - DNA, 624 bp, Avena sativa
actggatgttacacttcttcaaggactcaagtggtgcagcacttcatccctctaccattcaagtatcaaactataaccagttggtcgcatcttctatcacttggcagaattctaaagacggaaatacttacctgaaaataaaggttctcaacttcggcgacaaagctgtagatattggtatatctataactgggctggagaatgacattcaaacctttggatccataaagacggtacttacatctggctctctgcgggacgagaactccttccaacagccagacaaggtggtgccagtggaaagtccgataacaaatgcaagagagcagatgagtcttgtactggatccatactccctcacctcagttgatctcctcttggacccgagcacaaagatgcgttcattcttggactcgaacttgcattcgagcatgtgaatacaaaaagggacgtggtgacgatagagcctttcaatggaatatgcgaattcgtgaatacacatgaatttcgtatggcgtgcgtgggttctttgtatgttgccgtttcacagcagtttggtctaaaaaatctgtggacagaaaagccattggaactctatataaatttataagttacccaaaaaaa

SEQ ID NO: 2419 - DNA, 471 bp, Avena sativa
gcggaggtgaagatcgttgaccctgaatctggcgtgtcccttggccggaaccaggcgggagagatctgcatacggggacaacaaatcatgaaaggttatctgaataatccagaggccacaaagaacaccatcaaggatggttggcttcacactggagacattggttatgttgatgatgacgatgagatcttcattgttgacaggctaaaggagataatcaaatacaaaggattccaagtaccacccgcggaacttgaagcccttctcatcacaaaccctgaaatcaaggatgctgctgttgtcccgctgatagacgaacttgctggtgaagtccccgtagcattcgttgtgcgggttcaaggttccaagatcagtgagaccgagatcaaacagttcgttgcaaaggaggtcgtatattacaagaggatcagtaaagtttttatcacggactcaattcccaagagtgctgcc

SEQ ID NO: 2420 - DNA, 933 bp, Avena sativa
agaacttgcccaactgtggaaaatggggcagaactaaaccctaatgctttgactgatcctgaccgagtctgcacaccatcaataacagaatattggaaaccacttgcagaagatatggacacatccgctggaatcgaggaggagtatcaccacaaaaataatcgtgtttattgctggaaaggtttacggttttcagccagacaagatctggaaggattttctcgattttgtgaatatgggattgaaggggttgtacctccagaactcttgccacccgacgtccgcgccaaatttaattcaaaacctggcgagaaggccaaacggcctaaaagggaagacacgaaaggcacctcatctcacccaaaagagccacaggttgccgcggccacgcccgacactgacggtggtggcagcggtgatcaggaagaaggcgccatgccgatggattctgacaatcccgtggtagacgacggcagccagaagcggagcccaggcgaagtctccgggcccgagtccggacagtgcgaagctgaagacgacggtgaagataactccaaaaccgcgcatagtagagagcctcggtaggtgtaatagccagaagcagaggattttcttccaaggaagatgctgtatcatgttttcattggtttcggttgaaacttgccatttatgagggagctccagagcctgagacatctggttagcatatatactgattatatttccctaacactagttgatgccatgttttagccttgacacatgtacagcctatatagcaactaggaagctctgtttttcgatggaagcaaacctcatctaatagtaggcctatttcggagctgatctttactagtaggcattttataggcgctgaaagcttctatcgtgaatgcctgccaactgtgactgttttcaggaaattcgagaatg

SEQ ID NO: 2421 - DNA, 828 bp, Avena sativa
agtggagattcacagaagagtcggagcttttgccatggcacttcagacagtaaacaagtgtctatcggatgcagtatgtgccatgtcacacaataggttagatggcgaaagccgtgctgtttctctgattcaatctggcaatgagattttggagacagccagatattcttctgaagccagtgttcaagacaaggatctcatttctgaacagcaaattgtactgagacagcttgaagctattcttcacatttataggcttactcgtgctggacaaactgttgaagttttgagggaaaccatcaaacttccgtttcttcatttggatccccagtctccaaatgtatcagtcgatgtattcaggaatttgtcaccccatgttcaagcttgtgtgccagacctcctgaagttagctctaaactgcatggacaacgtcagagatactgatgggaccctgagggctgtcaaatcaaagattgcgaaccttgtggcaagcaacatgagcaggaattggccacaggatttgtaccagaaggtggctcagtgcatttgaattagtttgtccttgagctggcgtgctagggttgggctccgtggcgggaccttcatacacgattcggtttgtttgcagtggtaatatgcgctatgatcatgtacgccacattaacctgaacttgacgagatctggtggtgtgtgcgaatggtttttttgtgctaaaccatatggtttatcttgtttgttggcctgtctgttgtgtaatcagcctgaaaatgttgaggagctgaaggaaaataccattttttctcatatataatttagtaatccatggt

SEQ ID NO: 2422 - DNA, 814 bp, Avena sativa
gcctccagctgaggctcaaagagaatcagatagcagctatgttcccagagcttccctgggtgatgatgaaggagaatacgccgcctgaagaagagcggaaagacagatcaaagaagaaaggcaggaggcagaacaaggaaggcggcttccgcaaggccatcatgtttgcggtcggcgtaggcattgttggcgccggattgcttcttggctggacccttgggtggctgctgcccaggttgtaagttcatctatatagtgtgtgattccgcaaataggtggtaggtaatgttccagatatgtgctgcgtgacgtaggagaatggaatgatcgaattcttcaaaccactcgtacaagcatgatgatttggaagccttgctgatctctctccacgccttcgtgtatatatcggaaggatttagtgtacatatttgccagaataaggtatttctggtgcacctgtaggttccatgggcaagggttgagtgtgtgaatattgtgccatgggtcatgtggtggtggaactccaaaatcagtcgacttcaacgatgtgtaaacctgtactgtaagtatgttatcttagataatgcaaactgtaagtactgtgacttggttcttttcttaatgtaagaataattgtattactaaggttgatgttcttttaggtaatttatattgtaagtttgtaacttggttcttttcttaatgtaagaataactatattaccaggcttgatgtatttctagatgatctatactgtaactctttaaatatgtagcttgatctttcttattgtaagaatataattgcgaaaaaa

SEQ ID NO: 2423 - DNA, 654 bp, Avena sativa
ttcgattgacccgataaccggacaagagactaatgatgataaccagcaatttgtgtcaagcgtttgctggagagggaggtcaaatatggtggtggcggccaattctagtggaagcattaaagtgcttgagcttgtttgaacaagttgttgaggaagttacagaatgagaggatctgagtgctgcttttgtgatgctgtctcagtgatgcttcggtaaccgtatgtttcctctagtgttctgacttgtcaatggacaaccaagtgtcaacatatatgaaggacgaaccatcagcctggtggaaacacagagttgtgcagttcaagcaacctacaactcaacagtctgatattgtttgcttgagactcccagtgaaccgtgcaattggatggcacgaaagctgtcggctgttctgaaaggcaaactgtgtttggaaggcactttgacatagtacttactagtcagcatctcaaggaggccctaggattaggtgtctgtacagatttaggggctacaagggcggaagggccgtgtaatatatatcttcgaactggttgcgcctttgagcaagagctattacagtggtactatgtctatgctatccatatctcgacgggaccaacctagtttggtatgcaatgactaacggtctagta

SEQ ID NO: 2424 - DNA, 555 bp, Avena sativa
catgaacaccaagatctctcatgcagaggcagttcacccagatgaacttgatgaagagtttgacacattcccgacgagcaggagtcaagagattgtaaggatgaggtatgataggctgaggagtgttgctggaagaatacagactgttgttggtgatatagcaactcaaggggagagaatccaagcattgcttagttggagggatcctcgggccacatcaatatttgtcctattttgtttcatcatcgcgatagtgctgtatgttacacccctccaagttcttgcagccataggcgggttctatgccatgaggcacccaaggttcaggcacaggttgccttcgactccaataaacttctttagacgtttgccagcaaggactgatagcatgctatgaagtagctggcatctggtggccttaccgttgtaatcgctagaaatactgcatgcctgttcatgtagtttgcactttgctgttatctgtaactgtttgttgttcaggacttaagagcctgtttcgtagtagtcgtggatccagggaataatgtgctgaca

SEQ ID NO: 2425 - DNA, 752 bp, Avena sativa
  modified_base (351)..(351): a, c, t, g, unknown or other
tctccgactcagatatcgcgagtgcagttgcagaccatggaatttcaacccattctgtaccaaacggcaaaggcagcaacacagttaggattcttattgttgatgttgattcatctgatctaagttctgggctctcttgccctccagcaaactttgtcgaagatgctttcctcatgtcagcaaagaagttcctttcagctggtgggctcctcatcatcaatttagttgcgcgatcgtctgcagtgagggaaacggtcgtttcacgactgaaagcggtctttgagcacctgtacttcctgcaactcgaagaggacgtgaatgaagttctgtttgcttccccaacgaaaggtntctggagatcgaccacctcgacgaggccgcagcgaaactgaaggctatgttgaaatacccggtggatgtagaatcagatatgaagaatctgcagaggctgcagtagcgtatgcttctgagttctgccgtgaagcaccgcacagtccatttgcacctggcactcagcagaacagttgctgttgactttctatgttgacaaaaatatgatcattacctattgttttagaaggtgtagtgtattgtggtgccaaattttgcacaagtgaaacattgttagcatctgtagagttacaaagggtgagtagtggcttggctctctcaaaagaaaatggtaattgctgaggatgtctatactttcctggcttggaattgtttacatgaccattatcaaatatcttgcc

SEQ ID NO: 2426 - DNA, 809 bp, Avena sativa
cggagcagccggcgacagccataaaccacaactacggcgggaacgaaagaagggacgagtacgacatggacagcgacagcatggacgacgacgaggatgacttcgacgacgacgatgaggacgacgacgatgttcgccgcatgccggtgcagtacgacacccacttcttccaaaagcagcagcagcagcagaaccacagccacagccacagccacggcgtggtccgacccaacgtgacaaacggcggcggcaaccagccggcaggcaacgccgcgcctgcagggacggcggcgacaagtggggcgccgttcctggccatggtccagtgacggcacgacgacggcagctagctacaaaccaagagatggccaggtggtctcaatctcgatccatcctgtgcccatgcatacggatccggatctagtacaattctacattgccacttgaatccttgatcgataccccctgcctgctcctaggtaaaattttcctaccagacctggaaagcctacacaaagatttacttgtgctccttccaatccaagctcttaattatttccattcctcgtgcacatatatatggatcgacgtatacatcatgtacatgtcacattcaatcaccacactgtagatgcatggtaaattaaaggcgtgctcatgcgggtaattttcctttttctttttcttttctttatgaggatacttttggagtgttacctttttacccttttgttcagaaacaaagttactgtccagtaagtgtcatgtaagaacttttcctcttcttaaactattgttactgttcaaaa

SEQ ID NO: 2427 - DNA, 647 bp, Avena sativa
cttggaggaaacctgacacaagggctgcggaagtcgatgctgaagtgctcggtgatcgtggcaatcgtgtgtatccgctacgtggcgctgccggtgatcgggatcgcaatcgtccacgcggcgcacggcgtggggttcctgcctcgtgacccgctgtataggtatgtgttgatgatgcagttcgcgttgccgccggccatgaacatcgggactatggcacagctattcgacgttggccaggaggagtgctcggtgatcttcttatggacataccttgttgccgccgtcgcgctcaccacctggtccaccgtcttcatgtccatcatttcatgatttctcaccaagccgccggcgaaaccggccgtatccggctgcgaggccgattgagatttgagacccggtgaaggcgcccacgcgagggccgtggcatgacagttcaattttgtaacatggtcgcctttcttagactagaaagcaaaggagcatatttatgtacagggcatgcgcattctttatgtatacaatgaaattctttgtcaatttgacttgcactacaactttaccatacagtgtgcatttatctatgacatagtcaacgtcctacacaacgaaagacagatacaaaatataatttaacttctatgtac

SEQ ID NO: 2428 - DNA, 832 bp, Avena sativa
gtgctttgcttggttactcattcctgtaccaggtatacaattcttgccaagcatattcaggagcggcagatgcaggaggaataatctagcctatgtaaacgtacgtcttatattctgaaattgggtaatacgtactccctccgtttcgaaatataagacattctaactttgtgaaacgaatgtatctagacaccttttagggtataggtttactccaaacctctacgaacctatacactaaaagacgtctagatacatttgattcataaagctaaaacgtcttatatttccgaacggtcctatacacactgtcgcacaatcaactttagctcccctgctttgcgtcactatctatgtactgtatatgtgtaggattattcctttggagttctagtaaatcttggcgaaatccagcgtcttcttgccctcgagcttgctggtgacgtagtgccggctgtactcgccgtggttgaacctccggtacctgcacggctccccgtcgccgacgagctccggcagcgggcccatctcgacgtcgtaggccggcgcgtagaacgtgacgatggacatccggtcctgctcgctgttggtcaccgcccggtgctccacgctcttgtacctgccgttggtgagcacctcgagggagtcgccgatgttgatgacgagcgcgcgcgggacggggtggacgggcacccaggcgtcgcccctgcgcacctgcagcccgacgcggccggcctcctgctggagcacggtgacggcgctcccgtcggagtgcgcgctgagccccagcaccaggtccgggcgcgggcacggcgggtagaagttcatccgc

SEQ ID NO: 2429 - DNA, 521 bp, Avena sativa
tggcttccagcctgacgaatactttttgcggtacgttaggcgcatcttggaagttgcagcgaacattgaggagatatctctgcaagatagggaggcgtgcccgcgctgcggatccttggatccgaacatcaaggtttctccttctagatacccgcggactggtgaaaagaagaatatgttgagggaggagatcactgctgggttccagatggtttcccctgctgtgattcgctttgagccctaatagttgagaataagagatgcatgccatcgatcactatggtctagatcagtctgtctgcaggaatatcacttctgagttccagatggtttctcgccctaaaagttgagaataagagatgcatgctgtcactatagtctgtgcgttcaaagatataggatgcatggtaatcattattgagttgctgaactctgtaataagcacttgttgtactcttgatttcttcttcttcttcctttataattcgatgattgaagctctgcttgtaattaaaaaaaaa

SEQ ID NO: 2430 - DNA, 948 bp, Avena sativa
ggcctcctccgcctcctccacagccgcagccgccctcctccgctccgccccgtccttctcccacggaggaatcgtcggcccgtgggcggcccaggtccggcgctcgctcgctgcccctctccgcgccgcagcggcggcgaatgggtccacggtgaagatgatggagagcaaggtcaagaagaggaacaagaagggcgccggagcgggcggcctccccgccgccatcgacctcgagatccgggaggccgaggagtacctcgccaccgacgtgcaggaacctacaccagacgactttccctttgaaatcgttgatgaagaggggatgagcgtggttattctgaaaaaggactacaaggatgagaagatcgaggtcattgtcagcatgcctaatatggacgcagagcctgagtttgatgaagaagatgaggacgatgataaggatgctgccaaggacgacgacgatgaagatgagggtgaggaagatagtagcctttccatgaaggtggtagtctccaagggaactggcccgaagctcgagttcacctgcacagccttccgcgaggagatcaccatcgacgacatgctgatatcggagaaaacagaaccagatgcagagaagttccccttcgagggcccagagttcaccgagcttcctccgaacgtgcagaaggggctgttcaagttcctggagctgcggggcgtgacgctgcagaccaccaacttcatgcacgactacatggtgacgaagcagaccaaggagtacgtccggtggatgaccaagctcaaggacttggtgaggcaatgagacaccgagtagatggccttgccgcgtggctcgacatcaattttggtagcttagtcttttagcacgcgtggcaagcgcagcgagaaccttgtgaagctactactactatgcagtgtgtgagtgtgtctgtagttccgtatcag

SEQ ID NO: 2431 - DNA, 704 bp, Avena sativa
ttgcttacctcaccacacataacatttcctcttatttttggacaccacacagtgtcaacttcttcaagacaaaactatctgttggtatcttgtcaccatacaatgctcaagtgagagctttccaggaaaagctggagaaatcatatagcagctgtgatggtttctctctcaagataaagtcagtggatggtttccaaggcggggaggaagatatcatcatcatatccacggtgaggagcaatgaggatggcacagttgggtttctcaaggacacaaagcgtacaaatgtggctctcacaagggccaagcattgtttgtgggtgattggcaatgcaacgactttgtccaagagcaggtctgtctggcagaacattgtgtatgacgctaagaaacgacagcgctttttcaatgccaacggtgacaaaggtttgtcagatgcaatagaggcggccactattgagcttgatggctctgataatctgcgcaggatgggatccttgcaatttgcaccacgatctgagagatccagcaaggagtatcgatcttagacggatttgaagttcccaaactggatcatatatcttcgatgcggttgaaaggtgaaattgtgccagaagaagaagaacaatttgaccgttgtgttccttatgaatgaacaaacatgcctacaagcttgtatagctctcatgaaaagatatcataaa

SEQ ID NO: 2432 - DNA, 651 bp, Avena sativa
gacaagcagtactggaaggcgatatcggagctcatcccacacgagatcgccaacatcgagaagagaacaggcaagaaggacaaggacaagaagcctggaatcatcgtggtccagggccccaagcctgggaaggccacggacatggcacgtatgcgccagatactgctgaagctgaagcagacaccacccccacacatgaagccgcctaaccccccacccgctgccacccccgcagcagcagcccaagcaccggcagctgagcccatagccgctgcctgagcgaagatgatggcctggtcttctgctaatccttggcaatagccttgtatttgggtgtcagtaaccgggaaatggggatgaaatgcaaggtggtgaatcttccgagttcatcatggtggcatggcatggcggggagattacacacactgtactattactgtcaatttgagtttgttattattatgaagaggtggagggttattatggacttattcgttatttttattgcattttgtagataaggcattggtcaaaataaggtgtattagaggaggatatgtgcttgtgtttgtatttggaaaaaaatggtaaaacctcaacctgcatgcagtatattatatcagttggattctcatctcaagtcaaaaaaga

SEQ ID NO: 2433 - DNA, 628 bp, Avena sativa
ggaagctgaggcaaacaaggctggtggaaagtatgataatgcttcaattgataaccaaatagagttctataagagagagggtttaacccattattcatcagctaagcttcctattacgagtgatgtccctgagggctgcgtgataataagggagaacatccccatcaccaacctcttcacatgcctttggtttaatgaagtcgatcgcttcacttcaagagatcagataagctttagcacagtgagagataaaatacggtcaagagttaattggactgcagacatgttcctggattgtgaaaggcgcgattttgttgttcaggcataccacagagagctgatggagcaaaggctagctgccttaagaagccagcctccaccgccgcctcccgtggtgcgcgcgcaacaacctaggaagatgctcccagacaacgcggcaaaggaacccgggagagcttctgcagccaagaagtcgtcagggaagcggtcacggaagtcaggctcgaaacgggcccatcgaacgaaagggaccggcgggaaggaacccatccgactgtaaatctccctgcgaaaatttgcacccatacaacgacatccaacacggactggttatttaactcctactact

SEQ ID NO: 2434 - DNA, 928 bp, Avena sativa
caatgatggaagttgtccgaggagctgcctttgacattttacaatcagctggtggttctcctgcttcactcagacctggtctgtggttagacttgtacagtggtactggatctgttggaattgaagctatgagccggggctgttcagaggcacattttgtcgagatggacccttgggttatttctgaggtccttaaacctaatctggactgtactggatttcttggttcttcacacatacatatgcttcgtgttgaaaacttcttggacagtgctgaaaaatctaaagactcaggtagatatccttcttttgattatattagtgtaacaccaccatatgttgaggtaaactacagtacactactcgatcaactttcaaggtccccgttggttggagaagattgcttcattctagtcgagtacccactcaaaacagatatgcctgaatcctgtggagacctaataaagatagctgacaggaggtttggtaggacaaacctgctaatttatgggccaacctggtcagagaaaaagaaaggacagatcctgagataatttttgtaacgtcgacacaagttttgcccttttttgcagattagtaccagctcaacatggaatgctgctgtcatcacgtcatcatatatggtgaacacaaccaaggagattgagtagttcagggctattgagatcatcacattccctggaaatctcttataccagagtttaacttccctaacttgtccatataaagatgtcatctcacctcggggagtagaaatcctgcccttctggttcagagatccacatcacgcaagaaagatggcctcccctttccgagcatcggcatcatggaggagccactgtgaagccacgtttcgtcagcaccgatccgatggggaccttcggcccctctacgttgctaagctcac

SEQ ID NO: 2435 - DNA, 735 bp, Avena sativa
gtggcaccttatgagtatatatttatctgggacgaggaccttggagttgatcatttcaatgcagaggagtatattaaacttgtgaagaaatataagctggaaatctcacaacctggtttggagccagataagggattgacatggcagatgaccaaaagaagaggggatcgcgaagtccacaaggatactgaggagagaccaggctggtgcacggatcctcatcttccaccttgtgctgcgtttgttgaaattatggccccagtcttctccagagatgcatggagatgtgtatggcatatgattcagaatgacttggttcatgggtggggtctggattttgctctgaggaaatgtgtggatcctgctcatgagaaaattggcgttgtcgatgcccaatggatcgtacaccaagtggttccttctctcgggaaccagggacaatcggagaatgggaaggcaccatgggaaggcgtccgagagcggtgccgaaaggagtgggggatattccagacgaggatagcggaggcggacaaggcgtactacgagatgatgggcgtaccccctccgaatgtaacgttcgtccactaggccgtacaccgccgctgttaatccttcttttgatcccttctagagcgcttatgtagagagaaagagagcttaggtggatggtggtattgatgatacgtgtagatcttacgagatatcatatcgattaattgattttgtgcctaccaa

SEQ ID NO: 2436 - DNA, 726 bp, Avena sativa
gtggggcaagtcgaattctaccatgctgcaggtgttgatctccatccagggccttgtgttgaatgataaaccatactttaatgagccaggcaacaaaagcacggtcaatacaccgcttggtgaaaagcattccgtggcatataatcaaacagcgtttgtactatcctgcaagacaatgctgtattcacttcggaagcctccaaagcattttgagaaccttgttgttcaccatttccacgagcgggagcgtgccatcctggacgcatgtggcgcatactcgtctggagtggtggtaggatcatcagccagtgacggcgcaaagtacgccagtgacaagtggtttgtgagtttcaagaagtctctggatgcacacgctgaacttctcgcaaaggagttggcgacgaacagaactcgagcgctggaactgaaaacagacgaaccagctgcagatgagatcgtgcctaccagctaggcttcttctgccagaaccctgaccattgcaaaactcgtctgcttcagtcgatcgcggaagtgtctagatcacgattcacataccttatggatacgtgttcgtataactgcagatgaaatttactgtagtttagcgtatttctggcgttgacacatcacattcggtgatgaaaattaggctccatcctgtgtctgtctacccactggttttatgcatgtgacttagaaacgaaaaaaaaaaaaaaaaaaaaaaaa

SEQ ID NO: 2437 - DNA, 823 bp, Avena sativa
atctcgtcgagctgtatctcagcgacctcaatctcgagaacgagggtacgctagccatcaccgatgtcctcaaacagtcagcgcctcagctggagatccttgaaatggccggaaacgagataactgctggcgcagccaaacgcctagcagagtgcttgacagcaatgcagtcgctcaagaagctcaccttggctgagaacgagctgaaggattccggtgctgtgacgattgcacagtctctgcaagaaggccacccagatctgaaggagctcgacgtgagcacaaatatgtttcagaggtctggagcccggtgctttgctcaagcggtcgcaaacaagccaggatttgtgctgctgaacatcaacgcgaacttcatctctgaggaaggggttgatgaggtgaaggagattctgaaggatggtaggaacttgctggaagtgcttggcccgctggacgagaacgatcccgagggggacccagaagatgatggtgaagaagaggatggggaggacgacgagaaggatgggaatgacaatggtctgggcttaaagctgcaggacatgaaggtggaggaggattagtcgtgtctaggtggactagcccctatctttcgctccaattagcctctgaaatgttcactagacggtttaaattttcacataaagccaactcaccgtggctctattgtcttgaattgagccgagcagccggatggtgtaccctggcggtttatctgtactcctgcaacttgatgttttattagtaccatctcggttctccaggtcatggtcaggcccgtactcttaaatctatgacawgatga

SEQ ID NO: 2438 - DNA, 973 bp, Avena sativa
cccgggatgaaggaaagaaaatggcagcgccacctctcagcctcgcacgccgcctcgccggcgcatcccacccaaccaccgccgccgccgcgcattcctcctcccgttcccgacacctgcgtcctcgcccgctcccttcaaagaggtggagcggagtggtgaagatgggggctgcagtgggaggcgggcaggggggcggggaggaggaggaggagacgaggcaggccaaggagatggccgccgccaggaggcgctgggagacgctgatcagggagcagaaaatcaagaccctgacacccagggaagccggctacacgttcaaactgacggacaaggtccttctggatgtcaggccctccaacgagcgccaaaaaggcctgggtccaaaaggctctaacctggattcctgtattcgacgtggacacgtcgtctgatctgaacggcctcagcaagaaagcgttcagctttgtgatgggtggatggtggagtggcatctcaacaatgtcattcaataagaactttgtacagcaggttcaggagaagttctccaaagatacggatattatcctagtgtgccagaagggactgagatcaattgctgcttcagagcaactttacaatgctggttttgaaaatttgttctgggtccaaggaggactggaagctgctgaagaggaggactttgagcgggaaggttcccagcctttcaagcttgctggtattggtggggtttctgaattttttggctggacggatcaacaacgtgcacaggctgcaaaggaaggatggggctatcggctgctcttcacgggtcgattggttggagcaatcgtgctagcagatgctttattcgtgggtgcacaaagtattggccctctgcttcaacaattgcagtctcgttaagggatccatttttctcatggccaacgacggcatgaggattcatagcatgttatgaggccatgggacaggc

SEQ ID NO: 2439 - DNA, 538 bp, Avena sativa
tcgatcaatggctctgctcaaggccgtccgcgtctccgacgtgccgaccctcgacgtcgtcgtcgtcccggacattgacgcggcgtcggcgaagcagcagcagcgcggttccggcggcgcggggcggttcgcggtgatcgggcaccgaggcaaggggatgaacgcgctgtcgtcgccggaccggcggctgcaggaggtgaaggagaactcggtgaggtccttcaacgaggccgcgcgcttccccgtcgactacgtcgagttcgacgtccaggtagtctttgagtatgccaaggacagacccatcattttctctagcttccagcccgatgctgcacagctcatgcgaaaattgcaaagcacataccctgtttactttttgaccaacggagggacagaaatctacgccgacgtgaggaggaactcgttggaagaggcactcaagctgtgtcttgccagcggcatgcaaggtatcgtgtccgaggcccgtgcaatattcaggtttcctgccgctataccaaaagatcaaagaggccgacct

SEQ ID NO: 2440 - DNA, 597 bp, Avena sativa
gttgcctcctgaaaaggtgttcaaaccttgccatcttttcatatcctgcctaaggtcacccatatatattggcggaagatacttgaagctttcaagaaatgttagtcagtcatgttggataattgatgatgaaagaatgggggaagcatcagttgaggagataattggggagaatgttcgtgccatctgcagaggtgatgggtacaagttccacgctgctggaagagaagatatcgatgtacggatgcttggatctggtcgtccatttcttattgaagtcttgaatgtgcgatctatcccatctgtggttgaagttcaacaaattgttgagaatataaatagctccgaaaagaaatacgtcagagttagaaatctcaagttggtagacaatgaaatatgggccatgatgcgtgaaggagaagcagagaagcagaagcagtacgctgccctcatatggacttctagtcccctgacagatgatgacctgcagaagatttcggctgttaaggatatggaaattatacaaaataccccaataagggttcttcatcgaagaagcccattagagcggaaacggattatacattggatggagat

SEQ ID NO: 2441 - DNA, 448 bp, Avena sativa
cctctcgccaggcatctcgtaggtgcgccggaaggggtcgttcggggcatgccacgccctggacccaaaaggaagctcgtcagctgaagatcatcccgtcgatgatggtctgctgcacgccatcatggctgctgcctgttgcgccaacactacccgactatataatccagcattctccttgccctggcgtctttgctgccaagttgtgtctctagtatggttgctgtaataaaataaagtcgttctttcatggcggaaagcatgcagtactgtgtttcttttcggccttcctgtgtgaaaaacgtcaacgctatgctttgtgattgtgaagtgacatttgtgagtttatgtagccgttgtgtgctcgttaactcgttatgctctatttgttaagatatgtgcctactgttgttattcttatgatatgtgctatactaggtaaaaaaaa

SEQ ID NO: 2442 - DNA, 935 bp, Avena sativa
aagtcgaagcaggttagggataagcaaattgtacgagttcttgggaaggcaccagtaatagcagctgcagcctacctgagattagcaggaagacctgttgtccttccttcaaataatctttcttattcggagaatttcttgtatatgctggactctatgggtaacaaagattataagccaaatccccgacttgcccgggttctagatgtactttttattcttcatgctgaacatgaaatgaactgctcaacagctgccgttaggcaccttgcttcgagtggtgtcgatgtcttcactgctctttctggtgctgttggagctctatatggtccactgcatggtggcgcaaatgaggcggtacttaaaaatgttaaatgagattggaagtgtggagaatattccggatttcattgaggagtgaaaacaggaagcggaaaatgtctggttttggacaccgtgtgtacaagaattatgatcctcgtgctaaagtcatccggaagttagcagaggaggttttcacgattgtgggacgggatcctctaatcgaggtcgccgttgctttggagaaggcagcactgtcagatgagtattttatcaagaggaagctttatccgaatgtggatttttattctggcctaatatatagggcaatgggattccctacagaatttttcccagttctgtttgcaattcctcgtatggctggttggttagctcattggaaggagtcacttgatgaccctgacaataaaattatgaggccccaacaggtatataccggtatttggctgaggcattacaccccagtgaaagaacgggtgccaccgagcgacagcgagcagcttggccagatcgctacatcaaatgcgacgaggcgtcgccgcgcaggttctgccctgtagaactatcagcatgatagtacaacatacagtcca

SEQ ID NO: 2443 - DNA, 790 bp, Avena sativa
tggcctttgtgccccgccggagcaggggcaagggcggcagaaagacggcgtcaccggcgccgccggtgcagaccggctgggccatgcacgagtaccgcctcgccctgccgcatcagcataagaatggttgctgcttgggtgagggtggaacaggcgaatgggtcgtgtgccggatcttcaaaaaggacaggtcgtcgtcctcctcctcctactcctccaggcgacaagcgctgggcggtcacggcaccgacgagcaccgcacaatgccaatgcagccgtcgctatcgtcgccggcgtcgtcttccagctgcgtcacaagcggcggcagcagctcggacctgcaagaagaggtcagcagctgagaagcgaagcaagctctctgactagctatacccggtactagctaggcagacgcagactacgaacaaaccaggggaaatgatatgtcgttttcctgctccaatatttgttttcctccctctctttctctatggtctctctctttctctcagtgtaatgtaatgcagtgtgatgtgatgtagcgagaagcaaagcaactaggcagtgcatgtttagttaacacaagcaagcagctagagcacgtaagtattatttctcctcgaggttaattaagaaagctccttctagtttacagatgtactatgcatatctatgcagcagctgcagctagcagtcacctgtgcgtatatgcatgggcgctctgtaacttgcaagctgtaaattttcttcaagaaagaaaagattaatgaaagccttctcatttctgcca

SEQ ID NO: 2444 - DNA, 776 bp, Avena sativa
gcactataaacacctgctcgctcgtgttctcgtggaaagggctggaggtgttcgacgggagcaactcggtgtggcacacccacgacacggagtccgttgaaaatgacttcctcagaaccctgcagctggtggacgagggtgacatgcgcatccgcgacaagggcggcgagctggcgtggaaggccagcgacgagccacgcgcggcgcagcactgcggcatgcccggctcgcccggcctggtctccgcagcagcgcccttcgcgcagccgatagggcaggggagcggcaacctgccatttggacaggatgaaggaggcaatggcaacggcaacggcaacgccggcgtagcacagcccgagctgccgcttgtggctgggcagggccaagccgtggaggacgtggggcagacgattggatttggcaaccaaccactggtggacaacagcccatacgacagtggtgcactgaaacatggatgcagcttgctcggaactggactttcatttggtgtcactgctgccattgtcatggccctcggtttctgatttcagtacttgcgtgtctttcagtctttgcgtgtgatggcttttggtggtttctcgaatatgctcttataacttctggcgcaataagccaggatgtgctgtgaactcctgatcagggtggtaactttgtgtgtgtgggcatgctgataggatttgtatattatatttaaaactgcaatttgtaaaaagattgtgtttgtttaagtgttttgtaaatgtggtttcgattgg

SEQ ID NO: 2445 - DNA, 564 bp, Avena sativa
agaaatgcttgaaacagtctatcctattcttgaaaggtgcatctgagaagtctcttataattatcgatgagttgggacgcggaacttccacatatgatggatttggtcttgcatgggctatctgtgagcatcttgtggaagtgacgagggcacctgcactgtttgctactcattttcatgaattaactgcattagcaaataggaatggtgatcagcaacaacatggtccagatttgggaattgcaaattatcatgtgggtgcacacatagacccatcaagtcggaagttgactatgctttataaggttgagcctggtgcctgtgaccaaagttttgggatccatgttgcagaatttgctaattttccagaagctgtcattgctcttgcaaaaagcaaagcagaagagttagaagacttctctactgcacctaacttcagcgatgaacccagtgacgaggttggatcgaaacgcaaaagggtgtttagcccagatgatgtgaccaggggagctgctcgggctcgccttttgctggaggattttgctgcattgcctctagatgaga

SEQ ID NO: 2446 - DNA, 689 bp, Avena sativa
ttcagaaaagcgtgcagatcccgcttctgctcggcagcacgctctacttcgtcggcggcatcgtcaatcggcatgacatccacagccatcccttccctaccttcaccctgctggggactggctgggcttggttctgcctgttcggaagcctactgttcttggccgcagggctcctgaacctcctcaaggtgttcaagatgcagcagatggacggccgggggctggagaagctgcggggcggcgcgcaggagcggctgagcaggggagagggagggcaaggtgcctctcatcctggaggagggccggaggaggaagcgtggagacgagacgtggccggcggcggcgcggaatgagccgagggctgcgcccgtcccgccgccgccggaggggtcttacaaggacgctctcgtgagccgcggcaactagcggtttcgctgagctgcgcggtagcaataagaggttgcccacctcaatgtgcaatggcatagctgctggtgaaacttttgtttctgtttttgcgaatgagggactggagaaacattggcatgtatgttcgtgctcgtttgtcatgtaaattatctgaacctagcttattgtcagtgcttcttaattgtaatttgtaatcgattacatagctgaataatgtttgggcaaaaaaracgcaaagtgttttggacatggacaacagt

SEQ ID NO: 2447 - DNA, 533 bp, Avena sativa
gtcgtaggagcagcaatggcaatggcaatggcagcactgattggtggattgacggtgtaaggaggagtagcatggattgggctagttcagaatttgtgcccaagagtggtggagcagtgagcagcacaccgagcatgcgtggcacagtctgctatgtggctcctgagtacggtggtggtgggcctctatcagagaaatgcgacatttacagcttcggtgttctgttgttagttcttatctctggacgccgcccgctccaggtgacagcatcacccatgtcagagtttgagaaggcgagtctcatttcgtgggcaaggcaccttgcccacgttggccgcttgcttgatcttgtagactctgcgctcctggatgttaaccgtgaccaggtgctgctatgtataactgttgcactcctatgtatccagaggtcgccaactcgtcgcccatcaagtgaggaggtgcttgaaatgctatctggtgagggtcaaccaccacatctcccagttgagttctcaccatcgcctcctggcggt

SEQ ID NO: 2448 - DNA, 1009 bp, Avena sativa
attatatcttgatttcttgttaggtaccattacaacgtggctgacaacaggcttcagcagcatatagaaaagggtaatgaggatggcctatacattagctgtgtggcttcttcagcaaatctttgggctctcattatggatgcaggaactggttttggttctcaactttatgaaatttcaacagtttttctacacaaggactggataatggaccagtgggagaaaagtttctacataacagcaatagctggagcatccaatggaggttcattggttgtaatgtccaaaggaactccttacactcagcagtcatacaaggttagcgaatcattccccttcaagtggatcaacaaaaagtggaaagaaggttttcatgtaacatctatggccacagctggaaatcgctggggagtagtcatgtcaaggaacgcaggctattctgaacaggttgtagagttggatttcctgtatccaagtgaaggcatccatcggcgatgggagcatggttacagaataacttcttcagcagccaccagtgaccaagctgcttttatcctgagcaaaccaaaacggaaaccggtagatgagacacaagaaacactgcggacctcagcctttcccagcaaccatgtaaaggataaatgggcgaagaacctgtacattgcttcgatctgctacggccgaactgtcagttgacccctctgcgaactgaagtccagtggacatttagtagtttgtcaaaaatgagcatcaatcgatgtgcaatggaagagagtttccgggaataggattagaaagcagaagttgtcgtgatgggtatcggtccgtaactgttccctgactgtaaaggaatgttctaccgaatgcaggctgtggaccttatccgtaaaaagatgctaacacattctgtctgaaattcgccatgtatagttttcgttaagttctcattcgagcaatcctaataatttgcgagtttgaaaatgggtaaatcttaatctgcttgtgcaga

SEQ ID NO: 2449 - DNA, 738 bp, Avena sativa
gtctcctcgcagatgcatgtcgatccctcgccatatggcagcaaatactctctcggagctaaaactgatgtgggtgagctgagcttcttctctggaccatcagcaaacaccaggggcttcaccattgattctccatcggatagctcatggcactcaatgccatccagcatacccccatatcagttgcctaaagctagggatactggcctcctacaaggtggtggattctcgtattcccagtttgaaccgtcacaggagcttgggcaggtaaccattgcgtcggtgccccaagagcaagggcgccgctctttcaatggtggaggcggagggctcatggcgaacgttaagcaggagaaccagccgctgaggcccttcttcgacgagtggccggggaggcgggactcatggtcggagatggacggcgagcgctccaacgggacctccttctcgacgacccagctctccatctccatcccgatgcctagatgcgattgacaggcctgccatgtcagtgcgcgcggcagctcaatgcgtcgtcgccgtggttggttggtggtgctgtccatgcagaagttggtgggtcattttcctggttctttctgccattgttgtatttgtgctatgaaactcagcttaaggagcagtatcctcatattgttgttgtaagtggagaacagaggaacattagtactagctgtttaagattcgaccccggctttgtactctgggacaagtttg

SEQ ID NO: 2450 - DNA, 796 bp, Avena sativa
aacctagctctctaccaagagctttgcagagttcacaatgctgcgcttactgcgcagcctgcattggtgcagaatgaacagaaactgcttgagaagatcaatattctgtgtctgatggagataatctttagccggccatcggaagacagaactatcccgttaactgttattgctgagcagactaagctttctacgagtgaagtggaatgtcttcttatgaagagcctctcggttcatcttatagaaggaattatcgatgaagtcgagagtaccgttcatgtctcatgggtccagcccagggtacttggaatcccacaggtgaaggcgctgcgtgagcgtctcgactcatggatcgacaaagtgcacaccacgctgttgtcagttgaggcagagacccctgatctcgtggcggcataacttcttggccaaaagccttttgcgctaggctttggtttgcagcaaggcagcggtgtaaaatgagagatgttctggctgtgcacgtgctgcttgtactagctcttttctggaaaatgaaaacctgttgctttgggcatcctgttgttgatctggacttgtaacttcattatcctactcctctgaaggtctttctgatgcaggtttcaatgttgacgaagtatcacggattgaaacatgccataccggtagagggcatcactcaagttttttcagccgaattttataatgtaatcaggcggattgtctttaaatagttttctcttgtgttacgttggatatggatgaaggaaaatctttgattttcgtgttatttaagaaa

SEQ ID NO: 2451 - DNA, 692 bp, Avena sativa
ggtcaggctcacggctgtcgccgtcttcgatcgaggtggctggcgcacccgcaggagggtcatgagggtgatctgcgaagacgtgccagtcacattccgtgggaagaacgccgccgacgcgaaatttgatggccccccaaggcgctgcgaagtctacttgtgaagatgttaattggaggggacgatcttcagtaggcacaagaagttctggcactataagaagttggccagtcactgattcatgagtaatgggtgggtaacttcagcttacctgcctgtcaatagaaatcgcgacaaggaagagtctgcaatgaattatgattaatggtagtatgtgaccgtttcacctatcgtatcatagcatcaatatgagcggatgttgactatagcgaccgagtactgatgttggaaatacttggcaagaatgattatcaatggttgctagtttgcttgatgagagaacttcaaaacatgtatgcagccttgggggccttcgtactctaatgtaccttggcttgaaatatgctctaatcacttattgtgatcatgatttaggttctttatgtctaggatctttggtgccatttgtagcttagttcaaaaagctgcaattaaaatagttttattgcttactttggaggggctgtttggtgagatgggctgctcagttttagctgctctgttggttacag

SEQ ID NO: 2452 - DNA, 813 bp, Avena sativa
agacaatgcagatgatggtccttacttcaacagaaaaggtggcacaaatgaaatgtccgaggatgagatcaggcttaaggcaaggaaagaaattgctgccctgggtgtacaactggggaagatgaacattgcttcatgggctagcaaagaggagctagaactagtctctgcaacgccaaccattgctgatcttgagcggatgaagaaggaatatgcagctcgtgcagcggcattcgaggatgcagagaattcgaaacacacagcaagattcaagaaggaggagctgaagatcgaagcatgggagagccgccaaagaacaaaagttgaattcgaaatgaagagactagaggaacgtgcggagaaaatgaggagtgaggccatggcgaagatggccaaaaacctcgagacggcgcgccatctggctgaagagaagcgggcctcggccaacgccaagatgaacaagcaagcagcaagggcggttcagaaggccgatcagattcgccagacgggacgaatcccacggtcacatatcctatgctgtggctgcttctgtgaaccctagcatgtgtgttattaaacactagctgttcagtatgtttgctgtcgtgagaaatctaatttcctcgttatgtagttagcattccttggttttagtatggaaaaggaatgcctgattaggtacttgaggtgtacacattcttgcagtggtcgtataaataattccagtgcgcagggtttgtttgctcattgtgaaatgtgacgagttggttttttaagacagtagtactaagctgtcttcagtagaaaaaaaaa

SEQ ID NO: 2453 - DNA, 945 bp, Avena sativa
cttgcaaatttagtaaatgaagctgctttgttggctgggagatcaaataaacaaatagtggaaaggatcgacttcatcagtgcggttgagcgttcaatagctggtatagagaagaaacatgtaaagctgaaggacaatgaaaaggctgttgttgcacggcatgaagttggtcatgcagttgtaggaactgctgtagcaaagctgttgcctgggcagccacgtgtggagaaattaagtatactgccaaggtcaggaggtgcattaggctttacatacactcctcccacaacagaagatagatatttgctctttgtcgatgaactgcgaggacgtctagtaacacttcttgggtggacgggctgcagaggaaatagttctagcaggacgggtttcgtactggggcacttgatgatataagacgtgcaactgacatggcttacaaagctgtagcagagtatggtcttaatcagcgtattggtccaatatcggtagctacattgtcaaatggtgggctagatgactctggaggctctccatttggaagggatcagggccatctggttgatcttgtccaaggggaagtaaaagcacttctacaatcggcccttgaagttgctctttcagttgtccgtgcaaatccagcagttctagagggccttggagcatatttagaagagaatgaaaaggttgaaggcgaggagctacaagagtggcttaagtcagttgttgccccggaagaattggcatcttttattacaggaaagcaagagcatgttcttcagctcgaattaggcccctagcatcagaactataaaattggactcttagacacgattaatttaacctagattcaaccgttaaagctctgtaaatcccaagggatgcaatgaaaaagtctacatgcccaagtgatgctgtatatatacaatggtggctgccctttga

SEQ ID NO: 2454 - DNA, 604 bp, Avena sativa
caggaatgaccgtggaagggagatgctcagcctggtagagggacttttggagagcacaccaacagttagcagtggcgctagaaaaccgtttgtgatggagacagtgaaagctgatgatgcagcgaaaatggggaaaggcccttctgacccagctcccagatttgtgggcaacatcatcgctttcctgctaaacctgattggaccgaaggggctggaatttggtcgatactccctggattaccacacgatcaggaactacctgtatgtgaagcgagcatggggaagcgcgagagcggagcagcacatgccatcctacgccaagaagattgtggaggcatacaacaaggatggacgcatcgactcgatgctaaaagaaacaaaacaaatagtcaagtaggtgttcgatgctaagaaacaaaactgatatggtggtatagcaagctagctataggtagattgttgtgtatcgatcttcacgcgcattgccggtggatgaaactaatagatgtggttccgccatcattatcttgtttgattgatgggagaaatctaacctagaggcaccacattgttgtcttcaccgtgtggggtatatttgtacatg

SEQ ID NO: 2455 - DNA, 526 bp, Avena sativa
ccaaatggtccaaaggttgttctcagcaagatacttctgaactcgattgagtcgagaactcgagtgtgcagatatatctcatcctttaatgtatagaaagcatgcacggtcttcggttgaaggaatagtttaagcaaactaaacacggttcaacaaaacaagaagaaaagaaagagaaccctacatcatgcatacaaaatgaggcctagccaagcgagtgtgtgggtgtttcgtcgcatctttggtgaaggtaaaaacatcttatcccttggtcagaaatattcccctctatcccaaattaagtgactcggctttatctagatactatgttttagtttgcagatacatgcatatctcgacacagctgagtcagttaatttggggatgggaggagtagcatatgtgtatattttctctatgcacatgagtcatgtgttgtttctgtattttgcatgtgcatttctattttgtaatttatatccttttttagaaactttcaaaggcagaactgtgtactcggcgcata

SEQ ID NO: 2456 - DNA, 708 bp, Avena sativa
caaactttgatgtgcagtttctttccagtgcaggaaaacccatgatgcccatcagccttatgtataaatataaaaagaatccgctttgttaagataggctactttggataaggttgccttttttagttatgttctccactacacttcagaccgtgcgctgatctacacgccatgttaggaggctcaatggtttcttgatccttctaggaggtgtgattactgctttgcgtaggttctagatagttctatggtttggccatcgtcaagtttttttcagatatttttgattggttgcatacttggattgcaaggaacataaaaaactgcggatgacacaagtgttcacgccagaacttacgctgacatgttcctaacttcctaacatccggatgattacacaggatgttcgtggaatcctgccaacgccttcgtctcatgaagaactccgaggctgtcaacttagcaccgagggccgcccaatgaagcatactacgtggcccttacgaggaggggtggcggaaaggaggaggaagccttgccctgccgaggttcctcatgtgagataggaacgtgtacagttgtcgccttaccgctttcggttcatctatggtattgagccctgaaaagttgttagtttcattgcttgtccgtagtagtagtagttctctacatatatatataggccgcgaaagtactggagcttgaata

SEQ ID NO: 2457 - DNA, 562 bp, Avena sativa
ctctacctcggcttgactactgctactgtagataagggaataagaagaactcttcgttctacctctacctcggcttgactactgctactgtagataaagggaagtttcttatggccgcaagaagggttaggcgcggtccccatactgagtacattatatcccttgatgctgaagacgtgtcacaagggagcaatgcatatctcgggaaactgagatctgatttttggggaacaaacttcaaagtatatgatagcaagccaccatatgatggcgctaaagcatcaagtagtcgatctagtcggcgttttggaagcagaagaataagtccccaagtatcatcaggcaactatgagcttgggcagctttcatacaaatacaacctgctcaaatccagaggtcccaggaggatgtattgtgcactcgagtgcccttcaactcaagagacctgggaaagctctctcaagacaaaagcccgaaagcccatggggaccattgttttaagaaacaaagctccccgttggcacgagcacttgcagtagactaggtgcttgaacttccatgg

SEQ ID NO: 2458 - DNA, 550 bp, Avena sativa
acaacaaagtacatgaagtggtagagtataatgccctcagaacagtaggactgtccattggatacaaagcaagcaggatctccaaatatcttaaagtaattcaagaggaaggagccaggtgttgatcgcagatgaatgctcctgaccgctatgagcgctttgtcgtgcctgagggcacaaagaaggtgtcatttgagaaggatacaaagatcatgaatgctgcatctttcaccattgaacgtgaggaccacacagtcggcaatatcctccgcatgcagcttacacagggacccaaatgttctctttgctggctataagctccctcacccccttcagtacaagatcattgttaggatccatactgcaagccagtcctccccaacgcaggcatatacccaggcagtcaatgatctagacaaggagctcgagaacctgaagcaagcttttgaggatgagaagaaccggtacgaggaacggatgaagcagggctactaagccagtggtgttggatgctaacgtttagactgtcttgtatctgatgcctgaactg

SEQ ID NO: 2459 - DNA, 747 bp, Avena sativa
ctcagaagttgagcatcaccaatggaaggtgggatttctctaggtgaacaacttccatatcgatgaatgaatggaactgtatgccccaagatccccggtcttctgagaaggaggtcattatcttctccatcaaacttgctggagcatgcacgtggagcgtgaagccagcaccccgccagaccatcgccttgattgactctgacctatgtccctcagggtgaacatacactttgagcttcctacagacctatgtcctcagggtgaacatacactttgatgggtgcaggcacaaggtgaagcagatgcttcagaagattgaaggttcatcaggttcgtcctggccatcttgaacaggtttgtcgggttcgtcggtctggccaacagcgtgggggagctgaagccagggcatttgcgacggaagatcccgtgtcctctaaggacgaagttcaggctcgggcagcaggccaaccggcatgagccctctggcgacgggtctcccctgggagcatggtgaggtggggagacacccctgtttgagcaccgacaatgtagctagcagaagaggatggcaaaacttgctaccactgtccacatacagaaggcattcattatctttgtacatgacattaatctgagtgagtttacaaagcgtgaagcttagctcacaggctgacactacaatatctttattgtttccaattaaagttatytatgatcacaaatataaaattttatggactaaaaaaa

SEQ ID NO: 2460 - DNA, 650 bp, Avena sativa
tccgtgttgaagcccgggctgacagcaagtttccaccaggttgggtaattgagccaccgttggaagttgttgttcctgcaaagcgcaccccgtggccagaaaccaccaccgaggtttcaccggagctgttagacggcaagcaaagagcaggaggataggcggctgtcacgaaccaaccgatcatcccggccccgaagcaccaccactaaacggaaggccgacgttcagaactgaggcaggataaacaggccgtgtaatgtacatctcacattatcttacaatccgcagtatcttcggtagggagcatatctggttgacctggtgggtattgtgtttattttttcgttgatgtttgctctggtggcaacgacaaacgcctcttgccgggacatgtcttctgtagaaggctgtttcattatcgtatgtagctctacttgttgtgctgtaatatatacaccgcaatcggcgtcaagaaaatggtgtctgcattctggaaaatctatatggatctggacttgtggagttaaggagtatcgtgtgatgatcaatgttcttcaggcacagttttcccctttcttggggcgttgtactcgactgtattaattaattggtaaatttgagaagttgtttgacttaaaaaaaaaagaaaa

SEQ ID NO: 2461 - DNA, 723 bp, Avena sativa
gccaaatcctgatgaattccagtcccttgatgcacttagtggttggtcttctcgtactaggggtgttgcgagatatctcaagactttatttgatgaagagtctggtctagggaaaaagaatgttgccattgaccatctattaagaggaaagactaggaaagaagcatcaaggatgttcttcgagaccttggtcctgtcgacaaaggactacattcaagtggagcaaccgaacccctttgactttgttaccgtcaagccaggatcgaagctcctcaagtcagatttctagatcaaagatggcctaactagcgtggcatgatacatacatcttcaagttatctatcacagcaccgccaacatacagatgttgtctccgttgacgacgtgacaccccccattttttgtttgttgttgttgttgtcattttattatcctgtctgtactgtagtgtcccccctcccgcactaatctgtgcttagcagcgtcgagtagggccgtgttgttgtattccaccaatgtatgtcatccagtgtacatatatgattagtagcctacgtaaagttttatgtcgtgtaatgtggtagcgcggctcttggaagttactgtctgttggtttatttttgacagtccttgggaactgtatacatctgaattctgatgagctgcttgtctagttactttgaagttttcctcaarttttagtactggattgttctctaaaaa

SEQ ID NO: 2462 - DNA, 678 bp, Avena sativa
ctatttgagactaaaactagaggaaagaagcccgctgctgagaaaccaaagactactgtcaggaagagggcgccagctccgagcaagggcatgaggcagaaggttctggaagaaacattcaaacctgtagacgacagcaccctcagcgctccttctcccgagaagaaggtgcggaagatcagggcctcccccttcaacaagaagagcagctcgatccttcagagagttggcagcgcttcggcaggcacagaagatgctgatgctcctccctccagcagctctgctgagccagttgcaccgagaaggacagccagggagaggaacacggcactctactacaatagtgggagcgacgatgacgactctgaggacgacgatgaagatgtgctggacgtgagcgatgagtcttactctgaagatgactagaacttgttagcacaaccgcccgaactgcttttaccgtgctgtgtgatttatgagacatttggttagctgatgtgatgtgcttatgaggtgcatctcttatgcgtcgtatgttatgtttaggcgtgacattcagcgaagctaatctatttgagactactagtgtttctggaatttggaataaccgtatctagttctgaaatgcatctacttctgacatatggtgcgttggttaagttatgaataccaaaaaaa

SEQ ID NO: 2463 - DNA, 959 bp, Avena sativa
agccaagcaccaagaagctacgcttctcgctaccatacccgctcctggctttccctgtctacctctggtacagaagccctggcaagaacggttcacactttaacccaagcagcgatctgttcagccccaaggagaggcgtgacgtgatcatttcaaccacttgctggttcacgatgatcgcgctgctcatcgccatggcgtgtgtgttcgggccggtgccggtgctcaaactgtacggggtcccatatgttgtgtttgtgatgtggcttgatttggtgacgtaccttcaccaccatggtcaccaggacctcccttggtatcgcggcgaggaatggagctacctccgtggtggcctgacgaccgtggaccgggattatgggtggatcaacaacatccaccatgatattggcactcatgtcatccaccatctcttcccccaaatacctcactaccacctagtggaagcgactaaggcagcaaggccagtactcggaagatattaccgtgagccggagaagtcaggtccactgccaactcacctcttcagcatcctcctcaggagcttaagagtcgatcacttcgtcagtgatgttggagacgttgtcttctaccaaactgacccaagcttggacagcgatagctggacgaaaaatggcaagcagaagtgatgcaagattgcaactgaaagttactactgtccctggaggaatgcttggaggaatgcctcgtagatagagatatcatagcctgctgaagaataagcagaaaaagggcttcctgctaaaatcaaagcatgcagctctgcgacaacagacaggatgtgttgattggttgattgagattcagatcattcattatagttagcattctccaactgtggttgtagctagcaatgttattttcaatctttacaagttttggatgtggaattatgtaacacattaattaaacttcttaga

SEQ ID NO: 2464 - DNA, 764 bp, Avena sativa
agatcttgattggtgaaatgctggaatccactactgaaagtgaacctcttgaggtgatgatgaaagatcagtttgccaactatgtggtgcagaaagtgttggagacttgtgatgatcagcagagggagatgatcctcacaaggatcaaggcccacctgaacacccttaagaagtacacctacgggaagcacatagttgcacgtgtagagaagcttgtcgctgctggagagaagcgccaggggcttcaaccagcatgcaccgccgcctgaagggcggactctgcagttgtacagctaacagtggctaggtttgcgctcgtccgttttccccaactgaaaaccctataaaactagtatgtggtaccgcggaataagatacaatcttggttgcactggagagagtgtacattctgtagctgaggaagcaaaagactaatctgaactgtaaaggggaagaagaggagaggagtaagaaacaacatgttactctgctcactgtacaaatttagcactagagagagagagagagagagagaaagagaggggtcgctttccatttgaaaaaaaaaaacattgaagtaccggtagtagtacaattttggtttggtcttattcgggtcgtgtcgagtttgccacagtgatgtctaggagtctgtctagtctctagctatctagctaccccattttcattctcctgtgagatttttctgccgtcgccgtcgacggcgtaccgcaaattttgtacagttcatttcattcccagaa

SEQ ID NO: 2465 - DNA, 636 bp, Avena sativa
gaaattgtcagtgaaatcgacattaccaacatgaagtacctaagagcagttataaaggagtcattccggctgcatcctgttgggcctctccttgctccgcaccttgccatgactgactgcaacatcgatggatacacagttcctgctgggacgcgtgtcgtcatcaatgtatgggccattggtagggactcggcctcctgggaagaccccgaagagttcatacctgaaagatttgaagaaggaggtaacagtgtgtgtgtgaacttcaaggggaatgatttccaattcttgccttttggggcaggacgtaggatatgccccggcttaaacctcggaatcgccaacgttgagcttatgttggcaaacctcatctaccattttgactgggaactgcctctagggtttaagagcaaagatattgatatgacagagctgtttgggctgaccgttcatcggaaggaaaaactgttgttaatcccaaaagcacgcatttagccgcaagaataaaatctaagctaagtactttgtgttattggtatattttgctaataaagtttatacgtgtgacgacagttgtcgatagtcgggtggctttggattgatctctgtattttctttataaggctatgttgatta

SEQ ID NO: 2466 - DNA, 640 bp, Avena sativa
agctaatggggatgtatttgagtacgaagattttaagagaatcaaagatgctacaggtgctgcatctgtaatggctgctaggggtgccttgtggaatgcttccattttcagtgccaaaggtaaaataccttgggaggatttcaaaagagagtacgtgagaaagactattttgtgggacaatgatgtgaagagcacaaagacaacgttaagagaaataataacacgctatactaaccttgaattcgctgaagggaaaggtgtgataaagtgcagttcatcagcagatgtagcgagactttacaatgaagaagattactacaatcttgttgtttcaaattggaaatgaataaaacagaattttgctaacgtctcatgtgacccagcttctgcttgcatccctgtctcggttccacgatattttccggaggtttttgaaccagttttggacaaattcaccgtttcaccaaacaataggaggtgtacaattacggcttttgcacttgttccggtatcggatcaggatcgactgaggacactgattccttctggctggttacagttgtgcagcgtgttcttatagaattgtgagagaaaaggctactgatttggactgagaggaatcagtgtcctcagtcgatcc

SEQ ID NO: 2467 - DNA, 706 bp, Avena sativa
aatatcatgatcgagattccagagcagtgaacactgagtttcacaaatgggcggccgtattggccttatcaggggcgataaaaaatagaatctccgtgaggaattattttttaaggtcggtttcatagaagaagagatcaagatggtcgatatcacgccaaaaggctacaagatacaaacacaacgctacacgaaaacaacacaattacaccaaccacacgacaaagactctccttgagccatctccaaccaagcatggcaaggagataacacaccgagcttctaggccacgtcacaaccgaaggaaagaatcacataagaccgatccaactcaaggaagacacaagccaacgcaccgttcgcccatagcgcccaagttggcgagcgaaacggcgggaccgagcccgactggaggaggtgtcgacgagggagaaccaacaacagcatacatagcgtcccggaagcccaagctctaggcggcagccaaggccagactccagctagcgcaccgggaactcatcaaatcacctgagcggcgcctccaacaagggaacgacatagatgctgttgggaatatgccctagaggcaatcatgtatgatgatatttcccattgtattcataaagttattaagttgtccttgtataaatatctgatgtgtatcattgaatatgtgattcggttgtggaactatgacaaaaaaaaa

SEQ ID NO: 2468 - DNA, 812 bp, Avena sativa
caactggagtacaaccagcgataggtagggtctggcactatgcatatatgctatggattttgtggtatatccgtatcactgttaacttgagcacttctattctcaaatatatatctccctggttcttaaatataaacgttggattttatttttagatttcgcactttataaaaaaaattaccttgttggaagccatcaatctacagtggctgcatttgtatgtagtttaccccctttctgaaaactacaacatttaacttccaaatttatttcgtggtacaagggtgtaagggtgagaatatgcccagatggtcacccaaaattttgctgtacattctattgctcttgtatgcataggtgcaaatgtattgtgatctaaccatgtgaatgcagcattactgagtcacgatttttttcgttgtttgaatattttgcaggtcatcatcacgatccctgtcacctgctgcctccccctcgtgacaagtctgtgagcaggagcccccgccaggagcagaagtttatccccatctcggtctcctgtgaaatctgactgaagtcaaatgcgtttaagagcttcaaaagttgtatcaggatttgtgggattaggagaaaatgatactgattatatgactgctgtgctccgagaaatagcgttgttgttccttgaaaaaagaagtttccagccttgttgtttcagatgaatttgggtgtttgctgtatgttttacttctgtacctgtcagttgccagaatgcaaagctgttgactcatggcttgtaactttatgctatggtatcatgacgttatgttata

SEQ ID NO: 2469 - DNA, 647 bp, Avena sativa
gacagactagactaaagagaaagagtagcatccagtttgcataggcactgtgacctctgggcgaagcccgcatctgatttccagagtgagagtcggtagtactacagtttagtcaataaatatatcgctcgccttccagttgtgtcgaacaaggtaattacaacatctcatggcttccaacgatcatgtgttttcttgtcatgtggaaggccgtatattctctctctgtcagcagcctctgtcgagaatctgagatactacaaccagcaccagcctagagcaattccgcacacacaaacacggaactacccgcccaaattcgtgacgggtcccttgaaccagtgcctggcactgaagatccacgacatcaacacgaggatgaagagtccaccgacggcgaccagtgtgtagttgagcgtgtccttggtcaccgggtacgtgacgggcagcgagaagagcacggtgatgatcatcacccagagcacggccacccaacccaccacgacgccgtagcgtccgaggttgaacggtcccggcacgaagtacttgcgcgccagcgtcacccggaagaagatgggcagcgcgtaggcgatgtagagcccgatcgtcgtgatcgacaccatcgcctggaaggccaccaggctgcc

SEQ ID NO: 2470 - DNA, 714 bp, Avena sativa
cgaagagcaggtgcgcgcgctggagcggatcttcgagaaggacaacaagctggaaggggagcggaaggagcgcctggcgcgcgacctcggcctgcatcctcgccaggtcgctgtctggttccagaaccgccgcgcgcgctccaagacgaagcatctcgagcgcgactacgccgctctccgccaatccttcgacgcactccgcgcccaccacgactccctccgccgcgacaaggacggcctcctcgccgagatcaagatgctgaaggcgaagctcggtgacgacgaggcggcggtgaaggaggagccggtggcgtcctgcgtcgatcccaaggccgcggcagcgcagggctcgtccgagagcgattcgagtgaagtgctgaacgaaccggagctgacgcccgacaagcaggccacggcggtggagacggagccggtggcggtagtgccaggggctgtgctccacggcgaggcgttcttccacgggcatcagcttctgaaggtggaggacgacgaggccgcgttcctcggcgacgacgacgcggcctgcgggggcttcttcgccgacgagcagccgccgtcgttgccgtggtggaccgagcccacggagcattgggcctagggaggtactctggtaccggagggctaataagaatacaacagggatgtttctgcagtttcgctgaattggaaatgagccctatcctttcttgctat

SEQ ID NO: 2471 - DNA, 1000 bp, Avena sativa
gcaagcaacctcaccaccgctcccagtcctgcattatgtcgaccgacgtggctgctaccgagaccgcggcgccctcgcctgaacctgcgcgcggaggaggaggggcgacgggcgaggcggaggtgcgacgggggaggccgatgtccctgtggaggaggaggggcgacgggcgaggcggaggtgcgaagggggaggccgctgtccccacggccattttgcaaggtttactaatggagggtgtgcattttagtgtggatgttgatctgagcaaggagcttctgtcgccaaccaagtcaatcctgcggacccagcttgaggcttcccgctgtggtcgatccactggcgctgaggttttccgatcaaatcccatgccctcacaatgtagccttgttttcttgcctctgaaattgctgcgaggtttggtgtaggcctgattggatatatggtgtatctccgcatgcttggaaccagtgtggattctctagcgggtggaactaaagcagctgccaagggcgcagctgcacagccaagattgcttattccaatggttcttgtgatgatgtataatcgatggaatgcgatattagttccagaatatggcttcatgcaccttgagttgatacccatgcttgttgggtttttcacctacaagattgctatgtttactcaagcgattcaggaatctatacctgatgttggaaaccgtgaagtttgaacactgctctggttaatacttgttgagaaattaaagagaaggctgttgccctgagggaagattggtcgccactcatcaatatagtaaggccttaggttttagaagagtctaaactggagatggcgtcaagtacataagatgcgggttgaggatactgtctgaaaatatgactgattaacaacattccactgagaaagtttactacgactgtggtacaatgggaagttggcaaacaggtgtgcgtttgaaattcatgccagagttgcacgtagatcgtgaatagtc

SEQ ID NO: 2472 - DNA, 604 bp, Avena sativa
caagcggatgctagataagtcctattctagggtagattgagagggagaggcagggcctgcaaactcaggagaagaagctcatcgctgagatcaagaaagtggccaaagaaggacagatgggagctgtaaaagttatggcgaaggaccttatccgtacaagacatcagatcacgaaattttatgccctgaagtcccagctacaaggtgtttctcttcgtattcagaccctaaaatcaacacaagcaatgggggaagccatgaagggtgtcacaaaggccatgtcacagatgaacaggcagatgaatattccggcactgcagaagataatgcgtgactttgagatgcaaaacgagaagatggagatggtcagcgaggtgatgggtgatgcccttgatgacgccttggagggcgacgaggaggaggaagaaactgaagagttagttaaccaggttcttgacgaaattggcatcgacatcaactctgagcttgtcaaggcccctgcgaccgcagtcgccaagccagccatggcaggaaaggcgcctgctcaagctgaagctgccggcggatgggcggtggaatagacgatgacctgcaggcacggctt

SEQ ID NO: 2473 - DNA, 610 bp, Avena sativa
gaagcaaggggatctaattatctggtatgttgagcagcagaatgcccaaggtgcatatgccttgacagatgaggtgaaggaagaagtgaagtgcctcaaggccatcatagaggtaaaaccttttgcagtcagcatatacatcactgggtccttccgctctttactgaaacctgtcaaacatatgcagaggctgatacagagggaagggcatcttatagtcatagacgagggaacagccacagcagaagacggtgctcctgcgcgaagaggaactgagcacaggatcctggcagtcaacccgaactatgtcatcgattaaccgtgtttggagactcaactaactccgatccattttatgcggttaaccactagagcagacgttctagtgaagactgaaccctggtgtgcgattattatctagaaatgttgtaccatcatcatctatatgccttacctgttaggaagcgcatgatctacagcagaatccagaacaatggcaattcactagcacctgtagtgtagtctgcttgtgtatttttttgctgcttcatggttatgtaaactgaagagaagagcaccttaatttctgagcttctgaattacgaaaaaa

SEQ ID NO: 2474 - DNA, 807 bp, Avena sativa
atacacttaacctttgtctgctgctactttaatgggaaagttcctcagtatggccaataaggctctgaatgtggcgtcttcatacccagctctgaaatcagtttttgatcctgccaagatagatgaactaaggcagcagattgccggagtatgtgatattatgcaagatccacagttaactgaatttctcattttgacgattcctacggtgatggccattgcggaatcatcaaggtttcatgcttctttaaagaaggatggtgcgccggcaacaaggctaattataaatcaagtattgcctccatctgcatctgaatgcagattttgtggtgtaaaacggaaggaagaaacacgggccctcaatatgataagtgcggatcctgaacttggtggtctaaagctaatccaagcaccattacaagatgttgaggtcaaaggcgtccctgctctcagattcttcggcgacgtggtctggaaatagcctgctaggatgcgtagacgtgatgagaactctggtttcttgtctgaatcttcaggacattggtatgggtgtgtggtgggctatcatagtgcaggtatgtggtgaaatctccataaaagatgaaacccagcagggtatccctgttacttaaaagacatggggagcctggagttagctactgcacttgggcgccaaaaagtcatgcgaagaaccgttccttctcctttcttggtatgtcgacatttttctgcgcataactcaccaacttgggcagagcctattgtgatcttgaccagtgatctagaatcttacagccttcgttcaat

SEQ ID NO: 2475 - DNA, 985 bp, Avena sativa
gaagaatggtatcttttggaaaagatgttgcagaagctccagcttcagatattgagcagatagaattccgtgatgctgtcaaaggcagtaatcttgcccattcaaatacatcatgccgagatgtgtggacagagtatcacgaattggggtggggtggaataaaggcagttgcagattacaaagtttacaccgccagctctatcatagatctttttcactttgttgctccaaggatgatgcagcgtggcagtgttcatttctcatatgggattgctgatgacttggatgatccaaaatacaatcactacaagtattggtcaaaccccttggagacaaaactaccaaatgcgcctgaaatggaaatattttcaatgtatggagtaggcattcccaccgaaagagcatatgtctacaagttatccccacaggcagagtgctatataccctttcagatagacgcctcagctgagggtggggatgagaatagctgcttgaaaggtggtgtttacttgtctaacggtgatgagactgttccagttcttagtgcgggctatatgtgtgccaaaggatggcgtggaaaaactcgcttcaatccgtctggcagcaagacttacgtgagagagtatagtcattctcctccctcaaccctcctcgaaggcagaggcacacagagtggtgcgcacgttgacatcatgggaaactttgctttgatggaggatattatcaggattgctgctggggcaactggtgaggaactcgatggtgatcaggtgtattctgatattttcaagtggtcagagaaaatcaagctgaaattataacatctacatgaaattagtaggaaatcatgtctcttatgaggacaggttttattctctgattgattcctataaattttgattcgatgatgtaatgattttcctctcgccttagtgtgacattgtgaactggcgctgtatattaaaagtgtatagatgcaagtcgt

SEQ ID NO: 2476 - DNA, 697 bp, Avena sativa
cttctaagaagatggatatgccatccctaaaggatgtcgatgctacaaatagaaggctcgatggtgttgatggtttcattcaaaattgtgcggtgctctgaagtaaatgatcgatggagagccattggggcatgaagaagtgagggtgtacgacttgtgcaaaccctcaagatgtaatatgaaaaatcattcagatgccattagatgcaaagctatccactatttggttccttatatggtgctggtggtcatgaagaaaacgaaatcattgggattgccctcttgttgttgctgaatctgagcacaaggtgaggcattttacaacagataggtagaagtttaactggaaaaaccaaatgccactgagcacaatattcagatatggcaaacaccccaacaggtgttcacgaagatctgtctcggtgctggaagaaccactgatgttggcgatgtattgccataaattcagagagaaattgttttttctgctgctgggaacattgatcgggtgagtgcacctacacatgcagaaactttgcactgacccggagcatcaaatcgacagaaggtccaggagttggtagagtcgttttgaaaattgagtactgaccatcccaatatgaacctagtggtgatgagcaatgagttaatacgaccttgtggttccttatttctaagggaaaatttacatatcatc

SEQ ID NO: 2477 - DNA, 990 bp, Avena sativa
aaccacctcaggttcgacatatacgacctcgagctgactggggtcgactccaactcggacctcaggaggcttcttgttggaatgaccaaccgatccattctcgtggtcgaagacatcgactgtaccatcgaactgatgcaacgggaggagcaagatgaagacaaggaaaaagccaagtccaagtccaaagagaaagacaaaaagaaggcagaagacaaggtaacattatccgggctgctcaattttgttgatggactgtggtcgacaagcggagaggaaaggatcatcatcttcaccaccaattacaaggagcgtcttgacccagcacttttgcggcctggcaggatggacatgcacatccacatgggatactgcaccccagaggctttccggatccttgtcaataactaccacgccatcgactatcatgcaacgtatccagagattgatgagctgatcaaagaggtgactgtgactcctgcagaggtcgccgaggttcttatgaggaacgatgacactgatgtcgcgctggatgatcttgttgagctcctaaactcaaagaagaaagaaaccaataatgagttcaagactgaagacaagcaggtggacgagaagaaagataccaatgagataataaagactaaaagtatgcaggtggatgaaaagaaagatggcgatgggatcaagactgaaagtgtgcaggtagagaagaaaaaagatgacaaagaggttgtcttgaagaatgattccttcacagaagacagaagcagttaggagtgcggaagctaacactgaccagagtgtgtgcaatgtagatagttcctacaggatatccattgcaaaatatgtgatcattttgggagtatccattgggaaatatgtggtcattttgactactaaataacatcacgttttttggagcagtgaggcgcaacgtcacttaccacagtgtgtttctaaataattttgcaagtgatgttgcagcaagta

SEQ ID NO: 2478 - DNA, 600 bp, Avena sativa
ctagtgtttggatatgtggggtcaagcaatgggaagaattcaccaagcctttccatgattctaagagctcacaactgccaaatatggtagtctgggacaaagatcaggagtatgaagtggttgaaggttcggagagtctgcaagaaggtgaccatggatcccaaattagtcgcttcctcgagggatatagagctggaagaacaataaagaagagagtgggcggacgttccccgacactgctcggtgtgaatccgctgtacatcctcctcttcttggttgttgttcttattgccctgatgtttttcactgggcaaggcgaagatcgacagccaacacgagcccatcaggaataaacgtgtagaagtttcctgaagcagattacacttgaataaaatttcctgaaggagaatagaaagcatgttgtagagggggtaacttggaggtgaggataagtttctgatttttcatttgaaatgccttaggaaggcatggttttgacctcccttttgtctaacctggcagttactaactccattgtctaggctattttctattttcatgtgaatttaattgaaattagcacaaaaaaaaaaaaaaaaa

SEQ ID NO: 2479 - DNA, 869 bp, Avena sativa
cgtgtatcggttaccgtctggcaacttcacccttagcagggcgttctttgcggagtctgctccaaggggaacagctacgtggccggaggagcagttgccatcgaattcagtggcgacatcgacattgcgtaaatcccagtccaagttcctgaaggcgtcttgccagaacgctgcgacccatgcctggggccaggtgatagtcagtgcgagctgggatggccacatcaggtcattccagaactatgggttgccagtgcaggtttgacatggtacaagacgggcatcttacctccattgcctccatcagtggacgtcctagaaacggcacctcaccagttcatggtagcagattgggtttgatgcctagagaagccgccggggttgcctcgagctgacgctcctcctccagcaacattattacagtacaaagcgtcacatggttggttcttgtgctaacatgcttgtggaccataagttgtatgtagtctctcggcggtcctccaagatcttgccagcgtcgacacagttgtagctggcctggggaaagaaaagaagacggatcgcctcgcggaattatgcaatccatgtggggtctgtgcaccaacacttgggtgttgtttcttttctgtgtctagactccttgtaggagccctccgtaaatatatagagaggatgaacatatgtttttgccaagctgaactcccgttgcccctggggggcaagcggggaggtagaatttgctgttggataggagaattcagccttgggggtgcacatattcgattcatttgatttgtttctacgtacatctgagcacccgtttcagagcctggtgctgttgagtaaatgtttgaactgtgacaaaaaaa

SEQ ID NO: 2480 - DNA, 888 bp, Avena sativa
aagatcaagtcatataacccccgtacaggaatggaatccctgcttatcaatccaatctcaaaggcatcagcaaaccagagggcaggaaggtctggacggacagggccaggaaaatgtttccgtctgtacacaagttataactacatgcatgatcttgaggataacactgttccggagattcaaagaaccaaccttgcgaatgtcgtgcttacactcaagagtcttggtattcatgacttggttaattttgattttatggacccacctccttcagaggccttgctgaaggccctggaacaactttttgctctcagtgcactaaacagccgtggagagttgaccaagactggaagacgaatggcagagtttccattagatcctatgctgtcaaagatgatagtagctgccgagaaatataagtgttctgatgaggtcatctccattgcatctatgttgtcgattggcaactctatattctatcgtccaaaggacaaacaagttcatgcagataatgcaaggttgaacttccatactggcaatgttggggaccatatagctttactcaatgtctataactcatggaaagaaacagatttctcaactcaatggtgctatgaaaattatatccaggtccgtagcatgaagagagcaagagatattcgagatcaactggagggacttctggagagagttgagattgagatttgttcaaatgccagtgacttggatgctattaaaaaggctataacatcaggtttcttccaccattctgcacggttgcagaagaatggttcatatagaactgttaagaaccctcagaccgtctttgtccatcctagttcaggattagcacagctacttcctcggtgggtaatatatcacgaactg

SEQ ID NO: 2481 - DNA, 712 bp, Avena sativa
cgggatctgagagttgtgcaggatgctttacgtcgattgccaatgttttctcgatgattgggacggttggacctcccgtgacagcaatcgaagcgcggttggagtctgttcctgaaatgggctatgatgcactctccaatgcaccgcgaggcgagatttgcttgaggggacacaccatgttctccgggtactacaagcgccctgacctcactgaggaagtgttctcagatggttggttccatacaggcgatatcggagagtggcaaccagatggcacaatgaagatcatcgacagaaagaagaacatcttcaagttgtcccaaggggagtatgtagcagtggaggtcgtggaaagcacatacgtccagtctccactcgttgcatcagtttgggtctatgggaatagctttgagtccttcctggttgctgtggttgtccctgagaccaaggctattgaggactgggctgctcttaacggcaagcctggtgactttaccgaggtgtgcaatgacccgaaggcgaagagatacatccaggatgagctgaacaaaaccggaaagaagctcgggttaagaggatttgagatgctgaaggcaattcacctggagccagtgccattcagcatagacaaggacctgatcactccaacctttaagctcaagaggccccagctgcttaaatattacaaggatcgggtcgatcagttgtacaa

SEQ ID NO: 2482 - DNA, 767 bp, Avena sativa
gctgcgacattccggtggctgtcgtcttcaaattctgaccaattcatgatcgcctccaggccctaaccgaccagattaccgatcacactgcagtcaccagctcctgcaccgcccagatggacctgggtaaaaagccaggagaggctagtgacagctccaagtttgctaaaactgagccttctaagaatgccgctttgactcaaaacatggagcgttccagtatgtcaacctctggagaattcattagcgaagaaagaaaggattgcacgatcagtacaatggaccttcccaagataccatcattcggggagttcatgagccaaaaaagagcagagagccgtcctcacggcactcttagaaaggctggccctgtaatcagtaaggaaggaacgacaggaacgtccaagaagatgaaatcatgagtgatgacttctctatttacacgtgactttcctatttacatgagaattcatgagccaaaaaaggaaggaatcacgcaacaagttcaagagcagagaagcacttcgtggcatttctagcgattctagccctatgatcagcaagttaggaatcacagcatccaataagatgaaatcatgagtgaatgtgactagcaattgtctaatcaagcactgcacttttgcttcttagtgaatcatttcatttcttaaaaggagaacatgacaatattttgtatatcaaaattacttgtcacaggttcactgaacgtagaaaaatttaggcaacattttgcctaagactgacaa

SEQ ID NO: 2483 - DNA, 666 bp, Avena sativa
  modified_base (583)..(583): a, c, t, g, unknown or other
taggacatcttcaaatctgaatatagtttataggttctgttgaaagctctaaatggttattaacctcagcagttctgaacagtttcttttagacttcgatctcaccatcgaaaagtcagtggaattatgggacgaggtggatacaataaatatgatcctatatctattatggatgccacaactggctctcgcaggccatcatagttacaggtcaaccaaatagtcaatctagagggcgcaaaggtactcttgagtcctgtcactttcactgccacctcatgaagttcattctcgcgtgtgtaatcctgatccagttccatgcaccaagaacagaggcctcttgctgcttatcgagattgtcgtcgtcgtcatctggtatggagggcttcctcctctatatgaagctctcatctgaatttatcccttagatttgggagccccccgacttcatctaccgtgtttgcagctgaatatattcctgtcctttcttgatatttgcttgatagtagttcaacgtgaagatatccatgtgcttttttgatttttgcctcagagacttcagctccgactaaaaaaaaaaacntttcctctgttgttttatcttgaaggacctggtctattatgtttttgtttggtatatggtcagtaatgattgattgcataata

SEQ ID NO: 2484 - DNA, 764 bp, Avena sativa
ggtggcatgaagagacgccttagtgtcgcaatctcactgattggagatgctaaagtagtgtacatggatgagcccagtactggattggatccagcatcgaggaagagtctctggagtgcagtgaagcaagcaaagcaagatagagcaatcattcttacgacccattcaatggaagaagctgaagctctctgcgatcggttgtgtattatggtcgatggaaggctccagtgtataggaaggcctcaagagctcagagctagatatggaggctattatgtactgacgatgacgacatcctcggagttcgaacacgaggttgagaatttggtgctgaagctctcgccaaatgcaaggaaagtatatcatttgtcaggaacgcagaaatatgagctgtcgaagcaagaagttaggattgcagacgtcttcatggccatggagaatttcaagaagagagtggaagtgcaagcatggggcctcgcggacaccaccatggaagatgttttcgtcaaagtcgctacaggggcgcaatcgagcgaccaactctcttagactggcgcaacgtcctgctttgtgatatttacctgtacactatgtagaaattatttttgttgaacatttcaccggatctgggagagctcctgagtacaatccgatccgaggctcgcacctgggctgatgtcgggcaaagggactgcgtgccctgttacccgccgtctgtaccgtgtcgagtgggttgtgttgtgcagggtgttcgcttgtttccg

SEQ ID NO: 2485 - DNA, 691 bp, Avena sativa
atataagtgatacgttggaaacgtatctataatttttgatgctccatgcttgtttagtatctactgtgccttgatttgtctacactttgaggtatttttatatattttctggtactaacctattaacaagatgccacagtgccagttgcctattttcttctgtttttggtgtcagaaaggcagaaaatcaatattctcggaattggacggtacaaaagccaaagttattattttcccggagcaacacggaaccacgaagcagagccggaggggggccacatggtggccaaacccccctaggcgtggccaagccctggaggcgcctggacccccaccgaccttgattcatgcgcctataagaagcctccgacccaaaaaccctagcgaatctaaaagaaatccacgaaaacctccgtagcaccgccgccaccgaaggggagattcgggggacagaaagtctctgttccggcaccctgccaggacggagaagtgcccctggagccatctccatcgatctccatcgccatattcatcaccgttgctgattaccatgatgaggagggagtagttcttccttagggctaagggctctaccggtagctatgtgttcatctctctctatgcatgatattgttgtggtcatgagctttgtaatcaagtagatctaccttgctactcaagtgcttcagta

SEQ ID NO: 2486 - DNA, 889 bp, Avena sativa
gacaagtattgctgcttcagagatttacttctgccctgtcacatgcatccgtacgtccaaacaaaccacattagaacacaacaaatttaattcatcgcaaattatataagttggcctagacaacaaatgatcacattaattaagagagcaaatatgtgatgaagaagaaaaaacacgccttagatgatgttctgtgcctaggatcgatcaacgccatctatctcctcccatggaaggcaatttaccaccaattaatacaacagatcaaaaactagtttcgatgagttgaccaagagaataaggagtagcttcacaatttacaaatgcttcctttcttccgcttcgatggcctttatcttgcggtaacccttatccgtgccaaacaaccagtccatgtaaacaaaagtagaggcgtagttccctgacttggtgtaaagcaaacggtgatggtagtcatggaagtcggagcctccatacagtggcaggaaattcgatgggctccatgggaagtgatacccactgtgagcttcaaccgtctctaacaccctcaacgccatccacagccatagggtgaacaggtgagggccagtcagggcaggaccaacaatcgtggcgaatccgagaaacaaaatttcagctgggtgcgcatactccgaagttaagccaaatggtgtagcatattcgtggtgcacactgtggacatgcttgtacagccatttggtatggagagccctatgtccccagtagaatatgaaatcctcgagtacaaaatagaaaataatttgagatacaacgaccgtccagtgtggcagaggaagagagctcctcagccccatgaacttaaaggcggggtaggagagaatcatgactggcaagttcacgcagacat

SEQ ID NO: 2487 - DNA, 964 bp, Avena sativa
gctctacacaatttcatctccgatttcgagaccaagattaatctgctcaagctcgcccagttcgctgtgatagcctcgcgccagtatcctgacaaggaagctgctatcaccttccttgaggggggtaatcaccaagctccgtgagaccagggaactgcggatcaatgaacccatccttcacgtcaagatgcagattgctgcaattcacctcgacaaagggaaccaaaaggagtgcaagaacttactggaggaagggaagaccaccctagatggtatgactgatgtggatcccactgtccacgccagcctctactggatatcgtctcagtaccataagtcgctccaagagtttgctgagttctacaagaacgcacttctctatctggcgtacacaacagtggggtctctctctgaggcctttaagctggacttggcgttcgatctttctctggcagcgttgctgggggacaacatctacaactttggggagttgttagctcaccctattatcaatagtcttactgggaccaaggtggagtgggtctatcacatgttgcaagcattcaacaccggcaacctagctctctaccaagagctttgcagagttcacaatgctgcgcttactgcgcagcctgcattggtgcagaatgaacagaaactgcttgagaagatcaatattctgtgtctgatggagataatctttagccggccatcggaagacagaactatcccgttaactgttattgctgagcagactaagctttctacgagtgaagtggaatgtcttcttatgaagagcctctcggttcatcttatagaaggaattatcgatgaagtcgagagtaccgttcatgtctcatgggtccagcccagggtacttggaatcccacaggtgaaggcgctgcgtgagcgtctcgactcatggatcgacaaagtgcacaccacgctgttgtcagttgaggca

SEQ ID NO: 2488 - DNA, 684 bp, Avena sativa
ccgtggtggcatcggtgcagagagttgccatggcaatagccccttcacgtgtcggtggacagattgagatgaagaaccctcctgggtctcctgaggctcatacacttgcaaggtggattggcaggagctacaggtttcacactggagcggaactcctttgcccagagtcccaaagcccagacgcttccttgaaagcgctgtggcagcactcagactcaatcatgtgctgttccctgaaggctgctcctgtgttcaccttcgccaaccaagccggcctcgacatgctggagacgaccctgattgctctccaggacatttcgcttgagaagatcctcgatgacgatggccgcaaggcgctgtgctccgagttccccaagatcatgcaacagggtttcgcatacctcccgggcggtgtgtgcgtgtcgagcatggggcggcccgtgtcctacgagcaggcggtggcgtggaaggtcctgggcgacgacgacaccccgcactgcctcgccttcatgttcgtcaactggtcctttgtgtaatactagcagtagcagttggttgcccggtcaacctcgtactcagcaagctgtcaagaaccctgtgtttgccaagaaccctgtttcagtttgaacacactgcaagtactcctacttttgttgctcgctgtatcaatggatggattattgc

SEQ ID NO: 2489 - DNA, 457 bp, Avena sativa
ggctgtatgaaatctggagaggtcttttctgaagcgacccataagtggtatgaaccagactggtggaaatttggtgatgggaagtcgtactttcgacatgcttctggagaaatgtttgtcatatcaagggccgtagctcagttcatttctataaacaggtctgttctccggacatatgcgcatgatgatgttagtgtaggatcatggatgattgggctagctgtaaaacatgtaaatgaagcaaagttatgctgttcatcatggccctcaggagcaatgtgttcagctctttgataagaaatgctttccagaggaagagttttgtgaacagcgtgttaggctcaagattacactggaaggatacatccaaactacagagaatgagatcaaatcggcactgtatagattttgttactttgctattctttccatgacattcttgagtaagcagtgttcg

SEQ ID NO: 2490 - DNA, 761 bp, Avena sativa
tgacgttaaccacatcgaacttacagaatacaaaacaaagcttacagaatgccaccgcaagctgcagacgacgtcatcctgggtaaccttgtttcaagaacgggcggaaactcttcaaaaacagctagatgctgcacatgaggagaacaagaagctcgttgatgcagcaaaggcattgcctttttataatacgtcgctgcaatcgccgttttagacattgtgctaccagaacactatactcagttattttcttcttgtaggtatctgttgttaaaaaagaggagttgtcgccacaatcagctgaccttaagacagctgtgttacctcttccgacggttggcgttaaacaagaaatggcatctccaacgcctgctgacaacgaaactggtggcagcctgtcacggcgtgggaaaaagcgcgccttccacgagtctaacgccaggagagcgctctttaaggaatgatctttagacacaggataacaaagaaggcatctaaagcgtggatcacaccaaaccatatgcatgttcacttgccctttgatggacctgcctctgattccaagaccttttcttctactttgatattactactgtattacctacggcgtcagacttttgtaatgcatcgacttaactaatattccaaaaccaacctgctacacaacgaattgatcttttcaaaagagcagtgtatgtgttgcagagactattctggatgtaacaggatcaatgttatcgttgcactgacatgctaaatcc

SEQ ID NO: 2491 - DNA, 719 bp, Avena sativa
cgaagcagtgacataatccataagttggaagacacacgggacggtgcgggtggtatgaagggcaatggggcaacaaaagaaaagcaagacgtctcggtacgccggcgacagaaggtggaagccgaaacaccagacgacctgatctcagactcgatcaagataatcaagagttttctgccgaggccgatttccagcacacgtcttctaaatacggacaagagcagcagcccggatcccatcacgaagagcagaagctcgtttctcgaagggtttaaatccgccgtgcgcaagtcaccgagcgcaccgagcttcgcagagacggagaacaacagcggggtctccatgtggccgagctccaagtgggccttcaaccacgagtccttcacccgaccgctgctcgacggcctgccgaaacccgcaccagttcgcagggaaaaagcggctctggactgaatttggtctccacaggtaggtagctctgtttgctatgatgatctgcctgccgttccaagtaacacctgccatgatgccatctatgtcagctgaattagacggggaaacagaagagatgagactttggttggacatgatcacgtacgtatgcagttgtgtacttctcccctgctttttctcatgtcaaatctgctgcgaattcattgttcatctggtataattgtacatgacattataaatactagtaaaatgcatgtttgttcaca

SEQ ID NO: 2492 - DNA, 681 bp, Avena sativa
cagatgtcatccatggtgacaagcaagctgctggaccgctaccatggattcgacggcatctcggtgctcgtcgacattggtggcaggaccggttccaccctgcagatgatcacctcccgacaccagcatatcagtggcatcaacttcgacctgcctcacgtcatctccgaggcgccaccagttcctggagtacaacatatagctggaaatatgtacgaagacatacccattggagatgcgtatttctttaagatggtgctccatcttcaaggtgacgatgactgcatcaaggtactccggagttggccaccgagctctcccggagaagggaagagtgattgttgtggagtttgtcttgccggaaactccagaggtgactacagcggcacaaaatatgttcgttatggacgttttcatgttcaataacttccgtggagggaaggagagaactgagaaggaattcctgaagctggctagggatgcaggattcatcggtggcttccagtcaacatacatctttgggagcttttgggctctcgagtttatgaagtagtagaagtgcctacacgtcaataccactggtcatgtatgtccaataaaaaatgtccacgaatgcgcatgagttgaacaacatgtatgatctaggatcaaaattataaatagcaggawtggagcgaccaa

SEQ ID NO: 2493 - DNA, 874 bp, Avena sativa
tgccataacacttgtctaatataaaatatttagtaacctccattaatattatgattttttgtaaccaaatattataatgcacaattggttatacttaccaaatgatgatttggtatcactgcttttttgtctgcttgcatttcaagtaattccatgtctttattgaaataaaaatgtatttctatatggatttcactaaaatatggtgatctgaactcattccagttatactgctgactagatgcgggatttgtactactggtttcttggatctctgattctgaaatgagtttattaagcataccgaccataactttaaggtgttgtgtgtgatttggaatagtataatcatctgcggaattaagttgtatctatccgtgaaaacgttcttcacacatgaactatcactactttgtgttagacctcatatattgtttttgaatgtaggaacaaggtagtggtgccggagcagtgggaatacggcgacttcacaccgagcatcggagcagttggaagactatgtcgccgtcctctcgatgcccatggagaagcggaccaactgaagtagcgggaagactgtctcctgccacgccacgacatgatgccacagctctggtcggtaataatcatggcatctgatctgctagtgttgggaacccggggagaaggagaaggcaaggagaagctcgcgacgataaccgagcctggagatgctcaacctaacccagatgagagctgcggcgaccgcaagttggtgtgagattgtggacgcggtcctaggcgaagctgttcctgggcagagcggggaaggaaggcagcgtgctgggcgaggctgctccttggcagtgacggggagaagaagggatttctgatt

SEQ ID NO: 2494 - DNA, 835 bp, Avena sativa
ctggagatgtattcacgatggacttaagtgaagatgtgccatcctggcgatgcatcacaggcagtggaatgccaggagcttgtaacccagctggagttcggcccacccctcgccttgatcatgttgctgtgagccttcctggagggagaattatgatatttggtggctcagtagcaggtcttcactctgcttcacagctttacctcctggatccaacggaagagaaacctacctggagaatattgaatgttccagggcgccctccgaggtttgcctggggccacagtacctgtgttatggaaggatcaaaagcaatagtccttggaggacaaactggggaagagtggacgctaactgaaatacatgagctttctctagcaagctcactagtttgagatctggaagtctacatacaggtttctcaatgccatgcaaatggaattggcaagcaaactgggtactctcttctcttggcaggttagttgtgtatgcttgaaaggagaggacgactagtctcgagtagatcatacttggttactcccgcaatgtctcaggagtcacctcatgtagtctatgaagtaggaatatgttccctctgctgttgctgtttgtttcctctaccacaggataagaaattatcatctgtaacccttgatatgtgttgttctcatcagatgtttccagcactctgataaggaaaccgaagagactggtgttgtatagttggaacctcttgtgctgcactgttcaccgcacacttctgtggctgggcccttgacaccggtgagacggctatcttgaatgttgtaatcgccgaagattggttatagttaaa

SEQ ID NO: 2495 - DNA, 832 bp, Avena sativa
cagattatccgagtagctctccggctcttataaatcataaaggagatgaggtgctaaggaagaattccagtgccatctcggcctcagtggatgtggcgtttcgcaacgcccttggtgatatcccggaaccccggtcaatcaaggagacagccagggcgtgggatgcatgtgtgcggaaggccgtgacaaagtttgcgcaccggcacggtggagggacggtcagctcggtgcttggccggtgggagagatgcatcgccacatgagaaatggatcatatataggatgcaatgtgtgtggcttgtttgctatagaacagagcagacagtaagacggacgtggagggtttggaggacgtggagtaccttactacacaggacgatattgacaagttcatgaaacaactcacaactctcatagtaaaatcttcactgaatctagctccatgagaagaagaagaagaatatgatgaaaagaagagatgtacaagccttgtctggttgctgtttgctgatggtgaaatgggcttctgatgttggtttttagatgttcctgttgttgtgtcagtgcttaaaaactgtgtgtggagattcttttggttggttgttctgccaaaatttacctaaaaaattctactcgagggcaagtagtggtagtaggtttttgctccgtagtgtgttctcgacgccaagttcgcacagcggattctctattagtggctgttgttcaaatattataagtactcgtagaacatatcatgatttccctgtttgcaatatctagcagccaacaatcatatatttgagatatcaaatttgatttttctggtgacaaa

SEQ ID NO: 2496 - DNA, 693 bp, Avena sativa
gcatcatctcctggttaccagccaccgatacctgctgatcaggtcagggcaccagcgtgacttcgatcaggatgcagaggacttaccaagtgggcgcggaaggggacgtggccgccggggaaggggcagaggctttagcaatggaggggcagactatgataatgagaatggagactttgaggggccacggggatatcgtggcagagggagaggaaggggtaggcgtggatcctttgggcctggaaggggttatggtggcgatggctacctaaatgaagaagctggtggttatcatggtggggagtataacgcacctcctgcgcaaggatatgagggtgataggggaaggggccgaggtcgaggcagaggacgtggtcgtggacgtggccgtggacctccccctcaaggagctccacaagagtagattgggctatcaactatggaatgcgacaagtctcatctttgctagattaatgttatcttctgttgtaactttatatctgcttaggtttatgtttaaagttgacagtgactccagtgtgggggatgaggctagttatgattttgtagctaggttattcttccatttgcttctatatcagacctggtatcgttccaactgtgcattgtagcatcctaaatgtgtttatcatcaaatcttagcccagaaagttctattttatagaaaaaaaa

SEQ ID NO: 2497 - DNA, 866 bp, Avena sativa
gttgctaacagctgggcaatatacgaaggcgttggtccagcggcaaaggtagttgcccacgcacaaggcctgcatatgcgtgttggcagctggtttaactccttcgccattttgtttgagagtggaaggttcaagggatccaccctccaggtaatgggatcaaccgtcgatgatgcgggtgaatgggcaatcgtcggcgggacgggtgcctttgcaattgcatgtggcaccatcaacagaaaagtgcattcgaaaataccaaatggagaaatacaagagcttaccatcggtggatactgcaaaatgcagcttcctgtcccagtaaagtttggaccatggggtggaagtgcgggtcccgaccttccatacgaaccacggatgattgaaagcataacaattgcaagtggcgacgttattgattcattttcatttacatacattgaccgagctggccagaggcgcactgggggtcgttggggtaatggtcctggaacagttaacccgacgatccagttgggcccttccgagcttgtgatacaaatgtcaggaacgattgctatatggaaaggggagaggactatagcatcacttacttttatcacaacgaacaaaacatatggacctttcgggagcgcaattggcactccattttctgtctcggtgcctcaagaccaaagcatcgtgggtttcttcgggaaatctggcaagtattacctcgaatcacttggtgtttaccatgtgtgaattgtggcattgagatgtatcttatccaacacatttcccttatttttgttgttccactaataacatgggtaggttgcaccctatgccattatgtcgttttctatttccacttgatttccaag

SEQ ID NO: 2498 - DNA, 845 bp, Avena sativa
gtctccaagttgctgtggaagcagcaaaggcattgcaatatcttcatgatggctgtcaaccaccgcttgtacatcagaattttgaaccatcaattattctccttaatagcacattgtcagttcaaatttccgagtgtggccttgcttcgctgtctcagttgtctggcagtttgcgcgccttgttccattatgaagcccctgaagtgcatgaatccagaacattcagtgatcgaagtgatgtttacagttttggtgttgttatgttggaacttcttacaggacgtaaaccttatgacagttcccgtccacgcgctgagcaacacctggtgcgatgggccagtactcagctttatggtattgataccatatcaaagatggtagatccttgtattcgaggacaatgttctgaaaaggccctgtcacgttttgctgatgttattagccgctgtattcagcatgagccagaattcaggccaccaatttctgaaatcgtccaagacctaattcgtatggtcggtgacgcatcaaaggcttccatgtaaggggtttcctaaaacgaggaagaacgtggaaagcctatcttggaaaattcaagaaggcgcctcatcggagtgccatgagactggatttagggcttagagtcatatatgcttgtttgcaaacatggccttgttcggtgacagcagtagtaggatgaaggaaggatggttcaaccggtgaacttatgggatggatgtgcagatgtatgcacttcaatttttctctagaagctgtttgtccttggtaggtccttcgtatctgtgtgattgatttatacttgcgaaaattgcacctatatcagtgca

SEQ ID NO: 2499 - DNA, 964 bp, Avena sativa
ggcacgagattgctggagttgtaaccgaggttggttcagacgtcaagggcttcaaagcggggaccatgtggctgttgggacgtatgtgaattcatgccgtgactgcgacaactgcaatagcttcctcgagaaccactgctcgaaatttgttttcactttcaatggtgttgatacggatggtactgtcacaaagggaggatattccactcacactgtagtccatcaacggtactgctacaaaatacctgatggttacccactggaaaaggcagcacctttagtttgtgctggaatcactgtgtacactccaatgatgcggcataacatgaaccaaccgggaaagtcacttggtgtcattggtcttggtgggttgggtcacatggcagtaaaatttggaaaagcctttggactgaaggtgacagtttttagtaccagtgaatccaagagagatgaagctatcagtcttcttggtgcagataattttgttttatcgtcaaatgaaaaacagatggggtccctgaaaaattccctgcacttcattgtggatactgcctctggtgaccacccattcgacccttatctcgcgcttctgaaagttggtggcgtaatggcgctactcggctttccaggagaaatcagagtgcatcctgcaacacttaacctgggtgcacggagtttatctggcagcgtaactggaggcacgaaggacacccaggagatgatgaacttctgtgcggcaaacaaaatctaccctgatattgagttgataaagatagactacatcaacgaggctctcgagaggcttgttaaccgggatgtcaggtaccggtttgtaatcgacatcgagagctctttcaagtgatatcttcgcagttggcattattttgcccgttagcatattccaactttattggtttgttagtagttagcgaaaattattatggatcggagggagtatcaatat

SEQ ID NO: 2500 - DNA, 739 bp, Avena sativa
cgctgtcactgcactccttaattctctccatccatgagaacaataaggcaagcattgtggactctgacgctatccctaagatcgtggaagtgttgaaaactgggagtatggaagccagagagaacgcagcagccacactatttagcctgtcagttgtggacgagaacaaagtaactattggggttgctggcgcgatacctccactcatcagtcttctgtgtgatgggagcccaagaggcaagaaagatgcagcaacggcgatttttaacctgtgcatataccagggcaataaggtccgggccgtgaaagctggaatcattgtccatctgatgaacttcttggtggatcctaccgggggaatgattgatgaggcactcactcttttggcaattcttgccggtaacccagaaggcaaggctgtaatcacggaatcagagccaatgcccccactcgtggaggtcatcagaactgggtctcctcgcaatagagagaacgcttcagccattctatggtctctatgttctgctgatgctgagcaaatcaaagctgcaaaagcagctggaggggaagatgcactcaaggagctgtcagaaaccggcacagatcgtgcaaaaaaggaagcttctagcatcctggaactcatgcgccaaaaggaagaggcgtgaacggacagcatatatttgttgaaatctgaggttgtggcctagctatagccaattgtacacgtaaatactaaatt

SEQ ID NO: 2501 - DNA, 711 bp, Avena sativa
gtatacgtcccaaaattgagatggacacagtaactgagctgtcagcattctgcgagaaggctagcatgggttgcttggttgctccgacgctgtcgataggctcggtactccttcaacaagctgcaatccaggcctcattccactacaacaacgtcgagattgtggaatcaagacctaacccgtcggacctgccatcgcaagacgcaatacagattgcaaataacatatctgatcttggtcaaatatacaacagggaagatatggactctgataatccagcaagaggtcaggtacttggagaagatggagtgcgtgtgcacagcatggtcctgccagggcttgcttcaagcacatcggtcattttgtcaggccccggagagatttacaccttgaagcacgatgtaacagatgttcggtgcctaatgccaggactaattctggcaatacggaaagtgatacgcttgaagaacttgatttatggtctggagaagttcttgtaggaaatggtcgacttgcagatcaaggcaactacagttttgaccttccagctgttcatgataagaaataaatgggataaaatcaaagctcttgggacataatcagaagcagcgccactggaaaggcaggttcgagaaccctatgaaggtgatgcagagtttcgagaagaatggatccacaaacagatggcacttctgatatcactgaagacaa

SEQ ID NO: 2502 - DNA, 810 bp, Avena sativa
gcacccctcgtatgaagacagactgggaagaatcgatcatccagcctccatggcatggttcaaacagcccgtgtgttgtaaactccaccccgccgagccctgggcgtcagatggttcctgaccctgcatggcttgctggcatccagatctcttcaacaagcccttcatcacccacattcagtctcatgtcctccaacccattcagggtattcaaagaagcgatcccggccggcaactcgtcgcggatgtgcacgccggggcagagcggcacgtgctcccctgtgatccccggcatgatggcgcggcacccggacgtccacatgatggacgtggtctccgacgagttcgcgttcggaagcagcaccaacagcggcggcgctcagcaggcccctggcctggtgcgggcgtgggagggcgagaggatccacgaggactccggctccgacgacctcgagctcaccctgggaagctccaggaagaggagctgctgatgctaacagacacctaactcgggcgggattattcttgttgttgtagttcaattttcttcttcgtgttggttagttttctgaaagagagaccggatcgtgtggttccttcagatagcttcgcttcgcctgctgtggtgatgataatcgtgttatttatttgtgcggattttacgagagctagacggggagatgggctcgtgttcggcaggaattcagctgatgtatgtgtagcctccacagctgatgctgggctcgctgtgctgttgttgttgtgtcaagtgtaaattgatgtgggaaatcgtgcagattacgaagctaa

SEQ ID NO: 2503 - DNA, 680 bp, Avena sativa
ctttgtgcttaagtggcccgtggcccatcaatagaaattattcctcaggattaacactccgaccagattgatcatgaaagcaaatctaatctgccttcatcaagctttggtctgttggcattggttaccagtttcatggaccttctgtatgtaaaatattccagattggtacgttgtaaacaatggtcagtgtgttggatttacaataagaaaaatctatcagtttttctctatgttcctagtgcctttttcttttgatcttcacattttgtttgcaagaaacaaaaggggcgaagggggaggatgcctttagcttttctccaggaaatcatggacagtaatacaacttgaaagcttaagctgtggctgcttcaagataggaagcttgatgactgtcagcttgttgtacctaagtgcctaaattttgtggaaggccttcaagtgtgttcacctgttacttcagtgaaccatattggtcactggtcaacatggagcgcaattcttgatcgggatgacaggagcaagcgaagccccaaactggagggcaatgtaggtcactcatagtgtaccgtctagtctgatgttcccattgaaacaacacaattctcttccaggatgtgtgatgacatgtaatgtaaatataagttgattaatatagcatcgaccttgaaacaaaaaaa

SEQ ID NO: 2504 - DNA, 456 bp, Avena sativa
gtaaataatgagtgaatacctcttcgaggagcccatagactacctgcaatgtttcactcagtgctcataggacacatattgcttcagttggacactatgtatatatgtatcattgtttcagatgtttgtttagcactttccacttgaatgaccggatataactgtatgtcttgctcaatctgcttgtcataggatgctactagctgggataaggtgagcacatgaaccattgtctttaactgaaacacatgttcgtgatggttgccgccaagtgcaagctctcttggggtattgtgtcgatctgaagacgaagatggcatgttatttacccaggtgatctcagccttagttcatagctctcttctgtgtgttggcttgagaggtcaatggttgagttgcctggccatggggtgtatattgctgcacatgatcctcagtgcactttagagccttcca

SEQ ID NO: 2505 - DNA, 960 bp, Avena sativa
cgtctattttattgcttcagaagctcttgaactcgttgagaatctgggaaacatcaatgacttctctgggaaaacgagattattcctggtgttaccggttgccatacttgatgctaccttcatcatctggatattttcaatccctctctagaactttagagaaactgcagctgcggagaagcatggcgaagcttgaattgtatcggaagttcacaaattatctagctatgtcggtgcttatctcaattgcttggatcggctatgagctatatttcaatgcaaccgatccattaagtgagctttggcaaagggcttgggtcatcccttccttctggaatgtcctctcatatgtcctccttgccatcatatgtgcactttggtcgccatctcgtaatccaacaggattcgcatattcagaggatacaggtgatgaggctgatgaggaaggactttctcttgtgggcagtgctgttaaaggaacaggagatatggtgaacatgcatgtgtttcctgaggataaacgtgcatgagaagttattgacttagtgcagctgtactcctggtggaatgctatgtgaagtactgtactgttttcctctggattcgtggcaagttgacatctgctaaagcttgcgcacggttcctgatgtacaggtggtgactttgtgttgaaggatttgacttccacagaattttgcccgtaccagtgatgactacccatacaaagaagtcggcgaataaagtacggttttgagagtttagagttgcttattggttgttgcagttcttgcggtggcgtgtagaccggtagaagcctaccctgttaaacgcttgattgcatcatccccactctgcatggatccggatgatgccgaggcagtcgcttatgtatttatcatatgtatgacttaaaaggtagtttttgccgaattagtcactgtataaccatgtacactaaaa

SEQ ID NO: 2506 - DNA, 672 bp, Avena sativa
cagttccaatttagacttgtgttcggagatatgcacacacttcaaactgtattgttactgtcttctatcaaattggagatacagaattctttattctctatatcttaaatctttaaacaatagagataaaatgatggtatttaagcttcattcgtaatgcaattacttgaaatatacttttttattttgttttcacatcctggaatgtagcatctctgaatagcatatacaaaatcatgtatgcttactgcatatacaaaattcatgtgtacatgaccgaagagttgagttaaatgaatgttgattttatggcaggtcagctggttccaggtagcgtgatgctgatggactgtctcgaggtcgagggaaagaaggcatgtccttcatatgaggtcacacaaattactgtcgatgttcacttccaaacattattggcttaacaaagagcgagaaggtgaagatgccatatagcgcagtttgctgcaccatatttctgttcatttctatctcaaccaatcattgtagtagctagcggttcctaagtatcccagcaacttccgacagtcaaggtaactttgtaatgagagtttgagtatcatcagttcatcacttcccaaaaattcaggctacgcacctagattatggaccatagctacttctgatagtctgagt

SEQ ID NO: 2507 - DNA, 676 bp, Avena sativa
  modified_base (625)..(625): a, c, t, g, unknown or other
gctttgtaggaaactgcaagcaaataccatcactaccatcggaactatatgtatccattcatttgtttccctgcatatttaactctgtattatgcatatatatcactgcggagtatgatgccgcggttcccgaggcagagcgcgagcagctcaagggcggcgccttcgagggcgtgcttggggcagcacaggaggcgatcgttatctccccctgggttgccattgtcgtccggccaaagccaggcgtgtgggagtatctgagggtcgacgtgagcaagctcgccgtagaggagttgagcgtctcagagtacttgcagttcaaggaacaacttgtggaaggaagtaccatggttggtagcaacaaaccctgtgaattacggccacccatgtcagctttcatgtgtggaagctttatcggccgccctcataatatggaactcatagcaattttcgatcccgtgcacctcgaggctggagcaccttgagtctggttcacacgcggacggacccgaaggtgctggtgcgcgcggacggatcagtgaggatggcgtcaattaaaaccggccagagggagtagtttttctcagatgatgtttctgtaaattgtgattgtagatgaccccanacttgtacacttattcggttctaagtgatgtgattgatgaacacttgtgaa

SEQ ID NO: 2508 - DNA, 378 bp, Avena sativa
  modified_base (371)..(371): a, c, t, g, unknown or other
ccgggatgcctcctcgcccaacaagatcgagttcactaactagcacctctcgagttgtagcaatggctccgtcgtccaagaagctcgttttcctgctctttgccatgagcctgatgatcgccgccgtgaacggctgcgctccgcacttcccgacacctccaccgccggcatcaacatcccacggcggcacctgcccgatcaacacgctgaagctgggcgtgtgcgctaacgtgctgaacctgctcaagctacacctcggcgtgccggcgaatgagcagtgctgcccgctgttggctgggctggtggatctcgatgccgccgtgtgcctctgcacggccatcagggccaacatcatgggcgtgatcaacctnaacgtgc

SEQ ID NO: 2509 - DNA, 719 bp, Avena sativa
ccgattttccaatgtttgaatggaatagcgatgagcagagatacgaggctctacaccatcctttcactgcaccaaatcctgaagatatgaatgacctaccatcagctcgtgccttggcttatgatatgatctacaatggggtggagatcggaggaggcagtttgaggatatacaaaagtgatgtgcaacaaagaattttttgaaatcatcggtatctcacctgaacaggcggaggaaaaattcggataccttttggagtgtttcgacatgggtgctcctccacatggaggtattgcctatgggttggaccggttggtgatgcttctggctcgtgaaagttcgatccgggatgtgatagctttccccaagaccacgactgctcagtgttcgctcaccaaagcaccgtcccctgtggatccgcaacaactgaaggatctcggcctacgttcttcatgaggataatgttcataatttaggggtaaaaccatttaggaagaactacattgtacacatgggactcaattgtctctacacatctctttttgcactacagagaaaatgagctcttgctcatattttttttttaccatgtaagatcactggtatcctttggataaccatgtgaattagtttgtcgaaaaactagggctgcgaatgtaactgtattattgtagacctggagttgcatgaaccaggccttgtaggacgatgatctgttc

SEQ ID NO: 2510 - DNA, 598 bp, Avena sativa
ggagtacattcatgagcacacaaaggatcactatgttcatagagacatcaaatcaagtaacatcttgcttgatgcttcttttagagcgaagatttcggattttggtcttgccaaactggcggtaaggtccaatgatgcagaggcttctgtcaccaaagttgtgggtacttttggttatttagccccagagtacctacgggatggcctggcgactgcgaaatgcgatgtttatgcctttggcgtcgtactttttgagttaatatctgggaaggaagcgatcacaaagactgacgcgatcagtgcaggttcaaactctgaaaggcgttccttggcatcagttatgttgactgcactaaggaactgtcacaaccaaacgtgtgttgggagcttgaaacactgcattgaccccaatctaatggatctatatcctcacgactgcatgtaccagatggcgatactagcgaaacactgcgtcgatgaagatcctgttctacggccggacatgaagcaggcggtgatcaccctgtcgcagatactgctttcgtccatcgagtgggaagcgacgatcggtgggaacagccaaggtgtcagtggtctg

SEQ ID NO: 2511 - DNA, 941 bp, Avena sativa
gtacaacaccgatgagtcaattcaaggtttcgctgcggcttctatggcaattgcttacgagaagaaatggccactgtaccttagcacaaaaacacaattcttaagaaatatgatggcaggttcaaggacatattccaggcgatctatgaagctgactggaaatccaaatttgaggctgccggaatatggtatgaacaccgtctcattgatgacatggttgcctatgcacttaagagcgaaggaggctatgtttgggcttgcaagaactacgacggagatgtgcagagtgatttcttagctcaaggttttggctctttgggcttgatgacatcagtattgatgtgccctgatggtaaaactatcgaagctgaagctgcccatggcacagttacccgtcatttccgtgttcaccagaaaggtggtgaaaccagcacaaacagcattgcttcaatctttgcttggacaagaggacttgcacacagggcaaagctagatggcaatgctaggcttcttgatttcacacataaacttgaggaagcatgtgtcggagctgtggagtcagggaagatgacgaaggatctagcacttcttgttcacggatcttcaaaggttacaagaggagactacttgaacactgaagagttcattgacgcagttgctgcggagctccaagcaagattggcagccaactgaacattcaagaaaacctcgtccacttcagtgcttcaatagtcattacccaacgattcacgtcagtttggttatgtcgccattatctgtcatgctttcttcctgaacagaatgagcttttactgctccatcgcaaattattgtcaaaatgcaagcagtgctgtagatgctgatgatatgtaagtggagctctaaataaaagacgtatagaacgattgttcagctccgatgattgagttatttcttactgc

SEQ ID NO: 2512 - DNA, 885 bp, Avena sativa
ttgacagagcaaaaagtcgagctatatcgctcatggaatctacgctccagttgtcaaacattgaccttattttacatacatgcttacaggagaaaaaggcccttccgccaaagctacatcatttgttcaaaatgatattctgagtcctgcccttggcgatgcagttgatttgctgagcgaatattcaacatggctgagttctagcaatacccgcgaagcaaatctgtatctggaatgtttccatgaaagatggggttcattgattactcaggaagaaaggctcccatcggatccaaatgggctagttaatgaaggagagaaactcagcatcaaggcactgaatggtttcagtgctagtgctgctgctaaggtttttgaagaagaaattcgtgaagtggctacgggaacctttggagggcttggcgttgctggattgtcagcatctcttttgacctctgttctaacaactacgctcgaagatctacttgctcttgctctttgctcagctggcgggttttttgcaatatcaaatttcccaggtcgacggaagcttgcgatagagaaggtcagcaaggctgccgatgaactatctcgtaaagttgatgaagctatccaaaaggatatatccctgagtgctagtaacctagtccagtttgttgacgttgccagtaaaccataccaggactcgtgccagcgaaaaatcgattggctgcagggtgttcagggtgagttgtccgctgttgagcgtaagctccaaacactgaaagtcgatatccaaaatctccatggatcatgacatgttttgcttttcgtagatattttctttctattttttttttggttctttccaccatgatcatgctagtgtagagcagtggatgcatg

SEQ ID NO: 2513 - DNA, 863 bp, Avena sativa
taaatgatgcttgttacccaatcgctgattcagaaaataatgctccaagaactatcatttctgctggtgaatatggatcttctgaagatgctctctcaagtgctatagattgttggtctgtggcgcaagctattgtaaatgatgacagcgaagcagtcaaagatgtagtaattcagaatcaatgtgcagataggatagcttacgatgatgatctatgctctaacatgtctctagatgctgatggaaactgcatcaaaatgagtgaagaaaatgtttctgccatcaccaactatgcagttgacacttcagaacatcctcacccatgtggtgcgaactgttgttatagtcatcaaatgcagtctgaagtagttctggtttctgatgaggcaaacaggttggatgattgttctgtgtctgcaatttttgaggatgtgctggtttctgcaaccgaggctaaaatagccgatcttccaaacgatgagggattgaggaaacaaattcagagaagtttctcattagaagaagctactgatacaattctcttctgtagttccattattcacgaccttgcatataaggctgcaacaattgcactggagcacgagcagggatctgaacttgccgttgcccctcggccaacagtcatgggaataggtaaatcctttcaaagagatgatggcgtgctgaagctgcctcacagacgaacagcgaaacgtaacatagcaaggaaaagattggaacgtgaaaccgtcacagaaacagccgagatgcaagtcattaccaaagatcctgtaattgtacattctgcttctgaaattacaaggtcatctgatagcatgaagcctcctaaggtggaatcaaag

SEQ ID NO: 2514 - DNA, 489 bp, Avena sativa
gagctacgcctcgcgcccttcggcgacacctgcgcgctcgtatccgtcctcttcaactccctcggcatcgcgttcaagttcgccgagagcgagtacgtcacaaaggtgaacgacctgatcggggcgtccaaggagtacgcgacgctgaacgacatcctggacaaggacgtggagcaggactgcgtcaagaagcagggcagccattcccggaacctgcgcagggtccgcctcggcctgggactcatcaaggcgctcttcgagcagttcctcgccacagagggctcgttgtatgatgctgctacgacagcttacggccaggtttgcgcgccgtttcatagctgggcaatcaggaaggcggttggtgccggcatgtacactctgcccaccagggagcagttgatactgaggttgaatgaaactgattcctcygtgcagaaggagatgaggagatacattgatgcttccagtcctattatagagtacatygat

SEQ ID NO: 2515 - DNA, 674 bp, Avena sativa
caggtggcaaacaaggggatgtgctgctgaggaattttgatgcagcggatatacttgcaaggacgaaattcaatggtggtggaaacaaaaaactgccaaagaagatcctcgatcacgatcaagtacttctgctcggtgacttgaattacaggatatcactggaagagactgagacaaggttgctggtgaaagctaagaattggtccacgctgttagagaacgaccagctagtgtctgagttctcgactggtcgcctttttgaaggctttcaagaagggccagtcaccttctctcccacctacaagtaccagccaaactctgatcagtactactggtgcttcgaggcggcacggggggagaagaagcgtgctcccgcatggtgtgatcgcattctttggcgtggtaaggacctgaaacaaatccagtacgagacttgtgactacaagttgtcggaccatcggccggtgagagcgggtttctttgccgaatgcaagatcaggggagatggggaatcccttggtggcttcatgccatgagctctgcagatgactgacgttataggatggaaattttgcccgtgtagcccaagtggcagaaattgtatgtaagagtactaagtagtcacatccatagcaagctagaaaataggtcgagttttatgagatctcgaacgt

SEQ ID NO: 2516 - DNA, 1022 bp, Avena sativa
ggagagtctcatggtggtggtgttggttgtgttatcagtggttgtccacccagaatcccgctcaccgaggaagacatgcaagccgacctcgatcgaaggcggccaggtcagagcagaataaccaccccaagaaaggagaccgatacttgtaaaattctttcagggacatatgaaggaatgaccactgggacgccaattcatgtttttgttccaaacacagatcaaagagggggtgattacactgaaatggctaaggcgtacagaccttcccatgcggatttaacttatgacctcaagtatggtgttagatctgtgcagggaggtggaaggtcatcggcaagagaaaccattggaagggtagctgcaggagctcttgcaaagaaaattctcaagctcaaatctggagtagagattctggcatttgtttccaaagtgcaccaagttgtacttcctgatgacgcagttgattatgaaactgtaaccctggaccagatagagagcaacatttgtagatgccctgacccagaatatgcagacaagatgatcgctgcaattgataaagtacgaactgaggggaattcgatcggcggggtggtcacatgtattgctagaaatgttcctcgtgggcttggcactcctgtatttgacaaactcgaagctctactggcgaaggctatgctttctcttcctgcaagcaaagggtttgagatcggtagtggatttgcaggtactgacttaactggaagtgagcataacgatgagttctacatggatgagtctggaaatgttagaacacgaaccaatcgctcgggcggtgtacagggagggatatcaaatggcgaaactatatacttcaaagtagctttcaagccaacagcaactattgggaagaagcaaaatactgtaacaagggatcatcaggatatcgaacttcggacaaggggtcgccatgacccatgtgttgtccctcggctgttccaatggtagaaacgatggcggcattggcctcatggaccagctga

SEQ ID NO: 2517 - DNA, 783 bp, Avena sativa
gggaagaggttgatcccatcgtaagtgtgcggttgcgtatgaaggtgatgacattccttgactaccatgcgcagcaggatgagattgccttcctccagtacatctttgagaatgcgcaggttctgaagtatgtactagtttcggcgatcaatccaagatacacatcactttctatggatgatatgacctccaccttgtacgctatgagcgatgaattatggctcagcaaattctcttttgctgttggtgggactcatggtccggaaggaggtgaaccttggactttccgacgaggagcaaacttttctgaaagcgatcctttggcaccggttaaattcatcataagggcaggcccggagactcaccaccagaagccgcaagttggcaagactcaaaagcagaagccacatgctggcaagacgagccagcagaagccgcaagctggcaagcatcgcaattgagatcctcggcgcatggagccgtggagtaagcatcgctggcgtgtttaatctggagaacttgcctggtctggttgctttccatggttcttctagtgatcgagttctgcggttgtgtgtcaagttgctactccgttatgcatgagagggatagctgtgcgtgatatggtaatgtgtagtgcttgagttctgttgttgtgtgtgtccagtaactgaagaagacatggtggagttcgcagctttaggcagaattaaggcatccttggactagagaaacatgttccatttcactgtgatgaactacctgtactgtactacctctatt

SEQ ID NO: 2518 - DNA, 770 bp, Avena sativa
gttaaggagctcaagaacggccgcctcgccatgttctccatgttcggcttcttcgtgcaggccatcgtcaccggaaagggccccctcgagaacctcgctgaccacctggccgacccagtcaacaacaacgcctgggctttcgccaccaactttgttcccggcaaataagccatccactaaggcggtgtccgagagaccatgcacacgatgaagtatgcacaactggtttcgcttgtactaccatgatgtaaattatgaggatcgattctatgaaaatatgttactagatttggagaccaattttgtggcgacggagaactggctgcgtgatctgagactcgttgcagcgactgttggtgcaggaagacaacacaatgtgagttcacagtcttatcttgcatggtgaaaatccaaggtctggccttaactgattgtgcctggcaatgaccttgttgaagacattgttttgtgagcaaggactttctccagggtgaaaacctatgatctttgatcgggcaacgacggcgcttggacactgtttccttcttgaaggcgttgttattggagtggaggactactggtgttgttctgatggtgtcagtgtcgttgctttgaggattagttctctgtagcgggacttttctttttgtaattcttctctctttttttcgaagctgtgtgtatccgtagggccgctagggcatgcgttgttgcagaggctaggtgtaattggtatccctgtgatattaatatatactcttttacaaaaa

SEQ ID NO: 2519 - DNA, 791 bp, Avena sativa
caccacggcggggacgctgtcgtggttcctctacgttctgtgccgcaaccagcgcgtccaggacaagatcgcccgagaagtgcgcgtccaggagttcgcggcgtgcctgaccgagggcgccatcaacagcatgcagtacctccacgccgcgctgacagagaccctccgcctctaccctgcggtccctatcgatgtcaagtactgcttctcggacgacacattgccgtccgggcacgcggtgaagaaaggggacatggtgaactaccagccgtacccgatggggaggatgaagttcctgtggggcgacgacgccgaggagttcaggccggagaggtggctcgacggcgacggcgtcttcgtccccgagagccccttcaagttcacggctttccaggcgggtcctcgaatctgcctgggaaaggagtttgcgtacaggcagatgaagatatttgcggctgttcttctctacatgttcaggtttgagatgtgggagcgcgactccgccgtggggtacaggcccatgctcacgctcaaaatggatggcccgctgtatgttcgtgcgcttccccggcgatcaagtgcacagcgtgcctgatatacaagaactagctgaatgttaatacttctgcacatgttccggtgcttcgttctgtttagcttcgatagtatgatctgtatataagattcctgtgtcgctttatataatcagttatagaatatggttcatcggttatgggtttttaattagtttttttgtgtgaataggggattttattcatttgaaatgttcc

SEQ ID NO: 2520 - DNA, 470 bp, Avena sativa
gaagatttctatgtattttgtccagcaggcgaagggtgcatgtcatggtgagaagaagaagctaacaattgatcaagaattcgagcagtacttttcagaactcatgctttagcatgacagtgaagaaaaactcaaccttggaacttccaaagatgttctgcatcctaaccaatcttgaactagcaactgcaagtctgatctactgttggagttaattatgtatcctcaacttaaaatcttgtcttcgaatgtatatatgttaccattttcaaaccgtactttgaatggccatcaaatattggcctcccatgtatcatgtgtgtagatgagtagatctgtgcataaaggtacatctgggattctaaatagcgtgttactctcgtatgttggtgttatggaaggacttgtaaagccatattcccgacctggagctagaagtgaaaatttggatttccactatacgtgatggt

SEQ ID NO: 2521 - DNA, 929 bp, Avena sativa
attcatatattgcagatgagagagtgggattagctgagcctgcagatggactagagctgtacctgtgccctcctcaaggaaaaaccgtggagattctctcccggcacttgccaaaggaacacttggatggtctcgctgtggcagcaacgtcgatcatcggaatcaccgtctggcggagagccagcgttcccaggataccgtcccatcaaaggcacgagggttccaagaggcagtcgatcctaaggactccgcaggttactggttctacttcggtccgtaggtcctccgcgccccagaactctcatggtgcaccaccaggttttcccaaccagcgtcaccaccaccaggaggaggaagaggatgtaaacgatgatgtgcctccaggctttgggcctggtgttgttgcccgcagggacgaagacgatcttcctgaatttaattttgttaactcgtcaaaccccgctgctaatgtaacgacacgtgccttgaagggccgacagcatgtacctgctcgtccagtagagcaaatgagggagttggttcagaagtatggtaaaagatcatctgttgaatcgcgtcgctgggatgacgatgacgacgatgatataccagaatggaaccctatccagcaaagtaggcagccaccattggcacccaccctgccacagcaaccactccctccaccaccaccactgccgtccatccagcaaatccacaatccctaccagcaacagcagtacagccaccacccaactgcaatgcagcctcttcagcagcaaatgcccagcaatacccccatcctttcccaggcttacctccagcaactccagcagcagcagcagcagcttcagccttcrcaaacatggcagcarcagcmgmagcagcagcctaatgcctggtggccgcaggcgcagggtgcggcggctgct

SEQ ID NO: 2522 - DNA, 729 bp, Avena sativa
cgggatcacagcctctccatcgccgctaagttgccactgaccattgcatacccatcctctcctagggcgacggcagcgatggccggacgagtggcgctggcggcggtcctgctgtgcgcggcggctgccatggccgcggcgcagtcggcgtccaacgtgcgcgccacgtaccactactacaacccgaagagcatcaactgggacctctactccgccagcgcctactgctccacgtgggacggtggcaggtcctacgcctggcgctccaagtacggctggaccgccttctgcggacccgctgggcccaggggccaggcatcctgcggcaagtgtctccgagtgacgaactcggggactggcgcacagatcacggtgaggatcgtcgaccagtgcagcaacggcggtctggacctggactacgacacggtgttcagcaagatcgacaccgacggacaaggctatcagcggggccatcttacagtcagctaccagtttgtcaactgcggcgacaacgagctggttctcgaagcctgatgaaaaataagaagctatagtacaatcaactgcggcgacaaggaacttgcgctccgactctatggaaaataagaagctactacaaataatgatgcatttgcaatttccttacattgtaataaagtggatcgtggtggatccaaggtcttttctttaaataaagaggaatcgaagaagattttatttggaaaaaaa

SEQ ID NO: 2523 - DNA, 647 bp, Avena sativa
gccagaccatttttgggacttttgttctgcaagtaaatccaacaaacatgaacaccgaaaaaacaatgacgagtgggaacctgaagaggtgaagctactagtggatggcatatccaacctgggggtcggacggtggaccaagttgaagagtaaatggttttcccctcaaaagaagaagaaaaataaatgtttttcagcttcagatcaagttcgaccagttagaacggctgtgcatcttaaggataagtggagaaacctagtgaaagcctacgtgtccaagcctacctccaaaaaagaaggggaaaaatgcgcatcttgataaggacttgattaacaagatcaaattgctagacagttgagtacccttatccaaaaatgagctgcacatttgcaagatacaagaaccattttttaggatttttggtgtagcaagttactcagcaacaagagtactgctttttactggtacagaagagctgaggcattgtatgtttgtgtgtacatagtagatttgactatctgcagggagtagcgtgtatctcctacctaactgccttgtaaagtactcttttatttatgaactggaaggaggtctcctgctccacttttatagtccagtcttaagttaacatttcatgaccagaaat

SEQ ID NO: 2524 - DNA, 832 bp, Avena sativa
ggaagggggagagggtggcggagaaggacgtggcgacggtgacggagcggctgatgaacgagctgctgaagctggacgccgtggtcgccggcggcgacgacgtcaaggcgcagaggcgggtgcaggtgaagcgggtgcagaagtacgtggagacgctcgacgccgtgttggccaagaacgccaccatcgcgtcgcgcaagtccggcgcgaagaagcaggcggagcagcccgcaccgccggcaaggcagccgcaaccgcagtcgcagcgccagcgcacgcaaccgcagcagcagcagcagcagcagcagcaggcgcagacgacgaagtgggagatgttcgacctcctgtcttcgctgccgtccacgtcgtcggcctcctccaccaccaccgtcagctccaccgcgtcgtccggcggcccgccgccgcccacgaacaagctcgactggatgctcttctgacgagcaccatcatcatatatatcgcaatccaaagcagagaagcagatgttgcgtgccaagaattgcactcatgtctttcggaaatccaggaggctcgatgatccaatcgatcgggtcaagtcaattatactccatgtgcctagtttggttggccgcccatatcacctggttactttctgccagttgagtcctagtagttcgtcatgtcagagatgtcaaagcattttttttcttcttcattcttcttcttcttcttcgtcgtcgtcatcaaacgtttgatgtaaattcttttgtgtgcataccgtgagaaagaaagagaaagggagtcaggtggggttgatcaattagggatcaaaaatcaagcaacaagtgta

SEQ ID NO: 2525 - DNA, 797 bp, Avena sativa
tggtgaacgcaacatgactacaaaggatgcttacaaatacttcgtgctgagggcccaggagatagcaattcatcttaactggattcctgtaaactgggaggaaaccttcaactcatttggggaaaacctgaatcctctgactgttgtgcataactggttgggtcctggggtctgccctaaagtcgttgcaaagggtttgagatgcataatgagtaaccaaggtgcatggtaccttgatcatctcgatgttccgtgggaggaagtctacgccgaagagccactcgcaggaataagtgacacggcgcagcaaaagctggtactaggtggagaggtttgcttgtggggtgagacagcagacacatctgatgctctacaaacaatatggccgcgagcagcagcagctgcagagcgtatgtggactccattggaggccatatctgcacaagacctggaaacgacggttattgctcggctacactacttcagatgcctgctgaaccaccgtggagtcgccgcagctccggtcacaaacttctacgctcggcgacctccgatcggccctggctcatgttttatccagtgaacaggtaagtagcgcaggtgtagatacacatggagggggtttgcccccctacacacctcccatactgtacgaagatggttaccgtcacttgtaccctatatcacttctgtaagtccacttgcattacattatcccacatacacttgttaatccgctggtccttgtgtatttcaacttgaaattctaataaaagcagtttcaacggtcaaaaaaa

SEQ ID NO: 2526 - DNA, 686 bp, Avena sativa
  modified_base (610)..(610): a, c, t, g, unknown or other
cgggatgagaattggaaggagaagtttgaggaaaactcaatatggtatgaacaccggttaattgatgacatggtggcatatgctgtgaaaagtgaaggtggatatgtatgggcatgcaaaaactatgatggagacgttcagagtgatttccttgcccaaggttttggttctctgggtctgatgtcatctgttctgttatcttctgatgggaagacatttagaggcagaggctgctcatgggactgtcactagacatttcaggctacatcagaagggacaggagacgagtaccaatagcatagcttctatatttgcctggactcgtgggctagagcatagagcaaagctggataaaaatgacaggctgctggatttcacacagaagcttgaatctgcatgtgttgaagcagtggaatctgggaaaatgacaaaggatcttgcacttcttagccatggacccaaggtaacaagggagtattacctgagcactgaggaattcattgatgctgtggcccagaggctgcgagaaaagatccaggcgccagctgcgttgtaattctcaccatatgcaggctattgctagccggaagcctgcctcggattgggtttntggatcaggttcgcctggcttgtgcttattcggcacacattttgaccgagacgatgagacagaggatcctgtcgag

SEQ ID NO: 2527 - DNA, 773 bp, Avena sativa
gaatatatggaaatgggatcactatactatctcatccatatgagtggtacagaaaaagaagctcagctggcgtaggagactgaaaattattcgtgatatatgcaggggattgatgtgcatacaccgtatgaagatagttcacagggacctgaaaagtgccaactgtctggtgaacaagcactggactgtgaagatatgtgactttggcctttctcgagcaatgacagatagtccaatgactgataactcctctgctggcacaccagaatggatggcccctgagctcataaggaacgaacccttctcagaaaaatgtgacattttcagccttggtgtgataatgtgggagctgtgcacgttgagccgcccatgggatgggatctcccccgttcaagtggtctacacggttgctaatgaagggtcacggcttgaaattcctgaaggacctcttggcaagttaattgcagattgctgggcagagccccaggatcgacctagctgccaggaggtcctcactcgcttgctcgactgtgagtacgctgacagctgatatgaacccgacgaaccagttcgctccctgccacctggtgcgttcagaggaccgtttcttgtactgtataaaacttgtaaaaatctagcctgttggtcttgcagactggcaaggatatatatacaactgaactcttgtattttggctgtatatcggcgacccttacttttgaaattgtaaaaaggaacaatttctccttttatagaaaaattgggcataccaa

SEQ ID NO: 2528 - DNA, 568 bp, Avena sativa
gacgccggttgtggacgatgggaaagaaggcaagaaggaggggaagctgccggctgaggagcacgtcgtggtcaacatcgccaagctcggcgcgacccccgagaagaactacaccaatgaggtgcatccggtaacggagatggccgccagggctgtcccgaggagctgcggggccgaggtggtggcggcggcgccagagaacaaagccgtgggtgcccttcctgtccaggcgatcgtctagatccacatactaacgcctacgtgcgcgtgcgtgcatgcatggaccatgcacacttaagtatttccacaggagcaaactgaaggaggacaagaataacttaattaatgattgattaatctccctattagctaagctattcatgcaagcttgcttgcatcagtggtggaacctgagaacgcgagaaaagagagggagggaagataatctatgtatacgtatgtgtatagggttgtctctatctctctccgtgttgattagtgctactgttgtattcattttcatcgagcgatgtattcgcaattacatatcgttgttccttacgtatgt

SEQ ID NO: 2529 - DNA, 502 bp, Avena sativa
ctgagctgcatatggagattcacaggcaaaatcgcatctcaacaagctgcacaaggaccgccctcgtcctcaaatgcaaggcaatcaaggaaaaagaaggacaatgagttctggtatgatttgggtgggtgggtgattcttggtattggcttcgctgcttggattgcaatggccaagaatcaaccccaacagcaacagacacccacaccagctcacagtcacatgtgatttggatcggcttgagaaaacgaaacctgcaaatggcatgcccatgttaagtgccccggacgtggatcttggtagacttagtagctaagtgatggaaagaggaaaatggtgtttccatgttgcggtttggttgaattttcagcacatgtcttccttcgtggtcttgacaaggtttgtcttgtcatggatataatgcatttcgttgcatgattttatgttatttagctaaaaccatttctacgttttgattccttttttgtcttctggttaagcg

SEQ ID NO: 2530 - DNA, 765 bp, Avena sativa
  modified_base (674)..(674): a, c, t, g, unknown or other
tcggtaacctgtcaatcgagtgtacccaatgtgtctgttgttcatccaactattgacttgtaaccaacgggcaagatctgcagtaccaaccagtacaaccaaagaatagtttaagagaccaggacagagctaggcggctaactacaccggtgattctagcgaactaacacagagtttcacagagtactcctaaggatgcagtggagtttatctcagggacacactaccgaaagtaaacagacacaagaggaatatcgacatcgttctcatcgtcgtcctcgcaggccacgccaatgtccaaatgcctcctgtactcgggaacgtccaccttggcaacttctttggcaacgtcggcaaccttcttggtcagtctatccttgtgcctcgcgaacatgttgttgtacagcagtgacgcgccgcaggaaatgctgtaggcggtgaggcccttgtccgcgaaccattgcaggagctcagcaacagtgaggtcgcccttgatggaccatcggtcccatacagtccagctcatgtctttatgcttcataaccttgggcggaactggttcagccatggagaacaacggcagagctaagtttgcgaatgtattgcggtagtcttcaatggggtgcctgccggcaatgaccttgtacagctctaggcacacaagtcctgtggcntggcggttgaggttgcaatagctgggataattctccctgcgatgaacttagccttcaacttgtcaacctctggaatactgtagttccttgc

SEQ ID NO: 2531 - DNA, 586 bp, Avena sativa
gtcaagtacacctacgcgcacggggccggacggctcaccaccatcgagcctaccttcgacaccgccaagaacgcctgggagttcgccgtcgccaggaagttcgatggcggggactctgtcaggggcacctaccaggcctccaccaagcagctcgggctcgagtggaccaggagctccagcatcggcggctcattcaaggtcgcgacgacgtttgatctgtctgatcaaagcaaagtaccgaagcttgtagcggagagcacgtggaactacgagatctgatggcctctacctggcagccagcaagcaggcagcagcgcctgcttgaagagcatcctcctcattatacttgtctactgtctcgtacaaccaaactatcccctcctggacgcaccattgttcggattccactactgttatatccatttttgtttgtcatgtgaccgaatcgtcatggcaatgccttgacattaaaatgaggctgaacatgttttgtgtcaaaaaatccactgagttgtttgtttgtttrgtgtgcttgtttgtcgtttatcttctctagacatctgtgtactgtggtcttcacaaatgt

SEQ ID NO: 2532 - DNA, 734 bp, Avena sativa
cgtcaggctcttggcttgagtacttctggcccactaaaactagaagatgtcaaaagcgcataccggacgtgtgcacttagatggcatccagatcgtcatcatggctcatcaaaggctactgcagaggagaagttcaaacgttgcagcgcagcataccagaccctatgcgacagtttggtgcataaataatgtgatacaaagatctgagctcattagttccttccaccagcagatcaacttcaactgcaaattcggcaggcctatcacctgcagaccaacttcataactgcaaattttgcatgcctatcacctgcagacttacttgatatctgcaagttctgctgggcccaagcaaaagtgcaaggaattaactcgagccaaatttgataaaataatgcagaagtactgtcccatgcagcagttttaaaatagtcgtcgctgtacttttagggatagaaagacactttttgtaccaattaggatattgtcatggccaggttatctaacccaatttagtcattttaattggatagttggatgacttatctggttttgcaaaaagtcgagtacagaacagtaggagatatcaaggctctttgatcaacctgagatatgtaatgttctatcttacacagatcttcttagaactgcatcatgtcataatgttccgagagatctctgattacatgaaactgcaataataaagaactgaaaatctgcatgatcaaaaaaaa

SEQ ID NO: 2533 - DNA, 479 bp, Avena sativa
ctgctgccgaatttgcacctcatcaaaccaaaactagagtcctgtgaagactcaccggtgccagctcctgacgcttctgatgattgggacaccatgcctctctccggagaccacccattctttaccatcatcctgtcaagatcacatgttcagaagccgtttcagctgtgcattccatgtcgctttcacaagtgcctcccggaggcacgcacagctgccaccctcgtctgccgtgggaaatcatgggccatgagctactgcggcgacctaaaggtgaaaaagctggatgttaattggatggactttgcggtcgacaaccggctgcaggtcaacgacgcttgtgtcttcgagcttgtgaatggcaccaaggcggaggtggtgttccatatgcagatactccgcggcggcctaccgggggagttcacctccaagggtgccaccatcgatgagcccatggtcatcgtggactagaggccagg

SEQ ID NO: 2534 - DNA, 606 bp, Avena sativa
tgatgctgcagattcagctgaaactgctgctattcagaacggtatgtatgtctccgtaattggtaccctaaagggacttcaggacaagaaacgtgccactgcgttctgtgtcagacctgtaactgattacaatgaggtcacactgcatttcatccagtgtgtacggatgcatatcgagaacacaaaatcaaaggttggcagtcctgcacacaccaattcttttctaggaaccccattctccaatagcatcagcgaactaagcactccaacctccttgaaatccaacccggtgctagcgaccagcgggacaaacgtatctgggactgatttgtacgcgcaggtgctgagtgttttcaatgaaccagcaagcattgcgagtgatcacggtgtgcacatggatgatattgccaagcgtctcagaatgcctgcaagcaagatcaaggaagctattgatttccatgttgatggtgggcacatttactcgacgatcgatgacttccactacaagtcagcatttattgactgactgtgcgacaagcttcttctgcttgctagcatccatccctagctgttaggtagcctgagaagcatcttctcagctgaagt

SEQ ID NO: 2535 - DNA, 634 bp, Avena sativa
attgatatcagttttagaccagaggaaggatgaatcaattgaacgcacatttaaaggagttgcaaggcacttccgtgaagtgttcgctgaattagtgcaaggtggccatgggtacttggttatgatgaagaaaaaggatggtgatgctgtcgatgatgacaatgatgaggacggaccttgtgagccggatcctgaaggaagaatagagaagtacattggtgtgaaagtcaaggtttccttcactggcaagggagaaactcagtccatgaaacagttgtcagggggacagaagacggtggtggcattaacactgattttcgctatccaacgatgtgacccagctccattctacctgtttgatgagattgacgctgctctggatcctcagtacaggacggctgtcgggagcgtggtccgacatcttgctgacttgacagacacccagttcatagcgaccacattccggccggagatcctgaaggtcgcggacaagatctacggcgtgacgcacaagaacagagtgagctacatcaacgtggtgtctaaggagcaggccatggacttcatcgagcatgaccagacgcacaatgccagctgaggccgacagaggctgcccaactcgtgtatgccgatt

SEQ ID NO: 2536 - DNA, 683 bp, Avena sativa
ccggaacatcgacttcgccgaggtgaagaaggtgttcgacatcaacgtgcacgggatgctgctcgggatgaagcacgcggcgcgcatcatgatcccgaacaacaaggggtccatcgtgtcgctggcgagtgttgccagcgtcatgggagggatgggacctcacgcgtacaccgcgtcgaagcacgcggttgccggtctcaccaagagtgtagccctggagctgggtaggcacgggatacgggtgaactgcgtgtctccctacgccgtgcccacggccctctccatgccgcatttgcccccagggagagcacaagggtgacgcggtgagagatttcctggcatttgttggcagtgaagcaaacctgaaaggcgtggatctgctacctaaggatgttgctgaggcggtgctttacttggcgagtgacgaagcgaggtacatcagcgcgctcaacctcgttgtggatggtggctttacatctgtgaatcgcaatctgaaagcatttgaggactagttgaagtttttagttgcatttgtcacttgatattcgctgatgtactactagaatatcattctgatttgcctgtattgtgtcaataaggtgggtagtcatgtgtaaaattggataatcgtcatcattatatattagtgcttaaggactgctttgattattattatcaaaaaa

SEQ ID NO: 2537 - DNA, 697 bp, Avena sativa
cgtacttttgctggccggagccacacgaccacaaaggagctagctagcaccgacaaacagcactgcagctgccctgagttctccctcgcgatggcaagcaccaacatggcgtcggcaacttccagattcatgctggctgcgggcatgcccgctcgcggcagcagcagcaaccgcgtcagcttcgtctcgtccaaccggctcggcaggaggctcgtcgtccgcgccgaggaggagccggcggcgccacccgcacctacacctgctgtgacggagacggcggaaggtgccgtggccaccaaggcgcccgccaaggtcaagccaccgccgattggacccaagaggggaacgaaggtgaagattctgcggcgggagtcctactggtacaacgggactggatccgtcgtcacggttgatcaggaccccaacacccgttacccggtggtggtgcggttcgccaaggtgaactacgctggcgtgtcgacgaacaactacgccctcgacgagatcaaggaggtcgtttaaacgaggccacgtgctgccctatgctccatgcagtgtttgcattggtagctcgcgtgttaagtgacgatgtgaaatgttagcaccacaaatcttgtgtaatagtgtaaccactacgattctatgtatttgtctccttccacatggagctcataatatcccgttgcttaaaatagaa

SEQ ID NO: 2538 - DNA, 631 bp, Avena sativa
agagttctttggtgacattgttctagtgcctttcatggatagctatgaccttgttgttttaaagactatcgccattgctgaatatggggtgcgtgttgttccagcaaaatacataatgaaatgcgacgacgatacgtttgttagaattgactctgtgttagatcaagtgaagaaagtacctgctgggggaagcatgtatgtggggaacataaaactactaccaccgacctttacgatctggaaagtgggctgtaacgtatgaggaatgggaagaggaagcgtacccaccttatgctaatggaccgggttatgtgatctcatcagacatcgctcagtacattgtatccgagtttgacaaccagacactgagactgttcaagatggaagatgtgagcatgggcatgtgggttgagaagttcagcaggactcgccggccggttgagtatttgcacgacttcaagttctaccaatccggttgcttcgatggctactacaccgcgcactaccagtccccgcagcacatgatctgcttgtggagaaaattgcagtcgggagcgctcaatgctgcaattccaggtgacagtgagctggtaaaatacagctctagttcattgcaaggatgtgtgatgtc

SEQ ID NO: 2539 - DNA, 857 bp, Avena sativa
cttatccagtatttgcccaaagtattaactgcattcaggacaggtctatctgtttgtccacataagtgcgtgttgttcttccctagatagtcacatgtagaagctttctataaagttgttttgattaattgaaaacctttcgatattgggtgttaattattcatttcctgtatatcttattttcaattcgaaataatttttcagagtgctaatctttcgggttctgatttgaatggagctaatctggaaggggccaatctcaagggggctaagttgtccggtgcaaacttgcaaggcgcaaatcttcagcgagcctacttgagagaagttgatttgcgtgaaactgatttaactggtgctaggcttggaggagcaaatctgcttggagctatcagataacacaacaagagaaggctcatatagcatgtacactttacaaattgaactgtcacctgcaatgtgcgtgtagttttggtcttggtgattgcggcggagaggagcagtacatcaggaaaacatcgaaaggctcgaatgtaaatgagtgcgccaatggttgtggaggcgtacggtgttccaaaagacatacaagctggggtaaatagtttcttgctgttggtcctcagtgttgattgttgtacattgagttgctgtgtcgaactcctgtagctaaaattcggtgaggctgtagctggttagatatcaacgccatatcaccattgtgcatgctttcaaaacgtgtgaagttcctgcgtattggggtgctgttgtggataaacatatctgaactgtaattgggggctattgtgtatgttgtttctgggtggagagtagagaaaaaagtacatggtcttgtcaaa

SEQ ID NO: 2540 - DNA, 627 bp, Avena sativa
aagtgacggggcctgatgaaagtgacgagccatggtgagcagcggccagcccttctaacaccatgtcatccactaaaatcctcctagaagaaaaaggggcggtcgagattgctttggaggaccgatgcagcctcgagatatcgccaaggagccatgcctctgctttcgtcaccgacacctccatccccagttggttgtactctatctttgtctgcatcgccttggtccttgcatcgaggagaaagcccgtatgctcgatccaagggatccggtgcttcctatcgtcgccaagctcctctccctccacaatgtccaggaagacaattgaaaaaaggatttgaagattcttgcacaattcctatgaattcaaaaaaactgccagcttaatctgagcctgatctgatcgtacttgatgttcctctgtatatctgggcatcttacttttgctagctaggctattccatgaattagtatagtatcgtattcctgttcgttctcttttgccctatcttttcaacatactactattcgttttttataattttagcgcattataactatgagtataccgggatggtgcgccaaggcgcacccctaaatctagtatttgtggttaataggaaaaaa

SEQ ID NO: 2541 - DNA, 776 bp, Avena sativa
tccaaatttgcggctcccactgtggtcatcagctgatgatgctagagatggtatcctgagcatatgggacactgctgatcttatcaaggtaagtgcagaggagatttcctttttgacgaatggggaggatccatatgatgattctgttgttaagaaacttatccatccgaacacaaagttgcttcttgtcacggaaggtccagatggctgtagatattattctaaggaatttagtggtaaggttggtggattaaaggtaaccgctgttgacaccactggtgctggggatgcctttgttgctggaatattatataagctagctatggattcttcactccttcaggacgaagctcgattgcgagaagccctgaagttcgcaaacgtctgtggagctctcaccgtgacagagagaggagcgattcctgcgatgcccaccccacagcaagtggctgatgccctgaccaacgtcgttgcttaagtaagcaaggcgcgttgtcctcacctttttttcgtgcaaaattggcaagaactggctgtagcctgcggagcatcacgctgctagaataggtttgatttggcacatttggttcacactgtctggggccatgctggcgtaataacccaggttaccggccaaccaaataagatgcgagatgcggtttgcatttcaggcgagctttgtaggtttggtgttttgagatccacggagttgccacttgatttgtaattcttgtatactgcctttaccgcactatctgaaggtttgtccgtgcaaa

SEQ ID NO: 2542 - DNA, 710 bp, Avena sativa
aaggaaatatcgtgaaactaacaacacccaatgttcatgaggatgtggtgttaccatcttcggctctgtcacaggccaggaccaaatctggagatgtgccaaccaatggttcaggaaatgattctgatattccagagaaagatcaagacagagtgaaccggtgcggcgaagaacatgtaaatgtcgcaaaactaatagcaatcagtggtcatgaggatgtggtggtaccgagttcggcagtgtcacaagcaaagagcacacgacagaaaaagtctaaaaagaggtatttgctcgaggataagacggccattcagcccgccagacagccgtacgatggaccatctacagttgtgttgtatggcaacgggaacccctcaaaggaagacaagaacattgagaagactcctgttaccgattattgtaaagaaacccctgttattgatttgagcactccgacaaattcagatagcgagtgcacggtcaaaaggaccaaagcgaatcctccttctgtcaaaggccctcagaggtcctgatgactaacaacttagtggatgagatgacgtcggaactggcatctttggtaaagttactcctgcaaaccgtgttgttacatgctctgcattgtacggcttaacttcattgagcttctgcatttcatgtttaggtgccatgtgaggtatttagaaggagagataaataggtcaaggttt

SEQ ID NO: 2543 - DNA, 885 bp, Avena sativa
atctcgtttggtcgctggtgcggagcttcgaccagccgcagcggtacaagccgttcgtcagccgctgcgtgctgcgcgggggcgacctcgagatcggcagtgtgcgggaggtcaacgtcaagaccggtctgccggccacaactagcaccgagaggctcgagcagctggacgacaacgaacacatcctcagtgtcaagtttgttggcggtgaccacaggctcaggaactactcatccatcataactgtccacccagagagcattgaagggaggccagggacgcttgtaatcgagtccttcgtggttgatgtgcctgacggcaacacaaaggatgagacttgctacttcgttgaggctgtgatcaagtgcaacctcacatctctcgcagaggtatcggaacggctagcagttcagtcacctacatcgccacttgaacaatagcatcctgccggcacggacatatgaatcagcatgaataagaagcttcaaaggctagtcggaaatttcgatctttttcagaatggtagattctctgtttccttgtcacacatgtgtctgcttaggattatgtatttgtagtagctagctagtgatgcttttttaggtcttagcaactgcacctggctacctcatggttacatatgcatacctagtatgtatgtgtaacagagaaaagcatatggagtagtttttgcctctttggtgcatttgaaacaacctagagttttttctgcatttgagatgcctactgtactatgttcctggatgactttccactaacacttgggattggggattttgacttgtagattttgggaatgtgctgtaatatatacattggtggaagagttctcctttggtgttactgcgatggaagtaaatggat

SEQ ID NO: 2544 - DNA, 480 bp, Avena sativa
atttggttctgatcctttcctggtagaactgaggccatctgagttgatgttctttgtgaagcagatcgtggtgccacttgccataaacacattcatcacatattcccgatgcaacgccgcgttggagcttctgcgtctgtgcacagatgcattggaacgcgcagccgaatccatgctttctcatgctggtaaatggagagaaacatcaatctcctgctttaggccagtccagtcggaagcccagtacacttacctttggcaggagctggctcttctgaaagcttctgtactagaaacacgggcgaagctgatgctcagaggtggacagtatggcaccggagatgacctgatacggaaggccatattcatccgcacctccatctgcggcgagcagcaccccgacacggtttcggcccgagaaaccctcggtaaactaacaaggctccttacaaacgtccaccttagtgatcatcatactag

SEQ ID NO: 2545 - DNA, 579 bp, Avena sativa
  modified_base (4)..(4): a, c, t, g, unknown or other
tttntttttttgagactaaaatttcctggctaactttttatttagtattgatggactcattccacctctctacatcaccagcgtcatggtcatagcacaacgaacaaacgaagaattcggagacactggcagctaatcctaagaaaaagaagggaaaaaaatccattcttaatatatattacaaggggtctctttaaattagatatgctcaacaacatgtgaactacgaatgccgagccgactcatggcgaaagagatactgtttcctttactgctttgcctgggagtagatgaaggttccgaggatggcgatggccgctccaagcgcgttgatgggctgcaccggcgtgtggaagatgatgatggaggccacgatgacggagatacgcttcatggtgttgcccacgctggatgtcagcggcgagatctcgtcaagcgacatgtaggacacctggttgtacaggtggtagaacacgctctgtgcagccacccaccagacgaagttgggaccgatctccgcgactgcattctgccagcctgcagcccacaccttggggccctccatggcgaaggcgaaag

SEQ ID NO: 2546 - DNA, 691 bp, Avena sativa
cgtcgtcgaagatggcgctgggcatcaagcgcgcctcgcggtcgcactcctaccaccgccgcggtctgtgggccatcaaggccaagaacggcggagccttccccaaggccgagaagcccgccgccgtcgccgagcccaagttctaccccgccgacgacgtcaagccacgcaccgtcagcacccgcaagccgaagcccaccaagcttaggtctaccatcacgcccggtacggtgctgatcctgctcgccgggaggtacatggggaagcgcgtggtgttcctcaagcagctcaagtccggcctgctcctcatcactggacctttcaagatcaacggtgtgccaatccgccgcgtgaaccagacctatgtcattgcaacatccacaaaggttgacatctctggtgttaaggttgagaagttcgatgacaagtacttcgcgagggacaagaaaaccagggcgaagaagactgagggtgaactctttgagaccgagaaggaggcaaccaagaacctgcctgacttcaagaaggatgaccagaaggccattgacgccgagttggtcaaggctatcgaggctgtcccagaacttaaaaactatctcggtgcccggttctcgctcagggacggtgacaagccccatgagatgaccttctaagttacaagttctgagtctgtggaagtgtttgcgtagct

SEQ ID NO: 2547 - DNA, 817 bp, Avena sativa
cccaaggactgggcccgtcccatcgcacggatcgcggccgacggcgccgccgacctcgtggaccacgccgtggcgcgcgccttcgggcaatgccactcctccaattacctgcgcattcaggcgaaacgggagaacatgccgccgtgcgggccggacggggagtacgacccgacgccgtcaaacgtgcaggcgctgctcgcggcggccgacgagacgatgaagcagcgcaacgtcgagtcggtgctcttcgaggggcggcggatcggtgagcagaccaacgcggagaagctggagtggttcgcggccgagctcgtcgccgagcaccgcggtaggggctcccggatcgcgcccacggtcgcgttcaagcagtcgccgcggaagcagccggcgctgggctgagctctactggtggccgtggaggaaggatcgacatgtaggcctctcttgcttcctgctgctctggtgggaattctgctgcactttttacgtggcagtgtcagcgtggcatggctccgtgaagcaattgccagtcggataattcgaaggggaaaatatatgaatggaactagggaacaatccgcgatatactctgtttttaaagcttcatttcaactttttaggatagatatgcagctactcccttgcagaatcatgccatgactaacgtgggtgtttgagctgcgatataatctgccgaaaatcagtggatacaactgcgggtaataaaaactgcttttctgagttgcaactcaggaacaaagcatgtttatgccttgtctcaacataaataaattatcaatgacatgcagattttcaa

SEQ ID NO: 2548 - DNA, 624 bp, Avena sativa
tgagcagcatatatttaacaacatacaagcaggtaaagttcctccttttctttttcctttgttagtaagtagtctaaactaagtctacctctttaacaacctgaacgatggcatgtcccgaacgcttgaaatgccttcgatcgtgagctcttgctctaactgaactactgtggacttcagaacttcgttgaattccatataagtagctctcctcgcgagccattgagcatcaagcatctgaaaagctacgcagaaaaggttatcgaaagccatctcgtcatcttcaagtagttgaacaaagcaagtacttgcttttgaactcctatttcctgattgcaaatccagcatttgaactaacgtataagatacgttcacgccagctaccgcaaaaggatattcccattcagctctctcaccatctgccttacgtaatagcctatgaaaggaatctgggtaatttctggcaaagtatattagattttccaaggacatgaaaccccctgccctaaaaatctgttgctgggtcagagttctgccagcccatctccttccacagatctgatttcagaggaggaagttgtcgattaggatatgccaacctccaaagttctttcagagcatcct

SEQ ID NO: 2549 - DNA, 739 bp, Avena sativa
ggagatcattgtagcaccttcaatgagtgagggtttccgcagcattgttcagacgatggggctaggtaacttgaagccaaatatcgttgtggtgcggtaccctgagatctggcgccgtgagaatctgacagagataccatcaacatttgtcagtatcataaatgattgcatcattgctaacaaggcagttgttattgtgaagggccttgatgagtggcctaatgagttccagagacagtatgggactattgacctctactggattgtgagagatggaggactgatgcttcttctgtctcagctcctgctcacgaaagagacctttgagagctgcaagatccaagtcttttgcatagctgaagaggacactgatgctgaagagctgaagactgatgtcaaaaagttcttgtatgatcttaggatgcatgcggaggtcatagtcgtgactatgaaatcatgggaatctcacttggagagcagtagcagtggtgctcagccagatgattcccaagaggcttacactagtgcacagcaaaggatcagcacatacctttcggagatgaaggaaaccacacaaagagaagggcggccacaaatggagcatgggaagcaagttgttgtgaacgaacaaaaggtcgataaattcctctatacaatgttgaagttgaactccaygatactcaggtactccagaatggcagctgtggtgctagtgagcctccctccaccaccgctgaat

SEQ ID NO: 2550 - DNA, 563 bp, Avena sativa
gcgctctccggtgcgcacaccgtcgggatggccaactgcatgcactacagggaccgcgtctacggtaccagcaacaccaagtacaacattgatccctccttcgcggagtccaggagacagttgtgcccgccgcaaggtccgatcggtgacgccggcaaggcgccgttcgacgtgacgacgcccatgaagtttgacaacgcttactaccgggaccttatcgcgcatcagggtctcctcaactccgaccaggctctctacggtggtggaggcgtggacaacctcgtggagatgtacggtaccgatggtgatgcttttgggagggactttgccaaggccatggtgaagatggggaacatacctccgccaaagggaatgcccatggaggtgaggctccagtgctcgaaggcaaactaatgatggctacatgcataacaaagtggatgctacccccaattatattgaattatttatcaaatgtccatattataacaagtaaactgtacttgtaacaagtgtcgtatgtaatgttggcataaaatgatccgatacatgttgtaggtaaa

SEQ ID NO: 2551 - DNA, 957 bp, Avena sativa
ggctgactatgttaactcaatgagagctgctcgggacttcagttctcaaatgtccaaagatttacagatgcaaatcttcccatattcagtattctatatattctttgagcaatatctcagcgtatggaagacagctatcatgaatatatgtgtttgccttggtacagtatttattgtttgcttcatagtcaccagcagtttatgggcttcagcaatcattttaattgttctggccatgatagtcttggatttgatgggagtgatggctgtccttggaattcagctcaatgcaatttctattgtaaaccttgttatgtcaataggaatatctgttgaattctgtgttcacatcacacatgcttttatgataggcattggggatagagaaaaccgtgcaagacaggctctatcgacgatgggtgcttctgtattcagtggaatcacgttgactaaacttgtcggagttattgtcctgcattttgcgaaatctgaagtttttgtggtatattacttccaaatgtacctggtgctcgtcctcgttggctttctgcatgggcttatcttcctaccggttgtgttgagtctgtgtggccctcctcaaaagaccatgaaaccgattgaacaaagtcagactctgccctcaaacgagcaaacttaataactacataagcatttcaatgtacatattactaggcgtagaaggagaagtgcagtgtacatcatgtctagaggcggaagcaatctccatagatggtagaaatagtttgtgcattagttgagctaagtctacggaagtacggaagtggattgtcctgaggcctgtatcgccaggcgcagaaggaagggtgagaggtcagtgtttgaccagtgtagcctttcattcttttttacggttattattagtagtccagtgtagccggtggtttgtatctgttccagcgagattctagtgcccgt

SEQ ID NO: 2552 - DNA, 687 bp, Avena sativa
gttctggtgactgggttattggtgggaagaaggccactgagaatgggagtgggaagaaggccatggagaatgggaatgcgaagaagagagatagggacagggaagatagagttgaggagagggattcgagctctcgacagaagagatctggtgatcatagggcagagagggaggttaaagagaaagaaagaaatgctcgagatagacgagagggcgagagtagtcgtgatgttggtaacaaagttcggtggttacagagcaatatcagggttagagtggttactaagaggctcagcaaaaggctgtacttgcagaagggcaaaattgttgatgtcgtgggaccgacaacatgtgatataatgatggaggatgggtcagagctggtgcagggggtcgagcaggatatgcttgaaacagtcctgccacggactaatgggcgagtgcttgtgctctgtgggaagcacaagggggtgtatgggcatctggtagagaagaatgcagaggctgaaactggattggtggaggatgcagatacaaaaggcatgatacgggtgaactatgatcagattgccgagtatgttggggatccagaattgcttggacattgattatttcttgtccttgagcagtggacatctgtttaccaggggctcttctactgtgctaggtaatattctgttccttact

SEQ ID NO: 2553 - DNA, 556 bp, Avena sativa
ggtagctctatggtagtagtggacaaggtaggagaaggaagatgcatccaaactggatgttgaagaagacaagaaaactgttgttgaggaaccacatcctagcgctggagaagatgcggtgaaagaaggggtaaagcatgagacgagtgactcaagcaaggatagcgactactccatggtttctagacagcgaacagcgaccgaggacgaccttgaatgggacgagattgaggatcttggggagcatgaagagaagaaggggagtgctcatggctctagtcctgctccaaaggaggagttacgtaagaggctcagcgttgctgaagatgacgaggatttgagttgggacattgaggatgatgatgataaggcctgagaagccatcctggtacgatagtgtcgattgtattgtctactattttttattatttctattacttgtgcaagatactgtcatgtgaccaataagtattggtttatagctgtgctgcttatgttatcgatacacgtgtaaactcaagtttgatgttatcaagtggcatttggctatgcgtca

SEQ ID NO: 2554 - DNA, 660 bp, Avena sativa
ttttttctaagaaatttcagaattcagggtagatccctcttatagtttctactcaatactccgtgtgcaaaacacgatagaatcaagatttacataattcaagctaggagacatatgtggtctttatggatgaggtactaggtaacaaggacaattcgagcaaggtgatatattgaacttcaaccagggttttttggacgacactatgtaagctaaatgacatcactttcaacaaaaataattttctaatctaaaagcaaattcagatgctaggtcgcgctcaaggaaaatccccagatactctcttgcataactttgtctagggtcacttttgctagctctaagatgttacacgctctgtttcaaactctgacattaaaaaggctccaatcatgattgctctgtttcaagcgctgccattgaaaaggttccaatcatgaacattgaagttcatcactgcaagtctgaagacctccgacattggcaggcatccagcttgttccgcaggtaccgctggtccagctgcaactgcctgggcgctttcactcagagggtttatcaacagcggctcatatgcagtgataactacatcagttgctgcattcttgagacgtatgtttgccaagtaaagtcgaacaatgttctgtgcttctctgcctt

SEQ ID NO: 2555 - DNA, 693 bp, Avena sativa
gatctctccggcggcggcgcactcgtgatctcaagccaggcgcgtcacccgtcgtcgtcttcttcccggatccaccgccgctccactcaaccatgtcgaagaggaagaccagggagcccaaggaggagaacgtcacccttggaccggctgtccgtgaaggagagcatgtctttggtgttgctcacgtctttgcatccttcaatgacaccttcattcatgtgaccgacttgtctgggagggaaacccttgtgcgcatcaccggtgggatgaaggtcaaggctgatcgtgatgaatcctcaccttatgctgctatgcttgcttctcaggatgttgctgtacgttgcaaggagcttggcatcacggcactgcacattaagctccgtgccactggaggcaacaagaccaagactcctggacctggagctcagtctgctctcagggctcttgctcgttctgggatgaaaattgggcgcattgaggacgtgactccggttcccactgacagcacccgccggaagggtggaaggaggggaaggaggctgtagatgtgtcttcttcaggctatacctttcatctcctacagtggcaatcaagaacttactcctctgtgtcgtcatatagttcctatgtttatgaggagaagctttaattttgccatgttgaggatcatttgatgttagttgaacctatggt

SEQ ID NO: 2556 - DNA, 798 bp, Avena sativa
gtgttacactggagagtcttcggaaatctcttggtgttgtaccacaggatacggtacttttcaatgatacaattaagcataatatacaatatgggcggttatcagcaaatgatgaagaggtttatgatgctgctcgacgtgcttctatccatgatacaattatgaactttcccgacaagtatgacacagttgtgggagagcgtggattgaagttaagtgggggtgagaaacaacgagtgtcgattgctcgtgtattcttgaaggagccttccattctattatgtgatgaagctacaagcgcacttgatagcagtaccgaggcatcgattttgaattctctgatgtctttatctgtcgaccgtacgtcaatttttatcgctcaccgactcacaactgcatcgctatgcgacgagatcatcgtcttggagaatggaacagtagtggaacaaggaccacatgatcttcttctgtcaaagggcgggcgatatgcggaactgtggtcacagcagaacaacagtgaagccagcgatgtttctgctgtcagcttagaagtttgatagacccccatgcgttttcccctttccagggaaaatatacagccatagttgaatgaaagctgttttctcctgatctgtctttgtaaatgagtgactaagattttagatgaagtaacaaaattttacaagaggggaaaattcttccatttctaggagagccgagaggcaagttttcctatagaattatgtgacgatcctggcattgtccatgtcaatgtaacaagttttggtacgtgaaaaa

SEQ ID NO: 2557 - DNA, 713 bp, Avena sativa
gttatgctcctcaaggggcacctttgtcttatttgtttgctggttcgccttctgtcattgcaaatctctgggacgtctcagataaagatatcgatcgatttagtaaagcattgctcaattcatggttgcaagaaaattttgcagccgccaagaattgctctaaatgttgtccgctcacacaagaatttgagtccatgaccattgccatgaaggataatggcaggtcaagacgaaaaggcacacgaggtcagaagcagaaacagacagtagggatagatgacagtagtaactgctgtaattgcgggcacaggcgaatagcttcacatataagtgaagctaggcgtgcttgtaggcttccgcttatgatcggcgcatctcctgtttgttatggcgtgcctactgtcatcaagaagaagtaaatggttttctgctttaatgggaaataattggtgattgggtgctgcagctctggtctttgagccattgattacagttgcatgtcaccgacggaagtgccatgataggcatgtcattgcacaggctcaaatgtgctcatgacatgtttatgctgttgtttgtacttagcagcaaatgcagaactacaagatgatgctgagtggcacatgccctggatctgttcgttttactcgaggactggccctgtgattccgtccattcttatgagattcagtgctttgccacacaaggtagat

SEQ ID NO: 2558 - DNA, 722 bp, Avena sativa
gacgtggcggagtggcccggtaccaacacgctaggcgtgtccatgaaccgtgtcgacttcgcgcccggaggcaccaacccgccccacatccacccgcgcgccactgagatcggcatcgtgatgaaaggtgagctcctcgttggcatcatcggcagcctcgactccgggaacaagctctactccaaggtgttgcgtgcaggggagaccttcctcatcccccgcgggctcatgcacttccagttcaacgtcggcaagacggaggcatacatggtcgtgtcatttaacagccaaaatcccggtatcgtcttcgtgcctctcacggtcttcggttccaacccaccgatcccgacgcccgtactcaccaaggcgctccgtgtggacgccggggtcgtagaacttctcaagtccaagttcgcggatgggttttaacttgaattctaaaaccgtgaaatgatcaaattataataatacgaaataagcatggtagcaaaatttatcaattctcaccagaagtcgtgtacttaagcttctgtttaagttagcatcatgttgtgataagattgaataacctcgcggttcagatcccaggactagtgcgaggagtgtatttttcattgtttttcagacaccatgaccaggaccggtgcgaggattgtacttttattgttttcttctttgcattgaacgaaataaatatctatcattttcgtaatataaaaaaa

SEQ ID NO: 2559 - DNA, 666 bp, Avena sativa
ggggctcaaccagaccgacatggtcgtgctctccggtgggcactccatcggccgctcccactgcccctccatcgaccgtgtccagccgcccaacagcccctccccgtccatggaccccgcgctcgccgcgaagctgaaccagacctgcgacacgcccgacaacgccaccactacggtgccacaagatgatgtcaccgaaaacgacttggacatccagtactacaagaacgtgctatcaggtagggtgctcttcacctccgatgcggcgcttaattcgacagacacgcgcgagttggtgaagaggtacgccggtgacatttccggggcattggaatggtacctatacttcgcagaagcaatggtgaagatgggcaacatcggagtgaagactggaccacccaaaggcgagggcgagatcaggaacaagtgtgggttcgtcaaccctccaaaggccaactagttgacgattggccatcttgacgcttagaataatgttacttagtactagcacacacgtgctctttggtatggtgtggtgttccggaccttcttctcatagcttacttaatttcttttgtctaagggcatctactaaaacggagtaatgcgacagttacaggctgatttgatatggaaaagatcttacggaatgacatggcaatcact

SEQ ID NO: 2560 - DNA, 794 bp, Avena sativa
ccctccgcctcggcgccgccggccagcccacgcgcgcgcggtacacgcccatgctcaggaacccgcaccgctcctcgctctactacgtcaacgtgacggggctcagcgtgggccggtcccccgtgaaggtccccgcggggtcgttcgcgttcgacccgaacaccggcgccggcacggtgatcgactcggggaccgtgatcacgcggtggacggcgcccgtgtacgcggcgctgcgggaggagttccggcgccacgtggccgcgccgagcgggtacacgtcgctgggcgccttcgacacgtgcttcaacacggacgaggtggcggccggggcgcgccggcggtcacggtccacatggacgggggagtggacctggcgctgcccatggagaacacgctcatccacagcagcgccacgccgctcgcgtgcctggccatggcggaggcgccgcagaacgtgaacgccgtcgtcaacgtcgtcgccaacctgcagcagcagaacgtcagggtcgtcttcgacgtcgccaactcgcgcgtcggattcgcgcgggagtcctgcgactagaattagattagatcgcgcgagacgatcgagcttcacgtgttcgtcatgcagttagtttctcttgttaatttgtggcttgatgatttccattgtttgtcataaggaacttggcattaaagtttgtcagttgtcacgggtgcgtgtgttgcgttgtacgtgtcgacaggactagtgagtgattcagaactttttaatggtgtgattatgtgcggtgattattatgttcaaaaaa

SEQ ID NO: 2561 - DNA, 845 bp, Avena sativa
gctgcgtttgctagactagggatatcaccagttcgtggtgtgcttttacatggtcctccagggtgctcaaagaccacccttgccaaggctgcagcacatgctgcccaagcttctttcttttctttgagtggtgcagaactatactcgaagtatgttggagaaggtgaagctttgttgcgaagaacattccagagggcacgtctatctgctccaagcattatattttttgatgaggctgatgcaattgcccctaaaagaactggtcctgatggggacagtggcaatgccacagtaggagaaagactcctatcaacttttgttgactgaaatggatggtttggaactggctacggggattattgttttggctgctactaatcgtcccaaggcaatcgatgcagctcttctccgtccagggcgatttgatatggtgttgtatgttccgccaccagatgcccaaggtcggcacgagatattacgcatcaaaacaagacaagatgaagttgggagaggatgtggaccttgggaatatagcggagtgcactgagctgttcactggtgctgatctcgaaagcctgtgcagggaagcaggaatgctggcactgagggaagatctcacggcaagttcaatacacaaatctcactttgagaccgcagtaaggtcgctaaagccaacactgacaaaaagcagaagttgatgagtatgcagctgcagccatccatggtccatcaacgacaagacattaaaacatgttatatctatttagacgatgtcatccttggataatgcagttgctgggcgttggatgatacagacctgcttatgatgttcaagttattctggt

SEQ ID NO: 2562 - DNA, 614 bp, Avena sativa
cgacgcctcggcttctcgccgctgccgatgatacctatctgggtgcagatggtgcttggaggcatggtctacacggccgtgccgttctacaagagggccaggcagatcgaagacgaggcgatcgaaaacgtggaaactgctttggatgttttggagcatgccgccgaggtgacggagaagctggctgctaatgtggccagttccctgccggaggatggttcgctgcacaaggtggctgaggagattgagtacattgctgaggtggtggataaggatgcacagaaggttgaagtcatcattaagaagattgaaatgatcagcgaccagatcgacgcggcagtggagcctgtcatcgaacagctcgagaaggagttcaagccaagcccagcatccgacgtcggatcagatgcccagaaatgacccctcatattcgcccccctctcccccagttgtaaatattgttgtttctttctttcgttgatctgaatgccaacgtgtagatatgttcgttgtgccctatgaactagaagtgtcccatggttacagtaagacatggtgatgtgctggccgcttggtgctcgaatctgaagcactctaaaatcctgatagcaata

SEQ ID NO: 2563 - DNA, 810 bp, Avena sativa
cggtgtacgggcccaggccggggaccaggaaggggagaaccccgagaaggcctccatcgaggtcgtctggaagcccaacaccaccacctctgtcattcttcaggttatgggtgatgacggttctcttcttccatgcgcaattaatgcatcctgtgctgcccttgcttttgctggcgtgcccttgaaacatcttgctgttgcgattggctgcggggtgttggagaatggtgatgtgattttggacacaagcaaggcagaagagcagcaactgaaatcgtttgctcacttggtgttccccaactcaagcaagtctgtcgatttgaaagaaccacagcagaaagacggtgactctgaacgaggcttgataacttcgatcacacatggagtgatgtccgaggacgattacttcaactgcatagagaggggtcttgccgcatcctcgcgcatctctgatttcctgaggacaaccttgcagaagcatacacccgactatctatgagaaccatcgtaacctggtgccaggcagcggcagatcatcatgatgtgatcatattacctttaggacgtcaatggacggtccatgaatcgctttggggtggagagctgggtgtgcgggtgcaaatttgtatgaaagatgtagttctactccgttttgaattctgatcagtggattagtgaggagaacttgtgtatgtcctctttttacctagttatattgttaaccgtgttgtaaaaccttgtggcttacggtattcatatcatctggttggtaacataaattgtttgatgacaatgagagtgctacttgtg

SEQ ID NO: 2564 - DNA, 574 bp, Avena sativa
ccacggaggacgttgacggcgagtcccacgacgccggcgtgcgcgtcgtgcagagcttctcgacggacaacagcaccgccgactcggtgggcgccttccggagtgacacgccagtcagcagcctgtccaccacggagtcccccgcagcggccgtcccggccactccgcagtccaacccgtcggagcagtcaggaaacgcgctctcgtcagcagcagggcacaaggagaaggcctcggacgcggcggaggtcgattcgtcccacactgttcaggagagccaggcggtgaactcacctggcaccatgtctgagagcgcggtggacaagccgccggctatgagtttcaatttcgagcaggaggtacaggtgaaccagaaggagatcatggatatgtacatgaagagcatgcagcagttcaccgaatcgctggccaagatgaaacttccgttggacatggacaacggcagcgacaagagcgccaacggcgccgcctccgccgccgccacttcgcccgcggactcgagcggcaccgactccagcgcgacgacgaagaaccacggcgcaggacaatctcc

SEQ ID NO: 2565 - DNA, 1017 bp, Avena sativa
ttcccgggagagagaagaagcggacgccagcggggaacgggagcaaatccgctgaggaaccaggcgctgtcgccctcatcccctccgatttcgtttcgggcgcgccgccgccgcagcaggcgcaggaatgtctccattctaccttgcgcgcggggcttccaaggtgttaagaaggatcacctctgagacgtctgtcgagctcaagatcctctccgaaaaatggcagctcctcctcgcgggcattgtcttccagtacattcatggtttggcagcacgaggggtccattatttacaccggccaggacccattcttcaagatgtcggtttcatgattcttccggagcttggaaaagaaaggggctacatcagtgagacattgtttacgctcatcttcgtctcctttgcgttgtggacatttcatcctttcatccttcaaaccaagcgcttctatactgttcttatttggcgcagagtgctcgctttcttatgtgcttctcaattcttacggatagtgacgttctattctacacaacttccagggccaaactatcattgccgtgagggttcacctcttgccagactaccacctcctcaaaatgcagctgaggtgtttctcattaatttcccaagaggtgtaatttatggatgtggcgacttgattttttcatcacacatgatctttactctggtctttatcataacataccagaaatatgggagtataaggtttataaaggtgcttgcatggtgcatcgctgttgctcagagccttcttatagtagcttctcgcaagcactacagtgttgatgttgttgttgcatggtatacagtgaatcttgttgtcttctttgtggacaaaaaacttacagaacttcctgatcgatcagcaggatcagcatcagtactacctatgagcgtgaaagacaaagacagcaagttgaaagaagaaaacaccaggctgctgattgttaactctgttgatgctgctgatcggagaccacggacacaaatgaatgg

SEQ ID NO: 2566 - DNA, 785 bp, Avena sativa
ggagagctgctgttactatttattttctaggttctctttttgttgtagtttcggctcgaagtgttgattacttttgtctgttgtgaatacatttctgaatctgctactactatcgacattctacacacaattaatgtaaaatattttgcttagatagagcgttagtttctacaaaccacaatgttttttgtagctgattcttgcccccgagccatcacggtactttatgactattgttgatacttggcagataagagcatcgcgaaagggaagctggtggtagatgtcacgtacttcattttccacgtccacacggagactcatgacttctgcagtgggactcattgtcccgcaaccggagaattcgtgctagccagcgagcagactctgccgtctttcaccccaccgggttcttacactctccaaatgaagcttctgggagagaagaacgaggaactgacctgcatctcattcgggttcagcatcgggttcgtcgtccctgacgcctttagctgcccacggttatatgtattttaactaacgtagtatctgcagaataaactctgaatcccactgggcactcagaatagtcacagtggggagtaccgtatggtagtatcatgcatatgatactagtatatgataccatctccataatgtatagtagcatcatagttttagtgcatttattgttttgtagaatctcaatgtaaaattgtgtacaagatttatttgggattattttttcttgttttatgtactatgatatcgtagctatgatacca

SEQ ID NO: 2567 - DNA, 621 bp, Avena sativa
  modified_base (613)..(613): a, c, t, g, unknown or other
ggaaaagttcctgctaggacttcctggccagaatatcagataacaattgaccatgaagctgcttcggattctgatagtaatgatgaaagcaagtcaaagtccttggtgatgcaaaaacatggtaaaccagatgatttgatgcagtcgtggatggatcaattcgaggctgatgctgacaatcaatgttgggcatactttcaagagcggatctcaagagcaccgcagcaagtattgagatactgtcgagagtcaaatgcaaagcctctgtgggccttgtcagctgggcgtccatcttctgctgatatcccttcatgtccctactgtaaaggtccactatgctatgaatttcagataatgccacaattgctgtacttctttggtgtgaaaaatgaaccagactctcttgattgggcaacgattgttgtgtacacatgtcaaggatcatgtgaccaaaacattagctacaaggaagaatttgcatgggttcagttataccctacaacaatcacacggccttagtaatgtttacatgctccacagagtaaagtttgttcttcgctgctgcagggaccttgaagggatcatctatgtgcatttcaacatgaagcatgtnttccaagc

SEQ ID NO: 2568 - DNA, 738 bp, Avena sativa
cggcactcctccgtctgctccgtcgtcaacgcgcgccactccgactacttcgaccccgggccccgccgccgccgccgccgcagcgagacgcgtacgggcaaccccctccagcgccgacgccaggggcccagagcgggagggtgttcgccagctacagcatctacaagggcaaggcggctctggccttcgacccgaggccgccgcagttcgtgccgctcgaatctggggcgcacaaggtggccaaggaggggttcgtgttgctccagttcgcccccgccgtggcggctcggcagtatgactggactcgcaagcaggtgttctcattatctgtgtgggagatgggaaccttgcttactcttggtccaacagattcgtgcgagttctttcatgaccctttcaaggggaggagcgacgaaggtaaagtgcgaaaggttctaaaggttgagccaacaccggatggcaacggtcgctttttcaacctcagtgttcaaaaccgccttttgaacgttgatgagagcatttacatccccataaccagaggagaatatgcggtcattgtatcgactttcaattacatcataccgcacatcatgggatggagcatgtttacaaattctataaagcccgaggattcacagcaatacagcaggcctcagtcgtcgcctgaacttgagtggcggaggtgacagatgataatgcctttgacggaaatggcaacaaggctggcactttcggtgg

SEQ ID NO: 2569 - DNA, 588 bp, Avena sativa
  modified_base (29)..(29): a, c, t, g, unknown or other
gaaatagccatcaaggactagtgctgaanaagggcgatctatttgagattaagggaactgacacttcacaggctgatgtggagatagattttgagctgacatccattgaaagcgctgatcctttcgattcttcctggcttttggatgttgaaaagcattgccgggaagcaggtgcttcagttgatggtggcatagggccgtttggacttgttgtcttggcatctgacaacatggaggagcacactgctgtgcacttcagagtctacaaatcacagaaaagctacatgatcctcatgtgctctgatctaagaaggtcttctctgagaccaggactgtacacaccagcctatggcggtttctttgagtttgaccttgaaaaggaaagaaagatatctctgagaactctgattgatcggtcggcggtggagagcttcggaggcggtggcagggtctgcatcatggcaagagtttatccggtggcgcttgttgacgatggcgggacccacatgtatgccttcaacaatggtagtacaacggtcggagtgcctcagctcagggcatggagcatgaggaaagcacaagtgaatg

SEQ ID NO: 2570 - DNA, 766 bp, Avena sativa
gttgaacttgatgatagctcatgtagcttcaagaattattttgggcaccataagtcagcacgtgatcttgagaagtatcctgattggtggagtgatgatcagaaaaaaaagctatatatatatgatcctgagtggagataaagtggcaatgggcaatgcaatcactctttcaaaggttgattggccgtgggacccttactcccaaaaacctcgcacaagggcaataccgattgtagaagacatatgcaatcatgctgccatgctccagtttccaacatattatgattatgaccattggagctacattcagatgtgtcggaatcttttaaagagttttgaaatgccaaataaatggatgaatgctatcccagaccgtgatgcgtttctaaggacgatggagacgtggaatccaaaaatgtggacatccttgtatgaaaagatcggtcctttggaaggtgataaactgtaacttctaaatctaagatgaagagcactgtcagtagacaacatgtcttgctgccctattatctggttatagctgtatgaaatgagtttctcttcgtccggtgggcgatctggaagagtaatagtgttgccgatctatgttatctgagatatgccccatctgtgttatctaagttaaaatcccatctatgttatctaagttatgaaccaaccatgtatctatctatgttattagtatttcagaactgatgcagcacaatggttgtggaggaacaactccaccttgctgctataacaaaga

SEQ ID NO: 2571 - DNA, 942 bp, Avena sativa
acagcgatgtgctattgaggcaaagaagcgccgccatcttagtcccaagtcagttgatgctttcctggaggagctaataataaggagggagctagctgacaacttctgctattaccagcctcactacgatactttaactggtgcttgggagtgggctaggaaaacactccaggatcacgcttctgacaaaagggagcacatttacacgagggagcagcttgagagtgcaaaaacagctgatcttctctggaatgcatcacagctggagatggtccaccatggaaaaatgcatggattcatgcgaatgtattgggccaaaaaaattctagaatggaccagtgggcctgaagaagcactttcgatagcaatatatttaaatgacaagtatcatatagatggcagggaccccaatggatacgtgggttgcatgtggtctatatgtggcctccatgatcagggttggaaggagcgtccgatatttgggaagatacgttacatgaactacgctggttgcaagagaaaattcgacgtggatgcttacatatcatatgtcaaaagattggttgctcaatccaagaaaaggaaactagacgaatctctggattcagcagcagcagctaagtacgcaaagtctgagaaggactagtccagccactaacagtagttcagtatagattacaaatctggtctagtagagtagtaattaatgacctttttgccctttttgctgtgtgcgttttcctaaaatctggtatagttagaataggtctatacaggttttgcaattcagaccatttttacattcacttgacattcttgtaatttctattggtaaagttttggtaatactcactcggttcgctatagtgtacggagggaggaagtactccctccgttcagaaaaagaagatattctagctttgtgaaatgaatatatctaga

SEQ ID NO: 2572 - DNA, 526 bp, Avena sativa
ctggagatcatcaacaacgagggcggcagcgtcgacgagccgcgcccccggtgatgatcctcgacacgggcgcccgcggtgccccgacgctgcgctccttcccgcacgtcctctacgtcgattgcgagggtgccgccgatgacccgctcgtccgcgaggctatcaaggagatcgagaaattcgccgtgttcgtccggattcttggttgctacgccgccgataccaacgtctacgatctgcaatgaggacaacattgatgcatcgccgtcacacaattgaagtgatcgaattagctattcgtacacaattggatctgaattggactcggaaaatatccatctaatccaatcactactcaagcatcttctgtgggaacgaagcttgcttttgctgctcagctgctgctacttaaagtttgtacagatgcaacaataactttccagacctgatttagctctgtgcatakgtgtaagattgcttctagtgcctagtaaccaaaggatgtgtaattttgtttgtgctacta

SEQ ID NO: 2573 - DNA, 953 bp, Avena sativa
catgagtaaatggctggtggctggttcttttgtttttgcagctctctggaaacgtgatgctgaaattatgtgggctttgatgggtgcggttgtgaacacggtgctctcgtcaattcttaaaagatgttcaatcatgaaaggccagcaccagctttgcgatctgatcctgggtatgccatcgtcccatgcccaatccattttctatgctgcagtgtttctagttcttgcagtgttctactggcttgggacaaattatctggcaatgattcttggagccacgactatagcatcggcctcctacctatcatggttaagggtgtcgcagcgtctccacacgctgaaccagattctcgtgggtgctacagtaggatcagccttcggtgctctgtggtttgcgctctggcatttgcttgtacaagaagcgtttgattcctcgctgtgggtccaagttccggtcattcttggcacagtagcgttctgtgtcggcttcgtcatccacatcattcgccactggctcaaggatgaatagcgatacatatagctgcagttggtttatggaggctggagccaagctgccacggaaggtttactccacattctctctgggaattattcacggaaaggaactcgcgtgatggttcaaaagcctacaaagcagaacacggagccattttcctttaggactgtagaccgttggttcgtgcaacatatctaacaattggtgctcggctcgttcattcatggtcccttttcatggaagtagttgatgttaaagctattctttctggaaatgacggtaaaagaaacaattcctgagcatgagagattttgtgagcagaatgcattgaggtgtactctctcttttactgaattatgatcagatttctttgtgagtgcaaatccttcatccttgccagatcgcacgcacacttatagtacgcttgtaaactcgt

SEQ ID NO: 2574 - DNA, 810 bp, Avena sativa
tttgctgctgtggctgtaatacctattcttggtgatgcttctagccgataccaaataaatgaatcagatcttcgaatagaacgctttcgttctggtggacctggtggccagcatgccaacaccacagaaagcgctgttagaattgtgcacatcccaactggtacaactgcaacttgtcaaaatgaaagatcacaacatatgaatagggcatcggcaatggcagtgctccaatctaggttggaccagcttgagattacccgtcaagcacagatgaatgcagagcacacacaatcactcaatgaaataagctggggcaaccaaataagatcctatgtgctccatccataccgtatggtcaaagatctccggacaaactatgaagtgtctgatcctgattcagtcctggaaggcgacctagacgattttattctgaactttttgtcattatcactggataaagctgatgaaagtgtctgaagacaaaccgtgcttattatttattgttagcaccaacagaatattgatagtgtccagctgatagcaggaagggctattgttttctttactacactgacaaatacaacagatatgtcaagtgacaaaaggtgcggaataattgtcaagctagttccgtaggatgaatgttatagtctgcattagtttcctgcttgtcagcctggcacgtcggtgtgatatcaaacctgctaggttgggttaggtaatccaccattgttcatattttttattttattgatacttacttgtcattttccatgcaaacatactgtattacaattacaagatggtact

SEQ ID NO: 2575 - DNA, 674 bp, Avena sativa
gacatggtccctgcctttgatgtacttgggaaaaagtcgttcttcttgggggagattggaaatggagcaaagatgaaactggtggtcaacatgatcatgggaagtacgatgaatgccttttctgagggactctgtttggcggacaaaagtgggttgagcccccagacgcttcttgatgtcctggaccttggcgcggtcgcaaatccgatgttcaagatgaaagggccttcaatgctgcagggcagctacaatcctgcatttcccctcaagcatcagcagaaggatatgaggttggctctttccctgggagatgaaaatgctgtggccatgccagtcgccgctgctgcgaatgaggcattcaagaaagcaagaagtttgggactaggggacctggatttttccgcggtgcacgaggtgttgaaaggtgcaggtggttcaggccaagcgtgatggaggtgttttttctggaagtctgaatgtttaaaactgtattccatggccatgcagatatttcaaagcgacatgtaattcgttcaacccgtatggcttatcatatattggtgtgtgtacattggacagcatgtgccggattgcatgttatagttgcaagtttccaaatatcagcttgtgcatgaatgaacaattgggatttgggacttggttgacaaaaaaaa

SEQ ID NO: 2576 - DNA, 696 bp, Avena sativa
atcgagtgcatccgtatcggtggtgttgaagattccaaaccacaagagggtggagtactcgctgcagtacatccacggcattggacggacgcgctcccgtcagatccttctggacctcagcttcgacaacaaggtcaccaaggacctctcggaggaggaggtcatcaccctccgtaaggaggtcactaagtacatgatcgagggagaccttaaacggttcaaccgtgtggcgatcgagaggatgaaggagatcaggtgctacaagggcatccggcacaagctcgggctcccggtccgtggccagaggacaaagaacaactgcaggactctcaaggggaagagggctccagttgccaagaagaagtcagctggatccgaggaataagcggcactgccatgttatttacctcagcgttttagtttttgtgtgcactgcgttaccggtcggttactccatttcgagttgccatgctgtctgaagaattacggggatatatggatattatgttgcgctgctgcaaagtctatggtcatgtcatctcttctcttacgtccatggacgccaaatcatcaagattacatgcgttgttcgtgccaagcaatttttttcttacacgtctctagtctagtcatatctgtgcttcatgctactgatggattagcttatttagcaccagtgctctgcgactttttcaa

SEQ ID NO: 2577 - DNA, 776 bp, Avena sativa
gtcgctgatgggtacagagtagtataataaacattgacattttcttcggttttaattgagttgatgagaaagaagtaactttgatcttccgcagctacaatacatgcaaatggatgttagggatatgagtaaatttcctgatgaatcatttgattctgccattgacaaaggtactttggactctttgatgtgtggtgtggaggctcctctcagcgcagctcagatggtcctggaagtggacaggcttcttaaaccagggggagtttttatgttgataacttatggtgatccatcagcacgaattcctcacttgaaccaaccagtatgcaattgggaaattatactgtacattctgccaagacctggattcaagggaaaggcaagaaggtctgtctttgatcctgttccactgacggagaatggtagactgcctgacggctatattccggaggatcccgactctcattatatttatgtctgcaaaaaggtgcatggattacagggataggttctccaaccttaaaccacttagagatgcaagattcagagtgagatgtaggaagattcatctcgcaaaatttgtgcattggtgtgatatttacaagatcaaaccgcgtgatgttgccaccattatggccatccaaagatagaaactgtgcctttgcacgtgtaaacatttttcagtgatcttgtaagaatcagcatgtcattatattgtgttacactggttgttatgtcgtgtgctgaagggagcacatgattgtttggctacaaaa

SEQ ID NO: 2578 - DNA, 568 bp, Avena sativa
cgttgccgtcggcgaccaccacgtgtgcgtcgggttccacgacgagaccggcggggagtaccgcgtctgggagtggcacggccacgtcatgctcttcgacgacgaggacggctactccgcggagtacatctacgggaaccacttcgagccgctcgctgccgccaccgccagagccaagaagaaggaaaaggagaagagagagaaggacctgacctcgggcctccgggatttgattgtgggcgatggggacagttctaatggcttgaagttgagtggcaatggcggagggcacagggtggtgcgcaggaacgtcgtgaatgcccccgcagcgcctgcaaggtaatgatttctagcagttgcaccggcctgctcccaagtgatgcatccatcaatctgaaaggcagagccaataatcttcttttccccaatgcttgtttaagcattctcctatgatccaaggctctgtaattcacttttggcatgatatatacaatgtatccactgggccttgagatggagtatttattcaatagtcaacatatatgctgtttttcagttaatctgtctt

SEQ ID NO: 2579 - DNA, 827 bp, Avena sativa
ccgcgccacccagctcgacatcgaggcgtcattccgcctcgacgcctccgctgtcgccgccgtcaacgaggccgacgtcggctacaactgcagcaccagcggcggctccgccaaccgcggcgctctcggtcccattcggcctcctcgtcctcgccgatggcaaggaggagcaaacagcagtgtacttctacgtgtctaggggtctcgacgggaccctccagacccacttctgccaggacgagtcgcggtcaacgctggcccaggatgttgtgaagcgtgttgtcggctacaccgtgccggtgctcgacggcgaggccttttccctcagggtccttgtggaccactccatcgtagagagcttcgcgatgggcgggaggtcaactgccacatcacgggtgtaccctaccgaggccatatatgccgccgccggtgcgtaccttttcaacaacgccaccagcggcaccgtcaccgtcgagaagctcatcgtgcacgagatggactcatcctacaaccagattttcatgtccgaggacttgtaggctgccatcgaccacgtgcatggacgggtaactatatatgcatgatcacctctactacatatacatactactgataggccgatcactggattggtcggcagcggcttcctcttctcctcaatgcggaaggagatggagtactagttaatcatcatgttgttgttttgttgggatttgggggtttgatgagatggttgaattagctatagatggacgattgtgtcctattatctcctgccttccaagtgtaactatacagatatattggcagggtcattatactcctgc

SEQ ID NO: 2580 - DNA, 772 bp, Avena sativa
gatatcagggatggctactctaactctcatcgaacgtcaagttgttaatacgatacagaacagattcgtactgactactcaattgtctgtggaggggcctatcaggatgaaagaggaatacgttgagggattttagagaccccaaaatcagtgaggaaacactacctgaacaactgaagggctttcttggacagactgcaggagctctacaacaacttccggcccccataagggatgctgtttcagagggtgttaagttacctcttaacgggatgttccagcgcttattcatgatttctacctggatgaagaatattgattatcagagatgccgctggagcacctgatgtccttaccaagctggaaggtccgcaaccaaatccaatggacaacgcaccggatgtagtggttccagaatatcaaagctagtgtttgggtactgactggagaattacgattaactttcggaggaattattttctgccacgccattttgtaggtttgcacgtgcatgaaaactgtagtgcgtgttagcactcatttgagtgtgtgattaagcttacttaagctccccctctgttactggctagagtagatactgcacgctgttcttgagctgagaaatactctattatggccatcaagcactgaaataagatgagaagataaatctgcaaaatggggagctaatagctttgggagcaaaccggcaccagttctccactgtaaattttggttgatatgattccagtacccagcttaggaaacgaaa

SEQ ID NO: 2581 - DNA, 723 bp, Avena sativa
acgcagatgcagatgctgttaccaagtctatcgtcaatggcaagactgatgctgtaccgaaagccaagacagcgccacaggtggaggaagagactggtgacgatggacctgatccagtttctgtgtacgaaccggactctgtaatagaagagccagaagatgcattggtggacgactttgttgttttagatgatgaatccgatccactggataccgatgagctactactagctgatgagcccaatgagtacgtggaacatttggaaatctctgatgttacagatagcatcgtatctgatgataacagtctggaaagctctcctgcagaagtttctgatctaagctcgctgaaggtcacagagctaagagagctggcgaaatctcgagggctcagaggctactcaaagatgaagaaaagtgagctggtggccgtactgagcgaaactgcctgatcgattggcatagccctcctgcccgggagcccacggttttgcttccctctgccatggccatgtgcacaacctctccgttcctattttgccaagaccaggtccttttagatagggtgatgtaaattagcaagggtaactcttttctttttggtttatcgctgattttgtgctggccccttttgcctccctagttttttagttaattagctgaactctgttagagctaagtatgctgtaaggccgtttgtttctgtgttgtagcactgctgtt

SEQ ID NO: 2582 - DNA, 807 bp, Avena sativa
cgaagattcagtgagggtactagtgcagatcgtgaaatccaacggacattgatggagctcctaaatcagttagatggttttgatgagcttgggaaggtcaagatgattatggcgaccaaccggcctgatgtcttggatcctgcactccttcgtcctggacgcttggaccgaaagatagagattccattgccgaatgagcaatccaggacggaggtcctgaaaatccacgcagctggtatcgccaagcatggcgaaattgattatgaggccattgttaaactcgctgagggcttcaatggtgctgatatgcgcaatgtgtgcactgaggctggtatggctgccatccgggcagagcgtgactacgtcatccacgaggactttatgaaggcggtgcggaagttgaatgacgccaagaagctcgagtctagcgcacactacagcgcagacttcggcaaagaataagtgatgctgatcttagtaggagcatgtaggcgatccactgaacgttctcttgtaccaaggcggagtttgtcatcccgacaatggcagactgcatatgctttgggatgtctgcccttgccgcacaagtcgtctcagctaagttgaaaaaacaggttcatgtacacgccggttcagtctgaaaccggcctccttgagatatagctattcttgaatttacaacgtttgctttctcctagttacttggaatcaagaaaatgttggaaaaatgtaacaattgtgacttatgtttctgttctgttactctacctggagttaaggaatgtgtgcaaaaagtaaacaaaaaaa

SEQ ID NO: 2583 - DNA, 899 bp, Avena sativa
caaggatcgtatagctaaggcttctgatgtgctccaggtattgccattttaggaagatacagtgttattgactgataatacaaggaatttaattaagtgccttgcaaatgtagtcagtatcttcccaggtaaatgaagctttggaaaagcgacctatctctatccaacttaggggtctggtaagtttcctatggagttgaaaagatgttattattgaatatctgttgttagtatcttcattagaagcggatttgtacatgactagttagagtgctgtccaaataaaatttgaaccaaagagcagcatttctctctattctctagacacctcacagtactttttatggccctattgaatgtttggatgtttgtaaagaacttttgtggtgattcacatgaatattacatttcagacatgcatgaaaggctcaccagctagggcacgtgtggtatatgctccagtactggaagttggtggagaaggacgcctagtacgtgcctgcaaggtaataactgaagcctttgtcaagtcaggcctagttcttgaaagggacgcaagacaagaattgaggttgcacgcaaccataatgaacgtgcgccacaggaagagcaagaaacggaaccgaagaaacgattcgttcgacgctcggaatatattcagacagtacggggaacaggaatggggcgagtatccagttccggcggtccacctctcgcagaggttcaagttcgacgagagcggatactacctttgctgtagctcgattcccttgcccgaggccgaggcgactcaaacttagtgagctctccatctgtctcagcaatcggcatagcgcaaatacttaaaagctaggcagcgcctaataaagttcaatcaaatcttctgccagttaggacca

SEQ ID NO: 2584 - DNA, 497 bp, Avena sativa
agcctcacccaaagaatcaaatggtctagacacgatgtttactgactagagtactccattttcctccgtttctagacaagccccgggatgacgaggggctgacaaggtaaaatcgcaacaccgcaatttctcacctctggatcctttttcatcaagggagagcacgggtatcttttgttgtttcaacaagcatgcaagtgccactgcaacacatcccttccaagttgacgtgagaagtcatggacggtgattaaaaaaatattgctcagtgtggcgctgaaggcatagatccatgtttgctatgaattttttttgtgacatggattcagctttatgttctgaacaagatgtgtttcttgctactccatccgattcacgttacttgtcgttaaaatggatgtatctagcactgaaacatgtctagatacatccactttagtgacaagtaatatggatcggagggagtatatagtatatccaaattccttatttgaaaa

SEQ ID NO: 2585 - DNA, 690 bp, Avena sativa
agtccagcagcaggtctttgtcctgtctgtagaaaagtcaatgagcaagcaagatcttattaccgccccaactaatagtcgctttcaaattgacgtcgagaagaactgggtcgaatcttccaagatatcttttcttctacaggaactagaatctcttcgcagttcaggtgccaagagcatcgtgtttagccagtggactgcatttctagatctcttgcaaattccactttccaggcattgcttctcgtttactagactggatgggaccttaaatcttcagcagagagagaaagtaatcaatgagttttctaatgacaagagcattctggttttactaatgtccctgaaagccggtggtgttgggataaaccttactgctgcatctaatgcatttgtcatggacccttggtggaatcctgccgtggaagaacaagctgtcatgcgcatccatcgtattggtcaaacgaagagcgtttctatcaaaaggttcattgtcaagggtactgttgaggaacgaatggaagctgtgcaggctcgtaagcagcgaatgatctctggagcattgacggacgaagaattccgcacttcacgtctagagactgaagatgcttttctcttgaggaacacaagatttgctcacgagcattctatattcacatgtctccgtttgagacctaactgggatgctcg

SEQ ID NO: 2586 - DNA, 863 bp, Avena sativa
gactggtgcaccgtcatcaagtacaccatcagacgtggaggagacaggcggcacaacaagcagttctctttttgaggggacatggtatcggaagcattattggcatcagcatgaagccatcaaggagtctcgtgaacgacgacgagtcatcaagttcagacgataaaacatctgacgacgagggcgagccaggtgacaaacagccttctagcaatcagaacgcggaccaaaaggacgcagcacaagagcaggaccagaaaagtgagaacgaaccagaccatcatccatgaaggtccacaccaacgatgcgcggaaagaggagcaactttttccaaactgataagaattacacagccagcggtttacagcaattacacagccagcggtttacagcaacatatcctaacatcacgcagtcactgacattcacttccgatccagaaccggaagctgcgacgtggtcctgaggagcgccgaagcgaccgagtgcaccacaatgtgcgctatcctcagctttatctgcccgcgacgtggcatctgccgacctccgtttcgcctctcgcccttgtaggctccgatgagatcgccagcgctaactctctcgcccatgtcggtgaaggatatatcagcgagcctccttgcttgcttgcttgaacttatgcttaatgtttgcatcctctctggtctatttataaggcttcaagggacgagtttttatctggatgcgagacatgacagctaaatccttgttcctttgtcttacaagcagagggctgccactgtatctgaatgatgttcattttaatgtaaaccctgtatgtagtgtctgttggtacgagaggcttcttccgttccgttagaaa

SEQ ID NO: 2587 - DNA, 715 bp, Avena sativa
tttttcctactagacgtccagtaaaaattctcgatttttgctcttgccaatggaagcagcagtctcgattattttcgcaaccagcacaattgtactacagctttacatgtctccttatttcgtttcgttcccttttcacacactatgtgtctgtgtgacggtgcaaattacagacaaagacggcaacatacgtctcacaagccgaagtatgtatgaggttcgccttcacaatcagcggcgattcttgattcccaggccgccatgcctagccgagcaatggggaccagtctacttagaacccaatccctgaacatccaccaactggtaaaggtctccgcgtcgttgatgtcgcagagggataaattgccttctatgctcgatcaatgagtagtcgacctcggctattacagttgcttcatcatgctcggttgtcgcaatcacctcaccaaacggtccaacaagagtggaatgtccccaggcaacataacttgaagtagtatctcgagctggagcacaggtcgcaacaaaaagctggttgtcggtagcccttgcccgttgaagcaactcccagtgcaatggcccagtagtcatgttgaaagcaccaggatagcatagtaagtgagcacctcttgcagcatagagcattgccaattcctggaaacggatgtcatagcaaatgcctatgccaattcggcctacatctgtgtcatcccgg

SEQ ID NO: 2588 - DNA, 804 bp, Avena sativa
  modified_base (322)..(322): a, c, t, g, unknown or other
ggcacatcagacgacgttgtcgattggtcccatggaaaacagctatgggaactctgcaaggtgaaacattcacctttgtggctaagtggcggtgggcactgcaatcttgagctgtatcctgactacatcaggcacttgaagaaatttgtgtcaggccttggcaaaaaatcgaccaaacctgacctgaaagaggtaacagcaacagatcacacctctcaaaaagatgcagagcctgcatccttggaaaaaccccaagaagctgcaaagtgccgacagacctcgcggaagagcttagatagtagagttgggaaaatccaaaacngtagatgttcctgaaaagccagaatgagctctgatgatgttgacaagtttaggaggagaagatgcttggtttggtgatatttctgcacaattcatggagtagtttctgaataccatgacatgagaatcaagcaaactgtgtcacattgtatagcgaggatcagacaccagcagttccctcagtggagggataaccgctgttttaatatgagaaaaagaatcaggaagctgctgaataaagtggtcatttatcaaagaggtacatctgaacatggtagctttctcggttcattgacgtgtgtgcaattaacctgttttgcaacaccagttgcacacagtaggatttccatcatgtaaaagtgtacaattattgtctgtaatcactgagggagaaagttagaacatttgctgccactttgtgcagtctaaagtcttggtgcaatcacaagcaacatattctagcctcaatatgccaatatagtg

SEQ ID NO: 2589 - DNA, 600 bp, Avena sativa
cgtgcgattctgctggactacgacggtacactgatgccacaggcgatcaataagagcccgactgcaaaatcggtccagatactgaacagcttgtgccaggacagaaaaactcggtgtcctttgcagtgggttcaaacgatctacactccacgagtggttcccttgtgagaaccttggcatggcagcagagcatggctactacatgaggttgaagagggacgcagaatgggagacttgcattccagctgcagactgcagctggatgcagattgcacgtccggttatggaactctacacggagactacagatggttcaatcatcgaggagagggacaccgtgcttgtttggaactacgaggatgcagaccctgatttcgggtcatgccaagctaaggagcttgtcgaccatctcgagagcgtggttgcgaacgaaccggtatcggtgaagagtaccgtacactctgttgaagctaaaccgcagggtgtgagcaaaggcctggtggcgcgacgcatgctggcaacactgaaggagagggacatgtgtcctgacttcgtgctctgcatcggggacaccggtccgatgaggcatgttccagttca

SEQ ID NO: 2590 - DNA, 314 bp, Avena sativa
cactgtcttagctctttattttcggctcactacttaatgctttgagactaaggattggtgaggaagagaacaaaactaaaaaagacagctgcaaggcctgcgctgattccaatgttgatagctaggctaaggggtcagaaggtcgactcatcgaagtcagaatcctcacctgcatcttcggcaaggttaaagctattactcaaggttgtgttagtcgcggtagcagcttgttgtgtttcactacctgtcaaacagttgagaactacttttgagctagttatagaccacggtgatattattttgttagaaaaaaa

SEQ ID NO: 2591 - DNA, 847 bp, Avena sativa
gtagaatatctccaagtcgcagaaaaggcagcgaattttataaaggaaaaactttatgatgcaagctcaaaaaggctgcatcatagttatcgaaatggcccagcaaaagcaccaggatttttagatgattatgccttttttaatcaatggcttgctggatctctatgaatatggtggtaagatagagtggcttctgtgggctgtccagctgcaagccattcaggatgaattgttcttggacaaacaagggggtggatatttcaatactcctggagaagacccttctgtccttttgcgtgttaaagaagattatgatggtgcagagccctctggaaactcgatggcagcgatcaacatgatcagattctccagtatatttgatgctgcaaaatctgaaggctacaaacgtaatgttgaacatctcctggcggtctttgagactagactgagagaacttggtatagcattgccgctgatgtgttgcgcagcagacatgctcaccgtcccatcgaggaagcaggtagtgctggtgggcgacaaaggatctgcagaatttcaagacatggttgcagctgtattctcatcatatgatccaaacagaactgtgatccagatagaccccaggaacatggaagaaatgacgttctgggagagcaacaacgcgaacatcgtgcagatggcacggagcagcccaccggagaagccagcggtggcgcatgtgtgccaagagttcaagtgcagccctccggtgacctctccagatgcgctccgggagctgctcaacaagacagtggctgctgctggttcatctgtctgagactgttcctgctggttcggctagacgctc

SEQ ID NO: 2592 - DNA, 651 bp, Avena sativa
  modified_base (619)..(619): a, c, t, g, unknown or other
acaaccatccttacctcttgaaattcttccagggcgattctaccaaggccatgctcttcttgaacttctccactggaccatttgagtccttcaaatctgcctactatggtgctgcagaggagttcaagggcaaggaggtcaagttcctaattggtgatatcgaagcgagccaaggtgccttccagtactttggtctgaaggaggatcagacaccacttatcctcattcaggacagcgaatccaagaaattcttgaaggaacagattgaggctgaccaaattgtttcttggttgaaggattactttgatggtaaattgaccccgttcaggaagtccgagcccattcctgaggctaacaatgagcctgttaaggttgttgtggctgacaatgtcaacgacgtggtcttcaaatctggcaaaaatgttcttattgagttctatgctccctggtgtggacactgcaaaaagctagcacccatcctggatgaggcagctactactcttcaaagtgaagaggacgttgtcatcgccaagctggatgctaccgcaaatgacgtgccagctgagttcgatgtccagggttacccgaccttgtactttgtccactcccagcggaaagntggtctccgtacgacggaggcaggacagctga

SEQ ID NO: 2593 - DNA, 913 bp, Avena sativa
agcaaagtcaacaagacaaaatcgttttgggcctaacataaactcaatacagtaaagatctacttaaacggtgtctaccaacagattcctggcggcgaataactcagccttccacccataaaattcattcatgggttactctttcactcccagttcggagtaggtgctgccgcagcaggtgcgggcacacttccttgttcccagccagtaggagcaggggcagcaactgcatcccatccaccatcagccacaacaggagctgcagcagtccattcagctccagcttgtccttcaacagcagcgggagcagcagctccgggccattcagcaccccaggtatctccagttggggcagcatattcagcaactgcaccgtactcaggggcaaccagagcatcttcttcctctagatcctttgcttcctctgggtccctgtagaagaacagatcaaccatgatatcccacttgcgtccaggaagaattgtaccacgcatctgcagaaccatcctagcaagcagccagaataggcaaccaatgctctgcttccccttgttgttggcaggaatgccgatatcgacgtagcgcataggggagtcagtgtcgcagaaggcgatggtgggaatgtttccaagtgcagactccttgatgggctgatggtcagtcctggggtcagtcaggataagaaggcgtggctcgctgaatgatgtctgcatctggttagtgaatgtaccaggagtgtgcctaccagcaatggcgttagcaccagtgtactgagcaaacttgaggacagccctctggccatatggcctagcagactgcacaatgatgtcctgagggttttcaatggcaacaatgaccctggcagccatctgaagcttgtcccaggtctttccaaggttgatgatgtagatac

SEQ ID NO: 2594 - DNA, 690 bp, Avena sativa
gtgcgatgtatgtccattgggtttcttgtagacaaagatgcgccaatcgtttggagaggtcctatggtaatgagtgctcttgagaagatgacaaggggagtggcctggggtaatctggatattcttgttgttgatatgccccctggcactggtgatgctcaactatcaatgtctcaaaggcttcggttatctggtgctttaattgtttctactcctcaagatattgctctaattgatgctagaagaggagcaaacatgttccgtaaagttcaagttcctattctaggattagtagagaacatgagttgcttcaagtgcccaaagtgtggtgagaattcttacatttttggggaaggtggagctcagagaactgcggaggacatggatatgaaatttcttggtgagatacctcttgaaatcgacatccgaacaggttcggacgaaggcaaaccaatagtaatatcttcgccaaactctgcaccagcccaagcttacctgcgtgttgctgagaaggtgactcagaggctcaaggagttagccgaggagcgactgatgggcccggaaatttctctttgagaatatgtaggcttaggccttaggcttatcatctttctttcatttgttttatttctctttgagaatatgtaggcttatgcccaaccattttgcgttaaaaaagagattctggta

SEQ ID NO: 2595 - DNA, 537 bp, Avena sativa
gatactgttgtgctggagttcaaccaatacacaccaggctcaagatggaggcagtctctggtcaaccggaaggaccacagggaagagggcaatgagggcgatggattctacggtggaataaggaagcttcagaacaaggatgaaatatccaagtggaagcagctgtggccaacagatatcctggaataatgcactatttctccgttacaatgaatcaagattggttaactgattgataccttccattgatccgattagccgtccctctgttcaagctgtacacgcggatagaacacggggtgacaaatctggtagctggacacggttgtaaacttactgtcgggcaaaataaacgcagactgcttctttatttagggaactgtaggcctgcaacaaagcctactacatccagtgtatgtaaaccgcagtctgcgccctttttgcctgctgttgtagttctagagcagaaagatcaaatgtaaattacaattttagttcagatttacgacacatgtgtcgaattgtataccaaaaaaa

SEQ ID NO: 2596 - DNA, 684 bp, Avena sativa
tagcaacatggttcatttatcgtatcatcacggtgagcactacaatagcgtcaggctgactgaagatccatgccaaggacctgcaatgccagtcgttatcaagacagacgccaatgtagccagcacaagcaataacgttcaaacaaaagcgaaagacctaaagaaatcttcgaacagatcaacctatgacgatatatcagttaaacgggtcatggctggaactggatgttctgatgttggtgtagctgaacatgtacgagttgttttgggcgaattggatggtgatgttgaagctgctattgagtacatgatagctgagcggttcgcagttggttctgataatgtggacatagatccttatattgactttgcgtgtaatggagatgagcttagcacatcccaaaatgggtacgaaataaccgagcacaaagaagacgaaagctgttctagtaaagatgaaacagttacaaactccagaaattcacaggctaagaaggagaagtccaaaaccaaggagtgctcttgtgggtcttcaaagaagcataaggcttcttgtagtttggccacggctgtagcgtcgaaagaacctccacggaataaaggtggccaagggaaggcagccccgaaagggaagaagcaaaagaagaaagaacaggcggaagcagcgcccgtcaaggaacgcaa

SEQ ID NO: 2597 - DNA, 876 bp, Avena sativa
atgcggaacacagacagagccatgagcaacattgagtctactccagaagggtttaatatgctccgccgcatgtatgaaactgttcaggagcctttccttaatgcaacaacaatggctggggagggtgatagaaatgcgaatccatttgctgctcttctaggaaaccaggggtctaaccaagccagagatccagctggagatgcatcaactactgctcctgttccaaatactaatccactcccaaatccctggagtgcaaatgctggggctgcacaaggagcagcaaggcctgctcctgctccaaggaatgcaacaagtggtggcctaggaggattgggttctgcagatttgggaagtatgctgggtggtggctctgatgcttccttcttgaaccaggttttgcaaaaccctaccatgatgcaaatgatgcaaaacattatgtctaaccctgagtccatgaaccagttgctcaacatgaacccaaatgtacgtaacatgatggaatcaaacacccaaatgagagaaatgtttcagaatccagaatttcttcgacagttgacatccccagaaacattgcagcaattaattcaattccagcaggcgatgacgtcgcaacttggtcaacaagctggccaggatcggactcaagcaggcactaatccaggcaatgttaacctcaacagcttgatgagcatgttcagtgggcttggtgctggcggtggcctgggtgttccaaatgcgccaagtgtgccaccggaagagcgcttcgcaacccagctagctcagctccaagagatggggttcttcgacacagtggagaacatccgagcgttgacagctacctctggaaatgtccatgctgcggtggagcgtctc

SEQ ID NO: 2598 - DNA, 549 bp, Avena sativa
gcttctgtcatcagtgcggtgaactccatcagtgaggagctctcaagcatcgtcgagttagcggctgatgatgaggtagccatcacagcaaaggaggaaaagctagcagagctcatggagatgaaccaaggtctgcttcagtgcatgggggtcagccattgtgctatagaaaccgtgctgcggacaacgttgaagtataacttggtctctaagctgactggagctggtggtggaggctgtgttttgacactgataccaactctattgtccaactcagttttggagaaaaccaccgcggagattgaatcgcacgattttcgctgctttcaagtcgaggttggtggacggggtcttcagttttgccgaggataaccttcctgttctaaggagattttgtataacactgtaataagtgggctggtttgaagactgtaccaaataagctttcagttgtgtagctgtcggcccgattgttgtatcagttatcaaataaaacctagttagtgttctgcccaatcgaggcaggtttaggtggtatgttcttctgta

SEQ ID NO: 2599 - DNA, 444 bp, Avena sativa
ataatttatgaatcttgtgaatgcattgtcgtgaggcctcgttgcgttttatttggttcttcccgaggtcgatcgtgtgtgtgttgctatttgtgcacccctacagggtaaatctttctgaaagccgtgtccgcggttatagacgacttggagcacaaattctcgatcatagacaagcataattaaagtaccgcatttaatttgactaagtcatgactagtaattagtacaacactcatggaatggttaataaaattgccaacggatgggttgttcttctgcctttttgtcggtaagcgagcaggaggacgagcgaggttaattatgttgcttatataactgttgctattaattaacgggcgtccgtccatctctggttggacrgatgtgtagcgagtctctatagctctttgtagatattatctttctctgcaattgcgtcac

SEQ ID NO: 2600 - DNA, 866 bp, Avena sativa
gtgaaagataagaatgtggatacttctgttgttgctcataagaggagttcatctgtatctgaagatgaaatgctgaatactaataatggtaatcagaagaaatcgaggaagaatgaggacagtgttgaggatggtgctgggattagtggaggcaaaagtaagatgaagacagatgacaagaagtatgacagagactcttctcgcaaggatagaaaatacagagaagatgaatcaaaaacagtctaaagataaaagctcccgtcattcatcttcacggtcccatagaagctcaaggcattccggtgaaaaactccatggggatgctgctgaccagcacgagcaaaaagaaatcagaaggggatgctagagctgccatagaagatcatgacactgaaattaggctgcgaaatgctttactagcgaaagcagatttggttatccaggaggacaaacagtgtgttgatgaaaccggtgtatcttctacagataaatgcacagcagatgttccattgcctgcatccgcgtacaacattaacgggcaacatggacctgaagaagatggtgctttaggggagtctgccatatgatgttaaccagagtgttcacctaatctggtcaaccaatggatgcctagctgaactggtgtttgttagctcctttctgatttaggagttttatttgcaggatatggagatctatggagagctccaatgcagaccagagtgttcgactgatctataaaaaatgtattccccattaaacttaattgatggagattaactcctatatgtaacactggagactgtaaggttatttagtacagcgaggtcaaaaccaaccaaccatatatttgtcgttgcaggctc

SEQ ID NO: 2601 - DNA, 811 bp, Avena sativa
agcagccaatttttgtgtattaccaactcaataacttctaccagaatcataggagatacgtcaagagccggaatgatgcacagttaagtgatgctagtaaggcaaatgagaccgacctttgtgatcccgagaagaccacaaaagatggactgcctatcgttccttgtgggcttattgcatggagcttattcaatgatacatataccttcgaatacaaaactaagaacttgacagttgacaagaccgacatctcttggaaaagtgacagggagcacaaatttggaagtgatgtctttccaagaactttcagaaggtcctcttataggtggaaatcactcgatgaaataaatcgctgagtgagcaagaggaccttattgtttggatgcgaactgccgcgcttcccacattcagaaaactgtatggtaggatacatgttgacctaaaggaaaatgacactattaccgttacactggaaaacaactacaacacatatagctttggtggcaaaaagaagttggtgctttctacttcaacatggcttggtgggaagaatgattttcttgggcttgcctatctcactgctggtggactctgcttcttcctagcatttgcattcaccctattgtacttgataaaaccaagaaactgggagataacaattacttgtcatggaacaaacaccctgcaggccatgcaggccactgatacactcgacgtcaaacaattggtcaatgtatcttgtactaaatagcaatttttatttacgagctgtggtcaagtacatgtatcaagtaggcttgtgtgtacaagt

SEQ ID NO: 2602 - DNA, 923 bp, Avena sativa
  modified_base (17)..(17): a, c, t, g, unknown or other
  modified_base (46)..(46): a, c, t, g, unknown or other
tggttgctattgctgancggatggctactgtgaaacacaagatacnggttttgtcaggaagggaggtgttggcaagagcacgttttctgcccagctctcatttgccctagctgaaaaggaccatcaggttggccttcttgacatagatatatgtggccctagcatcccaaaaatgttaggccttgaaggccaggatattcatcagagcaaccttggctggtcaccaatctacgttgagtcaaaccttggtgtcatgtcaattggtttcatgctgcctaatcctgatgatgctgttatatggaggggtcctcgcaagaatggattgatcaaacagtttcttaaggatgttgactggggggagattgactatcttgtagtggatgctcctcctggaacatcggatgagcacatctcgattgtccagtatctacaagccacagaagttgatggtgcgataatcgtcacaactccacagcaagtgtccctgattgacgtgaggaaggaaatcaacttctgcaagaaggttggcgtgccagtgttgggtgttgtggagaacatgagtggcttgaggcagccattctcagatctcaaattcatgaagccaggtgctgcaggggagacagatgccacagaatgggcgatgaactacatcaaggagaacgcccctgagcttttgtctgtcgtcgcgtgcagtgaggtgttcgacagcagcaggggtggcgcggagaagatgtgccatgaaatgggggttcctttcctcggtaaggtgccgatggatccgcagctgtgcaaggcagccgaggaagggaggtcatgcttcgctgatcagaggtgcagcgccagtgcaccggctcttaaaagcataattgacaagctgctcaaaaacaatcgaggtgcttacgaaatgagtggtgtgtagtaac

SEQ ID NO: 2603 - DNA, 795 bp, Avena sativa
ttaagtgctattttgtgactacccatgcgactatagctaggcagatccgaatttgatattcggtaacattactgtcacatgggttttgttgtagtggatggttgggaattgcaagatgtaggtctgaatttcattcactggttctaccaagtactattgcttgtgcctgaagcattatttttcagtatttttttgggtttggtgatctagtatttgatttgcatagcttctcgtatctagagttgtttgtttcagaaatataagtcttatatatcattcgattctcttatatagttggttatttgagacgtccaagcttatagagccacgtagatttattgttgccgatttatcatgtagaaatataagtagatgcttcatgtgtgcatctttgttgatttcggtaatcggcaagggaccaatgttgtctaccagtacctccccatctaccaatttggatgagtaagttctgagttttttctcccattgtgcatcattttggttaacatttgttcaagtttactcggtgtaaccttgttactgtaaaaatgaactaggctatgattgactcagggtgcaccgtaggatagcatttggttgcattttcaagctccttccactgatggtgactggtgacgctgcagctccgtggctgcccgtgaggccgcagtctcttttctccctgccttatcagtgagttccaccaaggccatcaaatgctcctataaatgagaatgttgaaggattgtgggttgatgatgatgattccgttggtgatcctccaaggccatcatc

SEQ ID NO: 2604 - DNA, 538 bp, Avena sativa
  modified_base (326)..(326): a, c, t, g, unknown or other
  modified_base (377)..(377): a, c, t, g, unknown or other
cgggatcttatacttatggatcatcattgacccctttatttctgcctatagtttacgttggcctgcatcaaaatgggaagaccagagttggcccgaagggccattgcagtggctgaggagaaactctcagctgacaagtggccagaatactatgacacccgatctggaagatttgtcgggaagcaatcacggtcatatcagacatggactattgctggttttctgacctccaagatattgctcgaaaatctggagctggcttctatcctgacctgtgatgaggaccttgaactccttgaaggctgtgcttgctgcctctcaaaagnggactaggtgctctcgccgtgcgaccaaatcagatatcattgggtaaaacngcagtcccttttatcttgatgctctgcacacaccatgtatactatcgattgagaaattaactgaggccgacacacagtagccatgtacaatataggtttargttagatatccatccattcatttcctcaatgtgcgctcattctttttcctaagctgacat

SEQ ID NO: 2605 - DNA, 869 bp, Avena sativa
gcaacaaacgcccgggtgcgtgtgtgcgtgccagagaaacaaacaaacagacagcagccagtgaccaggcgaaggcgaagcgcgagaggagagagatgccggggctcacagcgccgtcggactacgcggaggagccgccgcgccaccccgacctcaggatcaactccaaggagccatttaatgctgagcctcatcgctctgcgttggtttcatcttatatcaccccagtagatttcttctacaagaggaatcatggaccaattccaaaaatcgatgatatctcaagatacagtgtttccatcaatggccttgtgaacaagcatattcagctatccatggccgacattagattgcttccaaagtacaatgtcactgcaacattgcagtgcgcaggtaataagaggactgcgatgagtaaggtacgaaaagtgagaggtgttggatgggacgtatctgctcttggaaatgcaacttggggaggagcaaaactatctgatgtccttgaactagttggaatacctaaactcagttcaatcacagctttaggaggcaaacacgttgagtttgtcagtgttgacaggtgtaaagaggagaaaggtggtccctataaggcatcaattccattaaagcaggctacagatcctgatgctgatgtcttgcttgcatatgaaatgaacggagagatcatcaaccgtgaccatggatacccactccgtgttgtcgtacctggtgtcataggcgcacgttctgtaaagtggctggacagcatcagcataatcaaggaagaatgtcagggtttttttatgcaaaaagattacaagatgtttccacctactgtagactgggacaatattgattggtcgactaga

SEQ ID NO: 2606 - DNA, 726 bp, Avena sativa
gagggaacttcctgattcaggtgcttggaagcaatattcacatgtccggaatgggtaattcttcacacagcttgaatggttatccttctgcacaaagtcacacaaattttggctctagtactgccttcagcaaggatccatcaatatttgctcctcaaaataatcctccatgtcctacgctttttgtcgcaaaccttggtcagtccgtttctgatcatgagctaacagatgttttctcaagttgtgagggtttcataaagctaaagatgcaaaacaagtttggtggaccagttgcatttgttgacttcaaggatgagtacagttcaactgaagccctaaatcgtctccaaggagctattctacattcttcacctggcgagggcatgcgtttagaatatgctaaatctcggatgggcctgcgtaggcggtcctaataatgcagcagagagtggtgttcatcatcgtcgacgggcgttcgaatgctgctccagtctgatgacataatgtatgcagtgaaatgtcttaccctgatgttaggttgtggaggtcttcagtttagttgtatcgcctagtcttgttttgtgaatcattcggcctcttggaccatgtttctgtgtccggtgtaatctttaagttttcgttcagttaactgctgaattcagatcactaatgaccaagtgtgcgggtatgagggttcggttgtgtaggagtaaccgaatgctcttg

SEQ ID NO: 2607 - DNA, 732 bp, Avena sativa
gagggtggagaactcccacaactgggccaagatccggagctgcctccacgacggcaaggtctgccagaagctcggggccaggagggagacgctgcagcagttcgtcaccaacaatctctccccgatccagtctggatgctgcaagcccccaaccgggtgcaacttcacctaccagagtgagactatctggatcaaacctcctggcctcaactctaccgatgaccccgactgcaacacatggtcaaatgatcagaatgctctctgctacgactgccagtcatgcaaggctggagtgcttgctaacctgaggaatgactggaagaagattgccactgtcaacatcattttcctcatcttcctcatcatcgtatactctgttgggtgctgcgctttcaggaacaacaggcaggacaactcgcacccagcgtggaagtaaagatgcatggcgatgcttaggtaattaggccgatgatcagtgctaatgattggctcattgtcgttcgtcaagcactccgatcttctatcctttatctcccatgatatgtgaaccatagatagcccgtacatgcttgctatgttgctctcggatacatcactatggaggctcctattaccccaacgagctaggtcagttacccgtacatgcttgctatgttgctctcggatacatcactatggaggctcctattatcatgatatgttgataaattgcatgtgttctttctgctacaa

SEQ ID NO: 2608 - DNA, 663 bp, Avena sativa
ctttttgctacaaacaaagcaacacacagattttgaacacacataataataatgcttcagataaagttattacacagtacttggattgtaaacaaatattaaacacaagctactagattgtcatcaaatacaccctcaggcagcacgcctaacagttattacaaagatgtagactatgatggatcctagcagctccatccagatagatagcttccaaaccagaagtaaacagtgtgtctgcataagcaaacagtaaccagctcggtcgcttgtccagtgttgtgctcctgattgagtcacaaccaagttccggcttcagaaagagtgttccttgccatacggccagcattcctgggccatctacatgagatgccaacatccaagattcatgaagagtcgcatcaaagactgacggatcaaatcagcaaatcagaaacagcagatacttctgacatacatagccacaaaggtaacaaactaatacctctgttatattgctgtacaccaactaagggaatggtgccttgatggctgggttcaaacagttggagttcacaaggttattgggaacagaaggcatctcatcaaaaagctaggcattggtggaagctcgaaggcagatagagaagaaccaaaatcaatgtgactgtcctgtgttgatgg

SEQ ID NO: 2609 - DNA, 796 bp, Avena sativa
catggcatatatgagcggatgaaagcatctggtttgatcctttgaatctcattcttagaagataaagaagtatccaaggatgacgtgttatgtggccatagtgaaagattagctgttgctttggtttgatcaataccacacctggcacctctatttctgtcacaaagaaccagtacacttgtcacagctgtcatggtatattgaggatgatatctaagattgttcgaagagagataactgtcagggatactaaggaattccaccattttagggatggaagttgttcgtgcggaggttcaggctaaggagacaatataatatgtggccaagtgcaaatactcacctcggttccaaatcaccagtacagaagtcttttgcaacaagcattgtgaacttgatatagcaatatacacaatagcgagtagaagggcagcttcgatatggcaccatgcccaccagcaagactgcttgctgctttgataaacagcgcttatgtttcgggttatatgtagaagctccatgcaaatttacagcttggtacatggcaaaagatggtgaagagttacccgagatattgggaatttagctccaacatatgtggaccttgcagaaatctcctgatgaattgcttcttggagatgatatttcttccgacaacttgccaaaaaaaccaagtaagcttaatctagtaaggaagggcaggatagttgattgcatgatgttttgtccaataggaataactgtaattgtaatgcctgtcaagtgtcaactatagcctgtatcatttggagctaca

SEQ ID NO: 2610 - DNA, 565 bp, Avena sativa
ccggaatttcccgggattgcaaacactagcagttcttgtactactatacgttgcagcaccatcacacacacagactttcccttcggccagtctccagctcaagcaagaatggcgaacgcggtgtcaggagtggcggtgagcgaggagtgcgtgagggcgttccaggagctgcgcgccgaccgcgcgcaccggttcgtggtgtacaagctggacgacgagctgcagcaggtggtggtggagaaggtgggcggcgtggagtccaagttcgacgacctcgccgccgcgctgcccgccgacgactgccgctacgccgtctacgacctcgagttcctagccgacgactccgtgggcgacacgccccgcagcaagatcttcttcatctcctggtcgcccgagacggcggacatcaagaacaagatggtgtacgccagctccaacgagggttcaagaaggagctggacgggtgcagatcgacgtgcaggccaccgacaccagcgagctcacctccagatcctcaaggaccacgccacctgaacctgatcgctagctcctccgagctagctag

SEQ ID NO: 2611 - DNA, 948 bp, Avena sativa
acggaccgctgccgcggggccccaaccctcacctcccgctgccggggccgtcgaatcgccgccgccgttgctcagctccccactaagaacccagagctagcctccggggagaagaaaatccggtggtcatcaagggcggtgcggtcatttgcaatggcggagctggaggcacgcaagatgaggtacccaaccacaggcactgaggggttgcttatgggcatactcgttgaaggaactagtggcgcggcaaaacttatgcgtgctaatggaatcacattgctcacagtgcgtgacacggctgcagaagttcttgggaagtcagaaatgttttacttcagtcctatgcatccaccattgacagaatctgcacagaaagcccttgatcaggctgtaaatgagaaactgaaaacaggtgaggacggagaggtaacggccaatcatttgttcctggcaatatggtcagataaagagtcagctggtcataaggttttggcttcccttggttttgatgatcagaaagccagtttgctggccaaaacggctgatgacgaggcagcaatgggtcctagatagcaaagagagcaactagtttatattgattgtgagcttctctgaggttatgtgtgcacttggcaacctgtaggcactagttggcggctccagtaccgtggacccacattaagttaacttgaagagattgcttctgtaagattcagggatacttaagatcggttaggtcgaacccaatacatgtacttttgctattgccaaagtcagatgtggtacatccgtacatgtaaaaaacattgcaatgtattttcggacgaacatgcttctgttcccacgcacagctagatgtgtgggctgctcctgaaagaccctttcaaagatccgtattctgagtattcttccttcagagtttgttcagtttgcaccctgacagataat

SEQ ID NO: 2612 - DNA, 816 bp, Avena sativa
ctcgagcagccagattcaagatcagaagttattcttgaggagtgtttgacgaaatatctgaccaatcggctcggttgttcaatggagcccaggcagtttatgaggcaaggcgtatggtgcagaaaggtgttggtcttgaggtccatgactcgtatcgctatcttgtgcctaactgggttaccatcttccggggaatctacaactggaggttagcgagactttctacaggagacttctcagaagcctatgtcccgagtcagcgtctttaccaggctcctgcagctgagtctaatggtgcaacacaacatgggctcattgccagtagcgatactacagacgaggcatccattttggaggatcatgacatgattgtcgtgccatctagcctctcgctagacgagatgattgaggccagttgtgatcttgattctttctatgtgccaccagtgagaccttccccgccacagcagcccaccccaatatgcgaggaacctcatgcaccggttcatataaatggtgaggtaataaacccggtgcacagagctaccgatgtcaacatgcatgacgttccgagaagagtggagctcagggatctggttccacctgagtgggataaagagcttgtcaaggtagagcagaagtgcgccaagctgcagtctaagatcgatgatggtctctatatatacttctaagctgctgaacctctgaaaggccgcggcgcttggcgtaacttgtaacaatggataccgtcgagtgaaagacatgattttgcgaggttatgctctgatttcttaggcatatatgtcgcagatacca

SEQ ID NO: 2613 - DNA, 713 bp, Avena sativa
tggctggtatcactcatgttgccattcagttccctgcatatgagaagataaaagcttacctggctgagcgagataacactaccgttgaagcattaagttttggcgatgttgctgttgcttcatctgtggcaaaactagctgcgtcaaccttaacatatcctcatgaggttgttcggtcaaggttgcaagagcagggagcacactctgaggcgagataccgaggggtaatagactgcattagaaaggtttatcatggagagggtgtagctgggttctaccgtggatgtgccacaaatctgttgcggacaactcctgccgcagttataacattcaccagctttgagatgattcacagattccttcttgatctatgccctcctgaacctgaacagcatccccagcccctgaagcattgactgtaccattcatgtgtcctatacctgctgcaatccaacaactagaaatcgtacctatccagcggcgccatttaccttgacaggctctcctaacagagattttggtatcgcgacaagtagctgccattcagagcacaaacaatagtgtagaacaggaattaacacttgtgtatgaattagttttgatagtacgcagtgtggaggtatacggggtgtggtggaacagtgatattggttggtttggtgtcttatgatgatgatgaaaagaagagaattttataataattgctcyaaaaa

SEQ ID NO: 2614 - DNA, 868 bp, Avena sativa
gggcgactggtggcgcgccctgccgcacccgatgcgctcctggctgcgcaacaccctcagcggcttcatcctctactacgtcacaggcttcctctggtgcttcgtcatctactactggaagcgacacgcctacatccccaaagattctatcccttcagtagaggctatgaagaagcaaatagctgttgcatcaaaggctatggctgtctactgtgctcttccagccgcatctgagcacatgattgagtgtggatggacacggagttacttccatatcagcgaagttggctggccgatgcattttgtctatttggctttatatctcatctttgtggagtttggaatttactggatgcacagagagttgcatgacataaaaccattatacaagcacctacatgcaacccaccacatttacaacaaggagaatactctatcaccgtgggcgggactcgcgttccatccgttggatggggttttgcaagccatatcacacgtggttgctctcttcattatcccggtacacttcaggacccacattgctctcttgttcctggaagccgtgtggacgagtaacatccacgactgcatccacggcaaggtctggccggtgatgggtgctggttaccacaccattcaccacacgacgtaccgccacaactacggtcactacaccatctggatggactggatgtttggcacgctccgcgagccagaagacgtcctcaagaaggattgagcttgctgggcccctgtgcatacttcctgtctcggtagtgctgtcaactgcaatagagtttcacacccccccccccctcgtctgtttattctgctcagtgctgtgtgtcgcgtttcgagtagtcatggt

SEQ ID NO: 2615 - DNA, 765 bp, Avena sativa
gctggacaagaaagatttaggaccttgaccagctcatactacagagggcgcaagggatcatcatggtgtatgatgtcacccgacgagaaactttcacgaatctttctgatatatgggcgaaagaaattgacctatattcaactaaccaggattgtataaagatgcttgtcggaaacaaagtggacaaggaaagtgagagagctgtcacaaaaaaggaaggcattgagtttgccagggaatacggatgtttgtttctggaatgcagtgcgaaaaccaaagtgaacgtagaacagtgctttgaggaactcgtactgaagatattagacacgccgagcctcctagcagatgcttcttcaggagcaaagaaaaacatcttcaagcagaaggcgcctgaagccgactccgcggcaagtggctgctgctaacatgttgttaatcgatggatgatatgtcatggacaaaaatctcagctcaccaccttttcgtacccacaatatggacctacatttctttcgatgggatgctaccaatcctcaaaaatcgcacaactcatcggaagactcgactgatttgtattcagacgatgtctattctcttatatattttggtctcccggaaatacattctccaattatattttttgttgaaaaggtagatccgccagtttatgcctgactgtactgtgagtgttttgtgtcttgtgtaggtgcttagtctaattgcaggttcaatgctttcattgcgacatattaggcgtatggtatg

SEQ ID NO: 2616 - DNA, 699 bp, Avena sativa
agaagtgcttcaaggtggaaggtggtgtatgatccccatggcctcaacggctggggctggcaggcctgcaccgagatgatcatgccgatgaacgtgtcgagcgagagcatgttcccgccatccggcttcagttacgaggagaggtccgagggctgttttgatagctacggagttcggccgagggatcactggatcactactgagtacggtggcaccaaaatttatcaagttctgaagaggtttgggagcaacatcatcttctccaacgggatgcgcgacccgtggagtcgaggcggggtgctcaggaacatatcattgagcatcgttgctctcgtcacagaggaaggtgctcatcatttggacttcagagctgcaaccaaggaggatccagactgggtggtagagcagaggaggcaggaggttgagatcataaaagggtggatagatcagtataaccaggacatcgctgagaggtcgccgtaaggttttcacagtccgaggaaaagaaatacttagctccatggagaatacaaggagtttcctttctttctacagggtgatagacacataaaagagaatgaagataacacatcagcgcaactgcaaattcaataacttctgtcacttgacaattgacatcagaagttgcaaaacttgaacattcacttctgaaactgctgtaccaatgtcatatacagg

SEQ ID NO: 2617 - DNA, 768 bp, Avena sativa
gattcctgcgaacaagaaaaacaaaactgttagagttaccaggaggagctagaagaacgcatcatttcactagttgcttcattgtttggtggtataacaaaaggttcacgaaggatcagattactaggaaagtttgtagagaatgaatgtgaaaagatagaccgcctgatggagctatacatacggtattcagaaaggggtgaaagctgagaccaaaaggtttgagagtctcgatttagacgatttagagatggatgatgacgagaagtacaaccggaaacttgaagctgggctttacacgcttcagctagttgcgcttattcttgggcatatctggctatctgggaatccgcagatgaggacgagaatagagttgcttcttagacaaaataagctgacaaaggacgatgtcaaggctatacttcaggagtaccacgacaacatcggggacctggatggtccagaagagaaggaaagagcgcaaggtcggaccaaggagatcatcggcgcattgtgaccacgaccatggactgcgattgtcttcctgtagcactctaccgagtctccgtggatggatgttataggggggccatgaattcatggtggatgtgtatccatttgtgcattgttttgtaaactagagctggagcatctatctgcaaatgccagcgcttctgctgagtatccatgttgactctgttatcgagaacttttgtggaggaaactcgctcgcacccagctgttttgacagttatgtagcttcagagt

SEQ ID NO: 2618 - DNA, 693 bp, Avena sativa
ggctcatggtatcattattgtctatgacgtgacagaccaggacagcttcaacaacgtgaagcagtggttgaatgagatcgaccgctatgctagtgacaacgtgaacaagcttctcgtagggaacaaaagtgatctcaccgacaaaaaagttgtatcaactgagacagcgaaggcatttgctgatgagattggcatcccattcatggagaccagtgcaaagaacgccttaaatgtcgagcaggctttcatggccatgtctgcttcaatcaaggacaggatggcgagccagccatccgcgaacaacgcccgcccagccacggtgcagatccacgggcaaccagttgagcagaagacgggctgctgctcttcttagacagacagacaaagcacgcggccgactgacaccaccgaacggaagtggaagctccattatccttcagtatttccatgttttttacataggggtataacttggtatctatattccattctttatagtgtatacatataaatcgtttgatttgtagccggagtttagagagacgttatcttctgattaatttccgtaactcggttggatggctatgctgtgtttgcaagttattggtttgttcagtggatgcattgtatgagttaatgtgcaatttaagaccggatatctaaggatccaacagaattcacaaaccattgaat

SEQ ID NO: 2619 - DNA, 488 bp, Avena sativa
ggaatccccgggatgacgagctcgccgccgccatcgaccgcctcaacggagaactagacaagctactggagaatgcaccttccccggtgataccacaacatgcagcaaggatttcctctatccgcaagagagttttagcactcaacatgctactgagatccatacaaagacgtatagataatattgatagaatgatatctactggtgttacagatcattcatcttgtgtacagttgcaaaacaagaattgaacttgaattgaggatctgaagggattttttacagtgttgcctgttaattgcgcaccatttctgtctgaagggttgccattcaagagcagttgccggcgacattttgacaagaggctgtacaaaccagtggaaagtgatgattgcaactgccctacaaattcacatcaccaaatcgcttttattttttaggtcgttttatagtggaagtggcagtagtttttcacgtggaacaggctc

SEQ ID NO: 2620 - DNA, 755 bp, Avena sativa
gcgcattgcctgagatgaattggagcagctgcactgctataggcttgcacttgtagccttgctggtagcagcggaaaagtcggagaagacaaagaagatccggtgggctgggttgctgaattgccgccgctgctagctgtttggctgcctgctctgcttctctgtgagaagacaaagaagacatggacgattgtggacttggtcgagttggtgctacctatgcctctggcagtccggctgctacctatgcctctcagtcaccagcggcaggcaagctagcgccatcgatgtgcccagtacaagcggtggagcacgggagtaagaacatgaaagcgacgaccgacaagcagagctgaattgggagcaaatcaactgccacaaggctactactttggtaatttaataaagaaacccacgagactgcaactcaagatgagccgcttctccaattttttctgctgcatctgctctctgaagttatatttgagttttacaatggctctctggtcaagaatctggtgcaaagcagtataatttctgatgtcatccaagtatatttaatgtaacccaagcattgttattttgactgggtgatatgaataggttgttgtattctcaatctatgccatgtctacaaggctaagtttctacatacagtgtatgattgttagttctttgacaagtttcaattttactttaagatgttatttatttcgtgaaaccggaacaatgaagaacaatggttcatagtaaaa

SEQ ID NO: 2621 - DNA, 728 bp, Avena sativa
ggcaatacaatcttgcttccgacggcagagcataatattcagcatcaacagccacagcaactgcagccacacagccagggctcatacccacctcaaccaagcaagcccagtcactgcagtgtcgcatcatatgctgttcaaggcagtggccgagcttacaacaccgcatataagaatccttctgagtgccctgcaaccgttgttgctgttctgcctcagcacccggcaactgctcaaatggcgtttcaccatttgggttcacaagtcatgcataaaaatccatatggaagtatgtttgaaacgggcagtgtagtagggtatccacaggatctgcttcaaaatgtgactctcccagtggtgactaaagcccaacatgtagactccattgccatggttgataagctccatgctggtagcaatgttacatccccgcgagactggtccgcatagtgcagaatgggcacaacttagttccatgactataactggaagcttgtcagttctcaaatgggtatttcatctggcttcctttttaattagccagcagattggtgcagacccttctatacttttttctgccgaagggtcaatctgaaataagaatggtagattagtctagcggatgatgctggcatatgtcctaacttttaatggacatatcttgcttgtaaccgacagttgacgatgaatttgtgcctttgcgatatgaaaatatgacgagttcacat

SEQ ID NO: 2622 - DNA, 783 bp, Avena sativa
cgaaggctagtctgtgtggagattaccgaaggcatgcatggcggtgtgtcacgaggatgacacacggacactagcttctgccccttcgcaaccctcgttagtgttgtggtcgatggctggtccacgtggagattcatgtagatgttagtgtcgctctcaagtggccatcctgatgcatcggatgtacacaccggatctcccaatggtatgtatgtacaaaagaggtcacagaggaaacacaaaaaggtcagcatctcatgagagagtatgtatgtacaaagaggtcgcagaggaacacaaaaaggagcagtgcaacaccaactgtatgctcgaggaaagtctggtttgagacaagatcaatgcggaaaaactaggcactggttattggggtgtgcaataccatgtatcaattagatgtactagaaggaacatgcacgttgaccagaacagaagcagtgtaggagaacttcagttgtctggctcgcacatgtcggagcagaccggcacctccagcatcatcctcgtagaagccatccatgacttcatcgagaagacacaaaatttcagtggaaatggattgttcgttttgttggtaagatgaagttgtattggacataaccaaggtagaggtgacatgtaaaatggataattgatcctggcgatagtaaaagagttttatttgttaagaaaatagctataatggtgcacattccagtgcttccgaatttgattagttatctcaacaggaagataggcaagtggagttgtaggtctatacctgag

SEQ ID NO: 2623 - DNA, 742 bp, Avena sativa
acgttcccatcttctacaactacccgccggggctgcgctcgctgctggtgtacctcaagaacatgtacgtcggcaacacccccatctacatcacggagaacggcactgacgaggcgaacaacagcacgataccgatcaaggaggcgctcaaggacgggaaacggatcatgttccactacaaccacctcaagttcgttcgcaaggccatccaggagggggtgaacgtgaagggctacttcacatggacgttcatggactgtttcgagtttggcgacggcttcaaggacaggtttgggctcatctacgtcgaccgcgccacactcaagagataccgcaagatgtctagttactggctcgagaacttcctcaagaaatactgagtgattgatcggccacgacgtccacgtacgcgctagctggcccagatttgcatcttataatcggatcaggatccaagtgaagtgaaagagtgaataaaggtagatctctgtcgactggtcaactgatgttcgtcgatcgatcgcagatcatgctatttcatgcgcatgtgcatgtgctgcgagtataagtgttgcacgcacagtttcatttcatgtattgctggccagtaaggtcgcttttcatttatttttatgaatttgctcgaaatttgtgaaaaatgttctcatatcttccttaaaaaaatattctcataggtaaaagatatatttcgtaccaacttatatatcgtttcaaaaaataa

SEQ ID NO: 2624 - DNA, 551 bp, Avena sativa
aatggccacggacgcggcggatcctccggcctcggcggggtgctccgcgatgaaggccgagttcgccaggcacacggagtacctcaacacgctgaatgataaaagggaaaaggctagtgaaagcaagtcgggatgtgacaatgaacagcaaaaaagtcatctttcaagtccacaggatcggcagaaataacaaggaggaagttctttcaaaggcagaaaatgatcttgcctctgtggttaaccaacacattggaaagttagtaaaagaattacaaggaaccgacttctggaagcttagaagagcctatacctttggtgtacaagaatatatcgaagctgcaacgttttgtagattttgcaagactggcactttattgagtctagatgagattaatgattctttgctagcagtaagcgataaatctgttgagcccttgcagataaacgtgcttgactatctattaggggttgctgatttgtcagggagctaatgaggcttgcaattggccgtatatctgatgggaagttgaatatgctaagacatatgttca

SEQ ID NO: 2625 - DNA, 632 bp, Avena sativa
tgtaaccagggaaggccaagggccgggatactgcattaataaagaagcggtgtggtacaacttacataaaggacccccaaagataaaacagtacaaaccggtcccttacaacttgcaaaacagaccctaattgaattgcagaaaaaagcaatcaggtccaccaacaccgacggtgagctctggcttccagctgcaatcttcgccgccagcaccatcaaggccacatggagctgaggaagaaaggaagatcgaagctatgccagaagagggcctccactggaggttgaagaacacctggtgcaacgccggcgccagggtctggaggtgctgactgtcagccacttgattcggaagccaaacatgtgctgccgagagaaaactccagaagaactcagtatcccacttttcccaatctcctccatcgctattgatagacacagcaggacaaccttcttccattccaccatggtcagtaagaaggaaggactgctgcatcaagcaccagagccagaggagaagaagaaaccgcttattgaagaaggcttcaccagatctgcacccaacgcccagccaccacctcgacgactcgacgcagagcatcaccgacgaccgcgtgacgccgcggaaaagca

SEQ ID NO: 2626 - DNA, 710 bp, Avena sativa
  modified_base (532)..(532): a, c, t, g, unknown or other
gcctggtaaagttgatgaaaagaaaattgaattcataacagctggtggcaggactacagcctatgtgccagaagtgcagaagctgactggaacccaatctggcaacgcggtagcggctgacccagggcaagtaagcaagaccgcgaaggaagaagcggaaggtggagatgatgatgatgatctgaagccaagaaagagagtggaaatatccagggctggcaggggaaaaccaccatccagaaaaactaaccctgtgcaagtgagcgaggatggtgccgcaaaggaagcaggggaagatggagatgataatgatgatgatctgaagccaagaaagagagtggcaatatccacggctgacaggggaaaaccaccctccagaaaaactaactctgtgcaagtgagcgaggatggtggcgccaaggaagtcgtggcagatggagatgatctgaagcccataaagagaatggcaacatccagagctgccaggggaaaacaaaacaagaatgccacaagtgctccttccagaaaaacngggaaagttgctggtggcagagaaccaagcattgaacatggcggcaaagacgacgtcgagactatggaaccaaacaaagctagcgccactagcaacgatgagcctggattggacaaacctactgcagcggttcacggggtatcagaccgtggtgttacaagaacatcatcgaggaaga

SEQ ID NO: 2627 - DNA, 943 bp, Avena sativa
gagatgtcgagattgaaatcattgataaactaatctctgttccttacgttgaaatgacattgagattgatggagcgttttggcgtgaaggcagagcattccgaaagctgggacagattctacattaaaggaggacagaagtacaagtcccctggaaatgcctatgtcgaaggtgatgcctcgagtgcaagctatttcttggctggtgctgcaatcaccggagggactgtgactgtccaaggttgcggcaccaccagtttgcagggtgatgtgaaatttgctgaggtacttgaaatgatgggagcgaaggttacatggaccgatactagtgtaactgtcactggtccaccacgtcagcccttcggaaggaaacacctaaaagctgttgatgtcaacatgaataaaatgcctgacgttgccatgactcttgcagtcgttgccctctttgcggatggtccaactgctatcagagatgttgcctcctggagagtgaaggaaaccgagagaatggtggcaattcggacggagctaacaaagctgggagcaacggtagaagaaggtccagactattgcatcatcacgccaccggagaagctgaacatcacggcgatcgacacctatgatgaccaccggatggcgatggccttctccctggccgcatgtgccgaggtgcccgtcacgatcagggatcccggatgcacccgcaagaccttccccaactacttcgacgtgctaagcacttttgtgaagaactagatcgcgggatactataaagaattgcatatgtattttgtagcctgtgaggaatttttgctcttttcatatttctgcgagatgtttatgggccctgtaatattagttttgcagcacatcgtgagcctcgaggtaaaatgagttgtattgcacactgagtttgttttaaataagttgccatccagaggtcc

SEQ ID NO: 2628 - DNA, 1056 bp, Avena sativa
ttcacacgcaagctcaccacggccacgcagcgcccgaggatcccgtctagaatagagagaggcaggaactagcaatggcgatggctgcgaagcggcgggacgcggaggcggagctgaacctgccgcccgggtttcggttccacccgacagacgaggagctcgtggcgcactacctctgcgcgcgcgccgccggccgcgccgcgccagtccccatcatcgccgaggtcgacctctaccggtttaacccgtgggagctcccggagagggcgctgttcggcacccgggagtggtacttcttaaccccgcgggaccgcaagtaccccaacggctccaggcccaacagggccgcgggggcagggtactggaaggccaccggcgcagacaagcccgtcgtgcacgcggggaggacggccgggattaagaaggcgctcgtattctaccacgggaagccaccgcgaggggtcaagacggactggatcatgcacgagtaccgccttgccgacacctcagccaagaagcacaacaaggacggcacgctcaggctcgacgactgggtgctctgccgcctatacagcaagaagaacgaatgggagaagatgcagcaggacaaggcggcagcgcagtcggtctcgtggggcgagacgcggacgccggagtcggagatcgacaacgaccccttcccggagctggaggaatcgatgccggagttgcaggggataatggggacggcagacgcgatatttcccaaggaggaggtgcaggagctggacaacgactggctcatggggatcaacctggaagacctgcagcttccctgggacgactcctacgcctcctccttcctgtcgcccgttgccgcgatgaagatggagcaggacctcagaccattcttctaaactctccgctctgactctcgtgcgcggtgcggcgtaactctagactagatagttcagacttgttaaggattcagacaagacattctttcgtttctgtgtttttcttattcttaacattgtgtttatcggattgaccggccaataatgtatattaatttta

SEQ ID NO: 2629 - DNA, 1007 bp, Avena sativa
aggtgatgtcgcccaactaggtatcattcgggaaggcaacttcatgaaagtgcaaactattttgcatccaagaaaacatttagtgccgttcaatgttgaagggggtcaaccttcttatctgatagttgctggccttgtcttcacgcctttaacagaaccatttatagaggaagagtgcgaagatactttggggttaaaattgttggcaaaggcacggtactctctgtcaaccttcgaaggggagcaaatcgttattgtatcgcaggtactcgcaagcgaggtcaatatcggatacgagcacatgggcaaccaacaagtaaacctccttgtatcttccactctacctgtcttggatatgcttttgcatttagctaatgtgatcctgtaagcaataatttatcaggtcatgaaactaaatggaactctgataaagaatatacaccaccttgctcatctagtggacacatgtcaagacaaattcttgacattcgaattcgaagacgacttcctcgttgttttggatcgggaagaagcagtggccgcatcatcagatattcaaaaggagcacgccatcccctctgtaaggtcatcagatctatcggagccctatgtcgacacaaaccatgaggtccaaaatcaaggcgaggatttcggtgacagtcctgtcacaaactttgaactgggagttgattgtatgctgtgggcatgaggaactgtcagtgctccagcctagaaacaagaatacctcaacaaaaccacacaagcatggagggtttccatcaggatggtaataatgctggagaattttcgcttttgccaggtggcaaataagagcaccgtccatttgtttgacacacacttcatagcggcaaaagccaagccatgttgtatttgtatctcaatgttggaacttcaaaggttaggttaggcaaaatttagagtatgctgtatgttaaaatcatagaatatttcattcataaacatttttggggactgtggactgggct

SEQ ID NO: 2630 - DNA, 878 bp, Avena sativa
tgcatcttggacaccaccttctagattgggccactcaatgtctgtctatgatggtaggaaaattctgatgttcggtggtcttgctaagagtggtcctcttcgactgcgatctagtgatgtcttcacaatggacttaagtgaagaagagccctgctggcggtgcctcactgggagcggaatgcctggggcaggaaatccagctggagctggtccacctcctcgtctcgatcatgttgctgtgagcttgccagggggaagagtgttgatatttggtggatcagtggcaggcctccactcggcatcgcagctgtatctcctggatccaactgaagaaaaacctacctggaggatactcaatgttcctgggcgacctccgcggttcgcctggggccacagcacctgtgttgtcggaggaacaaaagcaatagtgcttggaggacaaactggagaagagtggatgctcactgaagtacatgagctctctctggccagtaactcggtttgaggtccagaggtcttttcagcaagcttccttgaaacaaatggcgccaaccgccagaggaccggagcactgaatcagcatactgttatactgaatcttttggcacaaagctacttgtatctgcttggaagagatgactgggtttgaattggggttgcgctttatgtagctgattagagttatatgtttttctcttgttgtttaattgttcttctgccagataagtaaaattcataagctacttatatgggatgagtaccagttttatgtattctcggacaattctgacatccattatgttagggaaaacaaaggactacgctgtacagatgaatcttctcttgtattctgtgatagtaatgagatgtatgggtga

SEQ ID NO: 2631 - DNA, 570 bp, Avena sativa
ggagaacagaaaaggtaggtgatatctgggaaagggcaatttatctgcggcaataggaagtgcgatgaaaaggttgggcttggtagttatgaggtgaacttttcttatgtcgaagcaggggagcagaaacaagcacttgtgaagttggtagcttgcaagggatgtgcagaaaagcttgctcataagaggcaaaaggagaaagaaaaggaaaaagagctttccggtgaagaggaacttgacctgaaaggaagagacaagagaaagagagaacatgacgacgaaagtgaagataccacagaagacgaatcggtcgagaaatgtagaagaaagaaaaaagaccgcaaaggagcttcgaagatgaaagtgggcaagaaagatgacgactttgaggagtttcttgaaggcatgttcccgtgacctggtgtaaaaaggaaatctggcaccacatgttaatactgaacttgaaagggtttcgatgacttgcaatctattgttgcctggaaaataccatatggtgtgccactcagctattgtatttctaggcctcttattatagtttctgacttgata

SEQ ID NO: 2632 - DNA, 785 bp, Avena sativa
  modified_base (348)..(348): a, c, t, g, unknown or other
cgttgcttggatctcgagtccaatgcatagagacgctgagaagtggagggcagagcagtccttgactgtctttgttctcggcgctgtggttccttgcataccaagatgtgagatgcacatctacaaaaaaaaaaaagtgagatgcaagaggggcacatacctatggctccttggaagatgaggggcgatgtttggtctacaagagaagagaatgggggcatccagtacgtggatagttgatgagggcctgggttagtccaagtccccttacatgcactctgcttcttcaacttgttccttttgacttgaaaattgacggtgatgaactgctacatgcaggtgccccgntgggagtaccggacctggcacttgactcgcttttggctgaagctgccctgattgtggcgcagctgattaaggagcgaaacgaagctgtatcgcctgcttccctgtggtacccttgcttgctctcggggtctgctgagtgccgaggagagagccgccgatgatgacgatgaagtgtttggatttctgttgatctaagattcgaactttagtagtgagtagtatagagtactagtatgtgttgtacatgagcgttggtagtggtaagtgggcaacccagtttgtttacaagtgttgtacgtcgttatgttaccaacttgagttgcttgtgctattgactagcttctttttcactacaaattccagatgaatgtcaacatgatcgtgctgtgaagtgaatttgtcgtgcgtatgtattggtttggtgtagatattgcatc

SEQ ID NO: 2633 - DNA, 744 bp, Avena sativa
acgttagccagcaatccggtatcgagcccgacgccgtgtcggaggaggaagggcgacgaagatgaggaagaagctgggcacccggttccccgcggcacggatcaaaaagataatgcaggcagatgaggacgttggcaagattgcactggccgtgcctgttttagtttcgagagcccttgaattgtttctgcaagatttgattgaccgctcataccaaattactcttcaaagtggtgcaaaaacattgaattccttccacctaaagcaatgtgtgaagaggtacagctcttttgacttcctaaaagagattgcgaacaaggtgccagaccttggtggcgctgactcttgtggagatgaaagaggattacccagaagaagaaaattatcaaatggaagcgatccagagaatgaggaacctccccggtccagcaaaatgccaataagaagcttgaacaccagtcccagaggacgaggcagaggtcgaggaagaggacgaggccgacctccaaccaagagaaaggaagttggtgatgtacaatttgaggatgagagcagcatgtttgctgagcaaagtgaacccttacaaggagatgagatagttccagagaccaaccgtggtaatgagagtattccccaaagcgcacatccagtagaggctccatccgctgatacagctgtgattttcaaaagggttgaagaagccagtgctgaccaccagccagattggcctatgccagatgcaat

SEQ ID NO: 2634 - DNA, 845 bp, Avena sativa
atgttctgggttcttggttacaatcttaacgaaggacataagctactacagagtaaaaggccaagctttccaaagttggaagcaattaaattggcaactgctgacattctgacgggcttgtcaaaaaactgcatcactttgaagtggaaaaatggtagctgttcttctgttgaaatttcagggcttgacattgggtggggacagaaaattcccctggcctatgataacgagaaaagtgcatggtttcttgagagggagttacccgaaggacggtatgagtataaatacgtagtggatggcaactggttgtgcaatgaccatgagatgaaaaccaacccaaacgccgatggccatgtgaataactacatacaggtttccagggacgacacgagcgttgaggagcaagaaatgagagatcggttgactggtccagaccctgatcttacgaaagaagaaaggcagatgatcaaagagtatttggaacaatacagtgcagaataagagaaatttctttgctcgtaacacctgggatgcgaccggtttgctgttgagccgggaacgcctgctgatggaaatagactacgcagctcgggaacacgtagcgctgtgctcagctcaccgccgtgcggataacagcttgactgaaatagttggctcgcatttttttttaaatggacttgcagtataattattagtatgatcctcctctgtaaacacatgttgtgtcaaaggagcaacagttggttagtgtttgtcccctgatgccatctgagtagccatataataataatgtaaaataaagggctgtgtacctagggttcgaaaacaagaacgtgtaacatatg

SEQ ID NO: 2635 - DNA, 662 bp, Avena sativa
acggccaggacctcgacggccgcaacatcaccgtcaacgaggcccagtcccgcggctccggcggcggcggcggaggtcgtggtggcggccgtggctacggaggtggcggcggcggctatggtggcggcggcggctacggaggtggtggcggcggctaccagcgccgtcgtgctcaagaaccagctcaacgcccacgtcgcctccatgttcaccgcgggtttcctggacaatcagttcaaggagctgcagatgctccaggatgacgggagctcgccggggttcgtccgcgaggtcgtcggcctcttcctcgacgacgcggagaggatcgtcggcgaaatcgccgtcctgctggaccagcctgtcgtggacttcgataaggtggacgcctgtgtgcaccaactaaaggggagcagctccagtgttggtgctcagagagtgaagctttcgtgctcgcagttccgtagctactatgaggaaaaaaacagagatgggtgcatcatggcattggctgttctcagaaatgagttctatgatacccgcagcaatttccagatcatgtttcagctggagcagcaaatcgaggcgtgctcctaaacaacaattgaagacaaaaaaaagaggagcgtagctccatgcatgtgatctctccacatggcggtgta

SEQ ID NO: 2636 - DNA, 474 bp, Avena sativa
  modified_base (431)..(431): a, c, t, g, unknown or other
atacacttccactgagatgggaaacaggttctaagacagatttctcctggtcaattgattcgagagtatttttgtcaattttatatccttgatttctcatcatagattcttttttcttgtatacgattcgaggcatgaaatacgtgctatttctcatgaaaaccggaggtacaacacagttggggcactttctcatagttttcttgttttacccgctagcacttttatttctttgtggctatgcaggcaaaacaggggctctgcttcgtcctaaattatactacatcagcaagagcttgcagccatcaacagaagagttggttgcgaccacagtttgatcgatgtcagagcaaatgaaccgtttggtgtttgaggtcatctgctcaaggtcctatgattatcgtctgaggtgcaatgcagatagaatttcncctatatctacaggagagcacatgagtagcacattgaagcctg

SEQ ID NO: 2637 - DNA, 677 bp, Avena sativa
  modified_base (666)..(666): a, c, t, g, unknown or other
gtgaccattaacgacgactcttggccaaaggaaacgtttgaacttgtctctggagaggtctcaaagactttggaaaggcttgaccctggttccactgcttcgcacgtgtttgtcctggagaccaaagcacagggcaggttccaaggttcacctgctgtcatcaaataccgtgtccccacaaagtctgtacttcaggaggcgtattcaactcccatcctccctctggacattcttgctgaaagacctccagtgcagaagttcgagtgggctaagaatctcgttgcgaaatacggtgctctggtgtccgtcgtttccttcgttctgggttcatctactggtggccacccgtcgaagtcctccggcgcgaagtcaggcaagagcgacgctgatctagctatcatccagtggtgttccacagtttttgtagctggtcgtcgattctctgaagttagttcttacacactgtggactgtaacgaagtggcactatagttttagtttctatttcggttgtcagtgacttaacagcccagaggagaggagtagattttgatggagattaaagttccttctgattctgatgctatgttgctgcatgtccagtctcttaggcaacgtggattttgacctgtaaaatcgttgaattccatagttaaaaaaaaaaaanaaaaaaaaaaa

SEQ ID NO: 2638 - DNA, 558 bp, Avena sativa
gatgttgccgtaccacatgccgttgccgcaccacatgccgccgccatacaatgttcaacaccgactacatgatgaaccagtaaccggccgccgccgccacaggcgtaccagccgccgtacgtgccgccgcagtactactacgtccgcaacgactgagcatggaggagaaccccaactcgtgcgtcatctcctaaggcgaggtggttgatcatgtgtatacgtacgtgctccctgccttgctctcgtcgctagcttgaggtgaggtgatcgatcatgtgtatagtactgtatatctcgaccgtttttacgagaccaacgacaaagtttgtaaccagaaattagtagtaccactaggtacgtacgtacggccattcgtagctgggaaatttctgatatactactacgtaacgtactgccacgtcatctttgtagaaaagcaatgagtaatacacggtgcatgatgagtggtcatgctcatgcatgtggggtgctagctgttcgaactttgctttctaaattgcagaaaaagaatcgcaactaatagtatggatcttggac

SEQ ID NO: 2639 - DNA, 921 bp, Avena sativa
tccaggtgcaggctcatcctccctcctctcccgaccggttgacgactcctttgacctctcgcgctgtcccctcctccaccgtcgccgcacgaagctcgaggcctccccctcccccacccccctcgacccgccggcagctccagcgccatggccaacagcaacctcccgcgccggatcatcaaggagacgcagcggctgctcagcgagccagcgccggggatcagcgcgtcgccgtcggaagagaacatgcgctacttcaatgtcatggtcctcggcccggcgcagtctccttatgaaggtggagtttttaagcttgaacttttcttacccgaggaatatccgatggctgctccaaaagttaggttcctcacaaaaatataccatcccaacattgataagcttggtagaatatgccttgacatcctcaaggacaaatggagtccagctcttcaaatacgcactgttcttttgagcattcaagcactgctgagtgctccaaacccagatgacccactctcagaaaacgttgcaaagcactggaaatccaatgaagctgaagctgtcgagacagcaaaggagtggactcgcgtgtatgccagtggtgcatgacaatccaagaacgcgttacggatgtaataacaccatgtcgttagtcgggtctaactgaaaaccatttgcttgataagaacaaactcgaaaccgtgttgcgtttggaaggaaagtgtccagggcgataacggttcgagttaccggctgtatttgtggtgcatgtgttggcacctgtcactgctgtgctgccgctccagccaaacatgttgccgcttgtagaacatgctgtgtgttccccttgatcttcaattatttaccagttccgctgtgattgtatgtaaagctgtccaaatgatggtcgctggttcgcag

SEQ ID NO: 2640 - DNA, 684 bp, Avena sativa
tcgggtctgggatgcttgtggtcttggaataaaaaaacaaatataggaggtccctgcactacctgggccaagacccgggctgtagcccgggctgcccgaggcccagatccgcccctgagcagtagtatatattcaagtgaaaagcagatgagctgatgcactatatgtagctggaaattaactataaacccatacagattatttcgttcgcctacacacacacgcacccaacgatactaccaagtaccaagtacatacgtgttttgatccatcaggcagctagccacaccgtccgtccgcgatcatggctcatggctcagcgcgggaaggcggcgatctcgacgcccttgctgccgtgcgacggcacgggcgcgtcgtaggcgctgaagaggcggtaggaggagatgagggaaagcaggatgtagcacaagacggagccgaaggtgatggccacggacgtccgggcctgccggcagaatcccccgaacacgccgcacgcctcgctccaggtcacctccttgtcgccgttgtacgccaggtagagcagctctgcggacgccgcgccggccgccaggatcaggtacgtgaacacctgatctaagaggaagatgatccaggagcgggccagcgtcgccgggcgcggcacggcggtgtaaaacgcggagaccgagtgcgtctctgagt

SEQ ID NO: 2641 - DNA, 495 bp, Avena sativa
tttttttctaactaacaagcatgcactgtattcataaactttgcctcatagacatgcactgattgagattacagaaaccgattcacatcacccagtcaaaataatgaagtttggatcatattaaacatatttgtattgtatgacatcagaaattacacagctttgcaccagattctgtagaatagagaggcactgcagaactcaggtgtaactttagagagcagatgcagtacaataaatttggaaagagaagcggctcttccggcgctccctccaagttaccacgacatggggacagccggtggcagcttcctgtcgagtttacgccgagttctatagcacgaagacggcatatgcagggtgttcttctacatgggcgtcctcatcatctacctgcgaccgcggcagcggtggtggcagggtgtcttcctaccttcatgttctcttcagcaacttcattatactatgatctgggccctataccatccaattgtc

SEQ ID NO: 2642 - DNA, 846 bp, Avena sativa
cagtcagagagaatggcaatggagcatgaacttgaagcatcaaaggccaatgttgtaaaactgacaaatatggtgagcttgctccaaggggagattgtgcacgagaggttgctgtcagaggattacgaacagaaatgccgaaagctggaggctcagttgtcaagggatatccgagatgcgaagctctggaggcttgtaaactcaaatggagatctgaagaccaaacaggagaaggagcttgcaaacgccactgggaagcttgcagagtgccagaagaccattgcgtcccttggacgtcaactaaaatcactaacggacctcgacaacatggtgctggagcctggactactgctggaagccagggatttaccactggatttcagaaccagtgaacctaaccagcttcagaaaaggaacactggtgctgactttgcggtcttcactgacgagctatatgatcctggccaccttcagaaaaggaacactggtgctgactttgcggtcttcactgacgagctatatgatccttgccaccttcagaaaagaaacactggtgctgactttgcggtcttcgccgacgagctatatgatcttgaccttccgaatggtggtgtgagctgcttttcgccactcccatcgattcgaccctcatcaccccctccctcggaaatgtcggtctttgcagggggctgtcgtcgcttagtagctacaggaacaagagaagaaagtaagagctgttggaggattatattgtcaagattgacactaacagttcatggacaactctcatccgagcaagagaagtagagattgtgcagctaacagttcatttgatgctctcatgta

SEQ ID NO: 2643 - DNA, 723 bp, Avena sativa
cttggaactgggaatggccttcttctgcaagcacttgccaagcagggattctcagatttaacaggaactgattacagtgaaggagccattgaacttgcaagaaaccttgctgctcgtgatgggttcactgctataagtttcttggttgatgatgtacttgagacgaagttagacaggaaatttaaaatcattacagataaagggacactggatgccatcgggttgcatcccgacgggcgtgcaaaaagagtgctgtactgggaatctgtatctaacttggttgaacctggcggccttgtggtcataacatcatgcaatcacacgaagaatgagcttctgcaagaagtagaagacttcagtgcgcaaacgtctgtcaaggaggacgcggacagcggtgtgcaccaggtcttccggtacttggatcatgtccagacatatcctaccatcatgtttggcggagtcgaggggtctcaagtgtgcaccgtggctttccaacgggtgtgaacggccaattttaagcgtgtgcgtcttgctctcagtgttgtagcccgttttatcctcggttgtcattgttgttgtagcctagactggctgctgtcgttgttgttgcagcctagactggctgttgttctttccggtttgcaaggacagagagtaaagaggatgtaagcgtgggatgtgtgcactcttttatacagacctgcagtttgccagtttactaaa

SEQ ID NO: 2644 - DNA, 696 bp, Avena sativa
acgcgtggaggttccacgacacgatgcagaagttcttgaagaaggccgacgacgagatcctcagggttcaggctcaggagagcgtcgcgctgtcgcttgtgaaggaaatcaccgagtacttccacggcgactccgcaaaggaggaggctcatcctttcagaatcttcatggtggtcagggacttcctcgccgtcctcaacctaggtatgcaaggaggtcggcaggatcaacgaccgcacgatcgccagctccgtgcgccatttcccggtgcccgtcaacccgatgatggtcaatccgatgatgccgcagctgttcccgaggatccacgcattgagagctgggatctcagacgatgagagctcgatcgcgtcgtcgccctgaccacaggtagcatgccgatagatcttttggtggactatcaacagggaaattgccacatggcaggaactagggatggagtaaacagcctggcagctggggacagagcaccctggcactggaactagagccagctagcaggggcatatccatccagcagagcggtccagccatggcatcaagctcaggtgagtttggaggttgctgagcatatcccctaacacggtgcccgacgctcgttctcccgcacgaacaccgatggcggcgggctgttcatccttttctcctaacttttgtacctgtagattatagaatgta

SEQ ID NO: 2645 - DNA, 965 bp, Avena sativa
gtaccaggtcatcgggtggatcgccttcgcagcctggtcttcagcttctacccgcaggtcgtcctcaactacaggcgcaagagtgtcgtgggtttgaacttcgatttcctggtgctgaacttgacaaagcattcttcctacctcatatacaatgctgccctattcttcagccccatcattcaaaaacagtatcatgaaaagtttggtgataaagagatgattcctgttgctgcaaatgatgttgctttttcaatacatgctgttaccttgacagcttttaccctttctcaagtactcatctatgagcgtgggaatcagaaagtctccaaagtgtgcatatcaatcaccgctgtggtctggatagctgctattgtttgccttattgtagcttggccaaaaagtaactggctatggcttattgatgtattcaactcaatacaggttctgatgacagcaatcaagtacatccctcaggctgtgatgaacttccagcgaaagagtactattggttggagtattggcaatattttacttgatcttacaggaggggtgctgaactttggtcagatgggtgtgcaatctgttgatcagcacactttagtgaatttctatgggaatattggaaaaacacttctctcattggaagttgttttcttcgatgttatattcataattcaacactatgtgctgtaccctgtcagacgcgatgagaatggtaaggctatcatttctgagagggtagcgcctcttgtcaggcccttagaaaagcctgaagaagatagtgtttgatatatacaatgcagtccacacagcgttgcctcagatacatttcttcagggccatagttcaatctgttcaaaccaagcgttaagtatttcatgtagtattgttgaactaactgttgtacatattcattcatggattactgtaaacaaatagatatcatgcacattcagtttagtcct

SEQ ID NO: 2646 - DNA, 716 bp, Avena sativa
attatgcactgtctttgggagtctgacaggtggctgcagaagtactgcgtgagtggtactagcaaggctgattcagagccaacttctgatggtgaaagtaaaacattgtcagctagtggtggtggggcagctgttgaaggtttaacctctgatgggttctcatcaacaccgcgatcgcttctgtgattaactgctgttaagagcgaaaaattcatgaaatcgtgtacgggaaataaaaccatctctggacagcatgtagatgtccaaaggaaataaatgagctgctgaacttgtatgagccagtccttccaggcaagtctggaccgtcgttgtattttgactcgacagaaggtgattatttcacagatttgtgggggctaaggaaagggttttaacattggtggatacggtgccctggctgaattcgctaaattgtatgctcttgttggggaggcacaaagatactgtaatttcttcccacgattgatgactatatgtacagtcgtagactagtgcataccattaccagagcagtaatcttgtggctcatcctgggaggcaattgacgtatgcgaattctattatttctcggtgcccaaactggagtcgtgtatgcacaacggtggatgagtgcatatggtgtattgtccgaatggagaataaataacattgttgagtgatagctcatggtagatcttctttatgtcccctcttgg

SEQ ID NO: 2647 - DNA, 818 bp, Avena sativa
caggttgcttgacagtagtgccaaagagaacgtcccaactggtgacgacaagcagggtgaggataatgaggcccaggatgtaaagaagccagtaggaaaagtgccagtctcgagcattcactcaaacggttcaagccagaagaaaggtgcaaaacacaagaagtcgtattctgatgcaagtggttcttcgtcaggccaatctacagccgtgatacctgccacttctttgggatcatccaagctaaagccgaagacatcggttgaaacctctgaggaagtcagctctcaacctccaaacctggctccccggtccacaagcaatccgaaagaaagggcagcacaggtcaatacaccaaccaagaagcgcctatcccttcctaacaaagcgactgcgaggggggagtaggaaaaggcccaaccagcagcggcgagaagactcgttccggcagttccaagagcgccgcggaaggagcatccaagtctgaaccgaaacagcggccgggccctgctagcacaaccacgaagcgaatccaggcacaggcctgataaatcagctcacccgcatttcacccattgttgccctctgtcatgtgtgtcattgcatctctgtatagtagaccaagaaataaaccctgcatctaggttgctgccatgttccatgcgtctggtttgttctgccactgctaggcgtgtcgcgacgttttctcgcgcttctgtcacgtgccattctgtaatgttttcttccaccccggtggaactgaagaagcaagcacatgtcatatgcaagttgtgttcattcttggacataagaaaaccgc

SEQ ID NO: 2648 - DNA, 619 bp, Avena sativa
cttggatgtaactgcaattgcttctgacaagatccttttattggattcttattttactgttgttatcttccatggaatgaccattgcacaatggcggaatgctggttaccaagatcaagaaggccacgaggtgttcgccaagctgttaaaagctccacatgaggaagctaatgcaattatcaaggagcggtttcctgtaccccgtttggttgtctgtgatcaatatggatctcaggctcgatttttactggcaaagcttaatccatccgttacgtataactcccaaaatgctgctgcacctggaggagacatgatattcacggatgatgtgagcttcgaggtcttcatggaccatctccagcggctatcggtccagtaggataggatatctcgctgcatatagcaaattttgtactaccaccaaccatctcctgtgctgtacctgtacagtaagagacattcttcataatggtttatgatgtcttgaaacttggtcgtgtgatcttgggctgatgcttgtaccatttgattggaaggtgcatgcttgtaccatttgatatccctatttgcggataccaaaaaaaaaatcaatagatgtgccatttgattgaagaaaaaa

SEQ ID NO: 2649 - DNA, 768 bp, Avena sativa
gagcaccaccatggccaagctcgccgactaccacaacctctttcctgcacttcgagagtttgtcggcgcaggaaaacctgtatggggaacttgtgccgggctcatcttccttgcaaaacaacggcagtagggcaaaaatcaggaggtcaggaacttgttgggggactagattgtactgtccaccgtaacttttttgggagtcagcttcaaagctttgaaacggaacttccagtgccaatgcttgcagagaaggaaggaggaagtcttacatgccgtggcgtatttattcgagcacctgctatactggaagttggaccagatgttgaagtattggctgattgccctgttcctgctggtagacccagcattacaattacatctggcgagggtttggaggatgaagtgtactcaaaagatcgggtgattgttgcagtacggcaagggaacatcctcgccactgcctttcacccagaattaacatcagactctagatggcatcgcctcttcttggccatggacaaagattctcgagcgaggtccttcgctgcactatcgctatcagcatcttcaagcgagccagaagtcgtgccgaagaataaacctcttgatctacccatcttcgagtagaacgaagaaaaccaaattttgatcattcagttggtgttaggaaagtgttttgggcatgtgttatgttcactccgaaggatactactggcgttaaaactgtaccaaccaaaataatggctccaaacactatgatattgcttt

SEQ ID NO: 2650 - DNA, 538 bp, Avena sativa
gaaattacagcagatcaccaccgcctccccgtgcccgaagcatcagcaggtctccgccgcctccccgcgcgcgaagcatcagcaggtctccgccgcctccccgcgcgcgaagcatcagcaggtctccgccgcctccccgcgtgcgaagcatcagcaggtctccgccgcctccccgcgcgcgaagtatcagcaggtcacctccgcgtgctcgtgagcggagctatagcaggtccccggcacagccaccccagcgtgaagagtccccatatgctgataacgcgtgagcacttggttccgcagatgctggaagtcttgtgcggccctctgtctgtttcccctaaatgttttttgtactgtgactatttggattaccatgtggctgagtatgttctttgttagcatttgtgtaatttcttttgtgaagagtctggctgctgatacaattgatgaagcaggagcctagcatttctgttgactggatgactcgagcgtaattttagttgttctgaagacaagacatgtctttcaataaaaaaaa

SEQ ID NO: 2651 - DNA, 492 bp, Avena sativa
agatggagaatttaagaatgttagaggaaaaaaccgaatgagtcctaattctgaaatgagaactaacttatcttcaatctctcatatctcctaattctaattagtaccatcgctggcatacttatggtggaattgtgaactggtagatgcatagtgtgataaagtagaaacataggttatactgtgcaaaataatagggactgacatatttgaaatttttgtaatttaggtggcttttcgcaatgctcatgagtcaatgcacggatcataaagcaaggatgaacgctttccgataagacatacacccctgacagtgcacggatcataaagcaagttcagctgataggtacaacacaggatttctgcagattagtaaatgcatgcactcttgctcaaaaaatgctaggctttgcctagcttactataccatgattcaatttcttgggtgacatttttgcagcaaagacacactcttgtgtttctttatattta

SEQ ID NO: 2652 - DNA, 695 bp, Avena sativa
  modified_base (300)..(300): a, c, t, g, unknown or other
tcccgggacgcccctgttccgcctcgcccccaccgctaagaaacacacccacgaaaaagaggaacgagagacgaacagcaggttttaccatcgcgatttcctagaagcgttccgtggagaaattctgctgcatccaaagatgccgcgcattcccctgatcagattccccaagaggcatctcaaagtcccatccacagcaccagcagcggcgcaatctgctgcagatcagcatgcgaccctcatgtccccgattggggagctaaagtgaggcaccatcttctgggggtgaaaaaaaaattntcgctttacatcagatgttccttcggcaccttctcataatgctgttggagggccagcttcacaacttcccaaacgcacaccactctccgaggaagagattgaggctatcatgctcggtggtgtcgtctgatatcgcttcccatcaacggtacatttggcggagcatcaataagacaccctacgtcatccctcattctcgtccttcaccttggaagtggtgttagtagagccatgttgatactatggaactcttcctttttggtccccagaactcaccagctgcctcacccgttttctgaatattctccacatgtgactagccgaaatggtcaacgctgaacatgtggtgtatgagtgccctgcgaaaaatatgtcgatcatggaatgtttcaaaa

SEQ ID NO: 2653 - DNA, 781 bp, Avena sativa
ctgaagaatggtgtagaggtgaagctgcagaggaatgctctcagtgtcttggaagctccaaccggcaacgaggacgatgatgagatcgacggcaacagttcgttctgcagcagcttcgacatgggagagaaagacatgaactactcaagcatagagtaccagaaaccaacaaagccaagggttcggcacacgaggccatggtcctcgtgcacgacgtccagcagccgaggaggcaacttccagtcaagttcgaaactgcgagcgagagtaaatctgacaaaacttggaacacccacactatggagatactggaaccacttcaatcttgtgagcgtgaaccccagcccatcagaggagcagctcttccatggggtccagcagcatttccagtcccagcaactggacgagttgcaggtgatcctggggttcatccagacggcgaagaggctcaagaccatgtacaactcctagcaatgcctcagtcaagatgcaatgcctcagtggtgggtgtctgttgttagtagagtggttctcaagagcttagatttgcatgtgcttaagtaagttaatcttagtcttgagagaggtgaacagaacagagagggatttgtatctagctggtgcatttgatcagtacaaattctctaatttgtcttgttaatcttacccctgtaatgagagcacttggtgatgtaaccccttgttgtgaactgaccaccgatctcagttatttggagataatataatgtgaagttatgggtagaaaaaaaaaaagaaaaaa

SEQ ID NO: 2654 - DNA, 766 bp, Avena sativa
ggttccatcaaagatacagacaaggaagagaagctaaaagggaaacctggctatgagcatctgaatgatccactgcatgtgttgatcgaggctgagttaccagccaatatcattgatgcaagattgagacaagcacaagaaatcatggaagaactgctaaggccagtggatgaatcacaagatttctataaaagacaacaactgagggaactggcggtgctgaattctaccctgagagaggatagccctcatcccggaagcatctccccattcaacaacggtggcatgaaacgtgctaaaccgagccagtagagaagcaattgctccatcttacatgatgttggaccaagggccttgtgccctatctagggcatgccatctggcgcgaggtgggcagttgtgtaacaaacattaagcttatttttagtatcaaacaacattaagcttatgctggttatccataatcgagtgggtgctctctccttctggtaaggtgaaaccggtgcctgttagaactgtccaatcttctactggaaatccagctgtgttgttgtaaggtcaacattcttttctttcgtcattgactgttaaccctagcagcttgtcatgctaagcataggtgggttttccttttccaggagacttgaggagtatgtcgactgagattttaacttagatatttaatcagttaattaacttgtattatgtctctttaaacactatggagttgcaaattgcagatggtaattttgagttagaaaaaaaa

SEQ ID NO: 2655 - DNA, 550 bp, Avena sativa
gcttgccgcggctgccatggttggcaattcagccccagccgcagccgcaggcactgccgacggcaactcctctcgtgccgctgctgacggcaatggttcgaggagaaattctgcggcaaccgatgttgccaccagcagcaaccaccgtgtccggtaccgtttcaaggaccaccatgcctcgcaacgcccttcttaccagtacaaccagaacaatgtcgacgctgattgcttacgggcaccaccgggagtggcagcgactctgacaacaaggaagacgaggaggaggaggaggaaggaggaggaggaggaggagatggaagacgaagaggaagagagccagtaacatcggacacaccgcaaaggtgattcgagaatttctatttgttaactagcattgtcctggttagaattgctcccatttagattgttgttctgggagcaagaaaatgactattgagtgctgctaggttgtagtgttattggcaaccaggagtagcagagtgatggtaattagctccctgtatgtgctccatggtgggcggccgcaaat

SEQ ID NO: 2656 - DNA, 456 bp, Avena sativa
ggcacaatgatcttaattatctcggatcgtctgaaactcacaataacatccaaaatcctccgagtttaaaactaaataaaggacatacgtagataaaagatactatcaagactggagacaaaaatataaggatattagaacctgcatagaacaagaataaacaataggtagaaacaattagtctaatggccttattacaagcagcacgagaaattaaataggcatgtgagcgcacacacacacgcccacatacatggcacatatatagttgacaccaacacatggattgactagatgtcgtcgctccacacactgggcaatttattggaggtaaacattaacataacttggccatagcttgaagaaacgcaatagatgcatatgagtggcatccatgctgatagcagtgcatgcctaccattttattcttgtccttccatcttaatttcttccatc

SEQ ID NO: 2657 - DNA, 647 bp, Avena sativa
gctgcgaaggtttctgatcttgatttctggaacggtgccaagggatccgattctgtcaccaatggctgcaccatgttagacacagatggcatcgtgcatcagtatggcattatactgctggagatattgaccgggagagtccagttccctgagcaagatttgccacttgagaagtgggcatctcaatacttcgaatgcaagatgcctctttcagagctgattgactcaagcctgtgtccctttcccgaagacgcggcgcgcgcactgtgcaacgtcgcgaggtcttgcatcgatccagacccaagtaagagaccgaggatggcagaagtggcagctcgtatgaaggaaatcacgtcgttggggcccgagggagcgactccgaaggtgtcgccgctgtggtgggctgagctagagatcatgtctggtgctgataactgacgatgaaatcagtcttcagtgttccgattcgtggcgggtgattatggattctttggtttgatttgttgttcctccttgatcctgaaaagttgcttcgtgggctgttatgctttgagttagaacatgtggtcggttataatggcattgtaatgagatgtcctgccagaaaacatgtggaagtaaaattgggaggttgtggttaatgtaaa

SEQ ID NO: 2658 - DNA, 622 bp, Avena sativa
atttgcggccgccccatggtctgagcttattcatacatgatgcttcaggatgaaaagaagtttgattcaaatgcagttaccaaactataagtgaaaacaagttcagagaagacatccctacgaaattgatttatatttattaaaaggtttcagcggctcagtatctctggatatcgtgagagaacagagaagcaaactcagcacaaactccagtaaatatgcaaaatttaagaatgagataggtacaagtgaaaaagcagaggcagcatcaacagaaacaaaggcaacaccatgtggtcctgtttcctcctcgctgcacacaatgggtggatctccgaggctagtgcatctagcttcagttccatagctcaaagagatgtgtcgtcacagtgaatgtaacttactgtatatgcttgtttaaaatatatgaactactattatatcatccgcattgcctactttctaaggctatacaatctgttgtagttttttttggctctgtcatagaattgagaaccactagaccactatgtagctttgtggtctgatgtattagaggatttggtttgtggtgattctgatatattattgttttcttgagagttaagataggaaaaaaaaa

SEQ ID NO: 2659 - DNA, 383 bp, Avena sativa
gaggaagaaagtgtgccacttgtgactaataaagctgtgtcacacaagcaatgctgccgcctgagatgaatggtagatggtcttaattccgtttcagttgcttcttttccaggaggtgccatgagaacgcgactttttcacgagtgtggttgtcgctgctgtattgtgcttcacggcttgtgttgcagtcttccacccggatagagtaggggcggcttgcagctccagtaaagaggtacttgtttagtgactgcccaccatagctgatgttaggttagattaattttcttgctgttggtttcctctgtacyatatgaacaccgctccactgaggcattgcttcttgtgtatctgtgatcaaataaccttttcctaccagtggg

SEQ ID NO: 2660 - DNA, 570 bp, Avena sativa
gtcggaggaggcctcctgccatataaacgaccacgcaccggcgccctcggacgactcgcctcgattgctcgatttgcttcctgacctcgagagtatcgaaacaccagcaggagcagagcagccgacgaaaccaccatcaccactcgatcggagcttccatcgacatgggtctccaggaggagtttgaggagtacgccgagaaggccaagacgctgcccgactcgaccaccaacgagagcaagctgtgtctctatggcctcttcaagcaggccaccgtcggccccgtcaacaccgcccgccctggcttcttcgacctggcaggcaaggctaaatgggatgcttggaaggccgtcgaagcgaaatccaaggaggaagccatgatggactacatcaccaaggtgaagcagctgctggaggaggctgctgccgctgttgctgctgcatccacttcttaggctatagaagcgcaagcagcaaaggcatatatggtggtggaaaatatgtgcgccaatgatcccaaataattttagtactagtacttgtcaaaacttatcgtcatgggtgtattta

SEQ ID NO: 2661 - DNA, 753 bp, Avena sativa
aagtttgtttgctgatcgggtctttgatttatttgacacaaaacacaatggaattctaggatttgaagaatttgcacgtgcgctatcagtatttcatccaagtgcccctcctgatgagaaaattgacttttccttccagctatatgatttgaagcaacaaggtttcattgaaagacaagaggttaagcaaatggttgttgctacacttgctgaatcaggaatgaatctttcagatgaagtcatagagagcatcattgataagacttttgaggaggcggacacaaaacatgatgggaaaattgacaaagaagaatggcgcaatctagttcttaggcatccctctttactgaagaacatgacactccaatacctcaaggacatcaccactacatttccaagctttgtcttccattctcaggttgatgacacgtaaaagctgtgagaattttgtatactagtatgatggaaaatcagaagacggtctcagtgctttgttaagctttccgaggatggtttcacggaagccgtagtttcccaaagcatgttacgtgctggattcgattattccactcgttcttattgttaatagcttcttttttgtctggaagtgtggctggaatctttcagcctgtgtgatgtttatatggagttccttcttttcctttggggtagctggtagtaagggttagtgtttcttttgtacatagctggttcgttttaaccaactgtattttacgcggggaacaactgtgt

SEQ ID NO: 2662 - DNA, 727 bp, Avena sativa
  modified_base (677)..(677): a, c, t, g, unknown or other
acgatggccagccgatcttcaccacagttcttcaatttaaaaagaaggaggaagaatttgtgtttaacaatgtatctgagagaccagttccttctttgttgaggggctacagtgctcccattcgtcttgattctgatctgactgagagtgacttgtatttcttacttgccaatgattcagatgagtttaacagatgggaagcaggtcaagtattagcacgcaaattgatgctcagtcttgtggcggacttccagcaacagaaaacactggctcttaatccaaaatttgttgatggacttcgagcaatcctgcgcagcacaagcttggataaagaatttattgcaaaagcaataactctgcctggtctaggggagattatggacatgatgccagttgcagatcccgatgcagttcatgctgttcgcacctttattaagaaggaactcgcctttcaactcaaagatgatcttcttgcagctgtaacaagcaacaggagttctgaagcttacgcatttaaccatgatagtgtggctcgccgtgcattgaaaaacacatgtcttgcttatcttgtatccctgaatgagccagaagtcactgaacttgcattgagtgaataccactctgctactaacatgaccgagcagtttgctgccttagcagcattatctcaaaacccnggtcaagttcgggatgagccctttggacttctatagcaagtggcagcatg

SEQ ID NO: 2663 - DNA, 971 bp, Avena sativa
tgcacggataacaagatatcagctgccttggctctccacaccttgacctcctccaatggatgacagcacgtcttctgagtcgacaaccacttgttgcaggtggttcatcagggctccatgcagcaacttcttgagcctatcacactgatcggcgctatggccagcactttgcatctcttcaagctgacaccaaaacctctcgattgtggtgtacgggaaccaggcagcagacatctttttgcggtggagcacatccaccggtctcgatgatgcaaaagaatccagatactccaccaacaagttggctgcttctgcgtgccggccataatttgtgtacagtcgaaataatgcagctgggtctgcctctttgccacacattccccatgaaatcatcctacttccacccttggtagtcttgaacatctgaaccagccaaagaggtagctcgatatcaggatcagtgtaaagaagtgtttcagcaacaatgacaggcaacctcggatgcaaatctttatatttatccaaatatagttcaagagtttcccactggcaacttccctgcacttgatgggccacagcaatcgttttgctatcgccatcctgtgcatcatcctcagaaggtagcagtaaaagttgttgggtgtcggtaaaatttctccctgggttgcctactctgttcgggcaacactgctgtgcaatggctgcaaagacacgttccaattctcttttcattcctgactccttccaaaatttcagcacaatggtgaatgccaggtcatataaattctcatttataagaatgtccgtcagagcttcgatagaatggctttcataagatttggatctagaatttacagtgctaagcatataaagtgcttccgttagtgcatattccttttcaagaatttcaatgtcaacacaaaactgcaatctagagagctctgaatctgtgccaaaagcatagttctcca

SEQ ID NO: 2664 - DNA, 847 bp, Avena sativa
agaaggatgcgatgtgttatggattctatccctgcatcagcaattgaacaaggaggaagagctccaacacagtctggatttcctttgagtaacaatgactcttctgcatcaatctcgttcttcaagtctaaatcatctcgaatggacagctccaccgctccattatccactcaggatcaagcggaaagtaagctagtgctgaagaataagtctcccaggtggcatgaaaatctgcagtgctggtgcctcaacttccatggacgggtgacagttgcatcagtgaaaaactttcagctggtggctacagatgagagtgctccaactaaccaggagcatgaagacaccaccctccagtttggtaagatagggaaggacttgttcaccatggactaccgttacccggtatcggcgtttcaggcatttgcaatctgcctgagcagcttcgacaccaaattagcatgcgaatgaaacagaggtgtcgaagaaccgatagagtgtagaaacaagtggctggattaatccagaactacatgctagatatcggagcccaagtaggtaattagaaagcttgatacttctgttgaacaatatcagaatgtaaatccagccccaacaatatctagctcggtgtggcttggaatttattttatatatttttccccaacaaagtcacattctttacccccagttgtatgtatactgaaaatgattgccgttcttcacatccgaagagagacagttctataggcacaattttctacctggtttgttgtatgttacagattatgttattgtgtrttttatgtttgttgaacaatatcaaagtttttattttagtaaaaaaaaa

SEQ ID NO: 2665 - DNA, 913 bp, Avena sativa
tgaatgctgagttgccacaaaattctcggctacattattattgaggcattcaatgctaggctattcgattaacttgatagcaacagatgacaataaaacgaaggaggtgaagcaaaccaataaggaaacaaaaaagattcaagggggtcccgcaaacatatgcaacaaactttagatgctgaatttggagttgtcagaggaattgacttcaaaaatgttttcacagtagttaattttgacatgcctccagatcctgctgggtatattcacagaataggacgaactgggagggcaaataagaccggtgcatctatatcacttgtttcaccagaggaggataatgtttttgaagagattgaaaacatgctgcagaatattgagaaaaaagacaccaactgcatcttacctttcccgttacttacgaaaaatgctgtggagtctctacggtataggtctcaggatgttgctaggagtgtgacgagccgtgatatacaggaagcacgtcgtcaagacataaagaatgaaatcctcaattctgataaattgaaggctcattttgaagagaatccaacagaccttgatttgctcaaacatgataagatactaagcaacaaagcaattcctgttcacctgcgtgatgtccctgagtacctagttgatcccacaacaaaagaagccagcaatgcaatcaaacttacaagggctgctatgggtattgataatcccggaaggaagaaaagaatgggattcaggaggggatcaggcaaaagtagtgacccccttagaacgttctctgctgagggcaaaccgcggagacgagggggaaaggaaagagacggagaacaagatagaagaaagaggaggaagaaggcagatgcctaagatcgcaagcagttcactatcaattttgctc

SEQ ID NO: 2666 - DNA, 717 bp, Avena sativa
catcatataaggttgatcgtgcacctgtcaattatatattagccagtcatcaaatggaagtgggaagcatggtggtgaatagcgattcctccaaaccttctacaaccggctcccttcgacctgcccagaatgctgattcttccttcggtccaagagctttccgcaaagcccatgaaaatgcagagggcacggatgaagcaaatgctgcaattactgctgcaccactcccgcctgctgatctgttggacctcaattccaaagtaggaaactgcatgccattagctgatattcgtatgggaacatggatacacagcattgaatgtcggcctggtcaaggggcacagttggttcgagctgctggaacttacgctaaagtggtcaaggagtcagcctcccaatgtcttgtacggctaccatctggtgctgagaaagtcatagattcccgatgccgggctaccattggtatagtttccaacccctcccatggtgcacaagagcttaggaaagcaggacacagccggtggttaggctggcgcccggttgttcgtggtgttgcaatgaatccagtggatcatcctcatggtggaggtgagggccgcacgaaaggtggtaggccatcagtgtcaccttggggtaagcccaccaaagcaggatataagacagcaaggaagacaccaaaagcatagttctttccaacggagatccacatcaaaaccc

SEQ ID NO: 2667 - DNA, 793 bp, Avena sativa
tatttagaagagtgcgcaagtttggtagagatgttcaatgtcccagcatctctcaagagcatgactattgagcggtgtagtaagctcgagtctatatttggcaagcagcagctgggcacgtcacagttaattcaagggtcttcttgcagtgagccaatcgtgcccacagctgtatcacagctggcatcatcacccttgaatcagttttgcccatgcctagtatatctatggttatatagatgtgatagtttatcaggggttctacatcttccaccgtccttaaataccatagttattggtttctgcagtagcattcaagtcctgtcatgccagctggatgggctcccaaaaccagaggtcactgcttccataaatgcaccggacccatcagcagcaacagcagcaggagagcatttacttcctccttgtctcacatatttatatttagagtcctgtgctggcatgttgggggggcattctccgtctgcccacctccctcaagtacctaaccatcgcaaacaacagtgggctgacatcgctggagcctgtgtcgggcccacctcccctatcgttgaaacacctttggctttatggctgcactgccctggcatccctacccaacgagccacaagcatacgggtctcttttcagtcttaaagttaaggcctgtcctgctataaagaagctcccctatatgcctgcagcagcgactaggcagcatcgactggaaatatctagatgcccagtatgaagtaatgacatttaaaccaaagacatgaggaataccaagact

SEQ ID NO: 2668 - DNA, 662 bp, Avena sativa
gtccgaatcgctgatcaggaagatggacttggaggcgcggagcctgcagccgagcctgaaggcggggctgctcgccaaattgagagagtacaagtctgatctcagcagcgtcaagagcgaggtcaagaaggtctcggcgcctaatgcccaccaggccacccgggaggagctcctcgaggccggcatgttggacacgctcgtggcgtcatctgatcagagaggaagattgatgatgacatcagaaagattaaaccagtcttcagatagaattagagagagccaaagagcagtattcgagacagaagaaattggtgtgtcaattcttcaggaccttcacaaccaacggcagtcactgctgcatgctcacacaacattgcatggcgtggatgactacattggcaaaagcaagaagatcctggcgtccatgtccaagaggatggacaggaacaaatggaccatgttcggcatcatcgcggccctcgtgtttgccatcctcttcatactgtacttcaagttcgctcgttagagctatataagcgtctccgacccaagccactccagacgcagcatgtgcctgagctgaatattcgttcaccgagataactaactctgcttcctaaggtgtgtgtttgtgtgtgtgtgtgaatgcgatgtacagtgtc

SEQ ID NO: 2669 - DNA, 807 bp, Avena sativa
caccaccgccacaacttccacctccagcacgccggcgccgcccgcggggttcacgcctccggtgcccaagcggttcgaggtcaagcccggccagtctagcaacatcgctggcgccgccctcgccttgcccttccgcctcggcaccggcgtcttcgtcctaggatatggagtatcacttgttgatgctgaccagataccaccagatgagtatgctttggaattccaaggtcgaaaggtgaaagagacatcaaaggtggggcagtgtcctcgacctacaaggcctattgaaatatacgagtttgaaggctgcccattttgtcgaaaggtgagagagatggtatctgtcctggaccttgacgttttatattacccgtgtcctaaaggcggcccaaccttccgtccaaaggttaaagagatgggcggaaagcaacagtttccttacatggtggatccaaacacaggagttgccatgtacgaatcagatgacatcataaattacctggcaaaaacctacggtgatggaagtgttccgattatgctaaagcttggtctattgacgacaataacagcagggcttgctatgagtgggcgtagccggaagggatcttcctactctcctgcaaagcttccaccccagccaatagagatatgggcatacgagggatctcctttctgcaaaatcgcccgtgaggcccttgtcgaattagagttgccacacttgctacacagcattgcacgtggcagccccaagcgaccaaagattttttcaagaaatacggtcttttccaggcgccttatatcgaggat

SEQ ID NO: 2670 - DNA, 882 bp, Avena sativa
gataagaatccactggcatgtgaagctcaactacaaggaatactggagagtgaaagtcactatcacaaacttcaactatcgcatgaattattcagactggaacttagttgcccagcatcctaacttcgataatatcacaaagcttttcagcttcaactacaagccacttaccccatatggaggccgcataaatgataccgcgatgttctggggaatgaagttctacaatgatttgctcaatcaagcaggtccgcttggaaacgcgcagtcagagctactaatgcggaaggactcagagactttcacctttgataaaggatgggcctttccacgccgtgtgtacttcaacggtgataactgtgtcatgccgtcccccgactcatatccgtggttgcccaatgcaagccctctaacaaaacaaccaatgacgctctcagtcttggtattctcgattatgttggctactttgctggcttatgtatgatgaatgagaccaagagatccagcgagcttcaagttgttgtcaggttcctgaggtgcgcggcgaaggtcatttgttcattcaattccacttgcataggagagacgggtgtcgcgctgaggaaagctgatatatgtgtgttttgtaagttaaaagggccgaaaatgtatttcttgtttggtatatactggccacaacacgttggtgaacttagttactgcaatttaggtaattacagttgcaccttttgtatttatagcaaacggagttttaattgaatcatatgactgcctttcttgtagtaaatgtatgggttccataagaatgttttgtactataatcaatgacacagagatgctgttggttgaggtaatttagcattgttttccttagaaaaaaaa

SEQ ID NO: 2671 - DNA, 842 bp, Avena sativa
atcctctgttgacggttgcagagatcatggcagaagcaattgacctaagtacagcaacaccggataacacgtccaatgcagtcgagtgggcgttggccgagatggcaaaccgcccagatgtgatgagaaaagccatggcggaactggactcggtggtcggcaaggacaggctggtccaagaagcagacatccgccatctcaactacctcaaagcatgcatcaaggaggcactccgcatccacccctaccacgcattcagctcgccccacgtcgccaccgcagacaccaccctcgctggctacttcgtccccgagggtagccatgttctcatcagccgacttgggcttggccggaaccccaaagtctgggacggcccgctcgagttccggccagagcggcatcttggaggcggtggttcaaagaaggcggatctcaccgagccggacctacggttcataacattcagtactgggaggcgttcttgccccgcggtgtcgctcgccacttcgatcacgatgatgctcttcgcaaggcttctgcaggggttcgtctggacgatgccctctggtgttgccagaattgagctccaagactcgccaacaagccttgcattgtccaagcccttacttctcgaagccaatccaagactggcgccacatctttatgtgatcacgccatgttcaaccatctaagcaggaatagtactactacagtctacagaataatttgattgttccatgtttatgtgtgtgtgtgtgtgtgtgttatagaattgtataagttaataaggcctaaacaataatgccaatcgtattcagtctagtaaaagttactacgtacaa

SEQ ID NO: 2672 - DNA, 879 bp, Avena sativa
  modified_base (838)..(838): a, c, t, g, unknown or other
  modified_base (860)..(860): a, c, t, g, unknown or other
ggatgagaacattcattcgatctcgaagaaagatttgaaggcgtatatttcaactcattatacatgtcctagaacggttgtatctgctgctggagctgtcgatcacgatgaggttgttgataaagtcagagaattgtttacaggattctctactgatccaactactgcagatcagcttgttgaggcaaacccggctgtttttactggctcagaggttcgtatagaggatgccgagatgcctctagcgcatcttgcaattgctttcaagggttcatcttggactaaccctagatcaattcctcttatggttgcccaaagcatattgggatcttggaacagaagcattggtatagggaactgctcagggtcttccttggctcgtggcatcagcaatggtgggttagctgagagcttgatggcgttcaacactaactatcgtgatacaggattatttggcatctatactacttctccgcctgatgcactacatgacctgtcacggttaataatggaagaatttagaagacttgcattcagagtgtcagagacagaggttgctcgtgctcgtaatcagttgaaatcttctcttctacttcacattgatggatcaacttcggtttctgagaataatggtcgccagatgctgacttatggacgagttatgccattcttggagctttttgctcggattgatgctgttgactgcgctgcaataatggaaacagccaaggagttcatagttgataaggatgttgccgttgctgcagtgggaccgatctctaatttgccagagctgagttggttccgctcacagacaagttctgatgacgaatttagngcaagaatattctcgctgggcncataaaatactgaagctgc

SEQ ID NO: 2673 - DNA, 850 bp, Avena sativa
acgcctcctagctgagtggaaatggaaggtgttgttgtacggcgagtgataccttcggacaacagttgtctcttcaatgccgtcgggtatgtgatggagcatgacagaaataaggcttctgagctcagacaggtcatagcagcagcagttgcaagtgaccctgggaaatataacgaagtatttcttggaaaaccaaatgaagcttattgtgcttggattttggatcctgaaaaatggggaggtgccatagaactttcaattctgtcagaatattatgggcgtgaaattgctgcatatgacatccagacaacacgctgcgatctgtatggtcaggagaagaattatggcgagagggccatgctgatttacgatggtttgcattatgatgctttagcaatgtctccatttgaaggagcaccagaagaatttgatcagaccatctaccctgttgaccgtaaccgttccattggtccagtagaaggccttgctcttaacttagcgaaggaggcaaataggaagcggagctacacagacactgcaaactttacattgcgctgcggcgtgtgccaaattggcgtcattggccaaaaggaagctgtcgagcatgcgcaagccaccgggcatgtcaatttccaagagtacaaatgactgtagaagatatactagttctgttgttgttgttgtacactcatttgttgaatttagttttcttcttcggttggcaggatattgtacatctgtactattgcataacactaatttgttacagagtaaatttaataagctccggtttggatattgatgttgatattgactgttaatttaaaggatccaagatccattgaycaaa

SEQ ID NO: 2674 - DNA, 754 bp, Avena sativa
cgctgacatgtgcttctcatataaccgcaccattctctgctgggtggatttgttcaaaggcatggtgatctgtgactcggtgcttcggatcgacggccgcctgcagttccgcttcattccgttcatccagagtgtgtgacctatgaccgcagaggccaaagttctgagcgtccacggcagggagaggatttccgttccattgcatgtgttggtggcagcatcaagtttgtcaccatggatggctatggtcagcggcctggacatgaagtatcgctgaccatctggactctgtcgtcagacctctctggttggaacaaaggccaggagtaccacctgagggacatctgggcaagcgaggcctaccgctccttgggcttgtcagagaccgttccgtcgttcccagtgctgagcatggacaagggtgacgttgtctgcctagtcgtcactcattgggacgtgacagctgatagtaaagtggtggtgttcaatggccagcatttgcttagcgttgacatgcagcataaaaaggtttccatcattccaacaaatacagggcagctacattcccaactctttgccagtgagtgcagtgcatacctacagcgcttagaggaccaccagggaaagttcaaagcaagaaaggtgggggaaagtggaaagaggtggtgctttgagatcttcgcatcatgtcatgtttcgaaatttggaccaagggtgtcacattgtttttgtttcccacaatgtgcaactgatt

SEQ ID NO: 2675 - DNA, 912 bp, Avena sativa
tgaggtatatggtcattcttgtctatggtagcacatcctttgtgccaatgggtgtttttggagagattgttccggtaatcactttgggagctatatcaaagagatgggctgtacctggctggaggcttggttggatagcaacttgtgaccctaaaggcgttctgagaaaaaccaaggttactgattccctgagaagtttcgtaaatctaatatcagatcctgcaacatttcttcagggagcaattcctcatatcatgaagaacacaaatgatgaattcttcagtaacattgtcaggctgttgaaggagactgcagatatatgttatggggaaataaatgaaatcaagtgtattacttgtccctacaaaccagaggggtcgttttttatgatggtaaaactggatgtctcacaattgtcggatatttctgacgatgtagacttctgcagcaagttggtgaaggaggaatcagtcatactgttgcctgggaaagccttgggcatggaacactggttgcgcatcacctttgctacggagccaccaacattgaagcaaggactcgaaaggctcaagtccttttgcctgaggcatcaatcgcaggctaattaacactcagaagttcgtggtaacactgcatggtatttcctcaatgtttgttgagattgttgcttacacatcatttccaatacacgacatgcccgcaaaattgaataaaactggcccgtgtctatcacgtgaggtgcagacgcaccgtaggactaatcggggaggtagtatttttaaggaaaaaatggattgcctcagtatgctttcatgttgtgcatgcttgcctggctctgttctactttaatcgcttatcagttcgtatcactttttcacattttaagatctccacatgtttatgaaggactag

SEQ ID NO: 2676 - DNA, 996 bp, Avena sativa
ggaaccaattcgagtctcacttccactggtgggatcaggtcgacgagcatgtgctgctgggtgcggttccattcccgagcgatgttttgcggctacagaagcttggagtttgcggtgtcgtcacactaaacgaatcatatgagaggcttgtccccaagccattgtatgaggctcatgggattgaaaacctggtgctgccaactagagactacctttatgcgccttcatttgacaacctatgcaaggctgttgacttcatccacagaaatgcttcatgtggtaaactgacttatgttcactgcaaagctggacggggacgtagcaccacagttgtgctttgctacttggtgcaatacaaacaaatgactcctgctggagcttttgagcatgtacgctcatgcaggccaagggttttattggcttcggcacaatggaaagctgtccaggaattctaccagctgagagtgaagaaaactgagaagtctagttgcctagacagcccaattactaagcccctttctccagtattcctttccactcgtaacctcatcacttttgatgagaagacattcgtgatggtctcagaatcagacctagaagggtataatgcggataccttggcagttaacatgggcagtgacttgtgggaaataagcttagtataccgtgtgcagtttgccagccaggcagcatttgcagggttttcatacctgtggttgcagtgtcgtgcccagaagggcaaggaggcactcgccgagagcatggcgagtgagagctgctctcttgaggcagagcagcctgccagtggccacccccgtctacttcaaggtgtggtggttaatccgtgaatcgccctgagttacctggtgtcttttgtcttgcacccgtaaatatgaaagagaaggacatgcaatgtgaagcctctactccagtctgcagcaaccaaggagtgcagttgttctggtctgtacatatgtgttgtaataagttgactgc

SEQ ID NO: 2677 - DNA, 841 bp, Avena sativa
cgtagaaatagttcaccatggatctaagcagcaccagcctagtaacgagtattttgatagcggtgtagatgaccttaaaaacccgcagcattacgttgtatgggatatgaatctgaatagtcatgtctattctgaatttgtagtcaccatcaaattgccttctaaagccaaagattccctcttcacacaagaagattgtcatgattcatctgatgtttcactggtgctgagtcccagttcgcctgatagtgtatcccaggacgtaaacgttgaggcttctccagcattgggtggtcaatatggagcccccatgttaggagattcaatggctaaagctccaagtacaccttggatgcctttctccatgctatttgcagctatttcaacaaaacttcctcgcgagagtatggacatgatcaataactgttatgaagaattcaagaccaagaaaataagccgtgtcgacctagtgaagaggctgaggcatatagttggtgacagaatgctcatatcgacaataattcggctccaagataagctacctcctgtggtcaagcgtgaagcaccagacacagcagcccaaccggttgccaagccacaaggtcagtgatggaaggtgaaaaagtgaagaaactggtcgacttgatgggatgtacccagaaccgggaggccaccaaatgaatgaagtcttctgagttgtttgcgtctgttgtctatgcatatgctgctatgtctctgtgttatctgttttagttgcggaaaaggaactgagtatacttttgtgaacctaggtggctacatagtagaggctccttgttcaccctcgtgtttgggttcattg

SEQ ID NO: 2678 - DNA, 775 bp, Avena sativa
catcttacgggtcttgtacatgtctctgaggtctcttgggatcttgtccaagatgtccaagattttctaagtgaaggtgatacagtccaggtcatagtggtgaatgttgatgcggagaagtcaaggatagctttatcaatcagacaattggaggaagatcctctactggagacattggataaaaattattcctttggaacccgatctgtcgccagatgctcagatcacgtcatctcctgcagaaattgaacttcttccaggacttgagggtatatgtaatgaactattagaagaggatggcataacagatgtgaagttcgggcgccaggcattggagaaacgtgtggtttcacaagatttagagctttggctttctagtatcccagctaaggacaaccagtacaagcttcttgctcgagctgggagacaggtccaagaagtgtacttgacgacaagcctagaccaggagggcgtaaagaaggcggtacaaagagtactaggccgtgttccttgagcctgatgcgcagcagagtttgaccatgagagaggaacatcagttccctactaggcgactacaccatactgaaatgacattatgaaattccaccactatttcgacattctgctgtactgaaacttcatcccagccaagacaccacgtaaccaaaagttgtatatcttttgctgctgtacaatgagtaggtaggcatgtcatggcatccttggttctgcatgaatgatcttggctgaactgaacctaaagttcacctgtata

SEQ ID NO: 2679 - DNA, 643 bp, Avena sativa
gctcatgccatgggatgttctgcggctgtaaaagctatccaatggtttagagatccattaacaaattcaaatcttgattttgatcaaatgaagctcaatgagatgtgggatggcacacttgtgaaccagttatcatcaataccaaatgtgaaaagagtagtatctttgggaactctgtgtgcaattgagctgaaggctgaggggtctgatgccgggtacgcgtcattgtatgcaagatccctgatccagcaacttcgtgaagaagatgatatctatgtaaggcccctgggtaatgtgatataccttatgtgtggtccttgcacagctaaagatatctgcactgaacaactctccaaagtgtaccgtagaatcagcagcttcaatccagtgcattgaggacagcgagggacagccacaaaacatatgctagccatcaaacaacgagtctcagttacgatgttcttttgtgatcaagtggaagtgggaactccttgcaatcttccgtacggaatgaaacttataactctgtttggttctcatcatttgggctggaatcaaggaattcatttgtgattccaagaatcaacctatttggctgttacggaattggtaaccgaatttatttgcaaatttcatggccgcc

SEQ ID NO: 2680 - DNA, 719 bp, Avena sativa
acacattctaacacgtccattgcaccaagctctctgataaatggaaatttcttgagaaatatttcgtcatggatgccaagtaggcaatcatccactattcagacatctagtactcaggaacaagaagatcccagatttccagggagaggacgaacacttgcttctacaggaactgaaccaactgcaagggagtcaagtgcgaatttgcatgctaggcatgcagcattaaacacagtcagagctgatgcaacagtaatagctgaccagactgatacatttgatgaagagcttaagaagctggttggtatgggttttgaaaagactcaggctgaagttgctcttgccgctgcggacggagatccaaatgttgctattgagattctcatgagtcagcaggattagagattagccatgcaattgttcaaagcaagcgcagttatcagaaaaaaaaatctcgtatgaaggtttaggttcagactggatagtggaattcttgaacgggagcattgtggaaatcttagctgcagaatggttgtcgaaaaagatgctcgttatcatgtcgtcaaaagagatgccgttgatcatgctttctgtaaaggcgcagaagctcctgcctggttcctagttcctgcttgtatttcgcggaactcatatgtattgaatatggaagtgtcaagggctccaggcatcagctgactgatttcgtcagcgcgtaataa

SEQ ID NO: 2681 - DNA, 926 bp, Avena sativa
actctagtgaggttgctcctgctccagcgccttcaggcgcaattgctccaccgataccgactgatggtgaccatgctaagggtcgttcagacgcatggaagattgctgtcagcgttgttgggggtgccattgcattgggtgtgttggcttcgcttctgctctgtttcgtcagatataaaagggagaagaggatggaggcgatggaacggaatgcagaggttggggagactttgcgcatggcgcaggttggccggtcgcaagcgcctgtagcattggggacgcggacaaaacctgtgattgagagcgagtatgttgcatagttgatttttggttttctggggagctcactcaacaacagcaaggctctatgatgatgccctgagacttggaactgaccattggtcggtcaaggcagaaacagttccatatcaatgagggtgctgtggattgctagatttggggctcagcttctgctccttgtgggttagcacattcttttgaggtctgtttagaagtttaattgttctgcaatgggttactggtgatgttcataattgccatgttcttagtggggttcatctccaagcaagcaatggagaagagatatttttcatgtcagatttggaatccctcagattattttttcattgttgtgttcaaaaggaaatgggcctggcagtaaagcggaggtaatattcattgcacatgacaccgtgccgttccagtgaaattcctacaagtttcagttcaatcccattttggcttactcccagttaggtacctgtttaatatggtgtacaactgtagatcttcacttgtttagttttatttggtaactaatctgcttatttagatttcattgtcacttgatttctcattgcagtctgtatgcaatgagaacattccttagtcttttgcatttctag

SEQ ID NO: 2682 - DNA, 738 bp, Avena sativa
ctctctcgtgaatcagagtcatttgtcacggaagaggatgagaaccaagcagttactgctgatgaaaactacgtgtggacttacacctcgcctgagttccccgtgctgcaggaaaattcactgcagacatttaaactgccgcgcccagtcctttgcattggtggtgtagtgaaaattgaactgctgggaagagtgcagaggcaagcaactgatgataggtattacatatgtgtctgccatgctcaggtggtcgggctttcgctttcaccggtcttcatggtcgacatctccaactccggtaaccgtgtggtcctcaagtacctgtcgggggccagaggcatgtcctccgaggccctgatgcataacgagaccctggaacagctggagtggaacgccctcgtcaccaggtacaagcaaacgaggcacctggcgatcatgaacctgctcctgggtcctgcgcagatcaatgaggtagacgacataggtggcggcgggggggtctgacgaccccttcgcatagtcctgctgttgctgggatgcagctgcagagactgttgctgcagtagtagtagttctttgcagaacatacataaatatctgaacttgtgaaccaacccgccgtatgtacaactagtcgaggaagaggacgacatggctgagaagagacagctgttgttgttgtggtcgaggatatagagtgaaaagagtttaatgacaatgggttgcagcttggatata

SEQ ID NO: 2683 - DNA, 863 bp, Avena sativa
ccggatctcgcggcctcgccatgacgatctccaccaacggctcctcggctccggcgctcaagttcctcatctacggacgcaccggctggatcgggggcctcctcggcaagctctgcaccgcgcagggcatcccctacgcctacggcgccggccgcctcgagcagcgcgcccagctcgaggccgacatcgacgaggtcgcgcccacccacgtcttcaatgccgcgggcgtcaccggccgccacaacgtcgactggtgcgagacgcacaaggtcgagaccatccgcgccaatgtctgcggcacgctcacgctcgccgacgtctgccgcggcaggggcctcgtcctcattaactacgccacgggatgcatcttcgagtacgacgaggggcacaagctcggctcgggggtcgggttcaaggaggaggacacccccaatttcgtcgggtcgttctactccaaaaccaaggccatggttgaggaactgctgaaaaactacgaaaatgtgtgcacccttcgtgtaaggatgcctatttcatctgatctgtccaacccacgcaacttcatcaccaaaatcactcggtatgacaaggttgtggatatccctaactcaatgacaatattggatgagcttcttcccatctcaatcgaaatggcgaagagaaacctcactggaatttggaacttcacaaatcctggtgtggtgagccacaacgagatattggagatgtacagagactacatcgacccaagcttctcttggaagaacttcaacttggaggagcaagccaaggtaatagtagcaccgaggagcaacaatgaacttgacactgttaaatgaagacggattacccagaacttctgtcaa

SEQ ID NO: 2684 - DNA, 653 bp, Avena sativa
tccgcctccgcgttgccgccgcccgccgtccgatccgccatggcttccgaccagaacaaaagcccaaagtcagatgggtctgaggcacagaaggggtcttcaccgacagctagtacaggccttcccagcccttttgatttctccaacatgagcagcttgctcaacgacccatccataagggagatggctgagcaaattgcgagcgaccctgtgttcaaccagatggccgagcagcttcagaaaagtgctgaggctaccggggaacagggtcttcccaatttggatcctcaagcgtacatggaaaccatgacacaagttatgcagaaccctcagtttatgtcaatggcagagcgtcttgggaatactcttatgcaggatcctgcaatgtccagtatgcttgagaacatgaccagtccagctcacaaagagcagcttgaagagcgaatggcccgtatcaaggatgatccatctttgaagcctattcttgatgagatagagagtggtggtccatctgcaatggtgaagtactggaatgaccctgagattcttcaaaagattggccaggctatgtcattaaacttcccaggagatgatgctacttccactgtactatctggacctcaagaactgaggaggaaggcgagtatgatgat

SEQ ID NO: 2685 - DNA, 756 bp, Avena sativa
tggctaaaacatcttatattactgaacagagggagtacatagttctggctaaactagtacggcaatcaccaagataccagacgcaacattcgatgaggcttgttttcgatacagcggcatagggtttgcttacacagagtagcaactatcaattaccaatttaccgtaaagaatttgtgtacacaacccctagaatactacactttttttgcgtggaaagtggtctcttcatcaagagaaaaaggacccaaaaacaaccactactcccgaagatattgatgcctataggatcatcaccggaccagtctccacagagagtgacgacctcgtcaggggctccttcctcagggcacgtccatcacttgcgatttcgacacgcgacgccctcgtgtcttctcgcttacgccgagccatgtcttgagaagctccagcacattctcgtcgcacagaagcccccggtggtctgccctgacgccgactctctctttcgccacgaaaccatcagccatggctgattccacgggaactgtgcaatctccgtccacataagtgtacataggcactgtgcggcacacttctgacagatctccaattggggagctttcagagccatagcagacatcatatggtgtttcataagatgttccatatatgctatagaaactcacagtatctggtagtttagcattttccagaatacggcgagtctcagtagcccatttgaagatggccatattgaatggtagtgcaattgtc

SEQ ID NO: 2686 - DNA, 949 bp, Avena sativa
tataacactaggagctcaactttcacctatttaaccagctggagataaaactcacttcctacaaaataaataactcatcctcacactaacttttctcttccctagaaatacaacaaaactttattattccggtagaacacaagtcccttcgccaattgaatccaacaaagctctccacatgcatagccgcttcgagactcaagtgccccagttgtgcattactcatcccatcttgatgatagatgcctctttatcagtggccgaactgaaatgcactcagaatctctcgccgaatctgaagaaaacggttccaaccccagtgttgtgatctacaatgtactcccctcttaccaaaccaagcttcacaccaagaccataagaagatccgtggccaacacgtcggaagaactcagtagggttccctttcacatccttggaactcccgaggtccgtgccatgttcgacaaatccatagacatatgtgttcttcacaggtatgcgcacctcactagcaacctcaagaacattcctagaagcacccagttcacccataccatagcccctaaccgagtaaggtccgccaagtgtaaatgcatcatagcttggcagatctcctacacagcctgcataatgaccatgaagaaccaacacagctggtagcggcttgccaacacctttctcttgattgtttagattaatgaactttgtaagcgtaagctggtgacggttgaagagtgggttttgcttccgatgccaagaccttgatccaactggaaaatacatctgtcaccaataactgcaccattaacaaactctgtattgtcacgagttatatttgcttgtagaaatgccattcgatctacaccagtaccactgagggttgtgggtggtccatccatgctcaagccaccactaggcattgcccgagaaccatgtgtacagatactat

SEQ ID NO: 2687 - DNA, 879 bp, Avena sativa
catcaacctctaagaataacatcagccgattgatcatataacaataatacagcaaagaacctgagacgaggaatgtgtacattacaaggaaaccgggttcttctacttcaacgtccgtgtccgtgggcgctttcatcttccatgatttcgatggtcgctaatttacactgatggaaactccccagctctatcaagaaagctgttgcaagatcatatacatcgctaaccgaactactcattcaggaacaaatatgatgttaaatacgtcaggctttgcttacagagcaaaccaaaaattaatttgagagctggaaccttcctgtcggtttcctctttcgccatccaaaaattgcatagtagaagagcgtgagtatggcaagtgcaacaaagccgtactggaaaacattgtacttgtagagatacttaattccacgcagagactgcagtgtgtggccaaagatctcctgagctgcagtggcttgtgcgtagtatgcaaaggctgttgcacagaactgaatcacactgatggaacaaagtaggatcagtccaacattaaacaggaacgaattcatcaacgttcctccccatttcattgggtgaatggtgatgaaaactaatttcaggccaagcatcatttccccagcaatcactgcgatgaggagatagaagcagaagaatgcgaaggcagcagtcccaagcaaaccccaaacatcgtccagctttatgaagatctcattcaggaaagaagatagaggaggatcaatcaacaagtatatgacaatatgtgcaacccaagcaattgatataattaacccaacaacgccgaatacgagttttccaatgtaagcaagaactgtaaaagcccaggtagcttcagcc

SEQ ID NO: 2688 - DNA, 424 bp, Avena sativa
  modified_base (345)..(345): a, c, t, g, unknown or other
gccggcctcctctccgggatgcaccatttctacaacatgcggttcgtctggatgtcgggctgcaacctgacgctgcaaggttgcaaggaggtggcacgccggcttccacggatggtggtggagctggttagcagtcagcctgagagcgagaggacagacggtgtggacatattatacatgtatcgatcactcgaggggccaagggaggatgtaccaccatttgtgaagatcctataagcttctcattgcggattctcagtgcagataaaatgaagaacgggcgtcaagatgatggagctgcggatatggcagcatttttggatgcttcgacgccatctacgggancagcggcgggttcagttgttgtagtactagcagggttcaccggtatttaccaaaatttccaaaccagaatatcataagc

SEQ ID NO: 2689 - DNA, 885 bp, Avena sativa
ggttattcggtcttatcatgggcatctgagtgggtttactgcctagctctccatccaacaattgatgtcttgctgacaggtggccgagattctgtctgtagggtgtgggacatccgaacaaaagcacatgtttctgctttaactggtcacgataacacagtttgttcagtgtttgctcgaccaacggatccacaagttgtcactggctcgcatgatacaactatcaagttctgggatcttgtagctgggaagactatgtgtactcttacacaccataagaagtctgttcgggctttggcactgcatccaaaagagaaatcatttgcgtcggcatcagcggacaacataaagaagtttagcctgcccaaaggcgaatttctgcacaacatgctgtcccagcaaaagacaattctaaatgccatggctgttaacgaggatggtgtcctggcaacagcaggggacaatggaagcatgtggttctgggattggaagagcggccataatttccagcaagaacagaccattgtccagcctggatcactggagagcgaagcatgcatatacgccctctcctacgataacagtggatcgaggctcgtgacatgcgaggcggacaagaccatcaagatgtggaaggaagatctgacggcgacaccagaaacccaccccgtcaatttcaagccgccaaaagacatccggcgatattgatttgaactccctagattatgccgcatggctggtgtacctcgacaagtcataaccaacttccatgtaactatgatacaaatagtgttgtcctatttgttgctgagctatgagcatattttctagctttcaaatcaaatttgttgcatcacattggggaacgaatatctgtgctgtatc

SEQ ID NO: 2690 - DNA, 885 bp, Avena sativa
cagaggctggtgtccatattgtttgttcctctcctgggattgtccacacaaatgttgcacgggacctccctaagattcttgtagctgcatatcgtctcattccctacttcatatttgatgctcaagaaggatcgagaagtacattgtttgcagcatctgacccccaagttccagagtactgcgagactttgaagtctcaagactggcctgtctgtgcttgcatcaactacgactgtaatccgatgaatgcttctgaagaagcacacaaccttgaaacatcgcagcttgtttgggagaagacgctcgagatgatcggcctcccatcagacgccctggagaagctcatcgcaggggaaccggtccagtgtcgttacggacaagagaacgcggagtaggaaggatgtgtacctgtcatgaaaaagaataggatggatatctcaaagcgtgatccaattcctgatgctgttagtttactagttcagcggtgggtctaagtacttgactggagtacctttgctgtaccaaaaaggatagagtgcatgaagcctgaatttgtcctgtgcatctgtgtgcttgttcaaagaattgaattagtaatagaagtaccttgtggcaaacgatattgtggaaaaaaaaaaaaaagttaattaatcgcgatctagaactagagactacggacatagagggataggtacaagggctacagggagctcagggaggccctggaggtcatgttcgtctgcttctcgggggcggcagacaacagcggcggcgcttccaacggcggcgccaacccggccgagtacgccatcacttacgaggacaaggacggcgacctcatgctcgtcggagatgtgccctttgacatgttcagcggcacctgca

SEQ ID NO: 2691 - DNA, 626 bp, Avena sativa
agctgagctagctccaccctcgccagagcaagcacccaccaaccgcaatggcgtcggcgtcgcggatcctgctcgtggccttcctcctggcaacagcctccacaatggccgcggcgcagaaggctgccccagctcccgccaaggcaaaggccgcgcccgcggcgcccgtcgccgacgctcccggcgcggccaccgccgacggcaagccgccgccgacggaccccatcgcgatcctgaagaaggccggcgggttcaacaccttctgcgacctgcttgagcagagccgcgtggacacgcagctcaaggcgcagctgacggacagctacaacgggctatcatagcccacctgctgctccggcgattcaagaccagaaccagttcccaactctcggtgggaagtgataatcttaacgtgtcgtcgaccttaaattttgttgttaccatatatttctgtgcgacttccattcggacaaataatcgtgtgctgtatgtggatcattcgctcttgtgttggtcagactttctaaatccagagttgtttgtcacttgttttgtaggctgttgcgcccctcaccagttaatacatgtcacagaccttggttttgttgtgaccaaaaaaaaaaaaa

SEQ ID NO: 2692 - DNA, 753 bp, Avena sativa
attggttccatcaagagtacgctggatgcagctgctatcccagctgcaagaaaagctgatctaagaggcaaggtctctaagttggaggatcaactgaggaaggccaagaagaaaatgggcgaagaaaacatccaaaaggctgtgaagaccgcgttagatgctgcagaagctgcgctctcggaaggaaaacctttctgtgttactcatatcgatgtgggtcttgatgccactgctgtccgagaagctgctgtgaaagccatgaaccgtttcaagagtttgccgataatgctgttcagcacagacgaggcatcaaacaaggctgttatttacgctggtgtacctcctgaggcacccaatggtttcaatgtgttggagtggcttgcaccttcgattgcaccacttaagggaagaggaggtggcggcaagaatggtcttgcacagggccagggaagtgatgcttctcagctcaaggaggccatggagctcgctacccagatagctaaaatgaagttgagctgatttgttgagcctggtattcttgtatcttgcttatgtcgttgccgattgtcattccacccctccatttggcattcacttttatcgcttttagcactacatgaacatgaaattaatcattaaacggaccaggtgtctttcatttgtaccgtttggataaaaatgggagtgtctatgtctcaggcgcagtcgctgacgtcattgtcaattataagcaagtttcagacgcctgagtat

SEQ ID NO: 2693 - DNA, 891 bp, Avena sativa
ctgaatccgattatgtatatggatgtatattaggtgtcatcagtgaactgttgcaagaagcagaggccctagctgctcacgaatgaaaccgtcccaggcctccaccactatattacactgaatgtcacagggtaataaagaccaagaaaagaaatgcctgatatatgaatcatcacttcacggtcaggccggccggggcagtcgtcgacggttttcacgccttgcgtgcgacgatcgtcggtcacgccgatcctgccttcgcttcttccgcgtacagcgccttgatctcctccacgtcgtcgtagctgccgaggaagatcggggatctctcgtggatattggtggggatcaggtcgagggaccgtcctttgcctgtgaatgactggcctccagcttgctccatcaggaatgacatggggaagacttcatacatcacacggagcttgccatttgggctcttcttgtctgcggggtacaagaatatacctccgtatagtaacgtgcggtggacatcggcaaccatactgccgatgtatctcaatgatttaggcgatgaaccatccgtggggtacttgcacttctcaacgtactttgcagtaggcgtgtcccagttcttggcgttcccctcgttcaccgagtaaatctttcctttaggaggtatcttgatttcagggtgcgtcatgatgaactccccaagagaagggtcaagcgtgaagccgttgacaccactcccagtgctcagaacgagcgtgcatgaactcccatacatgcagtacccagcggcgatcatgtccttcccaggcaggagcacctcctccagagtcacggtgtcatagttcttgaccatgtaaatcccgaagatcgtcccgatggagacgccgcagtcgatgt

SEQ ID NO: 2694 - DNA, 1005 bp, Avena sativa
ggcggtaggcgtgtacggtgggaggtcttatataagcagagctcgtttagtgaaccgtcagatcgcctggagacgccatccacgctgttttgacctccatagaagacaccgggaccgatccagcctccggactctagcctaggccgcgggacggataacaatttcacacaggaaacagctatgaccattaggcctatttaggtgacactatagaacaagtttcggtccggaattcccgggatggaagttgaagagcctgcagtaaaaattagtgaagctgcagagaaggcttctctgctagaagagagcatacagcctagggcaaaccttccacctctccttgtaaatcttagggatcgtcgtcctgaaaagctccactacctgggtgtatcttttgggttgacacaggagcttttccgattttggcgcaagcacgacttttttccgttctatgtgggccagattccaagtgctgttactggagagcatacctgtatggccctgagtcccctaaatagtgatgacatcaaagtgggtgatgataaaatcaagtctggatttttggaaccattttatcaagatttcagacaaaggttcaggcggcttttgggaacatctttccggcatctcaactttaagcttgcaattagtgttttggcttccaaaatagatttttcacatcacgagccttcagaaaatgataccagttcgacactgaagttactgagagacgtattatccccacatgacatgaagcggctagaagcatattccaacaacttggtcgattatcatctgattttggatcttgtccctatcctggcacatgagtacttttcagagaagcttcctgttacactacatggcgcccaagcttcagttttgttctgtatgggtctgcaggacaaggacataagcgctacaaaggaagagcttggcatagaaagggagcaagttctatctaacttcataaaaacaatgaagaagttatatggttaccttcac

SEQ ID NO: 2695 - DNA, 574 bp, Avena sativa
cggcatgtggggagctgttaaaaagactgcagtccggatttagagcatatcagctaatgagaaaatacagaaaacgtacctgtcacgcagcggcatcatggctcgggtgaccaccaggacgtgcattgctggttctgatgcccccctggatcaagggctctccagcgaagaaattccagcaatgaggatggcaattccagggcagtcgaacatggttttgactggaaatgggtggtggttggtggcgcggtggccgctgtctgcgtactcaacacgggcatcgtagggaaggcccttttactggagctgcaagaaggcatgcaaagaagggatgagcacctaggagcatctaagtacaagagaaggcttcatggcctggccagcagggcctgtcgctctcaaatggagatgggtaggaagggaatccatgccgtgctacaggaagcagataatcagtgtaattttggatggtgttttataatacagtatcgcgcatgtgtcttaccataacagattatgttgtattgggaatctttggatgatttattccaagacctactgaggttcacctgct

SEQ ID NO: 2696 - DNA, 512 bp, Avena sativa
ataaatcccgcaaatggatttcaggcatcgacagccctgataaatcttgtcatgataatctggataggaagtcacatctaaaagagggtaaaagaggcaaaaggcgcttaccttcgcctattccttttgccacttctggaacacaagaaactacaatgtcagacaaagaaccagtaccaagtccagatgactacgtaaccagggattttgatcagttactggtggtgctgggaaggttccaaacaaagatcaagtttgagacaaacaataaaagtaatgagatactgacatctactggagagatgataacccagcacctccagggggttgaggtgcagatgcaggatgatttggataagctggtaaatgcaggaaaatctaaaagaaagcgactggaatcaacatttgaagagaaacaagaacagttaaggcttcttcatgagaagttcaaggaggaggtaatcagcagttgcttggttgcaagaactctcttgaggtattttgaagcctat

SEQ ID NO: 2697 - DNA, 1022 bp, Avena sativa
catcaccggcgccacggcgctcgagtactccttcttcaaggccacggcatcgaccagcgcatctggaacaccggctccatcaacatccagatcgggtggctccagaccatgaagccgtcgctctgcaaatcggagagcgagtgcaaggattacttcagcaaatcgctgtttgtggtgggggagttcgggggcaacgactacaacgctccgttgttctccggcgttaagttctccgacgtgaagacctacgtgccgctggtcgccaaagccatcgtcaacggtgtcgagaaactggtcgagcttggggcaacagacctgttggtgcctggaattctcccgatcgggtgcttccctctgtacctgacgctgtacaacagcagcaagaaatcagactacaacgcccgcactgggtgcctccggagatacaaccgtctggccttccatcacaacagggagctcaagcagcagcttgatgagcttcagaaaaagtacccgaagacgaaaatcatgtacggtgattacttcaaagccgcaatgcagttcgtcgtcagccctaaaaatttcggtttcagcacggctttgcaagcatgctgcggcgccgcgggggagggcaactacaacttcaacatgaagaagaagtgcggcgaggcaggcgcaagcgtgtgctctaacccgtcgtcgtacgtgagctgggacggcatccacatgaccgaagccgcctaccgcatggttgccaacggttggctgaacggcccctacgcttctcccccaatcatgaagtgataattcagatggctaattatatgtagcgtccctggtgctgctagagggatggatatatgaggagtgcttcaggcactgaagaaattaagttattatgggttaaattgcttagtttgaggattgtataaactgtggcggtatagatatgttttcccaactgaaagatgtagtactgtagtacagatgtaccttgtatgacatgttctccgattcttattcatttggcaagacttgcgtaa

SEQ ID NO: 2698 - DNA, 730 bp, Avena sativa
attgtagcaagaatgtgcaatacttaccatctgtcgtgtttactgattctgattatgcttgatcttattagcgcatccatgggtgagagaaggaggagatgcatctgagatccctgttgatatatctgtattgtataacatgcgccagtttgtcaagtacagccgttttaagcaatttgcgctgagggctttagcaagtacagtcaatgaggaagagttagcggatctaaaggaccaattcgatgcgattgatgttgataaaagtgggtcaattagtattgaagaaatgcggcatgccctggcgaaggatcttccttggagattgaagggtcctcgcgttctcgagattattcaagcaattgatagcaacacggatggtcttgtcgacttcaaagagtttgttgcagcaactctgcatatacatcagatggctgagttggactctgagaggtggggcctgcgctgccaagccgcttttagcaaatttgatctggatggtgatggatacatcacccctgatgaacttagaatgcacaccggcttaaagggatccatcgagccgttgctggaggaggcagacatcgacaaagacgggcggataagcctgtctgaattccgcaagctcctgcgaactgccagcatgagcaaccttccgagcccgacgggagtcccgaatccccaggctttgtgaaaatccttagtttggagcattatagggagagcgtcgaga

SEQ ID NO: 2699 - DNA, 801 bp, Avena sativa
aacagagcacattttattttgtagtcgacaaaagaataaccggctgctatcggattaacaagcactatgcagagctacatacaatgcgaggcaattttccgcccaagcattttaggaacatcaagctgtacacatttcctcccggtgctccttctgttgggaccttgtggggttcttttgtcagcttctatcttcaacaagatatagctggaccaccgttttctttatgcgaattttctttgtggttagtcaaaagttgtcctttgcccgtcggacaacctcaagaacacgtgcatcatcgaaatgatctggaattgacagcattttcttgatctctggactggaggtcctcaagaagggattgcactgtttctctctcccaattgttgttggcaccgttggtgtattcttattgcgcagatcagctgcacttgcagcatattcctgaagttcttcgtttcctggttctacgctcaaggcgaactttgaattgctcagagtatattcatgtccacagtacaccttcgtcacatctggaagagctacaattttctggagtgaagagtgcatctgctctggagtcccctcaaaaagttttccacaagatagattgaacaaggtatcacctgtaaatattgctccagatgcagggaagtaaaagctcagatggcctactgtatggccaggagtttccattacaagaacttgatgaccggcgaacatccacgtgtgaccatcgcttagggttatgtcaatgccaggaattctatctttgtccttctcggaaccaattacctttgc

SEQ ID NO: 2700 - DNA, 516 bp, Avena sativa
agtgatcacgacaatctcgccatcaccgcttgtgatcgaccttgtacgttgtcctcgccgagatccggtaagacgcccttgccgagaacatcgatgacaccctgtgtgccgcgctccttgacgacgctcccgcccgtgtcgcctggctggacagcgtcgccgtcaacctggacgatggcgccgccctcgcgacaaccttggaagcccggaatacatcttaacatggtcgctgccggaattcgctagtgtcgcgtgtctggactgcgccctcgctgtcaatctggacgagggctctattgcggcgaccctcgacgcccaaaatacggcttaaccaggtcgccgccggggttcctctccgctggcacagtcacattgcaatcaccgttgtgatgcaggtacgtggcatttaggaaattcaattgccttgtatatcagcatctcctgctcaatttctcmtgtaagaaatatcaaacactttatatctacggcatgaaaataatgtgaaaagtctgatgc

SEQ ID NO: 2701 - DNA, 861 bp, Avena sativa
gcaccggctactcgctcccttccaaccgctccgcgctcgacctcttcgaccacctctggaactcctacttcgggggctccaagccgggcgtccgccgccccttcggcgacgcgtggctcgacggcgtcgacctgttcctcgaccacggcactcccacagaccgctacgacgtgctggcgctggagctggccaagcacaacatccgcggcgggccggggaagccgctgcacctcacggcgacggtccggtgcgcgtacccgccggcggcgcacgtggggcgggcgctcgcgaccgggatcttcgagcgcgtccacgtcaggatctacgagggggacgacgacagggcgtgcaacgtgtacggggcgtggcaggacgcctgggacaggtggacggcggcgtacccggccaccaggttctacatcggcctcacggcggaccagaagtcgtaccagtggatacaccccaaggacgtctactacggcgtcgcgccggtggtgcagaagaaggacaactacggcgggatcatgctctgggacaggtacttcgacaagaacagcgacgactacggaagcttgatcaagaactacgcttgagctgcatcatgcatgtgcatcgatcgtgtgctgcgtcattattatcttatactactccactaataacttacctagtggttctctagtggagtagtaatataataaactgtggtcagtgtgtgattgtttccgcttcgtgcatttgtgtgttttatctcgaagtatgtagacagcggagtgatctgatagtttttctgaacagatatcaacaactcaacatgcatcaatctaattaaggaaatttattgagcgaatattagtatttaaa

SEQ ID NO: 2702 - DNA, 626 bp, Avena sativa
gttccttgttggtaggtggaaggttccggacctaactggcctttctggcgagggacagaaggcccaggactacctttgcaccctcgctggaaggatcaggaagttggacgagagggctcaatctagagccaagcaagccggtaagatgccctttagctgggtatatggcagggaagtgcagatgtgagcaccaaatgccaccgcgactgcttgcattctaggcttcctgcataccgcctgccatccatccatccatgtgagactgttgtaataacgaggttcaggttttgcctcgttacatagtttgtcaggtttgtcagtgtcgttccttatagcgatagggagatgtcgttcgtccgcctgtgttctagttttgttttctgctccgatgtacaacttctgctggccgtgtggactggacatgaactgaacatgcagtgtgctgtttgtgttgttcagatccgttgaagttttgtgaccgagaactttgtcgtcctgaactctcttctttgtttgtgggcgaaatctgccatgtcgaataataatgcagagctccaactgaagatcactggtggagctaaatcttttcaaataatggactcccaagtatgcaatagtaaaaaaaa

SEQ ID NO: 2703 - DNA, 869 bp, Avena sativa
cattgcagctcaacaacctgaatttgcattggttaccacagattctgcgattgtattgctgcacaagacaacagtcacttccacaaccaaagttagttacactatcacttcatctgctgtttctcctgatggcactgaagctattgtgggtgcgcaagacgggaaactgcgaatttattctatcagtggggatactgttacagaagaagcggtacttgagaaacaccggggtgctattacttccatacattattcgccagatgtttccatgtttgcttctgctgataccaacagggaagctgttgcatgggatcgggcaactcgagagataaagctgaagaacatgctgttccacacagctcggataaactccctggcttggtcacccgacagccgtttggttgccacaggctcaatagacacgtgtgcgatcgtatacgacgtggacaagccagcatccagccgcatcaccattaagggagctcatctcggcggagtccacgggcttacctttgctgacaacgatactctgatgactgccggtgaggatgcatgtgtccgtgtctggaaactgccgcaacaataagcactcaatcatcagttagcacacgttcagtaccgatggaaataaacgttgtttgcgcttgtccatatggttgctgtttttttccacaggccgtggctgcacgttttggtctttctctgcctttgtttcttgtactccaggagaactctactgtcattctttccatgcttctggttttgtgagcggctgagaatacaggggatgctggtgtggttttttctgtctgctccctggactggttgttaataactgacattattgtgctcgagttttggtgtaaaaa

SEQ ID NO: 2704 - DNA, 966 bp, Avena sativa
aatcaacagctttaccagttctagtgataagtgtggccattatatcagcattttggttgggacgtacctctggcttggtagatgagtctggcaacccaactggtggtcttttgggacagctgtagctacaatggggatgcttagtacagcagcatatgttctcaccatggacatgtttggtcctatagctgacaatgctggtggtattgtggagatgagtcagcagcctgaaagtgttagggaaatcacagatattctagatgctgtgggtaacactacgaaagctaccacaaagggatttgctatagggtcagcagcactggcttcgtttcttctgttcagcgcatatatggatgaagtagctgcttttgcacaattaccattcaaacaggttgacatagcaattccagaggtttttgttggtggtttactaggctcgatgcttatattcctgtttagtggatgggcttgttcagctgttggcagaaccgcacaagaagttgttactgaggtcaggagacaatttattgagaggcctggcattatgaactacaaagagaagcctgattatggtcgttgtgttgcaattgtggcctctgcatccttgagagaaatgataaagccaggggccttggcgattctgtcacccatggctgttgggatcatcttccggattttgggccatgctactgggcagcctcttcttggagctaaagttgttgcctctatgctcatgtttgcgactgtcactggtatcctcatggcactcttcttgaacacttctggtggtgcctgggataatgctaagaagtacatcgagactggcgcacttggtggtaaaggcagtgagtctcacaaggctgcaattactggtgatacggttggagatccattcaaagacacggctgggccttcaattcatgttctcattaagatgctcgctacaatcacattagtcatggctcc

SEQ ID NO: 2705 - DNA, 921 bp, Avena sativa
tcactgccatcgctctccacaggaagcttcgcaagtcttcttacttctaagcctgtcatgttggtgaggtacttctgtgccgtgttaacattatctgcccctttggtcaactggaaaacatgaactgcacaccgctcagcagctagacgcactggcgtgctactatccttcaaagtaacaccaattgctgggcccaatatcgaaatatgtgtagcaagagctgagtgatttatctttgcagcagctttgatacaggacaaagatcttctcctgacttcacttgaatcatcacgcaatgccaagataagcaactgaataagttgcaaggtgctgccttcgaattgtaactggtaacaaagtagcctccccagagtttttgtagaggcttcacgaacagggaacttgtcatcttttagagaatctttcagaagatcaacaatagatggaaatgatactgaatggcacagttttgttggacaatgccttgatatggatgagaatgttaacaaagcaccatgcctggtacaccagtctggtaatgtgcccatgctcaacagagcctgcaccagatcagctgtctcgatctcgtccatgtactgagataatgtaccaatcgcttttgcagcagaactgcggacatcatcagcatcaacctgcagcagatctttgagaagagcacagccacgtgttctgattgcagaactaacacttttaccagcatgcctaacaacacctttaagtgcagaaagcacactttccttaacagcatcatcccctgactgcaacatggacagaagatcactaactaaagaatcaactcgtgtgctcaatgcactaagctttccaagagctgatgcggctcttgtacggacagatctattactgtcctgtagacatttaacaaacgttgtctgaagctgg

SEQ ID NO: 2706 - DNA, 713 bp, Avena sativa
ggcatgcataggagaactgttggaagagagggaagcagggaaaacttttgatgtctgttttaagcagatgaaggcttttgcagacaatattacagactggacaaacgttgtaatcgcatacgagcctgtctgggctattggtaccggaaaggttgcttctcctgagcaagctcaggaagttcatgctgctgttcgcgattggttaaaaaccaatgtatcagctgatgttgcttccaccgttagaataatctacggaggttccgtaaacgctgcaaattgtgcagagctagcaaagaaggaagacatcgatggcttccttgtcggcggcgcttctctgaagggcccggacttcgccaccatctgcaactcggtgacttccaagaaagttacagcctgatggagagtgacagttgtggaagaaataagcgatctgatacaagaaaaggcagattggcttctgcttcgctcacaaagcctgagataggtgctccgtgccgtgtgaaccatgatcttgtctgagtcgtggtgtggtttttgttgctgattcgtagtagcattaaagagagaataatgaaacgagatggcaccattttccttctcatggaccttttgtacgagacaggagtttacttgttgctcgtgtgactgggagtgagcagtcactcacacctgaattaatatatgccgatacctgtggaattgtttwacaaaaa

SEQ ID NO: 2707 - DNA, 640 bp, Avena sativa
accgataaagggtcctatgcacagtttgaaagatagctaggttaaaggtttcattggtattctacagtactgctcattacttgtttaagtcagatttgtgtggcattgttttgaaataataacctagtacttacttattccgagttcataattcaggtggttacggagtactcagaggatcaacttgaattggtattagaagccttggaaaagatgaacgcgcatctgacagctgcagtagtttcgaacgacccgttgttcctgcaggaagtacttgggaggtcagttaacgggacaacatacgctggcattcgagcaaggaccactggcgctccgcagaaccactggtttggacctgctggcgacccaagaggcgcagggatcggtactccagaagccattaagctcgtctggtcttgccacagggagatcatatacgacatcggacccttgcccaagaagtgggcgcttccttccgccacatgatatgcctaggatagctagctagctagaagaagacatttgctcaagaataaatggagagatagcgatacgaaccgggtttgtcgagaactgacagctgtttgaataatattgaagaagtaaagcctcatctaggcaatttggcgttacaaaaaaa

SEQ ID NO: 2708 - DNA, 1013 bp, Avena sativa
ttgacggcatctacaaagagcatctggatggagtgcgacctggtggtgagaaaatttaccatgtcttcgacaatcaatttcctgtggcaattaaacggttgcagtttgataagcaactgtcaatggaaaatgtgaggaagcttataacagaagctgatggttaccagcctcacttgatagctccagagcaaggatatcggcgcctcatagaatcttgtcttgttagtatcagaggtccagctgaggcagctgttgacacggttcacggaatcctcaaggaactagtccacaaggctataaatgaaacacatgagctcaagcagtttcccactctacgtgtggaagttggcaatgcagcttttgagtcgttggaaagaatgagggacgaaagcaagaagaacacattaaagctagttgatatggaaacgagctatttaactgtagatttctttaggaagcttcctcaggacgttgagaagggtggaaatccaagccactctatttttgatagatataatgattcttatctaaggagaattggttcaactgttctggcatatgttaacatggtatgttcaacattgaggaactccatcccgaaatctattgtctactgccaagtccgtgaggcgaagcgctcactgcttgaccacttctttactgaacttggagcaagagagattaggcaactttcaaagcttctcgacgaggatcccgcggtcatggaacggaggacgaaccttgcaaagaggctggagctataccggagcgcccaagcagagattgacgcggttgcatggtccaaatagttttgatcaagacttatcttgctctaatgtgtcgacctttactccttgtttggtgacacctctcccctctcttgggggcatatatagctctgattctttcttccgttctaggtcattcttagatcgcagcagcttgaaggtgtgtcatgtgggttgtgattttgttccttgcgcttgagggatctaggggacaccttgatgttg

SEQ ID NO: 2709 - DNA, 650 bp, Avena sativa
ggcatatttgaggcatactctggcatacttcagggtataaagggtgcaaaagctcagctgatggtaccttatgcaggccatctattgcagttcacggaagctgtgtacaaggatagtagcagggatgagagcgtgaccaaggctgcggttgctgtcctgggggatcttgcagacacacttggcccaatctccaaggatctgttcaagagccacctcttccacgttgagttgttgagggagtgcctcgatttggacgacgaagtcagggagacggcgtcatggacccagggaatgataaaccaggcaatagtttcttagtctgagaaattatcttgctttgtctgttatggcggtggcagatgttctgttttgttgctgcgccaaagtccgttttggcgcgcacagatgaacggaaggataccaaagtatatgtagcgtcggttgtaggaaccatgtcataggcgtcttctgtgtttgtttatttctcggtctgtcaagtcggtatgggtcacacattttctgtgtgtcaagtcggtgtgcgtcgcatttgacacggcagtgggttatggggcattggatgtcttgaacagctactaaacttgttggtgtattctgctctatgttcatccatgctatgctgcttgatataa

SEQ ID NO: 2710 - DNA, 720 bp, Avena sativa
cgtcgccatcgccgtcgccaggctcggcggcaaggccgccttcgcgggcaagctcggcgacgacgagttcggccgcatgctcgccgccatcctgcgcgagaacggcgtcgacgactccgccgtcgtcttcgacgcgggcgcgcgcaccgcgctcgccttcgtcacgctccgcgcagacggggagcgcgagttcatgttctaccgcaaccccagcgccgacatgctcctcaccgccgacgagctcaacgtcgacctcctcaagagggctgcagtcttccactatggatcaataagtttgattgctgagccttgccgatcggcacacctccgtgccatggaggttgccaaggaggctggcgcgctgctctcctatgaccccaacctgagggaagcattgtggccatcccgtgaggaggcccgcaccaagatcttgagtatctgggaccaggcagacattgtcaaggtcagcgaggtcgagcttgagtttttgactggcatcaactcggtggaggatgatgttgtcatgaagctgtggcgccctacctttaagctcctcctggtcactcttggagaccaaggatgcaagtactacaccacggatttccgtggatctgtcccatcttacaaagtagaacaagttgacacgacaggtgctggtgacgcatttgttggttctctgctcaaaaaattgtaccaagatccatcatcgttgctaagacc

SEQ ID NO: 2711 - DNA, 927 bp, Avena sativa
tgctgattgcttaactagcagaacctcagtttttgaagcttctttaagggctacccttgccaggattggaacaaacttttctctttctggatttggttctagcatggataaatcacccaccgggactgctgatgaaaattcaggagttcctctgggtgggagggcagcacttgatattgcaaccattcgtctcaccaatctaccagacaagtctaagaaactcttcgctgtactagaacagtcaaaagatccaaggttccacgctcttcctgtgacatcacaaagggttgcggccttctcggacaaagtaaacgagcttgtatatgatgtgctcatatctaaagtccgacagcgtctcagtgagattgctcgcctcccaatctggtcgtccgtggaggaacagggtggtcttcctcttccaagcttcagcgcgtacccacaagcgtacgtgaccagtgtgggggagtatctcctcactttgccgcagcagttggagccacttgctgaaggtatctcaggcaacgaggctggcaacgatgaggcccagttctttgcaacagagtggatatttaaggtcgccgagggtgccactgcgttgttcatggagcaactgcggggcatcccctacatcacggaccgaggtgcccagcagctcgccgcggacatcgagtacctgaacaacgtcctctcggcgctctcgatgccgatccctccgttcctctccaccttccatgcctgcatctcgacacccagagaccaggtccccagcctgatcaaatcagacggtggaagtcagctggacctccccactgcccatctggtctccaagatccggcgtatctcgttaaattagtggaacactgttgattgtggtggccatttgcccccactttctgcaaattatagcccttgtaaaagcatgcatcc

SEQ ID NO: 2712 - DNA, 806 bp, Avena sativa
cctgtttggtaccggttctttctgaacaaggaatatggaagtctgttctcatctttaaccactggtctttacctgactttcaagttgacttccgtagttgagaaggttcaatcattcttatctgcagtgaaggcattgtcacgtaaagatgtgcattatgggtcttatgccacatcagaacaggcaatcgctgccggtgatatgtgtgccatctgccaggagaagatgcatgttcctgttctacttcgctgtaaacacattttctgtgaggattgtgtctctgaatggtttgagcgagaacggacttgccccttgtgtagagcactggtaaagcctgctgacattcggtcatttggtgatggttctacaagtctgttcttccagttgttttagaactccaaatggaaaaccctaacatagaacgatcaatcacaagcaattggttataagagagttcaagtggaagtcctttgttccttatcttgcagcaccataatgtaacaatgttctcgaaaattatctgactgcgaccattatgttcatccatatgttcaagcgatagttagagatctgtcagttgcaacatcagcataagttcgcatcagaagggaatcctggtctggattgttgaaggaatctactcctgtgaaccatgaacctcctgcatcttgctgtggcttgtgcgatgtaaaattggtaattcttttaaagaagttaaagtgtcttgtataattggagcctgcaagttttgcttgctagcaagaagtatgtttgaggaagtggtaggatttaacctgtaagctgtg

SEQ ID NO: 2713 - DNA, 1011 bp, Avena sativa
tggatctgtggatcgtccaaggtcaaggagggccagcacctcgctgagcacgagctccagaccctttgcgaatacgtgaaggagatactcatcgaggagtcgaacgtgcagccggtgaacagtccggtcaccgtgtgtggtgacatccatgggcaattccatgaccttatgaagctctttgccaccggaggacatgtgcccgacaccaactatattttcatgggtgattttgtggaccgtggcttcaacagtctggaggttttcacaatcctgttgttactaaaagcaaggtatcctgcccacataacccttctgcgcggaaatcatgaaagtaggcagctgacacaggtatatggtttctatgatgaatgccagagaaagtatgggaacgccaatgcatggcggtattgcactgatgttttcgattaccttactctttcagcaatcattaatggcacggtcctttgtgttcatggtggtctttctcctgatgtccgtactattgaccagatacggacgattgatcggaattgtgaaattccccacgaaggtcctttctgtgatctgatgtggagtgaccctgaagagatagagacatgggctgttagtccgcgtggagccggttggctttttggatcacgagtgacaacagagttcaaccatgtcaacaatcttgatctggtttgccgggctcaccagctggtccaggaaggattgaagtacatgttccaggacaagggtcttgtaactgtgtggtctgcacctaattattgctacagatgtggcaatgttgcttctatactaagtttcagtgacaacatggaaagggaggttaagttcttcaccgagacagaagagaacaaccagatgcgtggtccgaggactgccgtcccatattttctctgacttcaattgtacaatattagaagtcactgttttaatctgtgtaagggttaaagatgaaatcaggtgtttattgttgtaggtggttcagatcatagtccaatctga

SEQ ID NO: 2714 - DNA, 559 bp, Avena sativa
ccaaagaggatgaggaacaacttcggtgtggccgtgctccctgagggaaacggaatgggagtcaatattgcacaggatatctgtgcttttgtaccatgagatgaagtattcactgccttacgttgagagcagctcagacggttcgatggacagccttatgctgaacagtgtcatggaggatggcgctagtaatggggatctctggagccttgatgagctgttcatggcagctggtgcttattgaggggccatagcaaacatgtccaatgcccattgtccaagatgaagaagaaccggtggcatctgctacgttttgtagcggatcaaaccgtagttatgctaagactatattgctgctgacagtggaacagtatgccgtgtctatattccgtttatgatgcaagtcgtgtctatgattgggtgcatgttgggagatcggatttaataaccctaccttggtcatatgactgctgtattgtgcctattaagtaagtacatgatcgctcttatattgtatactatctgcaattgtgtgttcaaaaaaaaagttattaatcgc

SEQ ID NO: 2715 - DNA, 953 bp, Avena sativa
acctagaagaccacctatacaatagggcgcaagttctaccatgggagaaaagattcaaaatagtgaaaggcttagggtccgcacttcggtatctccatcacgagtgcaatccgtgcattttgcatagagatatcaagccaggcaacatactcctggatcatcatttcaatgccaagcttgctgacttcgggctatcgttgatcgcctgccaaaaacagagcatcagtggtcacgacctccgtcgggacgtcgagatacatggatccacggcttcggagacacgggaatgtggagttcaaccgcaagatggatatctacagcttcggactcgtcttactagagactgcgtgtacagaaaaaaacaatggcaaaatcaaagggagcaaagttaagggagaaaagtctgggagctgtatgtggcagcgcagaaccccaggtggaggctgctgctgatgcaaggttacgtggtgttttcgataggaagcagatggagtgtgttgttgtccttggcctcaagtgttcacacccagaagagtcacaacgaccttccatggaggatgcaatgaaattcctcgaggacggcccctcatgttccatgatgaggggggatacaatgcgtcttgcagcataccctgagccagctgcattcgggtttgattgtatacatctccacgctgcatgcatgaatcccctgaatatatagatatgaaggaacattcaaggatatgatgtttaccgctacaattaattcatacattcatggatatgatgcatgaatccagttgatatatcgctgaattaattttaatttttgccactataattagttcggacattcatggatatgatgtttgtgttagtttttaagggtcatcactccactaaaagttgttattcatgtaaaattagaaacttcggctagagatttatttgtgtattgagttttatatgtt

SEQ ID NO: 2716 - DNA, 1024 bp, Avena sativa
ttcaggagtgtcgttccgctggatgccgtacactggctgaagccaagatacacatcgagcaaaagaggagaaaagagtacggtgtgaatgctcaaaaagctaaggaaagtggccagcttattccaagtactaaaagcaatacacaaaacaaatcggcctatgaaaattgagactgatgggaatttggatctgaagaaaggcagtacaattttagattctggtggtagggattctccaaaaaccacaggacacccaaccgctaaaaattgggatgattgggatatcgttggtcttcctggggcagagctattaagttccagtgtaaggacaattgcttattttcattcttgatgctgccttttttcgtacttttggtgcttgttacaataaacaaaaacttttctctgtttcagtgaaaaactcctgtgctgtcaaaacagattgctacctagtcattatctgaaaatgcaggaggtgttgatgcaggagatgtttaagggtagtgttgtcaagaaggaagatgcccatgtattattcaaagttgaccctgccaaagtggacacagtctatgatatggtgacgaaaaagctgggtaacaatgaagaggctccgaccgtctagttacacatttggttagtgcctggtgtaaacttccctcaaaaccaagtcttggtttctcattcgcagcatgactgagactcgggtaaaaaacggatgctatacttacattaacttggctgtagtgttgaattgaaattcgtgtcagatgtctgaagagtacacaataaggcgttccagccaaattgtaaaattacagtgggaatgtgtagcgtgagtttccattgctgttcaatttttaagaggatagttgtcattgctggagagtgtactgtgtctgatgaagtgacggtgccttgttgtagggttttagggttctgaaacgatgtatcatgtatgtaaccatttgttctatttcatgtcattgttccaatagcagatttgaagtactacagctattcctgtt

SEQ ID NO: 2717 - DNA, 806 bp, Avena sativa
gaagataggaaaaggcctgaatatttagttcaaggaactttataccctgacgtgattgaatcatgcccacctcctggcagtgggaggacacattcccacaccatcaagagccaccacaatgtaggtggtcttcctgaaggcatgaagttgaagctcattgaaccactgaagctcctattcaaggatgaggtgcgcaagctgggaagtattttgaacgtcccagagtcattcttgaagcgacacccatttcctgggcctggtcttgctgtacgtgtccttggtgatgttacagaaggcaatgctttggaggttcttcgtcaggtcgatgagatatttgttcaagccattaaagatgcaggcctctatgatacaatttggcaagcttttgctgtgtttttgcctgtccaaacagttggggtccagggtgaccagagaactcactccaatgctgttgctttacgggcaattaccagtgaggatggcatgactgcagattggtattattttgaacgccagttcctggtagatgtggtgaagaagatctgcaataatgtgcgaggcgttaaccgtgtttgtcaggacataacatcaaaaccacctgctacggtggagtgggaatagaatggccagactgggatttgcaaattatgctccgatactgcaacagtggcctgggaattgcagtctatgtttagttactagattattgtctaagtctctagactaagccctttgtctcgaaagatgattggaaacagcacttacaactgtgctttctattaaaaataatcttgcaactaaaaaaa

SEQ ID NO: 2718 - DNA, 666 bp, Avena sativa
gacacagtatggagggctgatgatagactgataatgtcattaatttgactagtagtggaagctgcttcgtttgcatttcttgttctgatagaagatgaatgttaatgctttggtttgcaggtttctcagttcaaagataaagttacaaccaaagaacaccacattgcagatttgcaaaagaaatctcagaaattagaggaagaattggctgctgcacgtaaagtttcttcagagcgacaattggttgtcacaaagctgtacaaatgttttcttcaacttcaggacttcaatgaaagggccaagaccgctgaaaatgagctcaaggctcttgtcgattctgcgatgtctgagatcgacatggctgaagatgccacaaccaaagatggctcagggtatgagaatggtgtggtctgaagatctctgtgttctgaaactgaaaataccctgattaatgccgtcaaggcctgtttgtctgggtacctgtctgacttctccgtttgtaatgtaatctgcctgtagtatgtcaatcagcgcagttatttaagtttgagaatctcttcgtaggctggccataacatttcagtggatgctgttcagaaacttccctgaagtatttgtgatttaagccctttatttgaggggcacactacctaactgtgaaatagt

SEQ ID NO: 2719 - DNA, 768 bp, Avena sativa
gcccgtggtcgtggtggatcatccagaggtagggtcaagaagacaacagcccgcaagaaggttggcgtggggctcaggaggcgttcattcggtggtggtgtggagagtggcattgatgagtcgatgcttggacaggatggatgggctgagggtgcggatgctgaaggtggacagccggaggaggtgagagggattaacataaatgaggaggcacaggctgctgatggtactagcagggcaaatgtcaccggaggggttgaggacctgggcagcttccatttggatgttgatccaaccgaggatatattagggaatctggggaatttacacaatttgccgttcttgagggtggataatcttggcagaatgatgtgattgttgccatggcttgtcgtggtgctgaagtattgtatgattagccgggtccgaacagatgtttcaaggactacccttacccatctcgttgtagtcttgctattgtgttattatctcatcttgtactagtagtgaactttggtcacttagttggcatttgagttgtttcatttaggttgccatagaagtactctgtgtctttgtggtatctccagatttgtcaggatatgtactatctttggtagacaaacttgggagtatttcttgtgatggaaataatgctccatagattgagcgttgtttgattggtagtgctcgtcatgtcactttggtttgttgaagggcctacaatggctagagaagtctctaagagcaaataagcaagtaaaaaaa

SEQ ID NO: 2720 - DNA, 808 bp, Avena sativa
aggagaagcaaagcgatctgcaggctttgctgtgtggtgtattgcaggtcattatccagaaactgagcagctcagatgcaaagtccataattgcccagactgctgaccagttgatgcttctgttcctccgtgtcttcgcctgccacagtgctactgtacatgaagaagctatgcttgccattggcgctcttgcttatgccactggtcctgattttgtgaaatatatgcctgaatttttcaagtaccttgaagcaggtttgcagaatcatgaggagtaccaagtatgctccatctctgtaggtgtggttggtgatatttgccgtgccttggaagataaaattttgcccttctgtgatggaattatgaccgttcttctcaaggacctctcaaactcacagctaaacaggtctgtcaaacctccaattttctcatgctttggagacatcgctcttgccattggtgagaattttgagaaatacctggcatatgctatgccaatgcttcaaggagcagctgaacttcttgttgttttggatcaaaatgatgaggatatggttgattatggtaaccagctcagacgtggcatatttgaggcatactctggcatactacagggtataaagggcacaaaagctcagctgatgctaccttatgcaggccatctattgcagttcaccgaagctgtctacaaagacagtagcagggatgagagcgtgaccaaggctgcggttgctgtcctgggggatcttgcagacacacttggcccaatctccaaggatctgttcaagagccactctccatgttgagt

SEQ ID NO: 2721 - DNA, 764 bp, Avena sativa
ctttctcccttttttgctgttaagatgtgctttattttgattacattcttaaatctgttttgccccagttgatttggaagcaagtaggtttaactaatcatgtttattacctaggtttaatgtaagttgaaacttttcagttttgattgaattgtaggtttttctgtaatttaataataattcttcttcgaagtctttgattgaatatgtgtggtcaatttacagagctgagacatctctgtcggagaaggatcagaaagagagggcccagaggagttcatttgcccgtgggattgttctctccactatattcgatgatgatagcttgtaagcgaaatccatctttacagtggttgcatgacattgtcaagggcgcgcaacacaagggaatattatttgcatcgctgcaaccttgttcatgctgccactgctgcttgcattccttcacgaccaggatgaggcccatcaagttatgtatgtattggtgcatgtttctctctgcattgcgcagatctcaacatgatagcggtggaaggtcttgtagctctccacatggaataaacgaggacactatccttatagtgacattgtgcatataggaagatgctactcgcctactcgccatgtattaggcattctgtttcatcaatgtaataacatgatgtgcttgtatacgcccatgtcattctattcatatgtaaactcatgtattccatatttattatgactggtacaattgagtaaaagagataagtttgttactt

SEQ ID NO: 2722 - DNA, 420 bp, Avena sativa
ttttttttttctttttttttttgttcggtgaaatatcagtaaagttgcattgaacctaggtataatgttagattgcacctgtgcatcgtagattgcgtttcaattgctagacagaattatacatgaacttctccaacatttttcctctgctcatgcgctccctccttattagctaacagcatgccgattaatcggggaaccatacaacataaccaggcagtgtgcccttgctcttattatcaacgaacctaagccacttatttcttgtctggaatcttctctaacagttgaccgagaacctcgaatagatcaccaacgattccgtaatcggcaacctggaagatggggggcatccgcgtctttgttgacagccacgataacccttggagtctctcatccccgccaggtgctgtatcgctc

SEQ ID NO: 2723 - DNA, 926 bp, Avena sativa
gcaacttcgacgcctgccgcgacataaacggccgccggctgcgccacgtcaacgccgagcgccgcctcgaggagtggaaggccgaggcaggggaccgccagctcgagaagctcgcggaggacttcctcaagaagaaagccaaagagtcgggtcgtggcggcgtccgggctgccgaggtcgacaagtacctcgagaagtaccgtaaggatgccgagagctgcgtcaatgctgttgaggagtccgtgcgtgcctctcttgggaagaggaaggctgtccccaagccacgtgacgccaagaagctcaaaatttggatgggcaagaagaaggtagcagatgatgagagtgatagcgaaagtgacagtgatgtggatgatgatgaagatgcaggtagaaaaaacctagacaagctcttgatgacgggaattgctcaaatgggtccaacaaaagtgaggatgagaaggttgatctggcttcagtttctgggtcacattcagaaggggagtcctcaggtgagaagtcccagagcagtgattcggagaaaaatggaaatgctcttcaggaatccatggaagtagcaattagatcaggatgtgattttgagtcggcgagtactttggagtgtgaggggggcacgtcggatcagcctgctcccgagaacacttctgaaaatggaacttctgagaacggtattagtgctctttcagaagaagttctccaatcagatgagaaagcagatgcggataataccggttcagctacatcacttcttgatgaccctgaggtgcccccagtagaacaatctgctgatgcaaataacaagtctcttctttcagaggagcctgtggatctgacaacattcagttcagcagcaggattagaggcgcttggcatggagaagcttaagctggagctccagactcgtggac

SEQ ID NO: 2724 - DNA, 893 bp, Avena sativa
gcattcaggaccttgttgatattgatgtcttcctagatgcaaaagagtaattgattctcttcagaataaggaaatagctccagcgttagcttggtgtgcagaaaacaagtcgcggttaaagaaatcaaagagtaaactcgagtttttactgagacttcaagagtttgtggaactagtcaaggctaagaacttcctgcaggctatagcatatgctcggaaataccttgctccctgggggtctacgcacatgaaagagttacagcgtgttactgcaactcttgtatttagaagcagtacaaactgtgttccttacaaggttttgtttgagcaaaaccagtgggactctctcgtggatcagtttaagcaagaattctacaaattatatggcatgacactagagccattgctgaacatctacctgcaagcaggcctgacagctctcaaaactccattctgcttcgagggtaattgccccaaggaagaccccttgtcactggtcggcttccggaaactcgcggagcccctacccttctccaagcagcaccactcgaagctcgtgtgccacataaccaaggagctcatggacaccgagaacccgccgctcgtcctacccaacggctacgtgtatagcacgaaggcccttgacgagatggccaagaagaatgggggcaagatcacatgccccaggactggagaaacctgcaactacaccgacctcgtcaaggctttcatctcatgatcatggtgatgccgctgctgtagctcaggatatgagtttgaatgtgtacatagaatgactggatgaatcagcacatgattgtgcatcctatcgagttaatttgaattgtgatctgagtcaaaacagcaccggtgatactgaagttactgattgt

SEQ ID NO: 2725 - DNA, 1048 bp, Avena sativa
ctcacgctctgggtctacgccttcttcctccgccccggcaagcacctgcgccgccgctacgggccctgggccgtcgtcaccggcggaaccgacggcatcggccgcgccatcgccttccgcctcgctgcttccggcctcagtctcgtgctcgtaggccgcaacccggacaagctcgccgccgtctccgaggagatcagggccaagcaccccaaggccgaggtccgcaccttcgtcctcgacttcgccggcgaggggctcgccgccggggtcgacgcgctcagggagagcatccggggcctcgacgtcggcgtgctcgtcaacaacgccggggtctcctacccgtacgcccgctacttccacgaggtggacgaggacctcatgcggaccctcatccgggtcaacgtcgagtgcgtcacccggatcacgcacgccgtgctccccgggatggtcgacaggaagcgcggcgcaatcctcaacatcggctccggcgccgcatcggtcatgccctccgatccgctctactccgtctacgccgccaccaaagcgtacgtcgaccaattctcaagatgcctctacgtcgagtacaggggcaagggaattgatgtccaatgccaggtacccttgtatgtggcaacaaagatggcatcaatcaggaggtcttccttccttgtgccatctgctgacacctatgctcgtgccgcccttcgccacattggctatgagccgaggtgcacaccatactggccacactctgttatgtggttctttatctccctggtaccggagtcgcttgtggacagtattcgcctgagcatgtgcatgaagatccgcaagaagggacaggctaaagattccaagaagaaagcgcagtgatgactcagatgctctgaggattgccacatttcttcaccatgtgtaatggaccagtacttgcattttagcttcattaccttcccagcacgctagggcgatatggttgttgttccttccatggttaagaacaactctgtaatccttcattcttgaatgtaacaccagatgcactcaa

SEQ ID NO: 2726 - DNA, 715 bp, Avena sativa
gcaacggggcatgctgtaccgagggaatctggcaagagattggctgcctcgtacgtgaacttctatctggccaatcgtgggatcatagcacccgctttcggcgataagcaacgggacgacgaggcgcacgaggtactccagaaggcattccctgattatgaggttgtgatggtcgaaggcgcaagagagatcgtgctgggaggtgggaacatacactgcatcacgcagcaacagccggcgcggccatcttagatcaacagcaagaaaggcgtaccatgatctacactgcggtgatgatctaatcatatattgttgctcctcgatgttgatagattgcgtgtggcgaggtctagagaaagaaatgcatctgagtcagtagcagtactcataattgtatgtgtatcaaacgcccacagcatctttcattgcacttcgaaattgcatcgtaagccggtagatatatcattggagaataatcaaactgtatctaccacatttatctgctgttgtttgttctgtccattccatcctcatccattttcaatacgccgccgtccgaaagtatttgttcccgtatcatccagtcatgaattcaggaagggacatgtacaattgattctaaaatctgaattgtggtgtaaatggatttttcgcttcattgtatcttgcctatcaatataaagaggagtatattttacaataaaaaaaaaaaaaa

SEQ ID NO: 2727 - DNA, 955 bp, Avena sativa
ctcaagctactcacagagtgacggtaacagcaaccgatcaagtcgggtacgaggtctacaaggaagcaagaagaatgggaaccgtggtggctccagggtcggcgaagcccaccgtcctccgcgtggccgccatctcaggctccctccgcaagaactcgtggaaccatggccttatccgcgccgcccaggagctgtgcgaggagttcatcccgggcctgcagatcgaccacgtcgacatctccaacctgccgaatgccaacccggacctggagaccgacggcggcgacagcttcccgccggaggttgaggcgttccgcgccagggtcctcgccgccgactgcttcctcttcgcgtcccccgagtacaactactccgttacgggctcgatgaagaacgcgctggactgggcgtccaggggaagcgtcaaatgctgggcggacaaggctgcggcgatcgtctgcgctggtgccgacttcgggggtgggagggggtcgctccacctccgccagatcgggatctacctcgacatccacttcatcaacaagccggagttccacgtcagggctttcgacgatccgcccaagttcgacgccgaggggaacctcaccgacgccaagaccagggagcggctcaagagggtgctcctctcactccaggcttttgcgcttaggctccaccacaaggacgagtgaacttctaatgaagctcgtatgtttcgtatgcgttgattactctgcgatctgcattactacattgttccgtgtttgttgttgtgctttgtggttgtaccacgttctgtattcatgtactactgtttgtggttctgtaagaaagacaatgctaatgtaagcgtgtgctagtaataaatcgccagagagtggcaaaacatataatgcatggagtacttgttttgtttagctccataaattcagcatttgcgtaggtattcgaacaa

SEQ ID NO: 2728 - DNA, 693 bp, Avena sativa
ccagcgacctgcaggagcacacttccattttcttcagggtgttcagacacgatggcaagtacaaggttctcatgtgcaccgacctcagaagatcgactaagagagccgacgtgtacaagccgccctacggagggttcgtggacatcgacatcgagaaggagaggagaatatcgctcaggacattgattgaccactcggtggtggagagctacggcggcgggggtcgggcggtcatcacggcgcgggtctacccggagcacgcggagacgagcaacaaccgcatgctcatgttcaacaacgggaccggcatggtcaaggtgtccaaactcgatgcctgggagctaaaggcggcaaacgtgaacatcccgggcgacgggctcatcacagttggctcaatgagcctcggcgaagcatattaggaggaggatactggttttgttcatacggtggatagccaattgtgtggctgattgaatttccctggccagctaaggcttttagggtgaatttggggattttatttagtaagtagtttcggtcaggatagttaaagggagaagaataggccggagaacgttcgttgattaatacatgtcagcgaacagtccgcgtcgtgtttatgctttgcaatgtaaatagagaaagtgtatatgtccatatgttctacatatccatgcacatctctgctaaaag

SEQ ID NO: 2729 - DNA, 935 bp, Avena sativa
ctaccacgtgcgctggtcagactccattaaaatggagatgatcaaagccaaatttgacttgatccatatgttgccaaactgctgcggtgttatagatacaatttatatctcgtcagctgaaccaaaccgcgaccatgagagaaattacagcatggctgtgcaagtcgtcgttgatccagatatgaggatcatcgactaccatgcggaatggtcaggtaccaaaacccagtcaagcattttggacggctctctaatctgcaagcagcgcgagaagggtgagtggctgactggcggcaaggtgaagttatcagatggatcggaagttggggaatacataattggtgacgcaggattcccccttctaccctggcttcttacaccataccgggagaaggatctctcctcagatcccaaagtggagttcaataggagactctctgcagtcagagccatcattctgagggggttggcaagactaaaagacacgtggaagtgcttgcacggagagttgtggcgcccagaaaatccacgtgagttttctcatataatcgttgtgtgctgcatggtgcataacatagtgatagacatggagggtaaagccgtggaggaggattacgtaccaaacagttgcgacgtgaagtacaatcaggaagctgtagaggaggaatgcgtaccggatgaggattctgtcaggatgagagatctactggcgcagcacttggccagtagaccatcgggatgtgtaggggatgaagaggaacatgtagttccatccgatgtaggtgatgaggaggaacaagaatcaagcgggaaaaaagcaaaggaagagacacactgctaggagaccgttctcgccacktagtttggtactcatgttcccctttctggtttattcagtagcatacatgaatactacaacttcaggcatgtgagaa

SEQ ID NO: 2730 - DNA, 589 bp, Avena sativa
tatttttttttttttccttgtaaaggacgattcatgcttcattgcatttcaccaagattaatactactagtacatattctaattctcaagctgttacagatcctgcagtagcatcgcaataaacatatgaaccatagaaatggagtttgcaacagaggaaagctacaacctttacatctcatgaactgccattacactcccctatgctaccgaatggctactcctaagcagctcacagcaatgatgagattgccacgaatcctgcatcagtatcagcgtcgcccatgttatttgagtgatatccagcaatccacaggcgccaatctagcagaagcttgctaaaacaggctacaggcagtacattttgcatgcttgagaatcggcacctaggatcacgtacagttttggcaattcgattcatgggctcatgctaggcaaaaaggtgatgaaccggctgatcctttcactgttccttccaaattctgccagtcaccctcaatttgagctccttcctttcaccaccggagaagaacaaggccatgttccgttggattattagcccgtcatagctatctcggaccttccggtg

SEQ ID NO: 2731 - DNA, 900 bp, Avena sativa
tcgccgccgatctgttgggcacgggcctcgcccggccgtccgcgcccgtgcccgtggccgcggtggggaaggcgcagcgcgagttcgactacttcgcgctcgcgctgcagtggccgggcaccatctgctcctccacccgccactgctgcgccatcaacggatgctgccggtcggagccgctccagacgttcacgatccacgggttgtggccggactacgatgacgggacctggccgtcgtgctgccgccacacaaacttcgacatggacaagatatcgactctgaagccgaagatggaccagtactggccgtctctgtactgctcaacctcctccacttgcttcagtggcaagggccctttctgggctcatgagtgggagaagcatggaacgtgctcgtcccctgctgttgatgatgaattacagtacttctccactgcccttgatctctacttcaaatataacgttactgaaatgctggcaactggaaacatcttcacctcaaatggtaaagaatatgcactgagtgatgtcatcgatactatcaaacatgcttttgggggatcaccacagatcatttgcaagaagggctcggttgaagaactaaggttgtgcttcaccaaagacttgaagcctcgcgattgcctcactacttcttctatgtacaaaaacttgtccaaagcaaagcattgccctcgaagcatctctctgccagcatatgatcccaatgcattcttaaattcaacctttggagattctcccagaagccagcaacagtgggatgtatttttatacatcctaagatacccattacagcaaccgagcattgtatggctatgatgaagcagatatcttctggactcttgactgctttgaagacatagccataggtgctgcggtg

SEQ ID NO: 2732 - DNA, 815 bp, Avena sativa
acgctccgctatgaatttaagccagcatccattgataagactcaggccggctctctacagaaaagcaaagataatcgggtagctgtagaatttcataacaatcagcctggcaagccaaaggtggcatttgaaggaagccaagaagagtataaggatattgatggtgtcttattttttgacggtgagacctttcgcttggagcgattgcatcgggctgtcaagagattaagacatgtccgggttccgggagagtctgcagctgcttccttggcagctacaactactggaatgggtgaatctcattctcctccatcagcaaaagttgccaagttacctgcaatgaacaagcctcttgtacactcagctccggttgaggttgagcgcattgaaattggtgaacctgaaaatccagagccaagaaacaataacaggagctctacatatcatgcagtcagcgcagacccattttcctcttcacctgatccaaatgaccaagatgaaaacctggacatactcggcgatgatgacaatggctcacccaacaatatggcctcagcagaaggcgcatcttatcgcgggttcgacatcaacttgccgaatcagctcgacgtggatgatgaggttgctgatgtagacgtaaacgatgaagccgacgagggcttaacgcagctgaggcgctgcgagctcaagtcaatgcggaaggccagcaggcggagcaggccgccacctctagctccagcgggagcagcagcagcagtagcagcagcgggagtggtagcggaagcgggagcagcagcagtgatagtgatggcagc

SEQ ID NO: 2733 - DNA, 629 bp, Avena sativa
atgtttcaacaagagacaaaatgtctgaaggcttagctagatagtatccaaaaagaagatgaaaaacttgctgtcacacctaaagtagtctcttctcttattgcttcgggaaaattcatcactttgtttatcaggacctttcttattccattgttgttgcttacaggtattcagcgtgaaggaagagttagttacccagcaatgcaacattaaaaaagaagtatccgatgcacaatcatccactccaccaccttccgatcactatatccgcactagggcagcagggatgaaaagaaaatgcaactcactatatgaagtatgtccgcatggtgtggtttcatttgtgtttggtcttagaacatctggctttttgatcagcccttctcctagcaactataaattccctctaagtaaagatgataacatctgctatcggtcttgtgtattaagaccacaacctgtcttgttgtcgcttaagttgcttctctagcatctgctgtcggtcttgtgtattagaccacagtctgtcttggctgttcgcttaggatgcttctcttctaaacgtttatctactgtaaattaaaaccatttacattatgtatgatatatatgtatcctgactaacgaaa

SEQ ID NO: 2734 - DNA, 632 bp, Avena sativa
cttgagcctcgccttagccatacatcagctgtggagcctacacttgctccagttgcagtggagcgctcgatgacaacaagagcagcagcttctaatgcattgcgtcaacaaagatttgttcgggaagtcacaatacagtacaatctctgcaatgagccatggttaaaatatagtataagcattgtggccgacaagggattgaaaaaaaactctttatacttccgcgaggctgaagaagggtgaagtgatatacttggaaacacatttcaataggtatgagctgtgctttagtggagaaaagccttgttctattggatcaagctccaacacatccgatttagaaccggagaaacaccagaacagtagccaccaccaccattcacaaaatggggacagggttactgcagaacatgaactgcgggacctgttccgatggtcacggtgtaagaaagccatgcctgagattgccatgcgatctattggtatcccactgccagctgaacaagttgaggtgctgcaggacaacctggaatgggaggacgtgcagtggtcgcagactggtgtttgggtctctgggaggagtatccgctcgcccgagtgcatttcctctcctcgactagcgggccgcagct

SEQ ID NO: 2735 - DNA, 673 bp, Avena sativa
ggaagaagtacaagctgatagtgaaagtgatgacgaagaccaacaaatatacaaccctctcaagttaccaatgggttgggacggaaaacctatcccctattggctctataagcttcatggtcttggccaggaattcaagtgcgagatatgtggcaaccacagttactgggggagaagggcttatgagcgccatttcaaggagtggcgccaccagcatgggatgcgatgccttggtattcctaatactaagaacttcaatgaaatcacatccatcgaggaggcgaaggcactctgggagagaatacaatcaaagcaagggctgaacaagtggcggccagacttggaagaagagtacgaggatacggatggcaacatctacaacagaaagacttacaccgacctgcagcgccaaggcctgatatagaattgtagacgtgatcctagtgcactgttgtggcgtgctaaaatgcttggtatactgttctatgcagatctgttgactttcctgctggttgtaaccttgtattgacatgcatacatttgtagcgatggtactccggagatcactgttttcttcagctgtcttttttgcttagcttgttgccttgttctgtgtttgtttgtgcaagttctccttttttcgttaggtatcaagccggagaacagagactct

SEQ ID NO: 2736 - DNA, 922 bp, Avena sativa
cgtcaacttcgccgtggcggcgccacggccatggatccgccattcttcgaggggattggggcatcggacaagctctggaccaaccctgtccctcagcgtccagctcgactggttcgagaagctcaagccttcgctctgcagctcacccaaaaattgcaaggagtatttcagcaagtccctcttcctcgtgggggagattgggggaaacgactacagctacgccttcttcaagggcaagaccttggacgacgccaagtcctacgtccccaccgtctcctccgcgatcatcgacgccaccgagaggctgatcaaggccggcgcgatgcacctggtggtgccggggaacctgccgacgggctgctcgtcggcgtacctgaccctgcaccccggcaggaacaggagcgactacgactccgtgggctgcctgaaaacgtacaacgacttcgcgcggcgccacaacgccatggtccagcagaagctgcaggtgctccgcctcaagtaccccaaggccaggatcatgtacgcggactactacggcgccgccatggccttcgccaagaatcccaagcaattcgggttcaagcagggtccgctgaagacgtgctgcggcgggggcgggccgtacaacttcaacccgaaggcgagctgcggcgtgcggggatccagcgtgtgcgcggacccgtcggcgtacgccaactgggacggcgtgcacctgacggaggccgcctaccgcgccatcgccgacagcatcctccacggcccctacaccagccccaggctgctctgaccccgagcccccttgctgtgtgtgttcttgcttaagctagtcgtgactctcggtgactgatctgatctgtgtaatcgatgctgctactgctaccggtggagtgagaagtaccacttgaaatatgactgcgctgtt

SEQ ID NO: 2737 - DNA, 685 bp, Avena sativa
ccgccgccggcccggccatcctcccggccgacccgtacgaacgagccactgctcgcttctgggccgcctacgcggacgacaaggttttggcgtcgtgggccacgatgctgttcaggggcaagacggaggaggagaaatcggaagggaagaaggcgctgttcgtggcactggcgaccatggagggcgccctcgcgaagtgctccgacgggaagggcttcttcggcggggacagcgtcgggctcgtggacatggcgctggggagccagctctcgtggctgaaggcggcggaggtgatgtccggagaggaattcttgggcggtgacaagaccccgctcctcgccgcgtgggcggcgcgcttcagcgagctcgacgctgcgaaagcggccttgccggaggtggacagggtggtggagttcgtcaagatgaggcaggcaaagatggctgccgctgcagctgcggcgtcaaacaactgagcaagccagctcggcttggacactgtcatacgtgacgtgactgaaaaagcatatatctgctgggaaataaaatagtctcaataattattgtatgcgacagcttgatctcacaatccgcatatttctacgaataggtttattgttatattttgagtgtacttcccgacaaaaaaaaaaaagaagtagaacttctactctgttcctcttgatta

SEQ ID NO: 2738 - DNA, 708 bp, Avena sativa
gaggccgtgggcgccttctccctctccgccggcgtgggcgtctggaacgcggtggtgttcgagatcgtcatgaccttcggcctcgtctacaccgtctacgccaccgcggtggaccccaagaagggggacataggcaccatcgcgcccatcgccatcggcttcatcgtcggcgccaacatcctcgccgggggcgccttcgacggcgcctccatgaacccggccgtgtccttcggcccggccgtcgtgagcggcgtgtgggagaaccactgggtgtactggctcggccccttcgccggcgccgccatcgccgccctcgtctacgacatcatcttcatcggccagcgcccccacgagcagctccccaccgcagactactgaacaacctgaacaaattccatccatcgccacggtcatgatcgagagatcagtaagattgcttcaaagaatcgagcaagtgtcgtcgtgcgtgtcaacaagcagtaagaaccaagcaagtgtcgtcagtaagattgctccttcaagaaccgagcagttttagtttcagtgttgttctctgcttctctcctgtgttgagaagttcagagtgaacagtgagtcagtcaggaataatgggtacattatgcatcttctctttgtaatccttcaattatgcttccattccatggtcatcaagattagtgtcattttgtacaaatcgacactaatctt

SEQ ID NO: 2739 - DNA, 860 bp, Avena sativa
ggttatgatccacttggtgttccttctcgtggtgaaatcctcatccgagggaacacaatcttcactgggtactacaaaaatcctgagctcacaaacgaggtcatagttgatggatggtttcatacaggagacattggagagatgaccccagatggaatcctgaaggtaattgaccgaaagaagaacatatttaagttgtcacaaggggagtatgtggcagttgagtatctggagaaagtatacgtcttccctcaaattattgaagatatctgggtgtatggggacagctacagatcaacattagttgcagtagttaatccacatgaagaaagcaccatgaagtgggcagcatcaaatggatacaaaggttcttttgatgaaatatgcaaattggaaagccttaaagaatatatccttaaagagcttgcaactgctgcacagaagaataagctacggggtttcgagtacatcaaaggcgtaatattggatcctgtaccttttgatattgaaagagatttggtcactgcaacgatgaagaagagaagaaactacatgctaaaatattaccagccagaggttgacaaagcatacaagaaattggaggatcagagggctgccaacaaagcgaagtgaagatatgtgttctgtttggtactttggtcatatgccggaagatcaaaataccattgtaaatttcctagtgaactttggtgtgaacattacataaaagcaataaaatgcttaaatgcatatcggtgcatggtgtatgtatcctctctctctgaagttacatgtgtggcgcagacacaacggatgtttctgctacacgtatttcaaccaagtaacagtttttctatcta

SEQ ID NO: 2740 - DNA, 887 bp, Avena sativa
gatgctggacaagctcggtggagcttttgcccccaagccatcatctggtcctcacaaggctagggagtgcttgcctctgatcctcatcctcaggaacaggttgaagtatgctcttacctaccgtgaggtgcagtccatcctgatgcagcgtcatatccaggttgatggcaaggtccgcactgacaagacctaccctgctggtttcatggatatcatctccatccccaagactggtgagaactacaggcttctgtatgacaccaagggccgcttccgccttcacgctgtcagggatgaggatgccaagttcaagctttgcaaggttcgttcagtccagttcggacagaagggcatcccctacctgaacacctatgatggccgcaccatccgctaccctgaccccctcatcaaggccaacgacacaatcaagcttgaccttgagaccaacaagattgttgacttcatcaagttcgatgttggcaacgttgtcatggtgactggtgggcgtaacactgggcgtgttggtgtgatcaagaacagggagaagcataagggaaccttcgagaccatccacgttgaggatgcccagggccaccagtttgccacccgtcttggcaacgtgttcaccatcggcaagggcaccaagccatgggtgagcctccccaagggcaagggtatcaagctcaccatcatcgaagagcagaggaagagggatgctgctgctcaggctgctgccaaggcttgattctgatgcgtcgattcgttttgctatagcatgagtttatctgcaaggatatagaactatgttcccagaactattgtttttaagttttgcctgatgttatgctggtttgtgaaccaatggctgctgctaggtgtaatgtgac

SEQ ID NO: 2741 - DNA, 533 bp, Avena sativa
ttgatgttggcaatgtcgtcatggtgactggtgggcgcaacactgggcgtgttggtgtgatcaagaacagggagaagcataagggaacctttgagaccatccacgttgaggatgcccagggccaccagtttgccacccgtctcggcaacgtgttcaccatcggcaagggcaccaagccgtgggtgagcctccctaagggcaagggtatcaagctcaccatcattgaggagcagaggaagagggatgctgccgctcaggccgccgccaaggcttgattctgatgcgtcgattcgttttgctatagcttgagtttatctgcaaggatatagaactatgttcccagaactattgttttaaagttttgcctgatgctatgttggtttgtgaaccaatggctgctgctaggtgtaatgtgacagtttaccttgttcaagtagtatttccatcctcctggttctgttcttgtttgtgtcaagttgggcattattatctcgttaagttacgatgatttttgattagatgcactgaagtga

SEQ ID NO: 2742 - DNA, 801 bp, Avena sativa
cgctaggccaattgatgcaattaatttggcctatgcttttgggctcactgaacaatttgagccagtgcagttgctgaaagcatatctgagggaggtcaagaaggtgtctcatgccaagaatggaaaaatgtctcctggagcacagaatgagatgaatgaacgcgagctgtctgcactgaaagctgtcatcaagtgtattgaggagcacaaactggaggagcaatatcctgtggatccacttcagaaaagggttgttcagctggagaaagccaaggccgacaagaggagggctgttgaagccgcgaagccacaatccaagaggcctcgtgccaacggttcagtctacgcgccccgtgttaccagcttccctgagaagagcttctaccaggcgaccccagagaggcacccatacccttacgaaaggcagttgtgtatgggccgaggcccatcaccatcctaccatgatcaacgcagcggcagctccctacaccatcgcacctgcacacacgccgtactatggtaacgggtacccaatgcagtaccaggtaccatacatccactaatggggaagagctgggctctttcctaactatctctagctttttaaccttctgctatgtcgtagttgtatcagtcttcgctagctagtctgcctagctgaaaatagtcggaccactcgcttgtgtgtgtgtgtgctatgagtggctattgtgaaaatctgttaattctatgtcacgacttatgacattaatttacttctaatgtctagttactattttaatcggcgtattctttaactta

SEQ ID NO: 2743 - DNA, 653 bp, Avena sativa
tttttttggttaacaaacaggttagcaataacttagaaaaggaaacaaaattaaaatagtcaaagtacaatacaattaccattgcactgacattagatcacttgtgcaataagggcgacaatagctccacagagcagctttacaacaagttaagcggttctaccaaagaaggcaaaaaaaacgaattctctcaaaaccagatggttccaacctagagctaagtttttaataaacatcagcgataagattttacaacaggacaggtctctaacggacttgttgtatacatgttccagcaaccaattgttttatgtggcagcgcctatgtggtcaccatcaacagccatagcatctgcatagttcccttgatgatgacctccggtataaggtcccatccttcggccacggttgcgctcatcgctttcgccatctgatgcctcggcaagcctagctatagcatcaatcaacgattgctcttgctccttcagcgctttctttgccttatctacctccacaggatcaggatggctaacactaaaaaccctctccacctcttttatgaggctctcagtgtgaagtatatcaatgtcatcagaacttctctttccaacaccattttgcgaacgtggaaagtcctttcttgacaaagtctt

SEQ ID NO: 2744 - DNA, 842 bp, Avena sativa
ttgatgtcagctgtcaacgaagcagccaagtatatgccagaggaatgcattgagcctgattcagagttccatccaaaccttgtcaacacagtttcatacatggtgaacatgatgatccaggtggcaacctttgctgtgaactacatgggtcacccgtttaaccagagtatatcagagaacaagcctttcaagtatgccctatatgcagctgttgctttcttcacagtgatcacatcggacatgttcagggatctgaatgactacatgaggcttgaacccttaccctgaaggaaatgaggggcaaactgatgctgtgggctatgcttatgttttgtggctgttatggatgggagcggttcttgcgatgggcattcccgggcaagatgccagcgtgggagaagcgccagaaacaggcagttgcaaacaaagacaaaaagcagtcataggatcttgtattatttttccatcactgttccattcttttaccctctggccatttctcagctggcagcgaatcttgtcactattgaactgaccatgatctggcatagttgctctctaatttgtagtttaggggaattttgtcagactcaaagctctatttgtagggggatacagggttactcaacatacttgcctggtatggagggtcaggattttcaggttccataccgtttgctaatgatgatgtaaacgtgtatgaaaaccattgaacactccaatgctgtatgagttatctgctgttacaagttttattacctctgtttctgaatataagatgttttgataggctactgaaacatcttatatttaggaacggaggtagtatttgatattatact

SEQ ID NO: 2745 - DNA, 939 bp, Avena sativa
cttcttggacagcacgcgaagcgcattatgttaatgtcaaaggttgaaaaccaggagggcattgtaaacttcgatgaaattttgagggaaaccgatgccttcatggttgctagaggtgatcttggaatggagattccagttgagaagatcttccttgcccagaagatgatgatttacaagtgcaacctcgctggaaagcctgttgttacagctacacagatgcttgagtcaatgatcaagtcccccagaccaacccgtgctgaggctaccgacgttgcaaatgctgtgcttgatggaactgactgcgtcatgctcagtggtgaaagcgctgctggagcataccctgaggtggctgtgaagatcatggcgcgtatctgcgtcgaggcagagtcttccctggacaacgacgccgtcttcaaggagatgatccggtctgcgccccttccgatgagcccattggagtctcttgcgtcctcagctgtgcgaactgccaacaaggccagagctaccctgatcgtggtcttgacccgtggcggcaccacggccaagctggtcgccaagtaccgtcccagggtcccgatcctctccgttgtcgtcccggtgctgacaaccgactcgttcgactggaccgtcagctctgagggcccagcaaggcacagcctgatctacagaggcctggtcccactcctcgctgagggctctgccaaggccaccgactcggagtcgaccgaggagatcctgcaagctgcactgaagtctgctgtgaagaagcagttgtgcaaggccggtgatgccgtcgtggttctgcaccgtatcggcgtcgcctccgtcatcaagatctgcaccgtgaagtgatcgtcaggcacttgggtcgcttctttactccaatgttctggagacaaattaattatcatccttgcagtttgttgcatagacccg

SEQ ID NO: 2746 - DNA, 640 bp, Avena sativa
acaagtgcagatccctgaagaacctgcagacaaagatactcctctggattccaccattgccgccccagttaaaccaggactattagatggtaagcaaaagaaaaaggggaaggcagtcatggagcatgataataacagcaaaccaaaaggcaaggatgataaagctcctaccgatgataccaacgtgaaggctaagaaggaaaccaagaggaagaaacttgtcagcggagaagataaagatgtgggtggaatcgatgacactgaagtgtcgtttgcacggctggtgttttcaagccagggtggccgtcaagagcccgtgccgaaggaggacaaaacccaggggaccgctccagatggaaaatttgtcggaggcctggtaattgatcacacaaagaagaggaagaagtcgcaagggatggctcttgacgcgtcggatcttaagttgctgtcctctgtgcccgaggtgggtgtgggtgaactgacgggatgggattagtggcagttcctagtgggcttgacaaatgatgtatgcctagtgagtactgttactaaaaacactgttgtagggtctcattgcaccttgaaatatgtaataatctgacttgaaaatgttatttgttgcaattttgtagaaaaaaaa

SEQ ID NO: 2747 - DNA, 811 bp, Avena sativa
agacctctgctgatggtcacacatcgtgtgctaaggagatgaccaaggtctctggtatctctgacataataccagagatggagatctgtgacttcgattttgagccgtgtggctattccatgaatgccatacatggctctgctttctccaccattcatgtcacccctgaggatggcttcagctatgctagctacgaggtcatgggcttggaccctgcctccatgtcctatggcgacctggtcaagagggtgctgagatcctttggcccgtctgacttctctgttgctgtgactatcttcggcggtcacagccatgctgggacctggggtgagaaactggatgttggagcggcctatgatggcaccaacatggttgagcaagagctgccttctggaggcctgctgatctaccagagcttcactgccatcagagaaatgtccactgggtcgccaagatctgtcctgaattgctttgttgatgacaatttggagggtgcccccaaggacgccaagatgaatgctttcctctgctgggaagaggatgctgctgcgcaggagatagatgacagggatgccaagaaaatgaggagctcctgagggtgataatgctttgctggtttaaacgagatgtgttatggtcatctgttattagaaatctcttttcctgctcggatgctgttatagcctatgggtactgtgaaatataaagcctctcggtggtctcagttgtctgccgctttgagcaattgtatgggcatacctgtataagaaatgaactatggttactatgaataaatcttgttaatcaaaaa

SEQ ID NO: 2748 - DNA, 790 bp, Avena sativa
  modified_base (730)..(730): a, c, t, g, unknown or other
tcgaggcgcactccgtcgacgagacatccgagtggaggaccttcgccaacgagtccaacgacaacgacccagtccgtgtcggggggcccctccaacccgctcctcaccgacggggggctctccaccgtcatcgccaagcccaacggcgcacacggcgacttcctctcctcatccctcggccgctggcagaaccgcggctccaaccccgaccgctccctcatcctcgccttccgcaccatcgcaaacatggcagacaggctgggtcttgtggctactatcaaggaccgagccaatgaaatctataagaaggttgaagatctcaagtctatcaggggacgaaatcaagatgccatattagctgcctgtctgtatattgcttgtagacaagaagatcgtcctaggactgtaaaagaaatatgttctgttgccaatggagcaacaaagaaagagattggccgagcaaaagagttcatagtgaagcaactggaagttgagatgggccagtctatggagatgggaaccatccatgctggagatttcctgaggcgtttctgttcaactcttgggatgaacaatactgctgttaaagcagctcaggaggcagttcagcgctcagaggagcttgatatcaggaggagtccaatttcaattgcggctgctgtcatttatatgataacccagctctcagacgacaagaagccacttaaagatatttccttggccactggtntggcagaaggtaccatcaggaattcatacaaggacctgtaatccctacgctgcaaggctc

SEQ ID NO: 2749 - DNA, 640 bp, Avena sativa
aagaatgctacctttgcggccatagaggaaggcatcgtacctgggggtggtgcggcctatgtccatctgtcgacgtttgtgccagccatcaaggagaagctggatgaccctgaggagcgccttggtgctgatatcattcagaaggctcttctggcacccgcgtcgctgatagcccacaacgccggagtggaaggtgaggtgattgtggagaagatcaaggacagcgagtgggagtttgggtacaacgcgatgacggacacacacgagaacctggtggaggccggcgtgattgaccccgccaaggtgactcgttgcgccctgcagaacgctgcgtcggtggctgggatggtcctgaccacccaggccattgtcgtggagaagccgagcaagaaggcccctgctgccgccgggatgccagggggcatgtagtgggttgaagtggtgtgtagtcctgctggggtgggttagggtgtgggagtctctgacgacttttaaggagttgtggtgtggtgtgtaatggtgcggctagtactctttatttattttttgcagtgggttgaagtggacgccgtcttgaactactatatatttttcttctagctgagatgaatttgagaagaggaataaaatttggtaaaaa

SEQ ID NO: 2750 - DNA, 944 bp, Avena sativa
tgctgcatgatagatcgcaggatgggtgtgtatggctaccccattgaaattcaatccctgttcttcatggcactgaggtgtgctcttctaatgcttaagcatgataatgaagggaaagattttgtggagaggattgcaactcgtcttcatgctttaagttatcacatgaggagttatttttggctggatttccagcagctaaatgatatttatcgttacaagacagaagaatattctcacacagctgtcaacaaattcaatgttattccagattctattccggactggctatttgattttatgccttgtgaaggtggttttttcgttggcaatgtcagtcctgcaaggatggacttccgttggtttgcacttggaaacatgattgcaatagtatcatctcttgctacacctgagcaatctacagccataatggatctcattgaggagcgctgggaagagctaattggtgaaatgcctctgaagatatgctatcctgctattgagaaccatgaatggcgaattgtgacggggtgtgacccaaaaatacaaggtggagttatcacaatggaggatcttggccagtacttctctggctgctgacggcagcaagcatcaaaactggacggcctcaaattgcaagaagagcaatcgaccttgctgagaggaggctgttgaaggatggctggcctgagtattatgatgggaagcttggaaaatatgttggcaaacaggcaaggaaatttcagacttggtctattgccgggtatttggttgccaagatgctgctggaggacccttcacatcttggaatgatagccctcgaggaggacaaggcaatgaagccagttttgagaaggtctgcctcgtggacaaactaagatatcgacgaaaattcttaggggagcaaagttcgggttggaaacacgaattcttcgggtagcact

SEQ ID NO: 2751 - DNA, 998 bp, Avena sativa
ccttcctccatccgctaatgaacagtctgttgcaatatattttaatcaagtcatggctgctattggaggaaacactgctggtccaggtgatgctgtccttaatgtgtacataaatcatgacaagaaatttgcttttgtggagatgaggtctgtggaggaagcaagcaatgcaatggcacttgacggcattttgtttgaaggagcaccagtaaaggttagaagaccgacagactataacccttctctagcagctgccctgggcccaagccagccaagtggaaatctgaatcttgctgcagttggcctaacaccaggctcagctggaggattagaaggcccggaccgtatttttgttggtggccttccctattacttcaccgaggctcaagttcgggagttgcttgaatcatttgggccacttcgaggatttgatcttgtgaaggatagggaaactggtaactcaaagggttatgcattctgtgtctaccaggacctcaatgtcactgacatagcttgcgctgctctaaatggtatcaaaatgggtgacaaaacccttacggtcagaagagcaaaccagggatcagcccagcctagaccagagcaggagaatatcctattgcaggcacagcagcaggtgcaattacagaaacttgtgtatcaagttggagcgcttcctactaaggttatatgcctcacccaggtagtcactgctgatgaattaaaagatgatgaagaatatgaggacattatggaggacatgaggatggaagctgggaaatatggcaacctggtgaaagttgtcatcccacggcctcatcccagtggagagccaattgctggagttggaaaggtgttcttggagtatgcagacattgacggctccaccaaagcaaagaccgccatgcacggaagaaaatttggtggaaatccagttgttgcgtccttctaccccgagaacaagttcgctgatgaggattatgatgaataaattatctctt

SEQ ID NO: 2752 - DNA, 742 bp, Avena sativa
attgtgcggtttgagcctatggaagctggaactgggtatgaattcaagagtgaaatcaagggaggggcagtgccaaaagaatacataccaggcgtgatgaagggaattgaagaaagcttacccaatggtgtccttgctggttacccagttgtggatttgagagcagtgctcgttgatggctcctaccatgatgttgattcgagtgtccttgcattccaaattgcagccaggggggccttccgtgaaggattgaggaaagctggtccaagactcctggaacctgtaatgagggttgaagtgattacccctgaggagcatttgggtgacgttattggtgatttgaactcgagaagaggacaggttaacagcttcggggataagccaggtggactgaaggttgttgacgctttcgtgccgcttgccgagatgttccagtatgtcagcaccctaaggggaatgtccaagggccgcgcgtcctacacgatgcagctcgccaagttcgacgtcgtcccacagcatatccagaaccagctctcagcggcaaaacaggaggaggccgctgcttaatttttttggtgagtctcgtagatatatatacgtggcgacgggagagcaagtgaataggacatcaagatgtatgtagctttgtagtgtcgaacccagcgggtgttaattatttgccattgttttcagacctgataacgtcgtaatttttacacgagataactgttcaattaaaaaa

SEQ ID NO: 2753 - DNA, 936 bp, Avena sativa
agcaatctatacctggaagcatgcattttggggtgttgaccaccagtgggatggaaatatttttgcaaccgtaggtgcccaggtagatatatgggatcataacaggtcagagccaataaatagctttgaatggggcaaagatacagtcatttctgtgcggttcaatcccggagaaccggatgttttaattacatcagccagtgatcggagtttaacactttttgatctacgcatgtcatccccagctagaaagctaatcatgaagacaaggtgcaactcaatatgctggaaccctagggagcccatgaacttcactgctgcaaatgaagatacaaactgttattcgtttgatgctagaaagctgagtgaagcaaagattgttcacaagggtcatgtttcagcagtgatggatattgattattcaccaactgggcgggaatttgttactggttcctacgatagaacggtacggatcttcacttataatggtgataatagcagagagatataccatactaagaggatgcaaagggtgttttgtgtgaaatacacatatgatggaacctatctagtttctggcagtgatgatacaaatcttcgactgtggaagtccaaagcttcagaacaattgggagttattcttccaagggaacgcaagaagcaagaatatatggatgcagtcaaggagaggtataagcaccttccggaaatcaagcggattgtcagacataggcacttgccaaagccgatctacaaggcagccaacataaggcgcgccatggttgatgcagaaaaccgcaaagaaaaaagaaggcaagcacacagtgctccaggcagcaggcctgtgcagcccttcaggaagagaagactcatcaaagagtcgagtaagggtttatctggctatggcgaggccacatatggcgatctcccagcatg

SEQ ID NO: 2754 - DNA, 276 bp, Avena sativa
acagtgtctggattggtggctctatttttggcctctcttagcactttccagcagatgtggatctccaaagcagagtatgatgaatccggtcccggcattgtccacatgaagtgtttctgagttaccatgaagtttgtagctgtaagtgtttgtccagatatatatttgcttagcagacttgcttccaagagtatacagcaatacatggttagtatttgcagtcaagtgataatacctaaaggaaaaaaaagaactgttgatcgtttgggamaaaaa

SEQ ID NO: 2755 - DNA, 999 bp, Avena sativa
ggctcgcgtcccacctcctgccgccaacctcccagatggaggaggtctccatcctgaggggctctaattgccgtgcaaaaggtgcggcgccagggttgaaggttgcagtcttgggtgcatctggtgggattggccagccactctccctgcttatgaagatgaacccgcttgtttcggtgctccatttatatgatgttgtcaacacgcctggtgtcacagccgacattagccacatgaacactggtgctgtggtgcgtggcttcttgggtcagccacagttggaaaatgctcttactggaatggatcttgtgattattcctgctggcatccctcggaagcctggcatgacaagggatgatttgttcaacatcaatgctggaattgtccgtactctttgtgagggtattgccaagtgctgcccaaatgcaattgtgaatgtgatcagtaaccctgtcaattctaccgtaccaattgctgctgaagtatttaaaaaagctgggacatatgatcctaagcgtttgttgggggtgacaacacttgatgtagtgagagccaatacttttgtgggggaggttcttggtcttgaccccagagatgttaatgttcctgttgttggagggcatgcgggagttacgatattaccactcctttcacaggttaatcctccctgctcgtttaccccagaagaaattagttatctcacttctcgcatacagaatggtgggacagaagtagttgaggcgaaagcaggagcaggatcagcaactctttctatggcatatgcggcagctaaatttgcagatgcttgtttgagaggattgcacggcgatgctgggatagtggagtgctcttatgtagattctcaggtgacggagctgcctttctttgcatccaaagtgcgcctaggtcgttctggcatcgaggagatcttgccacttggtccactcaacgagttcgaaagagctgggctggagaaggcgaagaaggagctgtcggaga

SEQ ID NO: 2756 - DNA, 506 bp, Avena sativa
agagactagcacaaaacaagtttgtgaagagaggtcagagttatgctctacttcctcaaagcacatgggaaatggggagacgacaatgtggataaggcttgtttaagcgatacagacccggtacccattgcggaggacgacgagggagtcgatatacgtacgatcggggacacggagtgggagaactctcattcctctgaagtatctgatgtaagggaggtgaccacagaacctgaagaaaacagccatccctctgaagtctctgatgtaagggaggtgaccacagaacctgaagaaaacagccactcctctgaattatctgacgtaagggaggtgaccacagaacctgaagaaaacagccatccatctgaagtatctgttgtaagggaggtgaccacagaacctgaagaaacagcttggatattcccgttgatagccaaccagctgctgagaatactttccaaggctagactggattttttgccattcttgtgtaccacgagtcc

SEQ ID NO: 2757 - DNA, 812 bp, Avena sativa
aatcgcctgattttcttcaaaagctcgataacattcagaagtcagtataccaacatggtgcagtagatgaaaccatatcatgggatatcgtaagtgcggcagacatctgggatgataagagcatcaacgtcaatgatgattcagaggatggatatgttctcgttaagcaagaggatatagttgatgggattgcatgcttcatggctgcatacttgctgtcgctgaaagaaactaaggaattgacgcccaatcaacttcaagaagcccttagcaagacattttcaactaaaaaaaggaaaggaaaacttcagaaggcttgggctggaacacaagttatttataatgtagcatcatggagtgcgacggctattggtatctaccagaatccggcaattctaaaagcagcaaccgcagccttctggacatcctgccgcgtggtatccaagttcctgtgaataatagtccatgccctgtgctccgtaatcctgtacacattgtgtgttacgactccccccctgtaccaccatcacgggaagcgttgttgtcatcaaactctgtgatacgcttgctctgccatgtgactctgccgaggtccttcaccaggccgtcaccacgcaggctcgtagtaggctgctttcaacagttagaccgtgtgtcagactaacgacataaagcgtctagtgatgaacatgtgggaactgattcctattaactgttgagtgtgcgggcttcgtgtgtgtttacttgtgtgtgtttacttgtatcattcatttgtatccgacctccgattgctatctcctccttgtatatac

SEQ ID NO: 2758 - DNA, 661 bp, Avena sativa
aacctgatgggatccaagttagaagccacaagattcaagggttctgttacggctttattgagtttgaggatgcaagctcagttcaaaacgcactagcggcttctcctgtgacgatagatgatcggccatgtcacgtcgaagaaaaaagaacccctggttcacgtggcagtagcagaggaaggtttccaccgggtagaggtggtaacttccgaggtgaagggatgcgaggccgtggtagctacactggaggaagaggctacggaaggggtgatttcaactatcgctctgaatacggaggcagaggtggcggcagaggtggctcagctcgtggaggcggcgaagttggctaccagcgggtcgatcactctggcaccggtggtcgtggtggtgcccgggcagctgcgaagtgagtttggtagctatgcattggtagaagtttgttatttcgtcgtccttggacttactaagattcacaaaaaagggtgtatcgtgagctgggttcatgtgaggttgttgttcagcgaattcaggtcataaattgttggtctccttgttttgtggcaaggagagcagtggtgatattggttactaattgtagaatgttacatctattcagatgcagtcctagtaagttttggcattttttgagacaaaaaaaaaa

SEQ ID NO: 2759 - DNA, 691 bp, Avena sativa
  modified_base (46)..(46): a, c, t, g, unknown or other
cctcaattccgtaccctcctcaagcagcgggcggagaacgaccccncaagttgccgacgcccccgccaaggccgagaagtttgctcagaggtacacttctattcttgaggagttgaagaagaaccccgagagccatggaggacctcctgactgcttacttctttgtaggctacgtgagctaatccttagagaattgggatttaacgatatcttcaaaaaggttaaggatgaggagaatgctaaggctatgtcactgtttgagggagttgttcagcggaatgatgaaatagaagacagtgagaaacgagcagagaacttgatccgtggaatattagcaggaaatatttttgatttaggatctgcacagcttgcagaagtttttgctaaagatggtatgtccttcttggcaagttgccagaatcttttatctcgaccttgggttattgatgacctagacgcgttcaaaaccaaatggaccaagaaatcttgggaaaaggcagttatttttgttgataattctggtgctgatatcatattgggcatactaccatttgcgagggaattgctccgacgtggcacaacggtgatacttgctgccaatgacatgccttccatcaatgatgtcacttacctagagctggttgagattgtaaaacagctcaaggacgaaaatggaaagcttgcaggtgtg

SEQ ID NO: 2760 - DNA, 692 bp, Avena sativa
  modified_base (683)..(683): a, c, t, g, unknown or other
ggctgctatcatcgaccaactacataacaaaaaggcaagcaatcaagctgttgggagacatgctgcttgatcgatcaaattctgccgtcatgatgcgatatgttggttcaaaagataatcttatgattctgatgaatctcttaagggattcaagcaagaatattcaaatagaagcattccatgtgtttaagctgtttgctgcaaataaaaacaaaccagctgaggttgtaaacatattggttacaaatagaagcaagcttcttcgattctttgctggattcaagactgacaaagaggatgagcagttcgaggcagacaaggagcaggtgataaaggagatatcggcgctgtaatgtccctgatgtagcttgccgaggatttaagttagacattgctaagtggcctcttgtgaacttactgtatttaccaccatgagaggctcttggctggatctgccgttatgtttcttagcaaagctgctcttgtaataatagacttctgcacataattatgttgcgagtcgagcaactgtatgaatcatatagctggatgctgctatgaagatgtgatatttatatagttttgttaccttggttggtttaaagttgggacaggcttttatagatattatttatgaatcatatagctggatgctgctatgaagatgtagaaaaaaaaaaaanaaaaaaaaa

SEQ ID NO: 2761 - DNA, 885 bp, Avena sativa
tccagactgcatacaaagacactctgaaatgcaagtcatcgcagcctcgtgggtatggatacatggccaaaccaccaagtggttctgaaaggattaggtgccagcttgaagatcaagcccgtgcccaagcagagacccaaaaggtaaactctgttcttaccaatcgggtcactgaattgcaagatcagttactagctgaacgtgaaagcacacaagagaggattaacctagagcgtgccgagagagaaaacttggaggagaggttaaaagaagagcgtgctgaaagggaaaaattgttggtagaggagcgtgctgaacgggatagattgttggaagaggagcgaagatcaagaatgaaatttgagagaaacatgatgtcaaagtttgcacaactgagccaacagatgggaaccaacagactcaagctaatcagacgtccgagaaaatgataggcaaagaaaatagcaatccaaacttgccaaatactcttctaaaggacgctagtactaatggggctgtaggtacgaggcaaactattatttctcaaaaggcgctcatacaagctgcaacaaagaataatagacagttttgagcaatggattcaaatatttaattggactggacattcagtatgcaccatgcaccatggatggttcaatttttgcacttaatcacaatgccacggatagtttaatctttgcacttaattaggatagcacattcagtttgttgaatgattgcttaattatttatggatattctctatgcaaagtatgatattttgtgaatatacgtcagatacatgtggttcaaatcatgtaattgaatgctttttttaggttgcaatagtctattaccacaaactagttttggttacaacaggtt

SEQ ID NO: 2762 - DNA, 630 bp, Avena sativa
ctcttctgcatgcttctgttgcttgccgcaaaaaacttgttgtagattgggttgcttccaccgatcttgaggattcaactgccaaggaggcacctgatgcttacaacacagcgtggagtttattgaagggtgcagatggcgttttagtgcctggtggctttggagacagaggtgttaaagggaaaatgatggctgctaagtatgcccgtgaaaacaatgtcccctatcttggcatatgccttggcatgcagcttgctgttgtagactttgcgcgtcatgttatgaacttccctgatgcggacagcgcagaatttaatcccaatacgaagaccccatgtgttatttttatgccagagggttccacaacccatatgggtgggaccatgcgccttggatcaaggagaacattttttgaggttactgactgcacatctgccaagctctatggtgatgtcaagtttgtagatgagaggcaccggcacagatatgaggtgaatcctgatatggtgccagcgtttgaaaatgcgggacttcagtttgttggcaaagatgagactggaaagagaatggagatcattgaaataccggagcaccgattcttgtaggcgtcaattccatccggagttcaag

SEQ ID NO: 2763 - DNA, 674 bp, Avena sativa
cgttcgccgacagcgccgcgaagaagccgagcgtggaccaggactcgtcggaggggagcggcggcggtgtcgcgcttgggttcgccgacgatcaggggttcgatccgttcatgatgttccagctcccctgctcggacacatacgaatcaaccgacagcttcttcgccggcgatgcaaacatccaggatggcaccggcggcatgggcggcgccagcctctggagcttcgacgacttcgccatggacggtgccattttctgacgttttccgtgtgatgatgcgatcggtcggttgaacatcggatgcagccgaggaaacgttggatgtttgcagaaggctccttccatactaggatgggttaattgcgtccaaccataccacttaaaatgttcccgggccaaggatcatggtttgctttcttgctcatcaaaatatattctactccgtacatttctactgttggagtttgttgcccagactctgtacctgtattattcctgtactgccagccggctgatcaaactgtattgtactgtgccatgatttgtgctagtctttcatactgtactgttggtcaatagtctacgaattgagcatgtcggcgatgccgtccattattgtacatgcttgtgattgttaatactaccgaataaatttgtgatgttgtagtaaaaa

SEQ ID NO: 2764 - DNA, 828 bp, Avena sativa
gtctatgagcatgttcttggagaagagaagtacacttttgtggagaatgtgaaaaatccccattcttgtactatattgattaaaggaccaaatgaccataccattgcacaaattaaggatgccgttcgagatggtctaaggtctgtcaagaatacagtagaggatgaagctgttgtgctgggtgctggagcgtttgagatggctgcgaggaagcatcttattgacaatgtgaagaaaaccgttaaaggacgagcccaacttggggtgacggcatttgcggatgctctacttgttgtacccaagacgctagcagagaactcaggtttagatacccaagacgtaattgtagctcttgagaacgagcatgatcgtgggttggtcgtgggactgaaccacaactctggggagccagttgatcctgagatggaaggcatctacgacaattactcggtgaaacgtcaaatcatcaattccggacccatcatcgcctcgcagctgttgcttgtagacgaggtgataagggcaggccgcaacatgaggaaaccaacctaacctaatatgatgtgttttctccaggtggagcgaggctttttgtttgctctggtgataccattagtttgcgccgagtagttaggcgggaatgcacgctagctttagctgaaagagattgtgcctgtaatacttgcgtgtgatcatgtttctcgcctcctcatgtttgtatgcggaatgttgccatgttaaattaagtttagcagttttttgtttagcatttagaacctgtttgcattagatgtcaccgttaccattttttgtgtccattttatgcat

SEQ ID NO: 2765 - DNA, 621 bp, Avena sativa
ccttggatggctgggaagcgtatagttggtcatctcacactcaggttgcagcaactggatgttcgctgtgagactaagacaaaggacaatgtgtttgtcaccgttgttgcttctattcagtacagacctctggctggcaaagaaagtgatgcattctacaaactgaccaacacaaggtcccagatccaagcctatgtatttgacgtgatcagggcaagtgttccaaagcttctcttggatgatgcttttgagcagaagaatgacatagcaaaggctgtggaggatgaacttgaaaaggcaatgtcagcatatggctttgagatcgtgcagacacttatcgttgacattgagccagacgagaatgtcaagcgagcaatgaatgatatcaatgcagctgcaaggatgagggtggctgcgaacgagaaggcggaggctgagaagatcatacagatcaagcgcgccgagggcgaagcggaagccaagtacctgtctggccttggcatcgcccgccagcgccaggcgattgtcgacggcctgagggacagcgtcctgggcttctccgtcaacgtgcccggcaccaccgccaaggatgtgatggacatggtagctagatcacacagt

SEQ ID NO: 2766 - DNA, 798 bp, Avena sativa
tttggtattcaaattctcatcacatgtgtagctaatatttgaaatataatcaaatttagaatcctagggcatttgctagcgttgttgatcataactttggttctattttctcttctcattctattagaatctcgtgctatttgcaagtatgcatgccgcaagaacaaacctgagttgttgaaggagggcgacctcaaggagtcagccatggtggatgtgtggcttgaggtggagtccaatcagtacacccccgcactcggacccattctctccgagtgcatcatccatcctatgctcgggggatccaccgacaagaaagtcgtggaggacaacctcgtgaaactgaagacggtgttggacgtttacgaggcgcgcctgaccgagtccaagtacctagctggagacttcctcagtcttgcggaccttaaccatgtgtctactaccctgtgcttgggtgctacaccctacgcatctttgttcgacgcataccctcatgttatggcatggtggactgatctgttggcaaggccctccgtccagaaggttgcttcactgataaaaccatcatcttagagttttctctagcgttggtttgtccacaaaataagcctaggggtaccccctctttatgtttcctccatgtggtatgtgttgtgttgttgtaatatgctcttgctgttgagtgatcaggcttgtgttgttatgatgcttgtgatcctctaatcatgtactaaaatgagcattcagatatttcatctttaataatattacgcatttgttgcttcgattatactaaaa

SEQ ID NO: 2767 - DNA, 850 bp, Avena sativa
cttcattcagtaaatctgctgcctctgatgaagatatgttgaatgcaagcggtgaaaaggtcaagcgttttaaagaagaatctggtcacataattcaggagtattttctctcagatgacgtcccggaactcataagaagcctccaagagctttctgcccctgaatacaacgccattttcctcaagaagctcatcactgttgctatggacagaaagaacagggagaaggagatggcttctgtactcctttcctcgctcagcttggaactattttccacagatgatatcatgaaggggtttgtaatgctcctgcagtctgcagaggacacttgcctcgacatcgtggacgctccaagtgagctcgccctcttcctggccagagcggtgatcgacgaggtcttggttccactgaatttggatgacatcagcagcaagctacgcccgaacagcagcggtagccagaccgtccagatggccagctccctgcttgcggcccgccactccggcgagaggatactgcgctgctggggcggcggcaccggctgggcggtggaagacgcgaaggacaagatctccaagctcctcgaggagtacaacaccggtggccacctgggtgaagcctgccagtgcatccgcgacctcgggatgcccttcttcaaccacgaggtggtgaagaaagcgctggtgatggcgatggacaagcagaacgaggccagcatcctggccctgctgcaggagtgcttcggcgagggcctgataaccatcaaccagatgaccaaaggcttcgcccgcgtcaaggaaggcctcgacgacctggtcctcgacatccccaacgcgcaggacaagttcgt

SEQ ID NO: 2768 - DNA, 932 bp, Avena sativa
gtgatggagctaccggtggagcatggacttctttggacaatctactagaccttgctcatgccccgtttacgcatacatccacctttgccaagggatggagtgttccaagctttgtgaagttcttgacacctacatctgggctccaagggtactgggatccttatcccattgatatggagttccgaccgccctgcatggtcttgtcaaccattggcatctccaagcccggaaagctagaaggaaagagcacccaacaatgttcgacgcatctccaccagctccatgtatgcttgccctcatctaggagtaaaaccaggctgctgtaccggatgtccctcgacttcgcaccctggatcaagcacatccctttcatgcacctgttgtggtcacatttcgctgagaaggtcttgaatgaggatctgcggcttgtgctcggccaacaagagcgaatgaacagcggcgctaacgtttggaactggccagtgtcatatgacaagctcggcatacggtacagactgtggagggatgcagtcgagaggggcgttgaccggttaccattcagcaaccaaatcgagagcggatcatagggaaacaaacacttggcatcaaatgtagtctcgttctcctggcatttctttgcctggcaacggcagacatatgacccatatgcacagattattggggcctgcatagcagcgtggtgtttcatctgccaaagattgctacagatagattggttctggaaaggaagccgccttgtgaagaggacgatgggcaccaccattgccattgtgtaatgttgattgtacactagcggcggcatcacctgatgcaattgtaatctcaggttgtttttcttttcttctttgtttccctccctttttcatgtaaagtatcttcaggtgttactgtcaacacgtacataaatatac

SEQ ID NO: 2769 - DNA, 669 bp, Avena sativa
gtgacatccttcttcctgggctggtagtagcatttgctttgagatatgattgggccgccaagaaaagcttgcgatccggttactttctgtggtcagcgttggcctatggcactgggcttcttattacatatgtcgcgttgaaccttatggacgggcacggccaacccgctcttctctacatcgtgcctttcacactgggcacgttgatatcgctgggttggaagagaagggagctgcagaacctgtggttcaagggggaggccagagagggtgtgcactcacatagcatatgatgacaatgcagcctcctcagtccaaggatatatcatcagggtcatcttcctcttagccgttaggtagatagattcctgctgctggcttggctgccctgtaactgtagctgtgtttgcactcgtaggagaggaagtacttactcgtagcatctgatctatgtgttccgaacaggcatgtgtattgcctggtaaataaatgtaccgcgccgcacgcgttcataggctggctgtttgctgaagagaggaggtcgtcttgctcttactggatctgttctccaatcaacaacaacaatgttccatgtattgtccttggacttgcccccttgggcgctccaagccatccgaaagttgtgcagaagtttctttaggaaaaaaa

SEQ ID NO: 2770 - DNA, 697 bp, Avena sativa
cacgcaacatgcaagctttcttctcaaattttggcgtcgaaggtctcattgtttctgccatgtgttctgctgcccagtctgtggtttcacctaaacaaacccaacacatatggcatcatctggctatgtttttccgcgatgaactgttgtcttggtcatggcgaaggccacttggcatcccttctgttccagttgctgctggaatgatcaacccgttagatttccagcataaggtggtaaacaatgtggagcacgtcatcaatcgtatcaaatcaatatcaccacattatcttgctgacgaggaagagaacacaacagaaccgcctcagtctgtccaaagaggcgttacagatctagtggaagctgcattatcttcgaggaacctgtgcatgatggatccgacgtggcacccatggttctgagagacgctcacattgtgttctagttatctcttgtgaatataaccttatgtagcgagcttgtatcgtgtagatagaaacatggggttttagctctgtttactggtattgacgtagtctaattttgttcatttagctggagagcatgcatgcagaagcttagcagtactcattgtaacatgtcaaagtttagtaggatggcaaaatttagacaygagatcctgaaaaaaggagattcatcaatcaataattggcgtgttaatgtgctttacgaaaaa

SEQ ID NO: 2771 - DNA, 963 bp, Avena sativa
gataacatgctggaatcgaactttcttcaaggaagttcaaaagctgtggacttgtctagattcaatcagcctgtagtaagtgagcagcagcagcaacaacaacagcaccaccagcagcagcagcagcaacaggcttggaagcaaaaatttatgggttcacaatcactgtcttttgggggctcgggtttgcttaactcgcccacaagtaaagatagttctcttgagaacaaaattggttccgatgtgcaaaaccagtccctttttagtcctcaagtcgattcttcctccctactgtacaacatggtacctaacctgacttcgaatgttgctgaaaataacatgtcgacaattccttccggatcgacatatctgcaaagtccaatgtatggttgtttggacgactcttctggtatatttcaaaatacaggagagaatgacccatcaagcagaacattcgtgaaggtttataagtcaggatcagtggggaggtcgttggacatcacccggttctctaattatgctgagcttcgagaagaactgggtcagatgtttggcattaggggtcagttggatgaccctgatagatcaggctggcagcttgtattcgtcgacagggagaatgatgtgcttctccttggagacgacccttgggagtcatttgtcaacagtgtatggtacatcaagatactttcaccagaggatgtgcataagttgggcaagcaaggaaatgatccacgatatctttcctaagtgcaagaccattgtgctgtttctgggtccagcgaggattctacagcacatggtagcacacttgcactcaacagcaccgagtccccggaactccgatcgtgtcatcttcgtacctgtctcatgtgtgtacaccgtacacgtcttgagaactccctgtccgttacctatcctcggtgcaggccaccgatgtcacgaactctatttctgtaggtt

SEQ ID NO: 2772 - DNA, 889 bp, Avena sativa
acactacgaggtaactggtggtaccattctgttcaagggggagaacttgattgacatggaaccagaggaaagatctcttgcaggtctctttatgagcttccaagcgcctattgaaattcctggagtgagcaattatgattttctgctcatggcattaaatgctcgccgagagaaggatggtctcccagctttggggcctcttgagttttattcagttgtatcacaaaaggtcgaggccttaaagatggaaccaaagatccttgatcgtaatgtaaatgaaggatttagtggaggagaaagaaagcggaatgagatactgcaactttctgtcgttggggctgacttagccctcctcgatgagattgattctggattggatgttgatgcacttgaagatgtagctcatgcagtgaatgggctcttgactccccaaaattctgttctgatgattacacattaccaacgtctgttggatcttattaagccaagctatgtccacatcatggaaagtggcaagatagtgaagacaggcgacagctctctagctaaccatatcaacgagggtggcttcaaatcaatcgcttcttttgtataggatgaataaggtcaaatgcttgaattcccatccactagtctatttgtcagaatagattggccactggccgggttccatatattcttatacctagtatgtatgccgcctggcagtaaagcccactagcctcagtgtaattgttgatctactgcccctttggccagacatgccatctttttggaagtggcgtcttggagttctgaattgccctcgcccctcgggtctatttctctttctcgtcctgtaagagttttttggatcacaatattaatacatcatacatgtattacgatc

SEQ ID NO: 2773 - DNA, 690 bp, Avena sativa
cttcctgacggaactccatggattccaaacttgatgaaagaaattactatggtcgtctcaaatgggagcaagcccattcatgttgatcagaagttaattgatggtccaaaccccaacaatcgctggaagaagtatatacctctcatccttgcggtgcagtactttttcgtggtaaaaggaattcgaagggcgattcattctgacattgcaaacgggaagctggatgactgggagcagcgttacagggacttggttggaagcggtaacccagtagaccagaaagtttcttcatcccgcaatcccaaggcctgaagctggccaatgagagaaaacaccagtctctgcatcttggcctgttcaactctcggcgctgttgttctttttagactcctgattccagctgtctattttgggggctttatagagttctctgggacaacttgaataaagttgttagtgttttagttgctaagtgtatgtaccccatttcattatgctctcccaattttgcaaatgttattgatataaacttagtgatttaaatttcttgtgtgccttgatgttggtcttgagtctggttgaccccatatgcaattaggcatagtctactcacgcagagaggtcatggccattggcattttggcactagtttctggaaagcctattgcttcactcaatattctgtgtttc

SEQ ID NO: 2774 - DNA, 1017 bp, Avena sativa
cggctattacggaaattgcagaatattatgaactactacacttcaaaggagttactttaccaaggaactgtgcttacatcctttgaaagactcaacagggaaggtgacttcagtaatcctaaagatggtaaccatcttcctgctgatatggtagttgttggtattgggatccgcgcaaataccagccttttgaaggtcagctgttgatggagaaaggtggcgtaaaggtaacgggcaaaatgcaaactagcgacagctctgtgtacgctgttggtgatgttgccgcgttccctatcaagctctttgacagcgatatccgacggctcgagcatgtcgactccgctcgtagaaccgctaggcatgctgttgcagccatcctggagccttctaaaaactagggacgttgattacctccattcttctactccagagtcttcacattgtcctggcagttctacggggataatgttggagaagtagtccactacggtgacttcacaagcagcagcgcaaggttcggcgcctactgggtcggtagaggccagatcacaggcgcgtttctggaaggtggaaaccgagaagagtacgaggcgttgtctgttattgttcggcgcaaaactaaggtctcagacttgtccgaacttaaaaaacaaggcctggcgttcgccatccaggagagcaagaaagacgtgcccgacggtggggttacccttggtgaaaagcctgcttttgtgtggtatgcaacggcgggggttgttgcggctgtgtcgatctccgcatttggttactggtatggcaggaagcgccgcaggtggtgaatttcgggatcggttcacgcccccggttgagctgatggaagaatggagggtctgtgatgtgctattgtttacggttactcagagggaatcaaatcctgtataaacctgtacgaaagtgtaatctatgtctgatatgtatacaaatacggatcatataatgttaaatgaaatgaatatgagatgatgatactaaatcgca

SEQ ID NO: 2775 - DNA, 654 bp, Avena sativa
agtcgctcaggacttatgtcagcacgcttgttagtgtcagagaaactcttctttcatctgagaagcaattcgaaacaatggagaagctttttgacaggctagtcgcaaggacgaaccagctcgaaactgagaaagcacagaaagaagccgaagtccagaaggtgatggaggaaaacgtgaggctacgtgccatggtagacaagaaggacgcgcagctccaggcgatgagtgagcagtgcaagttcatggctctgaaccgtccaaactagtggcagacacaccaagaaaacctgtgcaactgatgtcacctacagaattacagttatgttgacacgacatcaaaagaagaaaatacccctggctgtcccgaataactgacaactgacgatgctgtcaagttccagggtgtgtggttcgtggtgcgaaagcctgctgtgaattgttttaccttagatgtggtgtgctgacattgcaaccctgacatttgtatcttgaatgtgtgtaaaaggctgggcgcattggtccggttccgtagtaaaaaaaatccatagagatgtataactgcagttccatctttctgcctgaacgctgattctgctgctgttgttactgtggtgcttctaaaaataactgaattgttctgactaaaaaaaa

SEQ ID NO: 2776 - DNA, 847 bp, Avena sativa
gaccttggcaagatcctcgcctgtatgcacgggctggaggttggagctgaagcaaacctggctgcagccatccaggttgcccaactggcactaaagcatcgccagaataagaggcagcagcagagaattatagttttcattggaagccctgtgacatacgacaagaaaatgttggaattaattgggaaaaaactgaagaagaataatgttgctcttgatgttgttgatttcggtgaaactgatgatgagaagccagagaaactggaagcgctgattgctgctgtgaacagcagtgatagcagccacattgtccatgttcctccgggtgaacacgccctttctgatgttcttataagcactcctatctttaccggtgaagaaggtggaagtggttttgctgcttctgcagcagcagctgcagctactggagctactggatatgattttggcgtggacccaaatgtagatcccgagttggcacttgccctacggttgtctatggaagaagagcgtgcgaggcaagaggctatcgcgaaaaaggcttcagaagaatcttctggtgctgacaataaggaccatgcctcaagctcaaacactgattctgttatggctgatgcggaacctgcctcaaatgctgctgctgatgacaagggagatcaaccgaaggatgatgatgatgctctgctactacagcaggcactggcaatgtcaatggatgagggagcttcaggcgctgcagctgtggctgatgccgctatggctgaagctgctgcagatgatcaggatttggcattaggctcttcaatgtctgtccaggatgcagagatgtctggtcaatctgatatga

SEQ ID NO: 2777 - DNA, 936 bp, Avena sativa
gaagtcatcgccgactctaaggcgcacaaggttgtagttaagggtaagaagcctgccgccgaccgatgaaggtggtggagcgtgtcagaagaagaccggccgcaaggtggagctcctctcaccgttaccgcctccgccagaggagaaaggaagaggagaagaaggaggaacccgagccgccgaaacctgaagagaagaaagagccaccggtgatttgcgtggtgctgaaggtgcacatgcactgcgaggcctgcgcgcaggcaataaagaagaagatcctcaagatgaaaggggtgcaatctgcggagccagacctgaaggcttcggaagtgacggtgaagggcgtgttcgaggaggccaagctggccgagtacgttcacaagcgcaccggcaggcacgcggccatcatcaagtcggagccagcagccccggccgagaaggccggagacggcgacggcaaggacgagaagaagcccgcggaaggcggcgaggagaagaaggacgagaaggatgataagaaggacgacaaagctcgagacggcgacgaaaagaaggacgagaaagagaaggagggcggcagcggcgaagagaaggacaaggacaaggagaaagacgccggagccatctcggccgccaacctgtacatgcactacccgcagttcgcgttccccggagggtactacgcgccgccgaggccgggatatgccgcctaccctgcctaccctccgccgccgccgccggcagcctacccgccagcctactcgcattacccgccgcagatcttcagcgacgagaacccgaacgcctgctccgtgatgtaaaaaaagtacggtagatggtcttctagagcggtaaggaaaataaggagggaaaagggacctcgggtgtctgtcattgcaacaaaatggaggccggcccttgagcaaagcaatggca

SEQ ID NO: 2778 - DNA, 861 bp, Avena sativa
gcttgatgagatcataaactacgtacaatcgctacagcagcaagtcgagttcttgtccatgaagctttcgaccgtgaacccacaacttgacttcagcaccttgtctaccctcctacacaaagacatgcaccaagccctcggtccttcagagagttcagtctttccgttggagagtgccggcggagtgcttccattctgtgaccaaggggaccttttccagtccttcagttcgggcgctatgggttccatggatctgttagacatggctctaccccatgcagccaacactcagtatggctttcaaaaacagcaacagaatttctgggaggagaatctccagaatgcgccgcatatcgacaatgagcaaagccaagagaacggggtttcggcaccgaatttcgatggtcagttacaaggagcggatcatgcagaggtcgagttctagacgaccactgataatcacagaaggcccatacttttgtacagaagaagtatggccagtgaagctcctccgctaacagtctctagactcgaggactgagaactgattgacacctcgtcaaacgccgaatgtaccaagacgacggtagggatggaggacactggaattcctgctgaaccatccgagacttaattcttccctgtgtcgacgacgaaattatatggtctcaaaagtagtagatcatgtaggagtactagatatggtgaaaatatttagattcaccatctcatctctctttcagtatatgtataagagcttctggcagaaaaactgatatgataccatctattttgcgctttatcccgagacagggaagcatgaacatgtttatcctcgatgctttacggtccacattgaaa

SEQ ID NO: 2779 - DNA, 724 bp, Avena sativa
aacatcaagcatgcatatttttagcctgtcaagaaatgtttcaaaccctttccttgagatgtagccaaatctatgcatatcaatgtcaacctcaaagtaattatcacccaagaaaaactgatgctgaggtctagaaagcacaggcttctcgttatatgcatgcattagcttcctctctgcggcacttaaaggaaggtcctccagattagccactcgtccaagtatcttcagccgttctcgaaatggtgcctgaacttggcccttacaagaaccagctgacattgtttggaatctgagaggtagccaaatcaggccaaagggcgaggaggatcagcgaggtccctttgaggtttctgacctgggaaaccggagtgggactcgtcactgctgtagaagcaccagcggctgagcatgcgaatcttcatacaagtaacattaacagaggcagcagtgtatgtaaatctgtatatcattacatgagctccgatcgcctctgctgttgctacccatgattctagaagcagtaaatatgaccaatttccttgcgaaatggtaggtttagacaatgtcttgaaacagagtagaggttgacatgaggaggtttgtggtgaatgcgagctgcttcctttataaagcaatcggtgtagagggcacgcatgtcagtgtataacctatacctcacttggtaaacaaagaagtcgtggcaccccacacaagcaaaaaa

SEQ ID NO: 2780 - DNA, 510 bp, Avena sativa
cgcttctatccagcgtttgcgaaaacccctcttgaggtggcaagccaggagctgaaagagatgccaaacatgggcgccatctacacggcgtatatccctccttgtctcaagccagaaaagctcgaagatgtggaagtctttgaagacgctcagtcgcgcagcacctctagagccccatccttttaatgatttgcgatgaatgtcggtgtgcgctgggtggtctttccacgtcgctatgaagctgttatttccaggataggaaactgatgtcacgtgccgtgtacatacacacgctgttgcctgatgagcagttgtgttaaatagtttttcatatattttaggtaattgccgtggatactgcttagtgtttacgtttgtttttgttgttgtcgtgtttagactatatgcccgtgctggtgtgcaaagaactcagaagtcagactgcttgatgcctcttaattctgttgacaatttgtcacggtagtgttattatttgttgctgaaaaaaaa

SEQ ID NO: 2781 - DNA, 737 bp, Avena sativa
gcaggggtcaccgtcttcgagtggttcaggaacggccagttctggatgacggcgagcatgtccgcctacctacaggccgtgtgccaggtgctcatcaaggtgatattccagaaggacatctccttcaagctcacatccaagctgccggcgggagacgagaagaaggacccgtacgccgacctgtacgtcgtgcggtggacaccgctgatgatcgtgcccattatcgtcatcttcgtcaacatcattggatcggcggtggcctttgctaaggtgctcgacggcgagtggacgcactggctcaaggtggccggcggcgtcttcttcaacttctgggtgctcttccacctctacccgttcgccaagggcatcctcgggaagcacggcaagacgccagtcgttgtgctcgtctggtgggcattcaccttcgtcatcaccgccgtgctctacatcaacatcccccacatgcatagtccaggaggcaagcacacaaaggtgacacacggtcaccatggccagaagttcctcggctggccatgagctcggatgacgacgtcgccgccgtgcgtccagcaagacgacatatgagagaagaaacaagtcttccgctgagctgtgcatgcatgatctgatcaagaagcagagctcgccatttaattttttaattttttctttcactttttttgtcccgtttctttttagttttgtcctagagaaaagatggtgttgatttgatttag

SEQ ID NO: 2782 - DNA, 738 bp, Avena sativa
aggactaaggtgggaaatatcaccttttggtatgcggaactacaccttgtatgattcgtggttcacgtgatattgaagaagccctgttagaacaccttggagttaaacggaatgaggtgacaagcgatggtttgttttctgtcggggaaatggagtgcatgggttgctgcgtgaatgctcccatgattgctgttgctgactattccaatggttcagagggttacacttacaattattatgaagacctcactccaaaacgagtcgttgagctcgtagaaatgctgaggaaaggagaaaagccccctcatggcacgcagaacccagagaggaaaaactgtggtcctgctggagggatcctcaccttgcagggcgagccgaaacctcccccgtgcagggatctggatgcctgctaggttttgctttgagttacaagcacacaaataagtctgcctgtgctgtatgtgttgtggaaacgcaaacaactgataggcgatttgatctttgttgttctggaggtgtctattgttcaacaatcgacacatctgccagtcatcgtctcttctttcttttttcttcatttgtgacatcagctaaactgtcgcccattgatagagagatagtgctatttcaaagctgcagcggcaaaagctttgtatctggcaaaagaaactgggcctgggcattcttggagaattgaccgcctttgctgttgtgctacccctgcagtgttaaacttgt

SEQ ID NO: 2783 - DNA, 852 bp, Avena sativa
tcaacttcggaactttttgcaaaccatcaaggctgacagattccgaaagagatgaaggatctttattcatcaggtagaggcaaatgttgagtttgtaagctcaaaacgtgcaggaattacattttctcccaatgatgcagctgtagattcttttctacaggttgagaagaaagaacagtcaagtcctctctcaagatatgttgctactctacataagagagcacagaagagaatcgatgctatggatgagacgagtgttattgtaggcgccgagtcctcgaccttttcacggagactatcagaagtgcagaagcaacatgatgaacaggatgatagtggagaaaccattgctttcagtaagaacttgttggctgaaaagaagagaactaaaactgcaaaggaggagagtaagaaacgggctcgtgaccatgatgatttacctacagacgaggatgtggttgaggatttggtcctgagttcagacgaggaagaggaagacgagaatgatgatatggaatcagatgaggatggctctgctcctgttgaagatgacagtgatgaagactttgtagacccagacagcgcatggaagaaacagaaggagaagttgaagaaacggaacaagtaccaaccatcaaataagacatcctcaaaaatgaagaggaaaccccatcctaagaagaaagcaaagcattaatcaagctagataggactcggcaaagactgttgatgatggccgaatcatgaagaaacatgtgcctgtcacagaaatttttgtctagtttgagaaagacacagtgtcgttgtcatttccatgcattttcttggttatttgtagtgtattgttatgat

SEQ ID NO: 2784 - DNA, 801 bp, Avena sativa
tattctcgtctgatatcacttgttcttcttctggttgaaggttccacacctatagatatcacagaagacggatgggaaatgctccttgcagtgaagaaggcggcacctgagtcatccgcttcaaaatttcagttgctaggctttgcagctgtccatcatttctatcattaccctgagagcacccgcttgcgtatcagtcagatactggtcttgccaccttatcagggtgaaggccacgggcgtcgtcttcttgagtcaatcaattctatcgcagaatccgagaacatatatgatgtaaccatagaagacccttctgattacctgcagtatgtacgttcgtccatcgactgtctccgtcttctgacctttgagccaatcaagcctgtgcttggtgacatggtcttgtctctggaggagaccaacctgtctaaaaggacccgcagtttggtaatggttccaccggctgatcttgccgagacggtgcggctgaagctgaagatcaacaagaagcagttcctgcggtgctgggaaatcctgatctatcaacaccttgactctgaggaccgcaagtgcatcgacaacttcagggcctgcatctacgaccgcaccaaaggtgagttgcttggtggcgcctctgggaccaacgggaagcggctcctccagatggcaactagttacgatgaggactcatcgttcgccgtgtactggacaaaggagggcgcagacgcggacgatcagactgtcgagcagcagccggaagatctcaaggttcaggagcagcagctgaatgagctggtggac

SEQ ID NO: 2785 - DNA, 787 bp, Avena sativa
gactgatactacagaaggacagcagaaaggaaagaaagggaggaacgaaccgggcaaaagaggagcagcaaagaaggccatgacatccttgaccgaggtgtctgatgatgacatagcagaggccatccatgagagcgatgacgaagagtttgccattattgaagcgccagttgagaagaaagctagaggaaagaagcctgctgccgagaagccaaagactactgtcaggaagagggcgccagctccaagcaagggcatgcggcagaaggttctggaagaaacattcaaacctgtagaagacagcaacccttctcctgagaagaaggtgcggaagatcagggcctcccccttcaacaagaagagcagttcgattctgcagagagttgcgagcacgtcaacaagcacagaagacgctgatgctcctccctccggcagctctgctgagccagttgcaccgagaagaacagttagggagaggaagacgatggcaaagtacattgaatctgagagcgacggtgacgactctgaggatgaagatgtggtggacgtgaccgatgagtcctactccgatgacgactagaacttcttagcaatttggttagctgatgtgatgcaatcgtgattcttaggtgcatctcttgtgcgtcctatgttatggttaggtcgagacattctgtgagctaatcgatttgagactacttctggaatttggaataacggtgtctagttctgaaatccatgtacttttggcacgtgccacgttggtttaccttagcttgttttgaaa

SEQ ID NO: 2786 - DNA, 790 bp, Avena sativa
tccaggccgtttcaccagccgatcatgcagttcaatccgggcaaccccatgctcagggtacagaccctcccaagtgttgcaggtggtgtccagttcaagaatccgtatctcatgatcctaataccctcgtgtgccttgttctacagttggcgtgtacggtccaaggaacccagagcctacacgaatgaccatattctacaacggtgccgtgaatgtatttgatgtcccgctggacaaggcacaggaaattatggttctagcaagcagggcatctattccaagcccaaccaatgcagtccagaaatctgaatcgcttgttaccgtcgatacaagatttgcagcacgtgaggtttcacctgcaaggaaggttataattcagaaaccagagacctttgtgcctcatgtatcaggcatttcaactccaatccctgccgtgttacaagatgtggctctctccaaaagcacatcaagctctaacaatgagagtgctggtccgtcatctttaggcgtaccgtcagttgttcctccagtaagtcgggcatcctcagctgaaccagtccaacaagcaatttcagctgcagcagctgttgcaccaagagctgtccctcaagctcgtaaagcatctcttgcccgattcttggagaagcgaaaggaaagagtttctactgtcatgccatacccatcgttaaagagcccattggatagcagcgacagcacgccaagcaagtcatccggcacagatattgctctgtcgatcaacaacagccaggagcctacaagcttagggctc

SEQ ID NO: 2787 - DNA, 560 bp, Avena sativa
cctcatcacttttgatgagaagacattcgtgatggtctcagaatcagacctagaagggtataatgcggataccttggcagttaacatgggcagtgacttgtgggaaataagcttagtataccgtgtgcagtttgccagccaggcagcatttgcagggttttcatacctgtggttgcagtgtcgtgcccagaagggcaaggaggcactcgccgagagcatggcgagtgagagctgctctcttgaggcagagcagcctgccagtggccacccccgtctacttcaaggtgtggtggttaatccgtgaatcgccctgagttacctggtgtctttttgtcttgcacccgtaaatatgaaagagaaggacatgcaatgtgaagcctctactccagtctgcagcaaccaaggagtgcagttgttctggtctgtacatatgtgttgtaataagttgactgctacgtgtacaaaggtaaatggaaaccgtctcggatcgctaaccttacttgccgaatcttctgtatatatatgcactactttcttactctctgtgttggctaatgtct

SEQ ID NO: 2788 - DNA, 965 bp, Avena sativa
ggaaaaggccacaaaagtttcacctccccgaagaaaggcttatagggaagaaaaaactgaaaaacagagcaactacacaaaaaaggacagtggatctgagataagtcggcctgggtataaggtacagcaggcaaggcagttgcaacagcagcaacggccaatgtctgcttcagcttcagcttctcaggcttcatcaaggctatctgaaaaggaaagttcttgtgatgatgtggagatagatgcaattcttgaggaagaggaggccctcattgcggctcacaggaaggaaattgagaatactatggagatcgtgcgggaagagatgaaccttttggcagaagttgaccaaccaggtagccttattgacaactatgtaacacagttgagctttcttctgtcacggaaggctgcaggcttggtcagcctccaagcacgcctgtcgcggtttcagcaccgcctcaaagagcaggagatccttagccgtaagaaatcttccagatagctgactccggccctctctgcctggttagtgaatcgacaggagattgaccacatttcatgagaggtttctctcctgtgatgttggacctgagcatggagctaaaagaaaacatggcagtgggcgcaggatagggtgagccgcctggttgatgtcatttcagactagtcgcctgaggtttcaccaccagcttgctaatagtcctcacagttgggctgcgtgggcttgttttttccggcagacgcatggcttgtccccgatgccgttttcttttgtacgaggagacgtgagactgtttggagatatggatgggttgattttcgcagcggtgtctgtatttttatggacacagatacattgttgtattctttactgattgttttgtggcaaaggaaatgtgtgtgtgtggcaaagaacctgaatatattctcccatttgcccactgagagatccagacaggtataat

SEQ ID NO: 2789 - DNA, 794 bp, Avena sativa
gctctttcaagcacaagtagtccacctcctccaagtgttcagaaatatgtcatgaaggagtgcaaaaaatggaatctcgtttgggttggaaagaacaaagttgctgctctcgatccagctgagtatgagtatttactcggtttcccaagagaccacacgagaggagctggtaagacagagaggtacaaatctcttggcaattcatttcaagtcgataccgttgcttggcacttgtcagtgctcaaggatatgtttcccaatggtgtcaatgtgttgtcattattcactggtattggaggaggcgaggttgctttgcataggcttgggatccacatgagggcagtgatttctgttgagataagtgaagttagcaggaggattttaaagggttggtgggatcagacacaaactggcacgctgattgagattgctgacgtgcaaactctcacctatgataggattgcttcattcgttgatagatttggtggctttgacctggtgattggtggcagcccatgtaacaatcttgccggcagcaaccggcaccaccgtgatggcttggagggcgagcagtcagctttattctttgagtacttcaggatcttggatgatgttaagtctgctatgtcgaggatgtagcctaatcattttagtgcatgttttatcatttaatgcttgtctctgtgaactgcaacttccaatatgtttagacactgagttgacgtgaaggatctttatttggcagaaagatcgcattactcttagctgtatgatttatgttgctaactaagttg

SEQ ID NO: 2790 - DNA, 503 bp, Avena sativa
agcattgcaaagaagatagtgcagaaaggctccgactatactaagaaggaaactgagaggcttcatcgcatattggagaagtcgtctatcagtccttccaaagctgatgaattctccatcaagaaaaacattctctcagtcttctcctcttaatggtgatgacccacgtgccccagccctgccattggggtatagccagtagtgcaactcccacctgccacaggaggaactgaagaaaggacagaagatcagagagatggcaacggaagtttagcggtgatagaatacatgttggcttgtctgttgaacaacatgccacctcttttttactgtcgtttactttatatggttaaagggattgagtttgcttaagaacagaaggggttggcgtaaccagtctgatgatgacatcgtaatttgtgtttagataataaatttttcatttgagttatgcatgctatatttttctgtgatcttgtaaacgagaaatgtttgtggccgcc

SEQ ID NO: 2791 - DNA, 704 bp, Avena sativa
ggaccatgatgatgaggctgaggatggtgctgatgatgaacctgagcaagaagtggaagctgccgatcctgctctgaagaaagctccagcagcaccaaaagagacagaaagacagctgtccaagaaggagttgaaaaagaaggaactagcggaacttgatgctgtgttggccgagttgggaatttctgaaaacccaagcgatgctgcacaagatggaaatgctgctgagaagaaaagtgtgaatcaaactggtgatggagagaaaaaggaggacgtagctgccccttcagagagcaagaatgccaagaagaagaaaaacaagaaggacaagagcgcaaaggaggcgaaagaagctgaagtgtctgaggagactgccagcgcagaacctgatgaagacacaagtgctgtggatgtgaaggagcgcctaaagaagatggcctcgatgaagaagaagaagtctggcaaagagacggatacagctggcaaaatggccgccgcggaggcggcagctaggactgccaggctcgcggcagcaaagaagaaggagaagaaccattataaccagcagcccgtgcggtaaaagagggtccgccaaagttttgagagatgttctgagtttcgtcgatatgatccccttgttcgttttggactccgcaataaacctttttcctgtctcctcagtctcagagttgtatgtatgacca

SEQ ID NO: 2792 - DNA, 864 bp, Avena sativa
acttgatttgtgcaatgctaattgaggtgccctatatggcttccactacttatgacaagcggaggcctatgagcaagacattccgcaggcttcttgaaatgagtgagaggcagacttttgttggacctccagaaactgtgagggatcatgtaatggctgccacaagggccctcaataagggtgaccacgaaaaagcattcagtgtcattagttctctggatacctggaagcttttgaggaacaaggagcacattcttgagatgctgaagcttaagatcaaggaagaagctctaagaacctatctcttctcttacccgtcttgttatgaatcactgagccttgaccagctcactactatgtttgacctcagcgaggcacaagctcacagtattgttagcaagatgatgatgcgtgaggagcttcttgcaagctgggaccagccaaccaagtgcataattttccagaacgtggatcaaacaaggcttcagggactaatcttccagatgacagataggctctctgtcctggtggaaagcaatgaaagggcctatgaggctaggactggtggtgcccttgagggtgcaccaccgaggcgcagggggggtgatggtcaagattcatccaatttgggaaagtggcaggagaactttgtgtcgtcacaaggacggcgaggcggtggaaggtttggtggttacgctggcagaagtggaggctctggacagggtggtgggtaccagaacgacaggggtggtcagggttcccgtgggggctatggtggtggttcacggttccaggatggaaggtctcgcacgcagactggttcctcatctagaggggatggcaatgctcgcatggtgaacctga

SEQ ID NO: 2793 - DNA, 655 bp, Avena sativa
cccgggatcggttgccaagaagggtgatgccaaggcccaagccgtgaaggttgccaaggctgtgaagtctgggtcaatcaagaagacggcaaagaagatccgcacatctgtgacgtttcaccgccccaagaccctgaagaaggccagggaccccaagtaccccagaatcagcacgcctgggaggaacaagctcgatcagtaccagatcctcaagtatcctctgaccactgaatctgcaatgaagaagattgaggacaacaacactcttgtcttcatcgtcgacctcaaggcagacaagaagaagatcaaggctgccgtcaagaagatgtacgacatccaggccaagaaggtcaacaccctgatcaggcctgatggcaagaagaaggcgtacgtgaagctgacgccagactatgacgctcttgacgtagccaacaagattggcatcatctaagttagaggatcctgcagtaggcgtttctgttgtgtcctggtttcttgtgttactggagttttgtactagctgttgcttagcaaagcccctcggtggctccattgccccccaccatatcaccgcacactttcatgaattatgcaatccaagtgacttgtgttgagctggtttgatcgtaccaataattaggttaggtttaaacaa

SEQ ID NO: 2794 - DNA, 925 bp, Avena sativa
cgggatccgaaattccccccacaagccacgcagccgaattcgccgccggggaaaaccgatcgatcgatctagccagccgacgggaacggaaggagtccggcgggggagatggtgagcgccttcttcctcttctgcgggtgcgtggagcaggccaacgtggccgtggtggagaagtggggccgcttcctccgcctcgccgagccgggcctccacttcttcaacccctgcgccggcgagttcgtcgccggcaccctctccacccgcgtccagtccctcgacgtccgcgtcgagaccaagaccaaggataatgtttttgttcagctgatatgtacaatccagtaccgggttgttaaggcgaacgcggacgatgcatactacgagttgcagaatccccaacagcaaattcagtcctatgtctttgatgtggttcgagccatagttccaagaatggagcttgacaatcttttcgagcaaaagaatgatgtggcaaaagctgtacttgaggagcttgaaaaggtgatgtcagattatggttacagcattgagcacatcctcttggttgacatcatccctgatgctgctgtccgcaaagcaatgaacgacataaacgcagcccagcggctccagctcgcaagtgtctacaaaggagaagcagagaagatccatctggtgaagaaagccgaaggtgaagccgaggcaaagtacctctcaggtgtcggcatcgccaagcagcggcaagcaatcaccgacggcctcagggagaacatcctcaacttctcgcacacagtgtcgggcaccagcgcaaaggaggtgatggacctgatcatggtcacccaatacttcgacaccatcaaggagctcggggacaactcgaagaacaccacggtgttcattcccatcggccggccacgtcagggacatcagc

SEQ ID NO: 2795 - DNA, 765 bp, Avena sativa
cctacgaggagaaggagaccggccctgatggcgaagaggtgactaaggtgattcctgctgtcactccggagattaaggagaccctggtccagaatatcaggaggaggatgacaccgcaaccactcaagatccgtgcagatgttgagatgaaatgtttccaatatgatggggtgctgcacattaaggaggccatgaggaaagctgaagctgctggtaacactaattgtcctgtgaagattaagcttgttgctcctcctctttatgttctgactacacaaacccttgacaaggaccaaggcatctcagtactcactgctgcagttaaggcatgcacagcagggattgaaaaacacaagggaaagttggtagtgaaagaagcaccgagagctgtgagtgaaagggaagataagctattgaacgcccagttggataccctggttgagcaaaacgcagaagttgctggtgatgatgacagtgaggatgaggaagacacaggaatgggtgatatcgaccttacaaattctggcgtcaatgcagattgagtctccggtagttgttttggatgagatttgttgtatagcaccagccaagatcctaaagttccctgttttaaagccctttgaattcactgggagtgccatctttggtgctcatgagccggtgatgggttttattttattgagtagtacctatttctttttgtcgggtatttaaacatagttttgttgctacacaagtgttttgtggccaatattgctctgatgg

SEQ ID NO: 2796 - DNA, 865 bp, Avena sativa
tattcacatggtggcacaggattccgaagcacatgaacttcctgaagcatttctgggagggtgacgaggactcggtgaaggcgaagaagacgcagctgtttggcgccgacccgccgatcctctacgtgcttcactacctggggcggaagccgtggctgtgcttccgggactacgactgcaactggaacgtcccgatcctgcgggagtttgcgagcgacatcgcgcacacccggtggtggaaggtgcacgacaagatgcccaagaagctccagagctactgcctgctgaggtcgaggctgaaggcggggctggagtgggagcggcggcaggcggagaaggccaacttcgtggacgggcactggaagcggaacatcacggacaagaggctgaagatctgcttcgagaagttctgcttctgggagagcatgctgtggcactggggcgaggcccccaactcgacgaagaaagcctcgacgacgacgcaagcgctgcctaccgcgaagctgtcgagctcgtgagatgtgtttgtagatatccccccctccccaccccgagaaattagtataccagatacagactccccaagctccatacatacatagcagcagcttgtaaaggtcgctatgctctctctctctctcttaggcccgtcttccccaagagctccctgctacaccttgtgttcgctgtcatgcctcatcgcagcgcgccgctgctgctcctcctcgacggctaacgattttttggttgtgggtaataattcgtcggtatagggtgaatttcctgggcaagagaactgttacctggattggctattgtgatgtcacagtagcttgccttgttgtatgtatgcatatgtatgtat

SEQ ID NO: 2797 - DNA, 670 bp, Avena sativa
tgtgatcaagaaggtgatcctctgccaggaactgagctaaaagaggtctggaaagtcgctgctactccaccgaatgacaagtaccagtatacatacttcgcgcacaaattaaatagctttgatacggcgcccaagaagctcttgccttcagactccaggttaaggcctgacagatatgcccttgagaagggcgacatgtcaaaatctggtgcacagaagagcaggcttgaagaacaacaaagagctgagaaaagaactcgggaaaccaaaggggagcaattcactccgaaatggttcaacatgacggacgaaatctcccctaccccatggggcgatctggaggtgtaccaatacaacggcaaatacgcggagcaccgggctgccatcgacagctcaggtgttgctgaggagacggacgtcagctctatcgagttcaacccatggcagtatggtgactcgtcttcccaatgattccatttcagagggtctgaagcaacagcccatctcatttgtgtcgtctgaaaaatgcttccaggccttgcattgtgctgatgatccatatctctccgcagcttccccgtgcccttgtagtattatgaccttccccctttcctcttgttgctctattacagtgttcaggatgtgattgtgtatttgatgtagtcatata

SEQ ID NO: 2798 - DNA, 846 bp, Avena sativa
atgctgagctggtggagaagatgaaccatcttgaggctcagctactggaagcaaacaaagccagcgagaaagccaaggccgagacccgccaactgaaggacaaactactagacaaagaaaatgaattgcagaacatacagcaggagaacgaggacttgcaggcaaaggaatcagctgcttccgagaagataaaagagctctcttctctagtgccaaacagagcaacaaatgggggtaacaaggaagaagataatgacaatggaggcggcgtggacgacgaaccggtcgtggtggttgccaagatgtgggagaacagcaaggtcaccgactacgactcctccaaggagaaggagaacgacggtgggtcggaagtcgatctggagtccaacaagggagacactactctcgacagcagcaacgggttgcagtcagcaaagacaaccaatggcagcacatcaccagccaaacaacaacagcagcagcaaaagaagaagaaattcaaattcggtggtttactgaagaagaaaagcccaaactagcgcaagatcgtgttatgttgtattcctttgttgtatgctatgtgacatcatctcctttctttgactagccacctagtttccgagtctttgcctctcgtcatcatcatggtaaagcaagtgtttggatgtttcagagaaatacagaaggccgattgtatttacagccatgcgtttgttttcttacagtttgtgtaagtccaatgataattcatattgtagctattgtatttattcttaagtggcctggtaatgctgttgtatatggaacagagatttttcgtaaatcaatgcagaatgccgttcttga

SEQ ID NO: 2799 - DNA, 871 bp, Avena sativa
agatacttgagcaagcaggtgtcgggattcttctatcaaacattggactaagctctttatctgcatctattcttattagtgccttgacaaccttgctgatgcttcctagcattggtattgccatgaggctcatggatatgtcaggaagaaggtttcttctcctctcgacgatccctgtcttgatagtagcactggctatcttggttctggtcaacattctggatgtcggaacaatggtgcacgccgcactctcaacgatcagcgtcatagtctatttctgcttcttcgtcatggggtttgggcctatcccgaacattctctgcgcagagatcttcccgacctccgtccgtggcatctgcatagccatctgtgccctaaccttctggatcggtgacatcatcgtgacgtacactctccccgtgatgcttaacgccatcggactcgctggtgttttcggaatatatgctgtggtttgcatactagctctcgtgtttgtctacatgaaggtgccggagaccaagggcatgcccctggaggtcatcaccgagttcttctctgtcggggcaaagcagggcaaggaagcgacagactagttgctccgatctggtgatccgcatcgctggtggtaattttgtggttccagaactgcactgccactgacctgtgatgctctggtaaagaaacttcaaggagagcagagagagcctaaagagatgagatatgaagactgtgcaccgtgaggctgtaatcctggcgtagacgacttttggaactaggttacatgtttagataacctgttgttgtttgctttgtgactttgtatttgtgttatttggaattttcttgcctctgtaactagtgctcttcatct

SEQ ID NO: 2800 - DNA, 677 bp, Avena sativa
agccgtgccgaggccaaagagacgccggcggtggaggaggcagcgccagcagccactacagaggcgccagtgcaggaggaagcagcaaccaccgaggctcccgtggaggagaggacggaggtggccgtggccgtagaggcggcgccggctgaagcagaggcaccagttgctgctgccgctgccaaagagcctgcggtagaggcaccggtcgaggaagcgtcggccgtggaggagcaagcagcgcctgccgaggcacctgcggaggttgctccgggcgtcgaggcgccagctgcgggtgccgctgacgaggccgacaaggccaccgagtgatcgagttgacgcatttctcagggtattgatcgtgagctagcctctgcttgggtcccgtgcgcgtgtcgtgccatgccacggcacggtatacgtactagatcgtttattattgtatccgtatgtgtgagtatttgggaagtcttggcggtgtatgcgtggggcattgtacgtgaggtagctacgtacaagtcttgtagtggtacgtttgtcattgtcattgtgtggtgggttcaataattgtactgcagagtttcccggtcccattgtcagtgcggacgagcccactggctttggaccaggattgttttttttctccattcaaatatgtagcaattgtactgacaaaa

SEQ ID NO: 2801 - DNA, 762 bp, Avena sativa
cgacacctctgccagaatgaccgccaagggtgtgatcagcaaggtggttgactgggaggagtctcggagcttcttctataggagattgcggaggcgggttgctgaggattcactcgccaaggaagttagagaagccgctggtgagcagatgcctcacagagcagcgctggagtgtatcaagcaatggtatctggcttccaagggttccgaaggagatggcgaggagtggaacgatgacgaagctttcttcgcctggaaagacgatgccaagaactacgagacccatctcgaggagttgaaggctgaaagggtatctaagctgttctcgcatttcgctgaaagctcagacgtgaaggccttgcccaacggtctgtcgctcctccttggcaaaatgaatccttcgaaaagggagcaggttctcgacggcctcaggcagcttcttggttgatcgttggcctctacgcatccagcacaaagcctgcttggcggactacagtagaagcacagacgaacgatggcgaacttgcctggcgagctacaggaggattcattggaagagtactagaacacattgtttttttgtttgcacataggcacttggtgatggctaaacgtcaagaccgtatatattgttattatacacacaaagcataggttgttgttctctgctctgctggatatttgatttggttgtagattcgccagccgcatcagatgcgacatcactgctcgtctagtttatgtaatagtggttcttttcac

SEQ ID NO: 2802 - DNA, 892 bp, Avena sativa
cataatcacagcacttggccatccatggagggatcttccattactggaaccagtgggttcaactcaatggctgctcatccagaatcagcacagcatggtaattatacatttcaatcaagtcacgccagtcagtgctttcaacctgccagcaatgcatgggtttcccagtctgcaaatggtattgctgaaggagtacctcagtgggcatacgtcaatacaataactaatgttccaggcagatttgcacattcaggggccacagaaatagtgaatggaggctttcatgaatatcagaatggcccttcaaccatttcccaagggcctttaccttattttcatcaacacgctgtacatagtatgcaagttcataatccgctggatcatacacgaatgcaaatcccgtaccaacaatgccacaataatgccgtcttacatagcggggtaaatcattctggtaaccggctccacttgggtccaagaacaccttttctctctaattctgagcggtcttttgggcctacacagcatcagttcctggtgaatccagttactcataggaatcagcgtggtacaataatggatttttcgaggttgtatgaggtgtcaagtgctgtagatgagcatagcgatatgcggctagatatagacagcatgacctatgaggagcttttagcgttagaagagcacattggagacgtcaatacaggtctggcaaaaagccacatcatagataagttgaagactagcttatatgtgccaggaacatcctgcatgtctgatcagtcatccgagtcttccgcagagaacgaggcgtgcataatttgccaggaggagtaccggtctgcagactgcattggaatcctggattgtggtcacagataccatgcggagt

SEQ ID NO: 2803 - DNA, 865 bp, Avena sativa
ttggcctgagcagcgaacaatgtattcggcatcttgggatcattctgttcggcagtgggatgctcaaacagggagggaaacttggaatatgttttgtgggaaggccttgaattgcttggattgtggtggtgagggctcttcactgattgctgctggtggttcggaccctgtattgagggtgtgggatcctcgcaagcctggaacactagctcctgttttccagttctcttcgcattcaagctggatctctaactgcaaatggcatccaagttcctggtatcatttgatatcatcttcatttgatgggaaagtgatgttgtgggatctaagaacagcatggcctctggcttctgtcgactcacacagcgaaaaggttttatgtgccgattggtggaaaggggacagtgtagtaagtggtggagctgattccaagctgtgtatctcatcaggggttgaaatagcgtgatgaagatcccttccgcatattgtgctatcaagctaacagcagttcaatccagattatattggtcgacaagacatccctaaaagacaaaccatgccaacaagggttgaaaacatctgtaccatatgtcagatcaacataccatctgaagctgttacacttggtgctagtgtctgcgcataagtagatacacattagggatcaccccattctgcaatcaagttttgttttgtgctccttattagttgaaactctcaaaaccaacataatataacaatgttatgatcgataattgtgagttaattgttaggccgttaactcgaggctggttttgcttcagtcaaaattgtatgttctgcttcagtaatcctatatacaggcctgcgtgtgttttaacaaaaa

SEQ ID NO: 2804 - DNA, 812 bp, Avena sativa
caatgtccagtatgcttgagaacatgaccagtccagctcacaaagagcagcttgaagagcgaatggcccgtatcaaggatgatccatcttgaagcctatcttgaggagatagagagcggtggtccatctgcaatggtgaagtactggaatgaccctgagattcttcaaaagattggccaggctatgtcattgaacttcccaggggatgatgctacttccactgtactatctggacctcaagaaaccgaggaggaaggcgagtatgatgatgagtctgttgtccatcataccgcaagtgttggtgatgcagagggtctgaagaaagcattagatggcggagcaaacaaggatgaagatgatgcagagggaaggagggccttacattttgcatgtggatatggcgagttcaagtgtgcagaaatccttctggaggcaggtgctgcagtggatgcactggataagaacaagaacaccccactgcattacgccgctgggtatggccggaaggaatgtgtggatcttctcttgaagcatggcgctgctgtcacgctccagaacatggacgggaagaccgccatcgaggtggccaagctcaacagccaggacgaggtggtcaagctgctcgagcaggacgtgttcctatgaactgaatcctcggacgagactcggcgtgcatcgagccataaaaaactccctttggttatagactctcggtagtgtgtcttctggtggcgtgttggttggtggtggctgcttctccttggtagctcttgcctgtaaacctgtgtggccctttggttgtcttcttgaca

SEQ ID NO: 2805 - DNA, 716 bp, Avena sativa
  modified_base (698)..(698): a, c, t, g, unknown or other
gtggtaaggatgagggcttgcattgaactgatttgttcgactgggcaacctctctttcagagtttctgatgatgcactcccatgcgctctgctatttctaaatatcttcgcactacatttattaagtgtccttatttgctccattgttcctttttttccatatcttcagtcagttgagattggcgagctaaagcaaaggctgtgtgaacttgagaaagtcaaaggtcaactggaggctcgcaatcagaagctactagaggaaagtacatatgcgaagggtttggcttcggctgcaggagtggaattgaaagcgttgtcagaagaagttactaaactcatgaaccaaaatgagaagcttgcttctgagttggcatcgctgagaagtccaaccccaacccctcgcagggcaagcccgagaggtactaatactaggagagagagcatgagtagacgaaatgaaccagctagcagaagagatggtaatgcaagccacgagagggagagagttttagaaactgtccttatggagaaggaacaaaaagaagcggaactccaaaggaaaatcgaggaatcgaagcaaaaaagaagccttcttggaaagtgagcttgcaaacatgtgggttctagtggcaaaattgaagaagtctcagggggatgaccatcaggattggatgccaaatacaatggctcctgacctnatcaaaggctaatcaatc

SEQ ID NO: 2806 - DNA, 822 bp, Avena sativa
atcgagagaactcttgaggtggcagagaaagtgtggtctgaggtattcttctacctggctgagaacaatgttctgttcgagggtatcctgctgaagcccagcatggttacccctggagctgaacacaaggagaaggctactgctgaggccattgcgcataacacccttacaatgctgaggaggagagtaccacctgctgtccctggaatcatgttcctttctggtggacagtccgagctggaggcaaccatgaacctgaacgcgatgaaccaatccgcaaacccgtggcacgtgtccttctcctacgcccgggctctccagaactcggtgttgaagacatggcagggacgccccgagaacattgaggcggcgcagcaggccctgctggtccgcgccaaggccaactcgctggcgcagctcggtacctacaccggtgagggtgagagcgacgaggccaagaaggggatgttccagaagggatacacttactaatgaggcggcatgatttatatactgagatgcatgtcgttttgacgtcatggttccatttcaacggtgtgaataatcaccagcatgttggtgccaatgagcgttagcattattagcaggccagaaactgagttgtctgaaatttttatttgtgagaacaaaccttttactctataactgtatgcataccctgagaaagttgatgagagctcactttgggctgaggatagcatgattcaggccgttaatggcttgggctgtatatgctggttcagtttgtgtcagtacctcataagttatcatcctattttgtaactagttatcatataggga

SEQ ID NO: 2807 - DNA, 446 bp, Avena sativa
agcgaataatattctacagggatggtcgttcaagcgaggggacaattttaccaaagttctattgttttgaactcagtgcaatccgaaaagcatgtgcctccctggaggcgaattacccaaccaaggggtgactttcgtcgtggttcagaaacgccaccacactagattgtttgcacacaatcacaatgatcggaatgcaacagacaggagtgggaacatactccccggtaccgtagtagattccaagatctgtcatccaactgaattcgacttctacttgtgcagccatgctggcatcaagggcaccagccgccccgctcattatcacgtcttgtgggacgaaaacaactttaccgctgatgggttgcagacccttaccaacaacctctgctacacctatgcgaggtgcacacgttcagtgtcgattgttccgcctgcatactatg

SEQ ID NO: 2808 - DNA, 952 bp, Avena sativa
catggacggattcggggtcaacacctacaccttcgtcacccgcgatgggacaacccgctacgtcaagttccactggaagcccacatgcggcgtcagctgcctcatggacgacgaggccacgctcgtcggaggcaagaaccacagccacgccacgcaggacctctacgactccatcgacgccggcaacttccccgagtggaagctcttcgtgcaggtcatcgaccccgacgacgaggataagttcgacttcgacccgctcgacgacaccaagacctggcccgaggacctcgtcccgctccagcccgtcggccgcctcgtgctggaccgcaacgtcgacaacttcttcaacgagaacgagcagctcgccttcggccccggcctcgtcgtgcccgggatctactactccgacgacaagatgctgcagtgcagggtcttcgcctacgccgacacccagcgataccgcctcggcccgaactacctcatgctccccgtcaacgcgcccaagtgcggattcaagaacaaccactacgacggcgccatgaacttcatgcaccgcgacgaggaggtcgactactacccgtcccgccacgccccgctccggcaggcggacccaccgagctttcccgtgccaactagacctgttgtcggaaagagggagaagaccagaatcaagaaggagaacgacttcgtgcagcctggggagaggtaccgcggctgggcgccggacaggcaggacaggttctgcaagaggtttgctgatgcgctgggccatcccaaggtcagccatgagctcaggatcatctggatcaacttcctcagacaggtatctatagtctaaatctctcataatttcagtaacgtgtgacgagtcgtgtgggatgaaggtggccaaccgcctcaacgtcaagccaagcatgtgatccatgcaacaaggatggactggatcggttgt

SEQ ID NO: 2809 - DNA, 744 bp, Avena sativa
gactcagcgtgtctctagttgatgtttacccgtccgattctgcggcagagaagactaaagataccaatgggagacctgaatatctacttgaagttctcaactgtactggttgtccaaatattaagaaagtcgttattccttcaatgtcgaattacctgaagttatccaaaatcaaccttaatctgtctacaaatttgaaggaagtagatctgaagtgctccaatctttacagtttaaacctgagcaattgtagcggtctagagattctgaagcttgattgtccaagattggcgaacctccaacttttggcatgcactttgttgcaagaggaggaactagaatctgcactgttcttatgttgtgcattggagatcctcaatgtacactcttgtccaaaaataaatgcgctggattttggcagactacaggctgtttgtccacctcaagcgcatccagagcagcctcatcacataggtgaatgatgctgccttcttgatggactaggagcaattagtccagatttgaatcaaaaaagctccatcgtggcactcttgtacatactaatgcagtattgccagtgtattcttatttcttaaatcgatcacttgtgatatctagctggatctgtttttgttcttggcacatggaaactgcttttgtttgtatttgcttctgaagtgcagcgatagagcaatcttgtttgtatctgaatcagtaaatgatgtatgttctattagtcaaaaa

SEQ ID NO: 2810 - DNA, 798 bp, Avena sativa
cgcggttgtacagcgggaatctcagtatgattgcactgagaaatggatatcacggtggtagtgcgggaacaataggactgactggtttgcagacgtggaagtatccgattcctcagggtgagattcatcatgtcatgaatccggatccttaccgtggagctttcgggtctgacggtgcagcgtatgccaaggaagtcgaagaacatataaattatggcagttcagggagggttggaggtttcatcgcagaaacttttcaaggtgtaggtggcgctgtggaactagctcctggatacctgaagtcggtctatgatactgtccggaaggctggtggtgtctgtatagctgatgaagtccaaagcggttttggtcgtactggaagtaattactggggattccagacgcaagatgtgatccccgacattgtaacaatggcaaagggaattggcaatggtctacccttgggtgcagttgtaacaactcctgagattgcaagcgtgatgtctcagaagatccagtttaacacatttggtggcaaccctgtttgttcggctggtggactggctgtgctcaaggtcctcgacaaggagaaacgccaggcgcactgcgcagatgttggcgctcacttggtggagcgtctgaaatcgcttcagcagaaacacgaaatcatcggagatgtcagaggaaggggactgatgcttggggtggagctygttaccgacagaacggagaagacgccagccaaggccgagaccgctgtactgtttgagaaactcaaggatcttggtgttctagtcg

SEQ ID NO: 2811 - DNA, 641 bp, Avena sativa
ccgggatctacccaagtaagagctgtagtctaacttcgttgtctactactacacgatcaatatggcatccaaggttgcgctcttcattgccctgagcctcctctccgctgtcgcggtgcacggctgcggaccatattgccagccgccggttgtggtgccgacgccacccgttgtcgtcccgccgccataccaaggaggagggcacggacatggtaggcaatgctccatcgacgtgctcaacctaagagtgtgtgccaacgttctaggtgggctgctcggcctcaaggtcggcgtcccggcctacgaccagtgctgcccactgctacgggggctggtcgacctcgacgccgccgtctgcctctgcaccgccgtcaaggcaaatgttctcggcatcgtccacctcaacgtccctgtggacatcaccctcctcctcaaccactgcggcaaaaagtgcccgtctgatttcacttgcccagcccattaacgggcgtacctttacaattacatagacggcgccgaataagatttatttccatacttcattgttaatttcttgagatgtggaactgttccacatccacatttgattgttgcaaccgtgtgctccttttctttatgcaacaaccatgtattgtactact

SEQ ID NO: 2812 - DNA, 1061 bp, Avena sativa
gcggtggtgagttggaatcagcacaaggtaagaatcaggcactaagggatgctggggcagttgtccctacttcatttgaagctctcgaaagtgtgattaaggagacatttgagaagctggttgaggaaggaaaagttcctattgtccctgagattacaccccctcccattcctgaggatcttaaaactgcaattaaaagtgggaaggtccgagctcccacgcacattatctccactatctctgatgatagaggtgaggaaccttgctatgctggtgtacccatgtctacaattattgaacggggttatggagttggtgatgttatttcccttttgtggttcaagcgcagccttcctcgttactgcactcagtttattgagatatgcatcatgctttgcgccgatcatggtccttgtgtatctggtgctcacaattctattgttactgctagggctggaaaggacctcgtttccagcttggtatctggattgttgacaatcggcccccgatttggtggtgcaattgatgatgctgctcggtacttcaaagatgcatatgataggggtcttacaccttatgagtttgttgagggcatgaaaaagaagggaatccgtgtccccgggattggtcacaggatcaagagcagagacaacagggacaagagagtgcagcttttacagaaatatgctcacacacacttcccttcagtcaagtatatggaatatgctgttcaggtggaaacctacaccctgtcaaaggccaacaatttggttatgaacgtcgacggtgcaattgggtcacttttcctggatcttctttctgggagtggaatgttcagcaagcaagagatcgacgaaattgtagagattggttatcttaatgggctctttgtgcttgcacgttcaattggcctaattgggcatacctttgaccagaagaggctcaagcaaccactctaccgtcacccgtgggaggatgtcctgtacaccaagtgaggctgacttgttatttcagcacgacatcttattggttgtccacctgtgtacactaaaactgagcac

SEQ ID NO: 2813 - DNA, 558 bp, Avena sativa
gccaagaaggccgccaccaaggccaaggccccagccaagaccaaggccgccgcgaagcccaaggctgcagcccctgcaaagaaggccgcagccgcgaagcccaaggccaaggcccctgcaaagaaggccgccccgaaggccaaggccccagccaagaccaaggccgcgcccgccaagcccaagggccggccagccaaggccgccaagacctcggccaaggacgcgcccgggaagaaggcgcccgccgctgccgcccccaagaagcccgccggcaggaagccccccaccaagcgcacgacgccggtgaagaaggcccccgccgccgccaagaaggcgcccgccaagaaggccggcaagaagtagagccgctccagaaggttcctagggttcggtttccattggtagctgtttttatgtcccgtgttagttgctagctgatggggaaggggtacttaggctgtaaatttgatattctgggaaggggtacagcggtcatcctctgcacccattgggagaaaccggtggtgacgatgacggagggaggggagtggcgcgtgg

SEQ ID NO: 2814 - DNA, 567 bp, Avena sativa
ccatctggagcaaaggcagaaattggggctgacagatcgtccacgtcgatccaaatcacgcgaactcctatctgaacctacgtcagggctcgagagagttgaggtggaaaaggcaaagcagggacgacgccctatctgatctcagcgacatactgacggagctgaaaggcatggccattgacatgggatctgagattggcaggcaaacaagcgatatgggtcatgctgagaaggactttgacgaacttaacttcagggtgaagggggcaaacacccgaacccgccgtctgcttgggagatagacagagatcgtgctggtgttaccgatggattcatatgacacttgtttatcttccgcagtttgctcagtgggtcgttgtttcagaccattttgtgcataagactctgagcagtatggtattaattgtcagggtttattgtgtatatcctgtaaacagtagtacattctcaatgttgcaactatactcctaaacaacccatatggaagatcatgttcatgtacttattacatattattttaactctgcatccatgcggagagagatc

SEQ ID NO: 2815 - DNA, 959 bp, Avena sativa
ttgagtatgtgccagagactgctcatcgtgtcattaaacattacaacaagatgaaccaacacatgcccttgatatatgcaaaactatacatgtatcagatatgcagatcgttggcatacattcataacagcattggagtgtgtcacagagatatcaagcctcagaatcttctggtgaatccgcatactcatcagttgaaattatgtgactttggcagcgcgaaagtgttggtaaaaggagaaccaaatatttcttatatctgttcaaggtactacagagccccagagctcatatttggcgctactgaatacacaacggcaattgatgtttggtctgctggttgtgttcttgctgaactccttctaggacagcctatattccctggggacagtggtgttgatcagcttgttgagatcatcaaggttttaggtacccctacacgagaagaaattaagtgcatgaatccaaattataccgagttcaaattccctcaaatcaaagctcacccatggcacaagatcttccataaaagaatgcctgccgaggcagtagatcttgtttccagactattgcaatattcaccaagccttcggtcaaccgctttggaagcattaatccatccattcttcgatgaactccgtgatccaaacacccgcttgccaaatggccgtttccttcctcccctctttaacttcaagtcccatgagttgaagggcgtgccgatggacatcctggtgaagctcatccctgaacatgctcggaagcaatgtgcctttgtaggctggtgatataccggaggatggcttgaagattagttcagaatcaatccagttgtcgtctactagaaacctgaggagtttgagattgcctgcagacacgtgggatataggcggcgatgcatgtgattattattcttttttcatggatgtcgtgtattcttttcccccctactgccgatg

SEQ ID NO: 2816 - DNA, 794 bp, Avena sativa
gttggagatgggaacaatattgtgcactcatggcttctattggctgctgtaattcctttccactttgtatgcgcttgtcctaagggttttgaaccagatgcaaaaactgtagagattgccaggaatgctggaagtaagattgaaataactaatgatcccaaggaagcagttaagggagcagatgttgtgtatacagatgtttgggccagtatgggccaaaagcaggaagctgaaaagaggaaagaattattcaaaggatttatggtggatgaagccctgatggagatggctggtccgaaagccttccttatgcattgtttgcctgcagagagaggggtggaggtaacagacggtgcaattgaggcccgcaactcgatcgtattcccccaggcagagaacagaatgcacgctcaaaatgcaatcatgcttcatgtgtttggggcttagttatcctattgcatgctaggttgctagtgttaaatcagtactgaaactgaagattactactggacattaggttccttgggttttcacagtgtgacccttaaaggcgagaggggtagagtttttggaaacatgtcagtgttcagatactttgagttgtccagtaactgaagtgtgtttgtacttcgctggcggcggcatgtgtggtactgtgtcggatcgggtagtactgaataaatagagctagtactgaataaatagagcgcctccaagatttacttccatgctctacttttgttcagatattgatctttatcgttatttcaaacctttttttagaaatacaaaaa

SEQ ID NO: 2817 - DNA, 823 bp, Avena sativa
cttggagcattgcgctgataagatctcaaaggctgtattcttacgccacaatggtaaaggatagccagaggcccttcgatgtgttctcggaagaacttgcatcggcagatgttttcttgcaagaatcgcagtttttgctttatggaaatggtaaggacaagcctccaactgggctcaggtttgacaaacagcagatcaaggggttatatttcaaccaaagtccttccaaggatattgcactggccactgtgtccatgaggccaatcccattagccccgataatggagaagctctctctcactgcggagaagtatggcacggtccgccgctacttcatccagacgctggacgaccacatgctgtcgcctgatgcccaggagaagctggtccgggagaacccgcccgacgggatcttcaagataaagggtggcgaccactgtcccttcttctcgaagccgcagtctctccacaagatcttggtcgagatcgcgcagatccaagctccgtcgatgctgttcccaggcaaagccatttcagaagaggaagaagaaagcaccgagaaatcatgactgcctgaatgtcatgtgtttacatgaaatgagtagcacataggttgcaatttcgcaaaaggagagatacaggggttaattggaatcagccactctggcggtcagtcagagatcagaataataatgtagttagttgaagaagtgttaatttttcttttgtgacaatcaagtatagtggattggcctgtgagagatgttttaccatgtgaatatcttccaagtcaatcatcagaagttaagatcattgacttaat

SEQ ID NO: 2818 - DNA, 840 bp, Avena sativa
ctatgtgatgatttattgaagctgtaaaaccttcttcttcaatgactctgaagagttcgattcagcaagagctgcttgtagagatgccctatgggtttgcctcgacactggttttgcggcctgctccacccgttcatgccttacgtaacagaagaactctggcagcgtcttcctcagcccaaagactcttgcaggaaaagttccattatgataacagaatatccatctgttgttaaggaatgggcagatgataaacttgaaagtcaaattgaaattgtcttggataccgtgaacaaactaagatctctgaagccatcaacagatacaaatgaaaggtgtcctgcttttgcactttgccgaggacaagatattgctgccactgttcaatgctatcaatccctagccgtgtctctatcttctgtatcttcgctaaagatcctgacagagagcgatgaaactccacctgactgttcaactgccgttgtaaacaaagacctgaccgtataccttcagcttcaaggggctctaaatgcagaagtggagctcgaaaaactaaggaaaaagagagatgaaattcaaaagctacaacatgccctgtcccaaaagatggacgcatccggttacagagagaaggctccgccgagtgtccaagaggaggacatgagaaaactcactgctttcctcgagcaactgcaggtcatcggtgaagctgagaagaaactagacgtgtaaaatgggcaatgctcaagtcggctctctgtttccattgactgtgaacaggygttttttgttcaaagctgtttttgcgtcaaatttttgtggatggtggagctgtgtgct

SEQ ID NO: 2819 - DNA, 785 bp, Avena sativa
tctgcttgcagaatggaagaggaatcaagacgtaatcaacgagaagctgcaaaatggtacttgcgagctgccgagggagggaatgtacgagccatgtataatgtttccttgtgttactgctttggtgaagggtttacgcaggatcatgtgcgtgcaaagaagtggctgcaactagctgctgactgtggtcacaagaaggctctttacgagtgtggtcttaaactatgtgcggctggagacaaggtcaggtctttcatgtatctagagctggcaacacgccgtggagaagcagccgcctcacatatgagagatgtgatacttgaaacactctctcccatgaatacacaacttgctctgtcagaggctgataaatggcgaccgaaagctctctataccagaagatgaccagatggacccctccaaatactgaccccttcattgctctgggcattggcatatcatttccaagtcaggatcagaatatgcatccctgttggccaagcaggcatctgtgcaccttcaggatcttcatgttcaccttagctttttctttgtaaccctaccattgcagatgacggctggggtccttggtcaagtgccaatgaagaaagtagcgaaatggagcataaaactgtagtgtacagaatgtaaatgtcttggttcaggtggaaccattgcatgtttgtaatcagtagaaatgtttggatgctactactccagtcaccaaatgtgtgaaagctatagtactgttcggcaaccgaagaaacaaagcaactaaaattgca

SEQ ID NO: 2820 - DNA, 775 bp, Avena sativa
aaatctctccaagcgtcatttttcgttgacgaggttgatggcatgttgggtagacgtgagaaccctggtgagcatgaagccatgcggaagatgaaaaatgagtttatggtgaactgggatggtctaagaacaaaagataaagaacgtgtattagttcttgctgcgactaataggccatttgaccttgatgaagcagttattaggaggcttccaaggaggttgatggtgaatttgcctgatgcatcaaatagaaaaaaaaatacctgagcgtcatactggccaaagaagatttggcagatgatctagagctggaagccattgctaacttgacagaagggtactcaggcagtgatctaaagaatctttgtgtgactgctgctcatcttcctattagagagatccttgaaaaggagaagaaggagaaagctttggcagaagcagaaaagagaccattgccccaatcgtgttcgagcaatgatgtccgtgccttgagaataagtgatttcaaacatgcacatgaacaggtttgtgcaagtgtatcttctgattccacaaatatgaatgagcttactcaatggaatgatctatatggagatggtgggtcgaggaaaaagacaacgctaagctacttcatgtagctgatgttgagtacatgtacatacatcataaaccttagcacaaagcaatggagtttggaggggatagtggtgcagatttgctgcagtaaaaaaaagctgtaggcatctgttagacgtcagatcaacaattgacggtc

SEQ ID NO: 2821 - DNA, 693 bp, Avena sativa
cgcgccctgccgacgcccggcgatgagcagcccaagatctaccgcatgaagctctgggccaccaacgaggtccgcgcgaagtccaagttctggtacttcctgaggaagctcaagaaggtgaagaaggccaatggacagatgctcgccatcaacgagatctttgagaagaacccgaccaccatcaagaactttggcatctggctgcgctaccagagcaggaccgggtaccacaacatgtacaaggagtaccgtgacacgaccctgaacggtgctgtggaccagatgtacacggagatggcctcgcgccaccgcgtgcgttccccctgcatccagatcatcaagactgcgacggtagacttcaagctgtgcaagagggacaacaccaagcagttccacaactccaagatcaagttcccgctggtcttccagaaggtgaggccgcccacccgcaagctcaggaccacctacaaggcgacgaggcccaacctgttcatgtgatcgggtggcaaaaaggctcttcacctgctgttctgtgttttagctcatattaagagtttctgttctgaagttttggtgccctgtgggttatgatgcactttggttgttttcagtcgccattctggatgatgatgctttgcaactctctgactttattcagtattagtaatgagcagatccattgttccttacaaa

SEQ ID NO: 2822 - DNA, 755 bp, Avena sativa
ggatgagcaagtggagatgtcctaaacatatccggaatgaggtcattgatgttaaaacggacctgtctcaaattggcttttgacgttgaagcaattcaacagatggtagccggattggaagagaagattgagttgcttgacaataaacaggatgaaacagctaatgctggtatatggtacctctgccgaatggcaggaggtataaaaaggagggaataaataccaagtttttccaggaagcggatgaaaaactcaagctcttggacctggctcaaactgaaaagaagccggtgaagggcctcgagctatttctggagagcaccaaggaagtgaaggcaatcgactccaagcctaatgccatagcacagaacgacgccaagaaacccacgaaaacatttgacgtgcccctgaagagcgccgcggtgcacagatcaaacagggtcttatttcggaaggaaggcctcgcgctgtgatcaacacctgcctgcccgcttgctatgtacattgcgttcttgattgctttgtttgatagaaaatatagaagaagaagaataacctgcatccggagtgatgattttccaggatagacaggtgtgtggttttaatctgtcaaaagcaacctgtaatttttattttattttattcatttcatgctcagatttgtttttcgcttgtaaaacaagtgaaggagaaacaataaacttaatatgtttttgctatcctgtcgaattgggcgggagcctgcagctgcatga

SEQ ID NO: 2823 - DNA, 863 bp, Avena sativa
gagtacgtcagtggcggcgactctccatacatcaccctgtactaccgcagcttcgacggagagcaaggattccctggggactttggacgtgtacgcgacgtaccagctgtcgagtgcctacgagctgagcatccgcaccaacgcgacggcgctgaacaaggcgacgccggtgaacttcctgcagcacgtgtactggaacctgggcggggagggcagcggcgacatcctgggccacaccctgcagctctccgcgtcccggtacacccccatggacgaggagctactcccgtcgtccggacgcgtcgaccccgtcgccggcacgagctacgacttccggacgccgacgcccatcggagcgcgcatccggaaggtcatgggcggcaaggtcttcgggtacgacatcaactacgtgatcgacggggagggcatgcggaaggtggcggcggtccgggacggcgcgtccggccgcggtctcgagctgtgggccaaccagccggccatgcagctctacaccggcaactttctgaacaacaccaaggggaaggacggccatgtgtacgaccagtacggcgggtttgctctggagacgcaggcctaccccgacgccgtgaaccaccctgagttcccgtcgatcacggtgaggcccggccaggtgtacaagcacgacatgatctacaagttcaacttctagctgctaggtgcctaactactggctccagtaccaatacgatcattggttgacgaatcctcgatctgtcactctgtacgatctggggtttggatttttctttattttgttttttaggcctaagctggtgaggttctagagactgaaccacagtcatggcgtgaggcgtgatcac

SEQ ID NO: 2824 - DNA, 587 bp, Avena sativa
gcttattataaagcatgataatttgaagaagctcagtctatggggctgttcagcaatagatgctttgtatgtgaaatgtccggagttgcatgatctgaacctcaactcttgtacaaatctgcacccagagcggttgctacttcagtgcccaaatttgaagaatgtgcatgcatttggggtgtcaagatatgttgatcggtgctattagaaaccaggttctgaatgagttcgctgcagctgaacaacatcttccttgcaagcggctagcagatggttcaaagcgggttcaactctcagagttcccagaacagttaccggaggacaaaaacttgattggattaaagcgggcacggtgcactatgcatcttgattcttgattaataatcacataaccatagctagagtactgagcttttgttgtgcacattctgatttgtaaactattcaatggtgaatattatttatttgtcctggtgtacctccaaaccccataatatttgtaatatgcttgttgtataagctgctatctgcaagtgaaacttgtatgaattgtttttggtattacaaaaaaaaagttattaatcgcg

SEQ ID NO: 2825 - DNA, 587 bp, Avena sativa
gaaataactggccgccttcatctggtggctcacagtgcgcaaagttacacaatatacttaacattgtcagccaaaatgtggggtgtaggtgcggagcaaggcggcattctgcagacatccacagccaaacttgaactgaaggagccgtactacaggttgtctcaaacacaacaatatattccacaagaccaacagcagccgttgtcatctttgcaggcgcaaggatctggacagcagatgcaagatgggctaagccctggcatcacggtagaacaggagagagactccgcggctttcactcgatagggcggaaacctgaggtccatgctttgcttcctgcaacgagctcagactgtacaacagcaatatgcttctgctggatgttgctctgtgtagctgccagtggctaacatcgcgtccagtgtggtgtgagatcattgtgtccatgttgtgcagcgctgaagctaattgtgctcgcgcttgcccattatttaatgtcagaaaacataagagtatctgatcggatgtgaagtcggagttagaaggcatctaacaggggaagaaggttgtatgttcttatgtattat

SEQ ID NO: 2826 - DNA, 843 bp, Avena sativa
agagagactgtgagtagggagatcagaaagatactgacagagagggcaaggaactttaatattgcccttgacgacgtgtccatcactagcctgagcttcggaaaggagtttactcatgccattgaagccaaacaggttgctgctcaagaggctgagcgtgccaagttcattgtagagaaagcggagcaggataagcgaagtgcagttatcagggcacagggagaggccaaaagtgcggagctgattggtcatgccattgcaaacaaccctgctttccttgctcttaggcatatcgaagctgccagggatatctctcacataattgcctcctcggccaacaaagtgttcctcgactccaacgacctgttgctcaacctccagcagctgaatgtgggaggaaacaagcagaagaaatgaagttgctatctgagttggcgcgtatcactgtaaaagactttgcaaccagaagtttttccttaatgaattccaccagtggtcctgtctggtacagaactttgaagaaggcaaatcggcagacaaacattgtgggagttgcaacttgcaagtagtctggctggttttatttgactgcaagttgtcgaggaggtttaataaggattgcatgctgttttgagaatcccgtttattattaggctgctgttgctttagactttgtttggttaatccccttcaccagtggattggagtggaatttagaggattagggggggatttggtttagatgggatttaattcccctcaatccgagtcaatcccgtccatttctagctaaaccggctacctttaatggaatctcctcaggtacctctaagcttcctttta

SEQ ID NO: 2827 - DNA, 657 bp, Avena sativa
gagcacgcttactatgcagacgttctgtgacgacagccatatatatgaaaggggttcctttgaatgacagttgcagactttggagcagttaaactgaaaatactgtactatttcaatttgttcacacctttcaaaaaaacatagtacaacgtgtgaacctggtgccatgtttattcagctcaaagcttcaactttaatttacacacaacatatgagcacattcactacccgactcgaagcaatggtcatatcttcttcagcctaatttgagcaccgtgttgcgggtggagggttatcaccgtgtatggtgcgtgggtgtaggacggcgagagctcgaacgagaagcgctggaggatggtgctgagagccatcttggcttccagcaacgcaaagttctggccgatgcaaatccgaggaccccctccaaatgggaagaacgcggccggatgcttcgctgcattcgagatgccatcggcaaacctctgaggattgaattcgcttgcatcttttccccagatattgggatcatggtggataaacaggatgggcaacgtaaggttcactcctgccggatatttgatgccaccaagctccattgccttgtatgttcttctcgtaagaaacactactggcgggtacaacctagaacctcatata

SEQ ID NO: 2828 - DNA, 742 bp, Avena sativa
tcgccgagtcgctcctcatcggcctcatatgcatgctcctcgtcttgatctttagagataatttctccatcatcttcactagtgattccgagctccgccacgccgtatccaagattgcaggactgcttgccgtcaccatggtcacaaacagcctgcagcctgtcatttcaggggttgctattggatctggatggcaaggccttgttgcctacatcaacctaggctgctactacggatttgggctgccattggggtaccttctcggctaccacttcaactacggagttgggggggtctggggtggcatgctttgcggggttgcactgcagacacttatgttactcttcgtagtctggagaacggattggaatgcagaggccaaacaagcttcaagccgtgtgcacaagtggggcggcaccgatgtaaccaaaccactcctggaagagaactagctagagaaccgaagcatcttttatctcagcttaatactctaggtgttttgagccagatgatatcaccaacagagatggaaaacggttgaaactgttgaactactatatccatacatcaccacgaggctgaatggtccgccgcatcatctttgtatgtacataccaggaaggcccttttctcttacctgcaataagaggccacgaagcagtacgtacaaagctggacacgataaatcccatcaactttggttttgagcaacataaataagtttgcataaacttggaacgtt

SEQ ID NO: 2829 - DNA, 990 bp, Avena sativa
ttctggaattgctaccgcaatgatactgagtaactatcctgtgctacttaaagaagtaaatgagaaatttctgaatgctggaatcgacaggattaaagccaatttgcagagtcgcgtgaggaaaggaaaaatgacagaggagagatatgtgaagactctatctcttgtcactggtacccttggttatgaaaagttcaaagaagtggacctagttatcgaggctgttattgagaatgtgaaattgaagcagcaaatattttcggacttggagaagtactgtccttcccattgcatccttgctaccaacacatctacaattgatcttaatctaattggagagaaaacaaagtcccaagatcgtatagttggtgcacacttctttagtccagcgcatgtaatgccacttctggaaatagttcgtacccagcacacatcagcacaggttgttgttgacttgttggatgtcgggaagaggatcaagaagacaccaatagtagttgggaattgtactggttttgcagtcaacaggatgttctttccttacacccagtcagcgctcctgtttgttgattatggtatggatgtctacaagatcgatcgtgcatgtaccaaatttggaatgcccatgggtccattcagacttgcagatcttgttggttttggtgttgctgtggcgactggtatgcagtatcttgaaaatttccctgagagagtctacaagtcgatgctaattcctcttatgatggaggacaaaagggcaggtgaagccacccggaaggggttttacaagtatgaggataagaggaaggcaactcctgatcctgaaattatgacatacattcagaaatctaggagcatggcaggagtcacaccagaccctgagctgatgaagctaactgatraggacatagttgagatggtgttcttcccagtcataaacgaagcctgccgtgtccttgatgagggcatcgcagtcaaggcttctgacct

SEQ ID NO: 2830 - DNA, 628 bp, Avena sativa
tgtgaaatacccatctgtggaacttgcatacgcagctgggcgagctgggggcaccatgacaggagttctgagcgctgctaatgagaaggctgtggagctgttcatcgacgaaaagatcagctacctggacatcttcaaggtggtggagcttacgtgcgacgcccatcgcaatgagctggtgacaagcccatcgctcgaggagatcatccattacgaccagtgggcgaggaggtacacagccagcctacaggaatcctctggccggagccctgttcttgcataaggccctgttggaacagttcccagttctcgtcggaacttagctgtttctgtgatattcctgcgatccaaacttcagaatatgtctctagctttcgtagctaccaccgtgaacatggtgtccagcagaaggtctagaagatgaagtgtgggcagacaggcacagaggatgtacactactcccatggccttttgtcaaattggtcattgggaagcttagatcaagatttatgaaggcacacatagattgccttcctaatgtaaatcatgtctttgcacaaataaaacgtgtgtatccaatgtaaattttgatgggcaagtaaaaggaatggaatttaggtaagaaaaa

SEQ ID NO: 2831 - DNA, 982 bp, Avena sativa
gctgcacttggcttcatgtcaccggcctcccgcggtactctgatcacaggcatgctcttcttttacctggttctcgggatactggcaggatacgccagtgttcgcgtgtggaagactatcaggtgtggagatcactctggctgggtgggtgtttcgtggaggacagcctgcttcttccctggtatcgcgttcctgatcctcaccacgctgaacttcctgttgtggggaagccagagcaccggcgccatcccattctcactgtttgttgtgttgattctgctctggttctgcatctctgtgccgcttacacttgttggtgggttcctcggggccaaggcatcacacattgagtaccctgtccgcacaaaccagatccctcgtgaaatccctgctcagaagtacccatcctggctgctggttcttggtgccggcaccctgccctttggcacccttttcatcgagctcttcttcatcatgtcaagcatatggatggggcgtgtgtactatgtctttgggttcctcttcatcgtgatgttgctcctggttattgtctgcgctgaggtttccctggttctgacctacatgcacctctgcgtcgaggactggaagtggtggtggaaatcgttcttctcatctggatctgtggccatctacattttcctctactcgatcaactaccttgtttttgacctcaagagcctgagtggaccagtgtcggcgaccctctacctcggctactcgctcttcatggttattgccattatgctggctacaggaacggttgggttcatttcctcattctgcttcatccactatctcttttcatctgtgaaggctgattaagtttctccctgcgaggagtcttgtcattcaattgagaggtgagcatagtggagtggacattgaaatttgtagtcactaagtcttagttcatcccaacttttggtatacatgcgcttaataactattgtatggtctagta

SEQ ID NO: 2832 - DNA, 713 bp, Avena sativa
cagtaacatctccctgctcatagagccgatgatgttgattactggcttcttccttctgtttgttgcttgtattgcctacatgcacactgacatgtcaatctctaagaactctccttcatttctggcaaaactacaatgggatgaggtgcaagccactatccagcaaatccagggtatctttgaccagtgtttagcagttcacgataagctagagacctcgctgcacgatttgtccaggacaggagacactaaatcttgcaaagcagctcgtaaagctgctgatgcacagtttaaggaattagcgaaagagctgaagccactgttgacttctgtacagtcatcccctcagtcttatcagatatggccaaaggtagaggagttggttgcaaaggagagggagatgcaggagaagctcatggcaagacattccacagtggttgacagtttcgagaagaagctgcgcgggcaagatatagagaaccggattgcttcccagcaacagaaaattggtgcgctgaggcaagaggtcgaatccctactagagtacctcagcgagatatgagcagacccggtgccatattataccattagtgcttagaactgaatatcacctaagctttatttgttgaaaccttagatcttgtgttcggtaaatggtacatctacatagttggtgacactttgatttgagaagatcgtgtaacatagaaaaa

SEQ ID NO: 2833 - DNA, 728 bp, Avena sativa
agaaggtacaggtaagaagtttgagaacaaggttgaatggggaattgatttagcgtctgagcatgagaggtatttgactgaggtgatatttaagaagccagttattgtttataactaccctaagggaataaaggcattttacatgaggctcaatgaagaccagaagacagtggctgcaatggatgtacttgttcccaaggttggtgaattaattggtggaagccagagggaggagcgtcttgatgttcttaagcaaagaatactcgacgcagatctgcccttggagccgtatgagtggtacttggacctcaggcgctttggaactgtgaagcacagcgggttcggccttggcttcgagaggatgatccttttcgccactggtctcgagaacatcagagacgtcatcccgttcccaagataccctgggagggctgatctctgaagggttgacgatgttctcctcaaaatagaagtgaaacctgcgctccaaagccatttgaagtactacacttctttttgccttaaaattagaatgtgaaaattccgcgcttgattggtgattttggacagtgtcagccatccgccttctgtttggccggtgcctgctccacaattatgtctaggttatatgttcacactgatctgtgtctgtctctaagtctcttgtccttgttttctaaacaactgttgaatgtcaggcttgtattgtgctattatagatgttcaaa

SEQ ID NO: 2834 - DNA, 757 bp, Avena sativa
gcatgcagtttgcggaactttgacgcctggccatgaccctgtccagaaggttacattggttccaagaggtcaagctcgtggtctcacctggttcattcctatggatgacccgacgctcatctctaggcagcaactctttgccagaatcgttggtggccttggtggtagagctgctgaggagatcatctttggagagcctgaggtgaccactggagctgccggtgacttgcagcagatcactggcttagccaagcagatggtggtcacattcggcatgtcagatatcggcccatggtctttgatggatggggcgcagagcggggatgtcatcatgagaatgatggcaaggaactccatgtctgagaagctcgcactggacatcgattcagccattaagcagttgtcagaccaggcctacgagatcgctttgcaacagatcagggagaaccgtgtggcgatggacaagattgtggaggtgctcctcgagaaggagacgctgagcggcgatgagttccgggcgattctctccgagttcacagagatccctgtcgagaaccagattcctccaaccccacaggccgccgtcccggtctaagtttgcctagcttttatagggttggaaatttgttgttgtaagatgttcatattttcgattcttggtgtaaactaactctatgtcacactaccggatttgttcggtgtacgacatgtaacttactcgtggttaattataaaaatgtaattacctgaaaaaaaa

SEQ ID NO: 2835 - DNA, 763 bp, Avena sativa
cattaagagcatcacaacaacaaagttgtcttctgcaattgaagcttctatagctcgagggcagattggtatacagcaggtccgaggactgaaagaagcaaattttcagctggatagcttgatttcagaaccattgcgagaaacgatttacaagaagtgtgcggaggagatattttcatcaggaacaggtgattttgatgaagaggaagtgtatgcaaagatgccaggtgatcttatgataagtgctgagaaggcaaagtcgattgttcaggatatagcaaaagttaggttggagaacgctcttgttcaggctgtagctctgcttcggcagaagaagaaagatggtgtgatctcatcactgaatgacttgcttgcatgtgacgcggccgtgcctgcctcgaagccattgtcatggccgacgctaggagagctggatgacttgtactgtgtttacatgaagagtattcccaagtccgataagctatcgaggctgcagtacttgctcaacataagcgctgagaaggctgaccagcttcaggatgccgcaacggcaggcacgctgccagtcacagctcaagaggaagaagaattggcgttctaggagggatgtgaagaggcacttttttgtaggtagccagcagtgtcgcgctcgtgccacacggcggtgctgtggcgccaacagctgctgttgtagctagggcatggttttgaggaagcaacgcaataatcctgacatgcataattatctgtatagacagatttg

SEQ ID NO: 2836 - DNA, 1019 bp, Avena sativa
ccgggattgccgctcgtcaccactgacgcccgcctccacctccgttacccctcccgtcccggcatccccgtgtataaagatccgccgctcgggacgaacagcccaccgccacctccaccgcctcgccgccaggacttccgcacgaaccgtcgccatggccgccgccgccgctgcaccggtcatctctccgaaagaagatctgccccctatcctgacctccacctccgagccccctccactcttcgacggcaccaccaggctgtatgtcgcatatcactgcccgtacgcgcagcgcgcctggattgccaggaactacaagggtgtgcaggacaagatcaagatagtcgcgatcgatctggcagacaggccggcttgggtacaaggagaaggtttacccagggaacaaggtgccttctctggagcataacaaccaggtgaaaggggagagcttggatttggtcaagtacatcgacagcaacttcgatggcccagcattgcttcctgatgattctgaaaagaagcagttcgctgaggagctgcttgcgtataccgatgagttcggtaaagcagcatactcatctatcatctccaagggagatgtgtcggaggaaactgttgctgcgctggacaaaatagaagctgcactcaggaaattcacagatggcccttttttccttggccagttcagtctggtggacattgcatatgtgccatttattgaaaggtttcagatattcttttctggcatcaagaactatgatatcaccaagggcagacctaacattcagaaattcattgaggaagtgaacaaaatcgatgcttatacacaaaccaaactggacccgcagtttctgcttgaacaaactaagaagcggctcgggattgagtgaagatgcgaccaaggatgaacaagaggttggcaactactgcatcatcggcatggaagatgaaatctcagtcacttacgagtgtgcttgcttgctgtatgctatatatattgaataaaagatgcatgctat

SEQ ID NO: 2837 - DNA, 480 bp, Avena sativa
ctagttctagatcgcgattaattaacttttttttttttttatttggaatctgcttatcgtgttccttgatcaattgtgtaataaattggcagcttcaagctgcgtgggaaggagctgaatattacatatacatatgcagaagcaaatttggcggttctgtaaacaaccgaacccagtttttaggtttatgtacacgagcatctattaaaaggagatacttgagagcacgccgccttcgtggatcaccaggtgatcattcccagaagttggatcaccctggtcgttgaatccattaatgtcatgatgcaaatatttacgcgctgctcttcttgccctcaccagtcggtgtcgccaggatgcgcttgatagccttcactgacagtgggctgtccttggtcatgctgcaggttccccgcctggtgtcacaatagggtagtcatgagggcagcagctgtagtgatcatcgcagcagctagcagc

SEQ ID NO: 2838 - DNA, 668 bp, Avena sativa
gttggtgattcccgtgccgtcgttttaaaagccggcaaagctatggcactctctgtagatcacaaacctaacaggacagatgaacggaagagaattgaaaatgctggaggtgttgtcatttgggctggtacttggagggttggcggcgtactggcaatgtcccgtgcattcggcaatcgtctactaaagccatttgtggtggcagaacctgaaattcaggaacaagtgttcgatggagaattggaaagtctagttcttgccagtgatggactgtgggatgctgtagaaaatgaggaagctgtctccctcgctaaaacagaagatgtaccagagtccgcggccaggaaactcacggagattgcctattctcgaggcagtgccgacaatataacatgcatcgtggtgcaattccagcacgataaaactggaggatgagatgaacgacagctgattgaaggatttctctgcttcaggcctctattattatcctgcaagctgagtgggtttctccatatctattgcttctgtagcaaccgcgaaaggactttttctgttgattcttttccttgtgtgggagatctccttttcttttcttttgagttgtgtaacggatacaattgaatttgaaagcatactaataatttaccaattacctgccaaaaaaaaaa

SEQ ID NO: 2839 - DNA, 879 bp, Avena sativa
gggcagcgtccaagtatctatggcagaaccagaaacaacaaagaaagaggatgatgctcctactcagaaggaaaccttggttacaaggccagaacagaatgaagaagcaaatacatctgctcaagacgaaaagactatcgaaccagttgctgctgtgccagatcatgcggagcattctagtactgaacagcttggagaagatttaaaggtgctgaacactcaaccagcacccggtggtgtaaatttaaagcttggagaagccaaagctgaacagctgttgcaaccttcgtctagtgaggatatgactgtcacacgggaccttctttgcagaacaggagcaaaaactccaagcactgaacatgcatgtattgatggaactttggatcaaaaggaagctgatgcagcagctgatgagtctcccgttgtcagtgggagaggaggtgctgaacactgaaattgctcctgatggtaaatctccaagtgtgtgagaggctgatgctgtggaattgcaagcctgcgagcctcgaggggatggaggctcctagcactgacttgctgcctaatgatgataaagtgaagtagctgttgctgtccaggaactcagtgtaggaagccaggcagaaatgcaacggtgttaacaactgcacagacggagcgtggtagattatgcatctccacccggaggagtggatgtggtgggggcttgatgaaacttagaagtagattatgcaaatgttgtatgtagaacatattaagaaacctgttgtatccagagcagctggcgacgcagaagttataattatctaatgctttcaacaaaatgcatcgatgtttgctcttgggagtttatcatttgttgatgtattacttgaaacaaaa

SEQ ID NO: 2840 - DNA, 688 bp, Avena sativa
aatcaaggctggcagttgctttccataatcttacaagttccaacaatctctcaagcacgcttgaccgtccaaaccgacagaaattcaggaaaaacctccgcgctttcttaggcgaagtctcgggcttcatgcagataaagtaatcgggatgatatgaaaccagtgatgtctggtcaatccaaggaagatttttcgccagtgtggcaggagtccttgtgtgcatgttgtggcggagccatgagcaagaatgctagcacgaggttgagaaggcaccccccattatgtgttgaagggatagttgaaaacagaaatgacaggaacatgttgaattattccatgatcagcgcccgtgactgcattcggtggtgaagaattggacggccgcacatgagatcctcgtgtagattctgttggtagtcaatgccatgtaaaaaaggtgggcattttgttgcgacaggtacttttgcgcagatttagcttccccacgtgtatgggcatacaactttgaaggaagtgattcggcaccagctggtgtgtgaccgcgccgtcagactagttatctgataacatatatccagctccctagtgtaaaagaacgtaaaatattatgacctgcttttgtaagcaagttgttaattactggaatcgtttaatcttcccttgcaatctagttgaacccccttgatct

SEQ ID NO: 2841 - DNA, 784 bp, Avena sativa
gctccatgggcaggatagaaggcggggcaagaaggccaaacaggataggctgactatcaagttcctaaagaaatatatacattatgcaaagaaccttattcagcctaagctcactgatgaggcatctgatcacattgcaacttcatatgctgagctcagagatggtagtgcaaatgcaaaggctggtggaggtacgcttccaattactgcgaggacattggaaacaatgattcgtctatctactgcccacgcaaagatgaaactgaggcatgaggttctaaaaattgatgtggaggctgcattgcaagttctgaattttgcaatattccataaggaattgactgatatggaagatcgtgaacagagagagatggagaaacaacaagctgaacaggatgctggtacaggtggtgacaatgcagcagatgggcatgtggatgcaagtgctgatgtggatggccatggaagctctggcaacgacccaatggatgtggatggaagcaatgcatcaaagggtcaggatgtttcttcacagagaattgaagcatttgaggcaattcttggacagcatgtgttggcaaaccatgttgatcaaatgtccattgatgaagttgagcaaacagtcaatagagatgcagctgcaccttacaccagaggccaagtagagttcatcttggagaggatgcaagatgctaacaggatcatgatacgggatggcattgttcgcatcatctaatccgagcatgatttgatgatggactagctgattgtgatatgctatgtc

SEQ ID NO: 2842 - DNA, 885 bp, Avena sativa
cctcgacgtccgcgcgggtggaggccgtcgtcgtgttcaccatctgcgacagcttcgtgcgccgccccgaccaggcggagcgcgtcatcggcaccctcctcggctccgtcctccccgacggcaccgtccacgtccgcaactcctacgtcgtcccccacagcgagtccgccgaccaggttgctctcgacatcgagtaccaccacaacatgtacgtgtcgcaccaaaaggtgaaccccaaggaggtgattgtgggatggttctccaccggcttcggtgtttcagggggtagtacgcttatccatgaattttattcaagagaagtgcaaagccccattcatcttactgtcgatactggcttcactatgggcgaggcttccatcaaagcctatgtctcatccaacctgtctctaggagataggcaccttgccgcacaatttcaggaaattcctctggatctgaagatgcttgatgcagaaaaagttggatttgagttgttgaagtctacgatggtggataagctgcccaacgacttggaaggaatggagtcctcgatgcaaaagctataccttcttattgatgagatctacaaatattctgatgatgttgtggaaggccgtgtggcaggggacaacaagataggcaggttcattgctgatgctgtttcctccatgccaaagctgtctccatcatcgtttgacagactcttcaatgacaggattcaggataaccttgcgctagtatacctgtcaagcatcacacggactcagatcgccgtagccgagaagctgaacaccgctgcccaagtcctgtgatttccatgctgtctatgctttgtttttcgtttgcttgaatgagaagaaatcagaatatgttggcagaatatgc

SEQ ID NO: 2843 - DNA, 690 bp, Avena sativa
ttttttttcaaacatgctttgccagaacaaaacgcaaaaagacacagccaagcttgagcaaatttattctcaagtatttcttgttgcaaggaacttattctcaagttaaacaaagacagccaaccaagttatccatacaagcatacacacggaaaaaaagatcatccatctcgagtcaagtccccgagacgacttcatcttctgcctgtcaacgggattgacagattttactcttcttcccttgtttacatctgaagattcattggccatggccagatttcctcccccagccaaaactgtgctgggacttgtccagctaaaacagctctcacgcggctgctgctgattcttcccacttgttcaccacctctttcagctggtcaaatcccattcggtttgtgaaggtcccgaaagattcaccttcctgacgtgtgctgtgccaataggaaaacagtggttccaaaaccttctcaatatcttgaagcttcaccttattcatgaacgtttccgccaaggtggtctggtttggtgttcctccaagccagatctggtaactgtttgggccatcaccaacgaaaccaacctctgccatgtatggtctggcgcatccattagggcagccagttattctcaccactacagactcctcatccttgatgccaaccttgtcgaaaactgctctaatccgtt

SEQ ID NO: 2844 - DNA, 892 bp, Avena sativa
atgatttgagggaccacttctcctcatacggtaaggtggctgaacaccagataatggtggatcacagcactggacgttcaagaggttttggctttgtcacttttgaaagtgaggattctgttgaaagggtcatatcagagggaagaatgcgtgatcttggtgggaagcaggttgaaataaagaaggccgaaccaaagaaacatggaagcgatcacagtagtaatgcgagatctagtcactcaggtggtggttaccgtagttcttaccgtagtggtggagctgctgctgggggtggtagtagcggcggtggcagtggcagtggcagcgcctatggctatggtggtggtccccatcggtctgctgctgcaggaagttattacgatagcaccggatatggttatggtagaggaggctatggtgctgcctatggaggcaatgctggatttgggtctggctatggtggtggctatggtggctctatgtacggaggtgcttatggtgcatacggagcatatggtgctggtgcctatggtggcggcgcttacggaggcggtgcctatggtggtggtgcatatggaggtggtgcttatggtggtgccccaggtggctatggtgccgctggtgggtatggtagttatgggggagctggcggtgctgctggtggtagtgcaggtggtggtcgtggttctagcaggtaccatccctacgggaaataagtgtcaactcacccaagttttttctaggatgcaataagcgtgtgcttcatcatcagatctcctagaagtttggtgttcatcttgggtcacctaatcagaggcatcagaacatttttggttttgctcaattaagtcgtaaccagggacaagtgtaatctgtgttgctgagcctgcct

SEQ ID NO: 2845 - DNA, 645 bp, Avena sativa
gggtggtgttgtcagggcacgtgcctttgccaagaaattgtctgatgcccctttagctattgttgataaaagaagacagggtcacaatctttcagaggtcatgcatttaattggtgacgtgaaggggaaggttgctattatggttgatgacatgattgacacagcagggactattacaagtggagcagcattgttaaaacaggagggagcagaggctgtatatgcttgttgcacacatgctgtcctaagcccacctgcaattgaaaggctttcaggaggcatctttgaggaagttatagtgacaaactccatcctcctgccagaggacaaatgcttccctcagctgacggtgctgtccatggctaaccttgtagccgaaactatctggcatgttcatcgtgacggctccgtgagcagcatctttcaatagcagtgaggcacattcttacatttgggcggtatagagaagggcaccattggcgaggaatcaattttggtgacatgacaaataaagttactttgccgtgtaggcatcatacatgtaatggggtggtcaagttctcaagacacctagtaaagggtgtttagttcctaacctgtgtcacataagctctcttctactagtttggaattactggctcgccc

SEQ ID NO: 2846 - DNA, 308 bp, Avena sativa
ggcctcgctcggcctgtggcagtaaggttaggctaagatcctcttccttggcctcgacaacgccggcaagaccaccctcctccacatgctcaaggacgagcggctcgtgcagcaccagcccacgcagcaccccacgtcggaggagctcagcatcggcaagatcaagttcaaagccttcgacctcggtggccaccagatcgctcgccgagtctggaaagattactacgctaaggttgatgctgtagtatacttggtagatgcatacgacaaggagcgcttgctgatcgaaaaggagctcgatgctctcc

SEQ ID NO: 2847 - DNA, 676 bp, Avena sativa
aggtggaataagcttcaagatgtgcttccacccgaaattggtgatctaaagaaactgacacacttgtatttgagcttcaataacttcaaaggtgaaattcctgtggagcttgcaaacctaccagagctacgctatctttatcttcatgagaaccgctttactgggcggatccccccctgagcttggaactctcaaaaaccttcgtcaccttgatgttggtagcaaccacttgataggcactatgagggatttcattggcattgggaatggcttcccttccttgagaaacctatatgttaataataatcagttgattggagtgctaccagatcagattgcaaatttaaccaaccttgagatcctgcacttgtccaataataggctgattggatcgatatcgccaaagctagtcagcattccaagattgacatacttgtatttggacaacaacaacttcatcggaaggatccctgaagggctatacaagcacccatttttgaaggagctgtacgttgaagggaaccagtttagacccggaaccaggtcaaaaggaacgcacaaggtgcttgagttacccgaggccgacgtttagtttagggaagctcatatatgtgtgcgcttgctgttagtattctgcagggcatcagccaccattctacatctccacatgatgcag

SEQ ID NO: 2848 - DNA, 926 bp, Avena sativa
accaaccggattgggttacagttcttgatggatctcaggaaggtgcatatgaatgggttaccattaattatctattaggaaatttgggaaagacatatgcagacacagttggtgtggttgatcttggcggtggatctgtccaaatggcatacgctatcccagagaaggacgctgaaaaggctcctaaaccagcagctggtgaagattcatacgtgaagaaacttttccttaaggggacgaacgtactatctttatgtccacagttatttgcgctatgggctgctggctgctagagcagagatcttaaaagctggcaatgccaatggttacagcaactgcatattggctggacatcaggggcaatataagtatggtggcaaaacatttgaagcatcggctgcaccttctggtggtagttattcagaatgcagggctgatgtagtgaaagctcttaaagtggacgaagcatgcactcacatgaaatgttccttcggtggcatttggaatggtggtggtggtgatgggcagaagaatctctttgtagcatcgtttttctttgacagggcagctgaggctggtttcataaaccctgaggcacctgttgctaaggttaaaccctcagactttgaggaagctgccaagcgtgcttgtaagctaaacgtgaacgacgcccaatccagttaccctggtgtacagaaggataacattccatatatttgcatggatcttgtttatcagtacacactgcttgtggatggatttggtgttgatcctcaacaagagatgaccttggtaaagaaggtcccatacagtgacgcgtttgttgaagcagcatggccgcttggaagcgccattgaggttgcatcttcatcataggcaccacccttttagcaagggagcatcgatgtgggagcatgagcctgggc

SEQ ID NO: 2849 - DNA, 658 bp, Avena sativa
gtttggtggtgctcagggcaccgccacctttgcattcattaagccccagcctgacccaacagctcacgtctgggagcttcatctccgttttgtgtgcaccgccttcactaaacagacccctcccatcaaggttgagccgcctgtaggtgggaatggaggacaagctgttgacgttgcagccaagcctcagcgtctactgagtgtcacaattggacacggagatgtcatcgactcactttcgttttcctatgttgacgaggctggaaacaaccaaaccgctggtccatggggtggcaagggtggggtttctaaaacgatcaagctgaaacctaccgagaccgtgaataaaatcatcggaacaacgggcaattttggaggccatgttgtcgtgaactcgctcgagattgtcaccaatcttgacacatatggaccatacgggaaaggaaatggtactcagttcgccattccccagaaggacaacagtagcgtggtgtgcttccatgggcgcgctggcttatttcttgacgcaattggagtctatgcggctgaaaactagtactagtctgcaagctttgcttttaaaatagtatggctttatctgaagccttttgatttcccgcgttcaataaggacaagtattgtcctcgtgtcatgtacg

SEQ ID NO: 2850 - DNA, 952 bp, Avena sativa
ctggatcggagaggcctaagcgtactgttcctcaaccatttgctctttcaactcaaagaagggcttctggaggaggaaaaggtggtgtggctcatccatccagcgagggagaaaaatcagggcaaggaagtagcctctctccagcaagcatgataaagaagactactccaatggcatccaagaagactttgcagcctggtcatacatttcagccccaagaagacgactcctgttctgttacttcttcaaccacaacttcgacaagagctggcaaaactaagacaactgttgcctttgccccttcatttgtatgtgacgaccgtgctgacaagaggaaggagttctacacgaaattagaagagaagcacaaagctttggaagctgagaagaatgagtctgaaacaaggaaaaaggacgagcaagaagcagctttaaaacagttaaggaagtccttggtcatcaaggcaaaacccatgccaaacttctaccaagaaggcccccctccaaagactgagcttaagaaggtgcctccaacccgtgccaaatcaccaaagtttacccggagaaagagctacagtgacacaccgccgaccccggaggcggcatcgaccaaccggtcacatcgtcacagcattggcactcctaaagacgccaacaaagcccaatgctcaccgaagagcggtgtaggtgccaaagccagagctgtgaaacctgtgagctgatgaaggcccctcttaagaagtgatcatggagcagccccaagctcgaagcgccgcccgcaaatgtctctgtacaaacccctaactcgaggcgtctccgcatttatggcatttcgcgattaagttaattcatgtaaggagtcacacactgggtcttatgatgctctcgacgaactaattcgtgagccgaactattgaatttctctgctggatgtttgtctcggtagtattca

SEQ ID NO: 2851 - DNA, 848 bp, Avena sativa
tgaagagggatttctcactatcactcataatggaagaactgacaccttaccttacccaaagcaagcaagctccttctatcatctaagtaaagtgcatgactctcacaacatagcatttacttgcaaagcttggggcataagggccacagatctcaaccaaggcgtcgtctatggagtcagaacagatgaaactgctatgcacgaagagctatccaatagactggactatgatggagtctttggcacagcactaaataggttctgtgttcaggctgctgtaggccacccgcttacagtttacggaaaaggtggtcagacccgtggatacctggacatcagagacaccgtgcaatgcgtggagctagcgatcgcgaacccggccaaaccaggcgagttcagagtcttcaaccaattcaccgagcagttctcagtcaatgaactagccaggctggtgacggccgcgggagcgaagcttgggctggaggtgcagaccaagtcggtgcccaacccacgcgtggaagcggaggagcactactacaatgcgaagcactcgaagctctcggagcttgggctggtgccccaccttctgtctgactcgctcctcgactcgctgctcaacttcgccgtccagtacaaggacagggtcgacacggcgcagataatgcccagtgtgtcgtggaagaagatgggtgcgaagccgaagacggtctctgttcagaggggagcttagctcggggagctttcctttgttatagggcagcgcgcctatgtatgatgtcaaccttgacattgacattgtatcttgttgtgtaatgtagctataataataatgcacgttagttcgatgt

SEQ ID NO: 2852 - DNA, 837 bp, Avena sativa
ttcttctgcagcaggttgctggagatctcctgaagcaatatcagcaaaatttaagggaggaacactctcagtcacctggaactacttgagagattccatgagcacctacttgtctcagccaaatcccgttactgcccgatgggaaggggaagatcatctaagggatcctaactttcagctggatgcattcagataccgaacatcacgattactgcatagtgttgctgctcgactccagaagcatatgaagacacttggaggttttggtgcgtggaacagatgtttgaaccatctgctgacactcgcagaatcacacattgagtctgtcatccttgctaggtttatagaagctgtgaaaagttgccctgacgaaaaaacacgtgaggtactgaagctagtgtgtgacctttacgcgctcgataggatctggaacgacatcgggacatatcggaacgtagactacgtcgctccaaacaaagcaaaggctatccataaattggtagactacctcagttaccaagtcaggcttgtggcccgagaactcgtcgacgccttcgatattccagatcaaatcatccgcgccccaattggcatgcaatcggaggcgtactctcagtatacgcagtgtgtcggcttctagacaaacaaacaacacaaggatcgcattccactaccaagttcagacagttagtacacgaagttttctgtagacaaacttctgttgtatatccagtatagcaaatcaaataaagtatataataaggtaaataatagacgagagagaatgtataagtggtaacattgtgtaatttttttctattcagattgtgttttgta

SEQ ID NO: 2853 - DNA, 767 bp, Avena sativa
cttatggatggaaagcctgcaagatctgttgagttggctgaccatgagaaagaagctgtacaacatctttatctgctaacaatgaagcctgtcatttatgttgctaatgtaacagaatctgatctttctgaacctgataaaaatccccatgtcaaagaggtggctaaactagcatcagaattgcagtctggcatggttaccatatcagctcaggttgaggctgaactgtctgaactaccattagaagagagagttgagtacctaaaatctcttgatgttgatgaaagtgggctcggcaatttggtgaaagcaacgtataaccttttgggactaagaacatatttcacgactggagagcaggaaacaaaagcttggaccattcttgcaggcatgactgcacctcaagcagccggagttatccatagtgactttcagaaaggcttcattagagctgaaactgtatcttatgatgattttgttgcggcgggttctcttggagtagcaagggagaagggagtgctgaggttggaagggaaggaatatgtagtgcaggaaggagatgtaatgcttttccggttcaatgtctgataaaaatagcctgcaaaacgtttcagtatacactcgagttcgtacatgcttgcaaggctatagaaaaattggttagagcatgagattttgtatgttgagacataaattttccaggcacccgcaatgggcattgtcacattattcagagaaaaataaatatttactgtttcatttcaaaa

SEQ ID NO: 2854 - DNA, 319 bp, Avena sativa
gagatcattgctctggaagcacgtgcagtattttgcctctttgacaaaactggatataactagtcccataatatccatagtagtgggaagtgaagaagcagcacttagggctggcagtcatatgctaagatctggatttcacgttacaccaattcgaccacccacggtaccacccaactcatgcaggttgcgaatcactctgagcgcggctcattcctctgatgacatcaagaggcttgcggaggcactcactccatggctacctcacaaacatggcaagccgggttcttccaaggggcatgctgacagagcttcgccg

SEQ ID NO: 2855 - DNA, 723 bp, Avena sativa
gatctttggaaaaactagtgaagatgggctactccacttcggcagaagaagctgcgaaggcaatgtagtgctatatctgccttgatcagagataatgtatatggtcaggaggcattccgttcagaaaggggaagcgcaatgttgcagcacatactgggaagcgacaataccgatgtccggcttcagaagaaggcggtgtttttagtaacggatctagcggactttcagctaaactctggaaactcggggcttgctttcttaagcgagcgcgttttcctgaagttaatggttgatatgctatcgaagtttgaccttgaccttcaagaaaaggttttgctggccattaggagtctactgaatcttcccacgaccgacactagagacttggagtcgtgtgacctcgacggcgtgctgtacagactgggggtgcagctggaagagttgccgtcggaggagcaaaaggagtacgccggggaggtggacgccctccggagagaagtccagacgctctaccagcagaagctcaaggaggggcggagtacagccaccctggcgttgtaggatactcggatgaactggaggggagcggcgttcgttcgggatgatccggtgctgagttgtatgcatttggttggagggaacaataggctagacacttgctggactgcagtatagttcttgtttgaatgactagagtagtaattgacgcactggttaccgtat

SEQ ID NO: 2856 - DNA, 896 bp, Avena sativa
ccgggatgaaaacttggaaaatccagagctctaccattatgcacttttctcggacaatgtcttggctgcctctgttgttgtgaactcaaccatcatgaatgctaaggagcctgagaaacatgttttccatcttgtaactgataagttgaactttggagccatgaacatgtggtttttgctgaacccacctggcaaggccacaatccatgttgagaatgtggatgaatttaagtggttgaactcatcatactgtcctgttctccggcaactggagtctgctgccatgaaagagtactatttcaaggctgatcgtcccaccactctttcagcaggttcttcaaacctaaagtaccgtaaccccaagtacctatccatgctgaaccatttgagattttatctcccacagatctatcctaagttggataagatacttttcctcgatgatgacatagttgtgcagaaagatttgacaggattatgggatgttgatctaaaaggaaaggtcaatggtgcagtggagacctgtggagagagtttccaccgttttgacaagtatcttaatttttcaaatcctcatattgctcggaactttgatcctaatgcttgtggttgggcttatgggatgaacatctttgatctaaagcagtggaagaacaaagatattaccgggatctaccacaagtggcaaaacatgaatgaagacagggttctttggaagctcgggacacttccacctggcctcatgacgttctacaagctgacacatccccttgataagtcgtggcatgtccttggattaggatacaacccaagcatagaccgctcggagatagacaatgctgctgtcgctcattacaatgggaatatgaagccatggttggagctggcaatgacca

SEQ ID NO: 2857 - DNA, 726 bp, Avena sativa
catagttgtgcagaaagatttgacaggattatgggatgttgatctaaaaggaaaggtcaatggtgcagtggagacctgtggagagagtttccaccgctttgacaagtatcttaatttttcaaatcctcatattgctcggaactttgatcctaatgcttgtggttgggcttatgggatgaacatctttgatctaaagcagtggaagaacaaagacattaccggcatctaccacaagtggcaaaacatgaatgaagacagggttctttggaagctcgggacacttccacctggtctcatgacgttctacaagctgacacatccccttgataaatcgtggcatgtccttggattaggatacaacccaagcatagaccgctcagagatagacaatgctgctgtcgctcattacaatgggaatatgaagccatggttggagctggcaatgaccaagtaccggccatattggacaaggtatataaagtatgaccatccttatatccgtggatgcaacttgagtgactagaaacaagagagcatcacccatctggagcagaagttgccccccttctcctgaggtatctatgtagattaagcaaaagtagtatcagctggagctattggttgcctacactctctgaaaatttctgattgacgctctcgtgaacaatgtgttagtcttaaaaagtccctttgttcaattgatgtgcagctttgtttcgccaaaca

SEQ ID NO: 2858 - DNA, 619 bp, Avena sativa
gcactgagcccatctgctggagtcttaaactgtggacagggattgtttgagggcctaaaagcatataggaaagctgatgggtccgtcctgttattccgtccggaggaaaatgccataaggatgataaatggttcggataggatgtgcatgcctgcaccaaccgtggagcaatttgtggatgcagtgaaacaaactgttttggcaaataaaagatgggtgcctcctactggtaaaggttccttatatattaggccgctacttattggaagtggggctattcttggtcttgcaccttctcctgagtacacctttcttatttatgtttcccctgttgggaattatttcaaggaaggtttggctcctattaatttgattatcgaaaataacttccaccgtgctgcccctggtggaactggaggcgtgaaaaccattggaaactatgcctcggtgttgaaagcgcagagaactgcaaaggagaaaggatattctgatgtcctctatttggatgctgtccacaacaaatatctggaagaagtttcttcatgcaatatttttgttgtgaaaggcaattactatttctactccagcgatagaaaggaacgatactgcctggtataac

SEQ ID NO: 2859 - DNA, 669 bp, Avena sativa
ctgatgagaatgcgcagtcaacgacagcacagccaattgatatagaggtcactgagccttcaaagccaattgatatagaggtcactgagcctacaatggatgagcatcttaatcgaggcgacaattctttgtcggattgcaaagggaataatggcgcttcaatagctcccaaatcacttagagcaggaaaagcaccatcaccagagaggataaaatattgggaagaacatgggtttagcagtttgattgttgctgctcctgggcatgaggtagaaagtttggttgctgatttgcttccactgttgtcttattcggctccatttgctatctaccaccaacatcttcagcctctcgcgacatgcatgcacagcttgcaagtatcgaaaatggctattgggttgcagataattgaaccctggcttcgagaatatcaggtccttccatcgcgcacccacccacacatgcagatgaatgcatttggtggttacattttgagtggcatccggatacataggcctgacccgagtaacggggagtaagccttgggtgccgatctataaggcgtgctcctgtccattagggaaaaggagcgccccatggacaccgatttggcagaccagagaagccaactggcttggcgaagctaaccgaatgtgatggcagagaaca

SEQ ID NO: 2860 - DNA, 517 bp, Avena sativa
ctccgtccccagcccctgcccgctaagatggtagccatcgcattgcttggaatggcagctaacgtccctctaggggtgtggcgcgagcacaccaagaagttctcccctcagtggttcgcagctgtccatgccgctgttccattcatcgcgatgctgaggaagtctgtcaacatgcccagggccgcaatggtattcaccatagcagcctccatccttgggcagactatcgggtcgagggccgagcgcatccgcctgaagactctggcagcaaagagcaccgctggtgctgtggccacacacgctgccatgtacccaaacaggaacggcaattgcagcgacaccgagggcaagccgtgggatcctcttacgctgaagatgtctggctctgtttctgctggcgcttctggaccaacacctagcatgtgcttctgactggtggcgtggaactagcaatctctatttatcatgtatgtgattgccttgccttgaccctggaaagcatagctgttagcgttac

SEQ ID NO: 2861 - DNA, 895 bp, Avena sativa
cccgggatggcgccacaggctacaacatgggtgtgactatgccgacacagcaaaatgcagtccagaacatgggttgggtcacaccgacaccgaatccaggaaacaccaacatgaatatggtatggaccacagctcaagcccaagggactccaaatgctgctgctatgatgggggctcagatccaaggagttgcagtggccccttggggtgccatggcacaaggaaatggaaattcttatcctggttgggtgccccaggttgggaacatgaatcagaatgtcggctggagtgctcctgtgcagggaaatccaggtcctagtcctgtaaatggtacaggccaggggaataataatatgaactggaatgcaccaagtgggaatcagacttggaaaaaccagcaggattttagtggtggtaactcaggtgggcggtcatggaggccaccttttaagaggggaatctgctatacctttgagaaatatggtcactgcaacaaagagcagtgcccctatgtccatatgcaaaaggatgaaggctctgcaccgagaaatgatcgccgctttgataggcaaccttcgagcaataatagacctcagtatgacaggcaaaatgatgaacagtttgatcggcaagcttcaggcggcgagaggcaccatggcaggcatgacaacaggcacggtggcagggacaacgacaataggcagtctgatagatcggaatcaagagagaggcagcagtaggaccagttttgggttcattttctgctgtattctcctgttttgttgtatatgcagtagctagctagtagcaccgtgcgtgtttctgaacttgatgtgttgtagcgagctgcaccccgtccgaaccttgtcatgtagaaccaaccgtagcttaagca

SEQ ID NO: 2862 - DNA, 887 bp, Avena sativa
ttaacttacctccatgaaagagatattgttcacagagatatcaaatgtgccaacatactggtgcatgcgaatggatctgtgaaacttgcagactttggacttgctaagcaggctagcaaactcaatgtgctcaagtcatgcaaaggaactgtatattggatggcacctgaggtcgtcaatcccaagaagacatatggacctgcagctgatatatggagtctgggttgtacggtccttgagatgttgacgcgtgaacttccctatcctgatctggaatggacacaagccctatataggatcggtaagggggaaccgccagcgattccaagtactctctcaagggatgctcgtgattttataagccagtgcgtaaaaccaaacccagaagacagaccttcagcatccaaactgttggaccatccgtttgtgaatagatcaatccggtctgtacggtctatgaggacatcttcacggccaaattcatctacacgtggcatgattggatagaatcgaggacagttataacagaaactatattagcccttgctaatcatgtggagctggctgggaaaaggacgatgctaaaaaacagtattgtcaccggcatcctcgtagcatcttgttctcaattgcttgattctttaccatatttacggggaagatgtttttgtgatccagctagtaatattcatcttcccggagagttagatctaaatgcgcatgggagcgcatgagtgtagtgtaaagtaggaaaggacacagctgtaaatatatgtcttgatgtcaatgtcatggtttggaatgagattcacttgttgatccaaactaactgaaaaagagtttaaaaagagaagaggtttgctttggaacttccggttaagtgctag

SEQ ID NO: 2863 - DNA, 880 bp, Avena sativa
tggtagggatgggcttcttacttgttgtatacgcccaagtagcatttttgggcctggcgataagctactggttccttctctagttgctgctgcaagggcaggcaagtcaaaatacataattggtgatgggaacaactactatgatttcacctatgtcgagaacgtggcatatggccatgtttgtgcagacaaaactttatcatctgaagatggtgcaaagagagctgctggaaaaacgtacttcataacaaatgcggagcccataaaattctgggagttcatgtcattgattctagaaggtcttggatatcaaaggccttcaataaaaattcctgtctctgttatgatgccagtggctcatgtggtagaatggatttataagacattttgtaagtatggaatgaaggttccccagctgacaccgtcaaggatcaggctcctctcatgcaaccgtacattcagttgctcaagagcaaaagatcagcttggttatgaacccattgtgccactcaaggatggtctgaagagaacaatagagtcgtattcccatctacaagcacataatcaaaggagtatatcaaaggcttcaatttttcttgggaatggaaatcttgccaaaacacttctttgggaagacacgaagcaaacaatgacagtgctactactcttggctgttatctactaccagttatttacatgtggttacaccgttatgacagcaatggcaaagcttttctcacttacagcactgttcttgttcattcatggcatgctgcccgcaaatgtgtttggccacaagattgagaaacttgagccctcaaactttcacattctcacagatggaggcacatcaggtcgcttgttcagtcagctcatcatg

SEQ ID NO: 2864 - DNA, 862 bp, Avena sativa
cttgaagaaatctacaaaagtgtccacatggatattgacagtgaccatgagtggcgggttctcactgatcttatagatttctggtagagcagatctctcagagctgcttaccaacatggatgaccgaattacagaagcaagagagcttgccctaagtagaaaggacattctagaaaaggtggaaaagtggacattagcaactgaagaggagggttggcttggtgaatatgagagggatcaaaatcgctataatgctggtcgaggagctcacgtaaatctcaagcgcgcagagaaagcaaggatattggtcggcaaaattccatctctgctggagaatttgattgctagagttaatggttgggaaaaagagaagggcataccatttatgcatgataagatgaggcttttggatagcttacaacaatacacctccgggaggcaacaaaaggaagatgaaaaacgtcgactacgggaacttaagaaattacaagaacagtttgcagcagagcaaggtgcaacatatggagcgaagcctagtcctatgcgtcagctttcggcaaggaagcctcttgggcagagttcgaatgtcaacatcattggtggaactcctaacagccggcgtgtgtctaccccaatttcacgcaagggagccttgtcttgtggaaaaatgaaggatgctggcaagacaactgcttccataccagcaaactatgttgcccttcccaaagattgttcagacagctctacattgtgaaatatgtaatcaccccctacaagttggcatctagcaagtaacttagctttatatttcatatgtttgatctcagatagattaactgcttgttaatgctggaatggttct

SEQ ID NO: 2865 - DNA, 598 bp, Avena sativa
gcagttcgtggtgagttggtgtggctcctggccggacttggtggcgagggggagtactccgacaacattgcggcctcgttcttccctaggaggcattacagatggatccgtcgatgttgcatcctctctggcttttcctcctcatctcgggcaggagctctgaggagggagcccggtatctttgagccgcagagatggattctcgctgctcgtcgctgctgttccaagattggtctgctccgcctgggcgctgtgggtgcgtcgggatgcaggggatcctcgaggagcggagttggcgatctgctgtggagtcgtgaagccaatcctttctgctcatccaaatcgaaagctatttgccagccgattatcctggccatgatgaggccatcaagcttgccggcaagatccggcgttcaatcaacctctagcatgaggcctagctgttgcagaggcggtgtggaagaagggcccgattgttttcttcttatctgctgtagggttctttttgtaaagcgcatgggcctggttgtatttttccttcttcttcggtcctgcgtgaaaatctgtagctccctgtagtgctccatggtgggcggcc

SEQ ID NO: 2866 - DNA, 742 bp, Avena sativa
caccgttggtattctgcagctacatccaggcgctatcaatagcatcccaagtaaatcacacctggaaattgatctaagagatattgatgagaaaagaaggaatgatgtcattaagaaggttcaccaatctgcgatcgacatatcaaaggtccgcgcagtcgagctatcagaattcaagatcgtcaaccaggatccacctgccctgtctgacaagtcagtcgttaacgcaatggagttttctgcaaaacagctgggcctgcaatacaaattgatgatcagcagagcttatcacgattcacttttcatggctagaatatcaccaatgggtatgatcttcattccctgttacaaagggtacagccacaagcccgaggagtatgcgtcgcgggaagacatggcaaatggagttcagatgctagccttgacgatggccaaactatccttggagtgagcacggaatggggaggaatcaagagggtagtgcccaataatacccaagctctccatccccgcattaggaaaccataattcattcttcctggataacatttggatgggcagaatataaggaaatacatttgattccatcataatgtgttactgtattttcatagaatagtagaacggtgatgcggcaaggcttaaagggcgggcatgtaatgtgtagtactgacaaaaaaatcaaattgccgatcgaccagcatcgcctcttgtgttcttgctgaggtgcgaaatcagtcaa

SEQ ID NO: 2867 - DNA, 915 bp, Avena sativa
cgatgtggtttctgacaaacccaccaagtcctgcaacaattcgaattgaaagcctggatgagttgaaatggctccctgctgatttcagttccagatttaagcagaagggcattcgagatccaagatacacttctgcacttaaccacttgcgctttttacttgcctgaagtattcccctctctgagcaaagttttactcttggaccatgatgttgtagtccaaaaagacttaagcaaattgtgggagatagatatgaagggtaaaataaatggtgctctggagacatgcagttctggcaatagttaccatcgattggacaaccttgttaatttttctgatcaaagtatcatgaacaaatttgatgcaaaggcttgcatatatgcatttgggatgaacatttttgaccttaaggaatggcgcaataagggtttaactgcaacttatgataaatggtttcaggcgggcaaaaggcggagactatggaaggcgggaagcttgccagtggggcagcttgtcttctacaaccaaacagtgcctcttgaccaccggtggcatgttcttgggcttggccggaatggcaacacgagaagagaagaaatcgagagcgcagctgtcatccactacagcgggaaccttaaaccctggctggagatctccgtccccaaatacagagactactggaacagataccttaactacgacaacacgtacttgcagcagtgcaacatccacagttagatagcaacagaaggcggggagattttacgcaatgactcgtgaatacgcagttttcgctgtagtactaaaagagtagtatgtagcaagctggtcttattcattcttttgtagatttaccactagatacccttgtctgtagttagacttatgtgtcttagccacttatggagattctgt

SEQ ID NO: 2868 - DNA, 832 bp, Avena sativa
atttatgttgattgtagtccaactgctgcgcctatgtttgagggtagaggttctgaagaattgtcggctgaactctctgttgcgctgcaaagatgtttactggggggtaaaagcggggcaggggctgcaatagatttgtcgtccctaatcgttattgagggaaaagcctgctgggatctgtacattgatggacttgtggtcagttccgatggtaatttgcttgatgcactagctgctgcgataaaggttgctttgagtgatacaggtataccaaaagttaatgtttctgttaatgctgaaatggatggggagcctgaggttgatatcagtgatgaagaatttttgcaattcgacacttccagtgtgcctgttatagttacattgacaaaggttggtaagcactatattgttgatgcctcttcggaggaggaatcccagatgagttcggcggtttctgtttcagtcaacaggcgtggccaaatatgcgggttgaccaagaggggaggagcagggttggatccaagcattattttcgatatgatatccgtggccaagcatgttagccaacggttcatctctctactggactccgagatcgcagctgctgaagcagtagaggctgaataaagaaaaagattcagaagatgatatcctgatcagtactgactactatctgtccttgcaaatgctttgcaagaatgtactatcttcctactgcaattgccattgttcgcacaagctcttaggtttggtattatgtagtgtcaagtgtagcgacatatgttggtgaaatgttttgttttagaggcatgcagtttatccaatcatgcat

SEQ ID NO: 2869 - DNA, 328 bp, Avena sativa
gaacctcaagacctaccccttcgtcaaggaaggtgttggtctagtccggtaacccttctaagtctcgtcggcggccactacgacttcgtctccggcaagttcgacacatgggagctgtaaatcttcctacacatacatacatatacagacgtacatataccaagatatcgtccgacccaccgaccgaccgatgtggatgcagtgcgttacttgttattttgcagtaccggatgccggatggctcgatgtgaatttgaataagcaatagttctttctaccgttttctgacgccggttgtaagtgtgatgcataatttgatcgccttctg

SEQ ID NO: 2870 - DNA, 937 bp, Avena sativa
cccaagttggttctgccataccttcaaaagcaaagaacactgctaatgttctacaagagtcatttccactgctttccaaactattacctggttatgtccctgacatcagagtattgaatggcagtgttagtcttctgtccaatctttccccaaaacatcctgacatggtgggtgccctgaaacagcacccatggatgttgactggctctgggaagcccccgttaccctctgatgtccaggtgcctgctagagtgatagcacttgaaggctggggtgctctatggagaggacttagaccagggatagcccgagactgtgtctttggtgggatgttcttttcatcctggcaattcatacacgaggggatgcttacttggaaatctgttaatatgaaccctcaacccaggaatttagacgaagcaggacctgtgcaccctttagcttctagtcttgccgcaggcttctctggagttgtagcagctgctgcttcacatacatttgatactgccaaaagtcgttcacagtgtactgtgatacctaagtatatagcaatggagaggaggtttcataaatggagggcaccaggaatgtggatagagcggatgacaggaatatcacctgctgataggaatgttctattccgtggcattggactacggatggcgcgcagtggaattgcatcatttgtacttgtcgggtcctactattttgccatagatcagctcttgtagatggcatgcagagaccccatttggtgaaacaaacgctatttatatgcgtctgctgaacaaccatagaattaactattgggacatcgctgtctcatctaaacttgattggagttgcatgctccaagatagaatttttgctgctaatgtaaatgttcataacagaactgtagttggtacttttggttttgtagcttgtgttgaagaga

SEQ ID NO: 2871 - DNA, 544 bp, Avena sativa
agagatggaaagtgtgatttcagcaaagaactttgagattgcaaggctatcagatagggtccagtactatgaagctgcaaacagggagatgtctcagagaaaccaagaagctatcgagatgtccaggcaacagcggaacaagcgtaagatgagacagaagtggttctggggttcagttgggatagcagttaccctcggcacagcagccattgcctggtcatacgtacccgccagccagccccccgctcaagagtcaaatagcgccaacaccatcagtgattagagctagctgaagatgtgtcttctctcgcagaggtcctaacaaaagctccaactatacttcatagggagaaagacggttgtataaattttctcttttggtgatcggctgtgatcactacaatcctcaatttgccgcttcctctgtaaagatgtggaatgatccatctccgtccaggactggctctattcctcttaccgtaartccctcgttgcatagttggttgagacaaaaaataatacggagaatgtggatatgcgttag

SEQ ID NO: 2872 - DNA, 536 bp, Avena sativa
ttccattgcaagaggattccctgatattgtctttctggatataagtgttctcccgctcataggggacatggggctagcagagattggtgaaggttgcccccagcttaaggacattgcactgtcgcactgcccaggggtgaccgatgttggtttgggacacctcgtcagggggtgcttgcagctgcagacaggtcagttggtgtactgtaagcgggtgaccagcaccggagtagcgactgtcgtctcgagctgctctaggttgaagaagctccttgttgaggagacgaaggtcagtgagaggacgcggcggagggcaggacccatcttatcattcctctacaatgggctttagcttcaaaagagaaaaaaagttagtgttgtaaactactataaaggaagcttctctgttatttagtctttcaaaagcagcttcataccttactgaaccttcagcaaatgttgttgtatcaaagtcaaaaaattagtcggaaccaaattaaatgttgttgtgaacctaaaaaactcgactggtgaat

SEQ ID NO: 2873 - DNA, 578 bp, Avena sativa
agggatacctgcgcttcctcgtcgacagcaagctcgtcttccagacgctcgaggacatcgtcgaccgcgccgccgtcccctggtatgcggagttccggaatactggattggagagatcagaggcactgaagaaagatctggaatggttcagcgaacagggtcacacaattccagaaccatctgctcctggcactacatatgcttcctatctggaagagttgtctgagaaggacccccaagcatttatctgtcacttctataatgtttactttgctcatactgctggaggccggatgattggcaaaaaggttgctgagaagattctggacaagaaggagctggagttctacaagtgggaaggtaccctgtcccagctgctgcagaatgtccgtgacaaacttaaccaagttgcttctagctggtcccgggaagagaaagacaactgcctggaggagaccgagaagtcgttcgcctattcaggacaactcctgcgccagatattcacctgagccaagaayaatctccattctctcttacgacaaacattgtaaatattaagtcatgtctgcgcactgggg

SEQ ID NO: 2874 - DNA, 613 bp, Avena sativa
ggttctgacgttgcagtttgcgtgaaggacgtgttgtttgagcctgtgcgcaaaacacaggacgccatgtacttctttaagacggatggcggcatgtggatgccctgtgggtcgaagcagccaggcgctgtgcagaccacgatgcaggagcttgcgtccaagggtctcgccgcacagatccttcctcccccgatctcgaagactgacttcgagaaggtcctcgcgaggcagagaccgaccgtcggcaagaaggacctggaggtgcacgagaagttcacgaaggagtttggcgaggagggctgatgtacactccgccgagaacactctcgactcgtgcacagccgcgccacaaaatgtatattgtttgatttacacacctgtatactctggcagtagctcgtgttgtgcggcggaggcggctttattaatgcgctgggctatcatcattttgcctctgttgtctaactcatttccatttttacaccctgtcgttatggttggaattttccgcaattgtattaaggaaaataataattttaaggtggggagccattgtggtgcagcttgtatagtcgttttgtttgctgttgtctcagtagttattttctgattg

SEQ ID NO: 2875 - DNA, 792 bp, Avena sativa
caagagtcactgctaaggcaacaggagcagcaaaaacttgctgaagagtccctactgaggcaacaagatcagcaaaagcttgctgaagaacaatcccttactgcttctctggcggctgaaaagcgagagatggaagaaaaaattgctgcattaacaaagaaatcttcagaagaggcttctgaatttgctgcacgcaaggcattctcaatgcaagatagggaaaaactcgagaaccggttgcacgatatggctttgatggttgagaggttagagggcagccgccaaaagctgttgatggagattgattctcaatcaacagaaatagaaaatctgttcgaggagaactcaaccttgtcaacttcataccaagaagctatgtctgttgcgacgcagtgggagaaccaggttaaagattgtctgaagcaaaatgaagagctccgtctccacttggagaagctaagaagtgagcaagctagcctgttgagagcaagcaatgctcatgtccagctagatgggcaaagtgagaccagcatcccaaactcaccagaattggtgacagagaacttctctctaaaggatcaactcatcaaagaacagagcagatccgaggggttatcggcagaaataatgaaactttcagcccaacttagaaaggcagtccaaacacagaacaatctcgcatgcctatatagacctgtactaaaagacattgagggtaatctgatgaaaatgaaacaagaaacttatgcgactatccaatgatcttgctaaagaacaagtgcaaagtgtcag

SEQ ID NO: 2876 - DNA, 800 bp, Avena sativa
caccaacaacccgagctctggaagctctagcatgtggctttatggggacaaaacagaaaggtggggaaggaaacttcccatcttcaagcaggagcagcagacctgtccgacgaccacgaagatcacctgatgtcacagttccatttccttctgatggcgagggaagtagttctcattttactgatcaagccattgctgtcaatgaatggggcatgagtaaccatcagtatcaaatacttcacagcagcccctcagataagtccagtgagaaggggatgcatgcattgtttgtggcagacaagtctactgataaaggaactcaggaatttgtttggcataccgtagatggcgtgaaaacgagtaacgatctccatgcccagcaattccgttgagttattcaacctttatactgtggattttctgctggttaagaaaatgacttgatcttatggtcataatttgacccgcagagatcacagaggcttcttcatcaaacttctgtctggatttaggaatcgcgttggggaagcttatacagataagagtgaatttcagctatagttaagtccatttcaatcaccgaatgtttggtcttgattgttatcaaggatatatgattctgaactacaaacatatgatttatgttggtcctgccttttctgataccatgagtgaagataaagaggaagaaaacaaccgagtgcaagaatagtgccccgttgttagaagccgtctcataaagcttttacttcattttatgtgtggagattttcctgatgagttatacctatactcttgta

SEQ ID NO: 2877 - DNA, 992 bp, Avena sativa
atcctcctcctcttcttctcggagatccggctgtatctatattctgctacagagagtaagctcacagttgatacctcaagaggagaaaggttacatataaattttgatgttacattcccggctcttccttgttctcttgttgctattgatacgatggatgtcagtggagagcaacattatgatataaggcatgacataataaagaaaagaatcgaccagcttggtaacgtaattgaatcaagaaaagatggagttggttcccagaagatcgaaagaccactgcagaatcatggtggaaggcttgaccacaatgaggcttactgtgggtcttgttatggttccgaagagtcagacaatcagtgttgtaactcctgtgaagaagttcgtgatgcctatcggaagaaaggatgggcactcactaatgtagaatcaattgatcagtgcaagagagagggcttcgttcaaaggttaaaagacgaacaaggcgaaggatgcaacattcatggatttgtagatgtgaataaagtagctgggaattttcactttgcccctggaaaaagcttggaccatgcattcaacttccttcaagatatgttgaatttccagccagaaaattacaatataagtcacaagataaacaaactgtcttttggcaaagatttccctggcgtcatcaatcctcttgatggtgtagagtggaaacaggagcatacaactgggttaacagggatgtaccaatattttgtgaaggttgttcctactatctatactgatattagggggcggaagattcactcaaatcagttctctgtgacggagcactttagagaagcagttggccttccaaggcccccacccggtgtatatttcttctacgaattttcaccaattcaggttgactttaccgaagaaaacacctcacttcttcacttcctgacgaacatatgtgccatcattggaggcatattcaccgtggctggcatcatagattc

SEQ ID NO: 2878 - DNA, 826 bp, Avena sativa
gctaatctctgcccttcttacatggatgaagatgttttctggaagatttacttcagactgcttgagtcaacccttagtgaccataattcagaggaagataaccagaatgtgcaaggttctgtgcatcacgtaaatgagattgagtctccacctcatgtctgcgagatagagagcgagaaaagcacccaagaaggttatcagtcttcagaaagccacgcattgaccaaaacacgatctgagcaaagcattgaccaatgggtgttcgcaaagtcaaaatctgagacgagcatggaccagtggtccgaagtaccttcggatgtagaatctttcagagaaggtaaacgatacttcagtagcgaggccgaggagatgagcgacgtcgacaactccaacgttctcgtcatggacaaatacatggattcgctcctgccagatcggaggagcctcccgtacgccagttcctccgtgcgaagggattcggtaagaaggaaacctgccaactcctctcctgactatagccgccggcctccgcagcccacccagcccgcatcactgtcgaagaaagaatcctgggatctcattcaggattcagatttcgaaatacttgacagttagcaataagagatcgttgttatctctatggccttttcatttttcttcgtttccctgcccttcacctggtttgtaaatggcggccttcaggtggtgccaatgatggttggaaaagatcttcacagtaataatatcgtgtgcatacgtctctctgaatctagagtatatatcctcttataccacatgctgtaacataagaaatttgacatggatc

SEQ ID NO: 2879 - DNA, 814 bp, Avena sativa
gaaagatttggcagttgaactgaaatccgggaggactactcctgatgaaaagaaagaattggcccctcggcatttcttcttttggagtccagaaaagagggcttccatatttatatacaacattcctaactcattcaaagatcaggtgttcgttgacacagttatcaaaaccttcatatgtccaccaggctttatttggagtgaagcggactacggtggtctgttagctatcatgaatgattaccgtgaattgaagttcaggacaaaatacatggggcaaaaaaaagactcactaccttaagttcgtttctggatgttacactcatgagaaagagtttacggaaccactctatttgaagaccgttgacgcaacttttcgtgtacatgatcctgagcttgttttgaggcttatgaagcttctgaaggcttatgaagctgcactccagaagaaggcatagattgcctttgtagtggatgcgtatccttgctcagcgctctggaagatttcatttgggccatcatgcatgcttcttgacatattcaccttaagtacactgggatgatgatcgttaacctgtagtttactgttttaatcggcaagtcttctggctgtcttctatatgatgagaatctttctacttctctggcgagacgaatccagtgtttgcgcttgtgagataacagaagattgtgcatgtattccagtttgacatttatacttcgattagtattccgggatagtgggaattattttttcgtgtttagatgatggattttttcttgggaataaaatttaatatarccaattacccaa

SEQ ID NO: 2880 - DNA, 675 bp, Avena sativa
cagaataccatgagcaccatcaagatcgaggacacaagagatatcagtgcaaaacaaacaatagttgtaggtagacacacagcatcctatcactgtcagagtacaaactagggcagatttgtaacatggtttctccacttaaactcaaaactgattcgaacagcaaagcaagcttaattcattttacagcttagttggctgcctgttcttcttcttgatgccagacttggaaacctggaggctgcggtacacagagctcagccttgcaagagccggcttggtcagatcaggcctgtagtagttgttgcaaacctggttcttgacggccttggccatcttgcggaactccttgcgcatcacattcttgtgctggagcttagcaggggcgttctgcttcttggtctttgtcgtggagaggacgacagccttgtcatctcctgcagacggctggatagtcacggtcttgctgttcgccaggccagagaacttgtaggagtggacattgtagaggttgttgggctccttgctgaactgcaccttggcgttgctgttgccgaactgcttgatcaggaagcagttgttcttcttgacaagctcccagacgagagaccctggaacggtagtcattttacttcgccggagatgaggaagccgcggcgccgccttgctctgctc

SEQ ID NO: 2881 - DNA, 989 bp, Avena sativa
tctccgcatatctcctgttggcctggtttacgtgcccatcctcctgagtcgacgacggaagctacaaataccctggtactggtacttagcgctggccttcgtcgatgtccaggggaactatctggttgtcaaggcgtaccagtactcgtccatcaccagcgtaacgttgttggattgttggactgttgtgtgggtcatcgtactcacctggtacgctctaggcacaagatactctttctggcaatttctgggggcagggacctgcgtggcagggctatgtcttgtgctcctttcagatgcaaaatctccagatgaccaaggtccgagtaaaatgccacttctaggggatacccttgttattgctgggacagtttgttttgcatttagcaatgttggggaggaatactgtgtcaagaagaatgatcgagtagaacttgttgcaatgctcggactatttgggttgcttgtcagtgcaattcagatatgcatattcgaaaggaagagcctagaagcagctgtctggtctccaacaatgataagtttgttcgcaggatttgccgttgcactatttgtgttctacacctttactcctttagttcttaagatgagtggatcaacattgtttaatctttcactcttaacatctgacatgtgggcagttgccattcgagtattgttctatcaggaacagataaattggctgtactatctagcattcacagttgtggcaattggattgatcatctactcgctgaatgagagttctgcgggcgatggaacagccacaagtacagaagcaacggatcaatatcaacaacttcaaagtgaggataactcaacaggaagtggctgtagtatggacagccaagaaaggaagcatcaagaagaagctcacatatgttaggggactcaatgtaaaatgttagctccacgtttcgttaaagccataataaaatatggcagtagaatcttgtgcagcatgcagaact

SEQ ID NO: 2882 - DNA, 668 bp, Avena sativa
ggaacctgaggttgaaatttctcaagacgggaagatcagggagattgcggtggataatgctgatttgaaaaacagaaacgatgaagcaaatgaacaacttctggcagctcttaaagctgagaaagaggaactagaagcaacacttaacagggaaggactgcaaacagtacagcttaaagaagagataactgaagcagaggccagaaatactgagctgacaaaggagcttcaagctgtccgtggccaacttgccgctgagcagtcaagatgtttcaaacttgaggtggatgtggcggagctacggcaaaagctccagagcctggatgcactggaaagggaggtggagctgcttcgaaggcagaaggccgcttctgagcaggcagcattggacgcgaagcagaagcagggctctggtggcgtgtggggctggcttgtgggaacccctcctgatgattccgattcatgatagagcccggcttcttcctccccatactacatacaggcagcgattcatatacttgtaccatttacaaacgatgttcttttgacgaggtcccatagagtttctttctttctttttgtccccattccatgacttctgtgttcatttgacgaactgagacaataaggtgtttcatagctgaaaaatattaatttatccaaaaaaa

SEQ ID NO: 2883 - DNA, 1005 bp, Avena sativa
atccgagttccctgtataattttctttacccgagcaaagagctacttccagatgacaaggaaatgagtatatttgatcatctggaggaacttcgtgagagaatatttgtatcagtactggctgttggagcttcaatacttggttgttttttcttctccaaagatataatcaagattttagaagcacctgttagtgttcagggtgtccggtttctgcaactctctcctggagaatttttctttacaacattgaaggtttctggttattgtggtcttctaatcggaagtcctatcattttgtacgagatcatagcatttgttctcccaggtttaaccaaggatgagcggaaattcttagggcccatagttttgggttcttcagttctgttctaccttggaattttgttctcctacactgtccttgctccagcagcactgaacttcttcgtgaactatgccgaaggagcggtggagtcgatatggtcaatagaccagtactttgagttcgtactcgtgcttctgttcagcacagggttatcttttcaggtccctgtgatccagctcctgctggggcaagtcggactggtttccagcgaccaaatgctatcgatctggaggtacgtcgtcgtgggcgcggtggtcgccgccgctgtgctcacgccctcgacggatccgttgacgcagatgctcttggcgggtccgctgcttggtctgtacctgggtggcgcatggatggtcaggctaacagggcgctaactgcagctgcaacatgtccttagcgtgaggagtgtagtatacaaatcttcgtagccgtggtggttgttctcgcttggtccctgtttgtaacatagtcttgtataaaattttctcggctccttttgagtggaagattatagggtttatttatgatccttcttatgtgatctgtgtgcacgtgaagttcatgtcaccacaagagtcacaaaatttagcaaacacggtgaaactttgatactaccaagagtag

SEQ ID NO: 2884 - DNA, 796 bp, Avena sativa
agcagtctattctgcacttgaacaggaaatcgctctgcttagtcagttgaacatgaaaatatagtccagtattatggaactgacaaggaagaatcaaagctgtacattttattgagcttgttacacaaggttctctttcgtctctctatcagaggtataaattgcgagattcacaagtctctgcatacacaagacagattctcaatggattagtttatctccatgagagaaatgtggtccacagagatatcaaatgcgcgaatatattggttcatgcaaatggatctgtaaaacttgcagattttggattggcaaaggagatgtctaaaattaatatgctgagatcatgcaaaggaagtgtttattggatggcacctgaggttgttaatccgagaaaaacatatgggcctgcagctgatatgtggagcttgggctgcactgtattggaaatgctaacccgccaaataccatatcctaatgtggagtggacaaatgctttctttatgattggaagaggagaacaacctcccatgcccaactacttgtcgaaagaagctcaagatttcatcggccagtgtgtacgagttgatccagacgagcggcctaccgcatcagaacttttggcgcacccatttgttaacaggccacttcgagcttctttcgattctttgtctcctccgaccaataggcaatagtattgatagcgtggtgtctccgtttgtgcaaccacggctcagctcctgaacaggtgagctgtttatttctgtcgaacagaaaggacaagcttcctatatgt

SEQ ID NO: 2885 - DNA, 679 bp, Avena sativa
gtcattcctgatggcatggtgaagaatcaaaagctggcagcaaatatcctcacgcctacaactaaagctgctgatcacgatgtgcctatcactcctgacgagatagtcaagtcagggctgatgtccaaggatgattttgatgaggcaagaagcaaagccttgagcttatttgagtatgggcagcaagtggcattagagaatggagtaattctagttgacacaaagtatgaatttgggaaaacagctgatgggacaattatgttgattgatgaggtacatacacctgactccagcagatattggattgccaattcatatgaggagagattcaaagctggccttgaacctgaaaatgttgacaaggagttcctgaggctgtggtttaagaataattgcaatccatatgaagataaggttctaccagaagctccagaagaactagtttctgaacttgcttggcggtacatattcctgtttgaaacaattacaaacacgaaattcgagatcccagaaacacaggaaccgatccatgaaaggatatcaaggaacgtggcagaagccttacggaatttataattgctgacagccgcaaaaaggcacttatccatgacaataagaggcgcacttctggcactaagattcccggtagttgctatatgcacatgagctgatgagtaat

SEQ ID NO: 2886 - DNA, 770 bp, Avena sativa
gcagctacaaggaatcgacttgacaggctcatgtttaggacaaacgagcggcttcctggtgctgtactgcaagcacaagcacgtgttctagagagactgagaggtgtttctatcggttcatctgcctccaggccatcgatcacattagatgaatttgcagctacggatgtgtttagaatcatcgacttcggaagcagggaagccccatacgaggcgaattggcctagctcatcgtctgtgcatcccagcagcgggtcggatgaagagaccccatcagtgggttctagtaccctgagcaggacacgtggtctgagcaagaggtccttccttcggctacagatagagatatttgaggctaagaaggatgataacagggaggcatcgcctgaatgctcgatttgcctcgatggcttctacgacggagatgagctgataaggctgcgctgcgggcacaggttccactcaacttgcttggagccatgggtacggaaatgcgcagattgcccatattgtcgaacaaacatacggtcgcgctcctgacatcaaaccatcagttcggaatcagtcaccttgagtaggactataaccagacagtaatatgtgttgttgtaattcactgttttgtgcatgtctactgcaccaggcctgctatggcgtcatgtattacattttacttgtgtgtggatatcatgtgtggatggaggctgatagtactatatagaaacttgccagtaaatctgaaatattgaggcagattgactaacaaaaaa

SEQ ID NO: 2887 - DNA, 731 bp, Avena sativa
ctgcagtttatggatggtgaagatagctccattctccaagggccgcctgttgttcagttagtttctgttactagaacaagcgcgaggcttcgtaatgtacagccagaagttgatctgtcacgaagttatgaggtgctaaagcggcacaagaaaagcactgaaaacgaacaaggctcgactatcaaagagtcgactgcgagagatgaaaggtctcctgtagatgtggacttgtcaaagccagtttccccagaagaagctccaaaaggaccagattcgaatggccctctgaaagaagctgacgaagcaccagctgaagcgccagcagtagctggttctcctcccgaacccatggtgactgataatggcaaaggggctgccatgcctaccagcgatgacacgcttgaacagctggaagctttgaagaagcgcttcatggagctcaccgcaggctatggggtgccgcagctcgagaggctctactcccggataatgaaaggtgcgatcgagttgagaggcaaagagaccaacgaggaccacggacggttagttgttaggcatttgttggcatttgttgagaacagcgacaatttttaactcgagcagcttgaagagattactagtttttcccgtgtacattctattgtgtctccaggatctcaaagaatagtggggaacaaaaactctgggagctgtccatgcctcctgatgtaacaacattctctgaaatgctc

SEQ ID NO: 2888 - DNA, 935 bp, Avena sativa
cgggacccgggcagggtgccgcccgcctacctgcccgacgtcgaggacgccgagatccccgtccacgaggtcaagcgcaagggtggtgatttgagatattgccaaaaatgtggccattataagcctccacgtgcgcaccattgccgtgtgtgcaagagatgtgttctaaaaatggaccaccactgtatttggataaataactgtgttggacatgagaactacaagatattcttggtctttgtattgtatgctgtaattgcatgcttctattctatgattttgattgttgggagcttcttgcacagtgctccgaaagctgaacagctaggcagtgattcttctaaaacatcgattattatttgtgggatccttctttgcccattaacgttggcgctgtcagtgctcttggcctggcatatctacctcatattacagaacaaaactacaattgagtaccatgaaggagttagagcaatgtggttggcggaaaagggtggagacctttatcatcatccatatgaccttggtgtctatgagaatcttatttcggtgctgggacgtcgcatattctgctggctttgcccagtatcaactaatacaggcaatggccttcggttccgtgcattttacgatattccattatctacaccaccgtgtgatttacagaagatagcattacattcacagtaggtgggcggatacttaaaaccctcaattgtaatatacgggagaaggtgcctgcagctccaggagtatttcctccactacagggatctattccgagtttggacatgaatatattgacctagtcgttcttttgttcttcatactatgagaaagatcgctgttgcctcggccataatctggagtgggctatgcttgtatgcaaaatggttaaacaaggcaattctgttgtaaagtaagtgtacatactg

SEQ ID NO: 2889 - DNA, 622 bp, Avena sativa
acctgatcgtgatgactcctcaagacctattccgaaccaggaggtgagcattgatgggaggctcatgggagaacctgatcccgatgctagtacatgtggagctgttccggaatctggaaataagactcaagtggagatcaatcagcagggaagctcttcaatgttgacaactgatcctgatcctgattatcaggctgctgatttgaacagcaacgagctgcaaaggatagaagagccagtggcagctctctgttcgcgtctccagaaggctattgaaatgcttcggtcacaagcaacgccttcagaggcagcttctgtacttcaaacactcttcaaaattataaagaatgtgatagagaacccaaatgacatccgatataagagattgcgtaagtctaatcctcatttccaaaggagtgtggcgaattacaaagctgcgatggaggtgcttgagttgatcggcttctgcgaggatgtcgtgtcggatgagattggtcgtgcagagacatacctggtattgaaaggatgatcctggactgctgtggattgtgaagtcctcacttgagtatcaatgggatgagaacttcctcctatgtaccctgttgactgtatgcctgtatat

SEQ ID NO: 2890 - DNA, 959 bp, Avena sativa
ttcacgtagcacgtggtgagaagttcttaaagattgaacagcctccggtatcattcttgcaaactatggaggaatatgtgacagatgctcccgcgatgaaagataagaccatactggctatagaatacaacaaagagcctgaggaggaagtaaagccaacttcacctcctcctgtttcagaacccgaagtggaacaagagccggagccagaaccagaaccagtaacagagcaagcacctgcatctgaaccagctgacttgctgggtctgaatgaaacacacccttctgtagccgaaatagacgagaagaacgctctagcgctggcaattgttccaattgatgacgtgccccgagccgctccctcttttgaaaatggagtcacaggctgggaactggcccttgtcactgcacccagttcaaatgaaactgctgttgcttcaggaaaaaaattggctggtggactagacttgctcacccttgacagcctatacgatgacgcgaaccgacgagcgagccagcccacgagctacaacccctgggagaccccgggtgcggctccaatgatgcaacagccagcagcaatgccaatgcaggacccattctacggctcgaacgggtacgcggcgccccacgcggtgcagatggccgccatggcccagcagcagcaggccttcatgctccagcagcagatgatgatggccagccaccagcagcagcaggtccaccaccaccagcagttccaggcagcccccgcgaacccatttggcgccaatcccttcgcgcccgctggttcccaccacccttacggtggcgccagctctggaatgatgccctcacaccggccaaggcaatggctacaccgggctgatctaggcgggaggtgtggtggtttggccagttcacagatggaggaaacttgttcttcccatcgttcttttcacgtctcttttttctgtctg

SEQ ID NO: 2891 - DNA, 572 bp, Avena sativa
  modified_base (537)..(537): a, c, t, g, unknown or other
  modified_base (551)..(551): a, c, t, g, unknown or other
gccaacatggagggctgggccgcggaggtcgacccggaggatctggacctgatccggcaggccggcgtgctactgctgcaacgggagatacctgattgggtcaacattcaggtcgctcaggctgcaaaaggcgcaggtgtgcctgttatcctggatgcaggtggaatggatgctcctgtcccgggagaattactgggactggtggatattttcagtccaaatgaaacagagctagcacgattaactgggatgcctacggagacttttgaacagaccagccaggcggcaggagcatgccataaaatgggtgtcaaagaagttttggttaaacttgggtcacaaggatctgctctgtttgttgagggagaggaaccaattaggcagcagataatacctgcgacagaagtagtagatacgaccggcgctggtgacaccttcacctcagcttttgctgtagctctggtcgaaggggagcctaagaaagagtgcatgagatttgctgctgctgccgcctcactgtgtgttcgagtaaagggngcaatacctagtangcctgaccgagaatctgtgat

SEQ ID NO: 2892 - DNA, 882 bp, Avena sativa
ttctccctgacctgacaatccaaggatcgctaagacttaactctacattgaggacctttcccaatacattctacttcagttatgctacaaagaaaactcggaagctatttggaattactgtgccgtcaagcgtccttggagttcacccaatgctctttctcagagttctccagatgtgtatgtggcggtaccctcaaagcgcgcctctaccttacaaaggatacagggatgaagattgggaagataacgatggggctttgaacacaatatccatgacacaccctcgcattccagtagagcatcctaaccgttttgtactagatgattctgactgccatcctttgcagcctgggatatggtattacaagatcattgaaggcgatcacatccttttcatcgtaaaccgggaaagagctggagtgcagtttgatttgctgtacgatggcattttccagcgctgcagaaagcatgcatttaggaagagccccccaaccgtgccaaacgaaacaagccaatagaagattacaccctcagcattctaggtagtactagtgagcaagagacaaggtggccacaaggggcttttttcgcttctcttcatctccggcctccatgcatgtagatgtagatgtaacttccacattgtgaactgtaaatttcattgtccgtccgatcaaatggcatgcttgattttgccggtttcttggaagcaggagcgttgcagcttgctcttcgctgcccttacagcacaatgcacttgaaggaagcttgtacttgagcaggatgttgcagatcagcaccagcatctgtccatgaccttaatgggggcttattgagattgactcgcatgtatcccaatgtggctgtacatattacggtctg

SEQ ID NO: 2893 - DNA, 662 bp, Avena sativa
atggcgctcgacgacgccgacgtccgggaggaggcgatcggcatgggggtcatccagtcgctgctccagctgatataccctgacctgccgtactcgtacaaggccagggaggtcgccctcgccgccatctggttcttctgcttctcctccgccagctccatcgacgacctcgccacctcagacgtcctggcatggctcctctactacctcaacaacggcgactacgccgtcctcgaatgcacgttaaagatcctgaggcacctctccgaggtttctgaagagcacagcaggatgatgggcagggcagggtacttcagtgcgctggcaagcctgctcgccgcgaaatccttccgggttcgcgagatggcggcgcaggtgctctcgagcctgctgtcgcatcacccgaaccgcgtcatcttcatccaggacggcgacaatctggacaggctgctgcagctgctcgatccttccgagggcaagctgatggcgaagggcctgatcctctccgccatcgtgtccttggcggagaccagcggcgggaggaagaagatcgtgtcgtcggagcatttcggtagcctgaaggagctggcagactccggggactatgaagcgaagaagctcgtgaagaagatcgccaataacagactgcagtcgatgttcag

SEQ ID NO: 2894 - DNA, 726 bp, Avena sativa
acggtcgggtcggcgcagtgcagctccttcgacagccggctctacgcgtacgggccaaacaaggggcaggaccccagcatggacccggcctacctggcgacgctcaccacgcagtgcccgcaggccggcggcgcgcccgccacgctcgtcgccatggaccccgtcacgcccaactccttcgacaccaactactacgccaacatcgtcgccaaccggggcctgctcgcctccgaccaggcgctgctcgccgacaacaccacgctgcagcaggtcaccggctacaccaccagccccgacaccttccaggccgacttcgccgccgccatggtcaagatgggcgccatcggcgtgctcaccggggccagcggctccatcaggaccgactgcaaggtcgccaactgaacctcacctcatcgattgggttgctcggactcgtgattatgttcaaatgctgtacggcgcctgtatatgtagttaggtagagtgtctgttttggtcattcgtttggtcgacctgtacctgtgctagctagcttagcttagcgtagctcgaccgtcctctctatcttccatacactttctttctctgcctgcctgtattcctgatagcctctgtatgtaatcatgtagctactggactgagaactgtatgtattgattgggtaaccaatgtaccaatagtaatacatacagttcttcagtccagtagctacatgattacagactt

SEQ ID NO: 2895 - DNA, 691 bp, Avena sativa
ctttggtgagctatttggagatggttcagaaggtttgcctgtcacgattggccttgccgcagctactggtttcggattacttgcctacacagagatagaaaccgtgctgcaatttctgggttcagctgccattgtccagctggtggtaaacaagctcttgtatgccgaggaccgaaagaagacattgcaacagattgatgacttcttcaacaagaaggttgctccaaaggagcttgttgatgaaattaaggaaatcgggcaggctttgctgccttcttctggtgaagctaagagccaaccagcagcaacagtggcagccccagttgctgctgcggcagctgctgcaccagtagaagaagcagccccagctgctgtaccagttgcagaagccagcacagaatcgcctcctgagaccgcagcgtcgagacccctttcaccatatgcaaattacccggatctcaaaccaccatccagccctaccccacccgctgcagacggtaagaccgaggccaaggctgaggccgcagcaaccgaatccccggtggaagttaacttggcagcggaatcagaggctgtcacagaaccgcctcctgcgaagacgagacctctttctccatatgcgaactatcctgatctcaaaccgccggcctccccaacgccccataccagaaccttgaactatattcttctg

SEQ ID NO: 2896 - DNA, 699 bp, Avena sativa
cagatggagaagaggaggaagaggaggaaggagtcgaaccgcgagtccgcaaggcgatctaggttgcgaaagcaacaacacctcgacgacctctcttcgcaggtggatcagctgaagaaccagaaacaacaactcagcatggcagtgagcataaccacccagaaccttgtcgcagtggaagcacaaaactctgttatgcggacacagatggtggagctggagagcaggctgcgcgccctgggagagatcatctactgcatgaactcaatcaccaacgctacaaatcccgccaccatgggcatcgcagcaagcagtgcctgtgacatttttggcaccagcagcacatggagccagcccatagacttgtaccagtgcttctaagggaaaataagaaatgaaagaatggttgatattgtcatagatggtagggccagaaggcatcaagttctgtttcaatcatgtagggcctttgtgtcaccattgatgcgtgcctctcttgattgattgtttattctgtgaggttcggtgcaatggttggtgagggtaggagtgggaatcaatgggtcagtttgtcaaagagagaggctgggaattttgtactggccctgatggtgatgtctagctagtaaaatgtggatttgatgcctcttcatatgcaaagtggctctccactataatatacataattatctccaaaaa

SEQ ID NO: 2897 - DNA, 744 bp, Avena sativa
tgcagatgacattgcagagacagtattgctgaatattttacgtggtgatatcgcaaggttaagtaggtgcaccttcataactactggtgaagatggaccgatcccaagatgcaagcctttcaaatacacctacgaaaaggagattgttatgtatgcgtatttcaaaaagctggactacttctccactgaatgtatttattcaccaaatgcatatcgcggatttgctcgtgaatttatcaaagatttggaaaggatgaggcctagagctatattggacatcataacctcaggagaaaattttcggatatccacgacgacaagaatgccagagcaaggaacatgtgaacgttgtggttacatttctagtcagaaactatgcaaagcgtgcgtcttgctggacggattgaatcggggcttgccgaagctaggcatagggaggactgctaaaagtggcgctggagctgatggtaacggtgagcgacaaggcaaacgtccagagaggaataggttgagcctacaagggaaacacggcaatttggacttctgattatttgctgtagtggccaccgaggaaaacttcctgttgccggtgttgtttgttagttcgctgtaatgtactataataccctgtttaaattcatggcgatcgctgcttgttaagacactgatagaaatgaaatacagtgtagaggaagttggaagtatctggtgtcaccagagaattgttattcaataggaaaaaaa

SEQ ID NO: 2898 - DNA, 770 bp, Avena sativa
ggaatttgtaaaccatggtggtgtcctatttaaggtctacattgttggggatgcaatcagggttgtgcgtaggttttcactgcctaacgttgatgctggtgatctgtcaaataatgctggagtgttccggtttccgagggtctcttgtgctgcagccactgcggaggatgcagatctcgacccttgtgttgctgaacttcctccaagaccactgcttgagatattggcaagagagctacgccgccgactgggtcttagattgttcaacatcgatatgatcagagagcatgggacaagagatcggttttatgttatagacatgaactattttcctgggtatggtaaaatgcctgggtatgagcatgttttcaccgactttctactgagtttagatcagaaggagtacaaacgacgactaggctatacctctggtgaggggtgaaacagaagtcagccacccccttcccctctgttcgtatgttgtctcgtgttcgctgtgtgtacaaatgtgcatgtcaggaagaccaatcatctcgtccgcagtagagttgggcatcggtagtttgataaagcagcgatcgaggactgtgtcaaactgtaattattaattccaatttgctaactattctgttcatgttctcgaataatcttgttcggctaagtactgaaatcgagcgggcatccacagcagatgtccaagaagtctcatacttccatacttaattttsttrgaacaatatactctwawcactagtgtctagatagatacg

SEQ ID NO: 2899 - DNA, 677 bp, Avena sativa
ctctacttgtaggggaagatccaacacagtgctttgcgctaatatgtggcaactgccatatgcataatggtcttgcaaggaaagaggacttcacattcattacatattactgtcctcactgtaatgctctcaatggatcacggcaacaggaggaaaatgacatggtgcctaattctggcaaggagactcctactgatcgttcctatggcaacagtgcccaacccagcaatagccttgcagaatcaggtgttagtagtcctgttgtgaggaacctacctactgttgaagaactgcgtgcagcaagtccttctgcgagtgacttaacgactggtgaaaaaccacaaacaaagggtcctgctgcaaataacttgccaccaactgtagaagttccacctgccaaagatattagggttacggcaaccagtgatcaacctgccagttgaatcttcttttttcttgtaaagaaatgtatttgctagttccttgcctttctgccacggattgtcttctgagggtaaccgcagtaagagcttttgtcacagatttttgtgcctaccacctcgtgtatagatgtgggttattggtttgttctgcttggatggtttcactgggtagggttctagggcgatggccatttgccggcatcttgtccagttacttgaatgatgggttgctct

SEQ ID NO: 2900 - DNA, 861 bp, Avena sativa
agcttttgtgggggacctctagaggttgcgacagaggaggaggctcagaagctcatgagccagaatgagaaggattcggcaaacgaagcagaagttctttcagctcctccgaggctggtgtacaacaattttgtgttaagattggctcgagatatgttagtggcagttgccaatgaatgggatcagcacgttgaagtcatcaacaaaataattccccagcactggaaggatgaacctgttgcaaggatccttgaactctgcattcttcatattgctatggcagagatgacatcgagaggaacacctcacaaagttgccatcaatgaggcagtagatctggcaaaacggttctgtgatggaggtgctcctcggataatcaatggatgccttagaacgtatgtgaaagatcacatcagcaatggcactagccagcctgctgaatcaaaacaatgaagtatccgttaatatgtatcacaaaggcagttggaattaatcttgtttcggagaaaaaagaaagctagtgatatgaccgaagcatggactggagaaaacttgctctgtttgaccaatctccttcagttattaagagtggatggtggatctgaaatgaggcaaagaagctgggttcatggaaagctagaaatatcgtcaacgttaaactggggattacaccagatgcaccaagctagatgctgacaatgcacactcctgaatgttttgaaaagatgccgatgacacacactcacctgaaccaactgaaggttactgtttctaacatcttctgcacttgctgagccatgtggttcatcggatgacaagtgctgtaaacttagtgtaaatgcaagattgtaaggttatggt

SEQ ID NO: 2901 - DNA, 902 bp, Avena sativa
gggttccgtggcaacagagtaattggtaacatccattccaagtttcatgtacctgtagagatgaaacgcttgcctgttggagatggtatttggattgctcgtcacagaagatctcgcacagagtatgttcttgatttcgttgttgaaaggaaaggtgtcacagatttagttagctcaattagagacagcaggtacaaagatcagaaattaaggctaaagaaatgtgggctaaggaagctgatttatcttgttgaaggtgatccaaaccctttaaacgcatcagagagcatcaaaacagcctgcctgaccactgagattcttgaaggatttgatgttcagagaaccactgggtatgatgatactgaaagaacatacggccacctcacactttcgatcattgattactatagcacaaatttcttagccagtgccaacaattctcgagtttgcttaacctatgacgagtttgtgaagaagtgttctgaccccaagaagttaactgtgagcgacatattcgcccttcaacttatgcaggtaccacaggtgacagaagaaaccgcgctcgccgttacagagctctacccgactcttttctcgcttgctcgggcatactccatgcttggtggcgatacccgtgaacaagagcagatgttgaacaagaagaacaagatggtaaatgctggggctagcagaaatatcttagcttatctggggtgaagggtgaaatcttcctaccagtacatcgttcctgacttaacttggttcgactggccttctgtcaccatctcgatgatttgggtgccacctcctgtgatgaagctccattggttctcggagatttcaccgtaaaaccttcatgatctgaaggcaagaagtaggctcctttggggtgatgtggtgcc

SEQ ID NO: 2902 - DNA, 735 bp, Avena sativa
  modified_base (21)..(21): a, c, t, g, unknown or other
cggtgaagaccagggccagtncggatcgtgctgggctttctcgaccgtagcagttgtggaagggatccaccagatcaagacagggaagcttgcctcgctatcggagcaggagctggtggactgcgatacactggacagcggttgtgatggcggtgtgagctaccacgcgctgcagtggatcacctcaaatggtggaatcgccgccgaggacgactacccatacacggcgaaggatgacgcatgcgacaccatgaagctggcgcatcacgtggcctccatctcgggtttccagcgggtggcgactcggagcgaggcatcgctgaccaatgcggtggccatgcaacctgtagcagtttcaatcgaggccggcggggccaacttccagcactactcaaatggagtgtacaatgggccatgcgggacaaagctgaaccatggtgtcaccgtggtcgggtatgcgcaggacgagcagactggagagagttattggatcgtgaagaattcgtggggtgagaagtggggcgacaaagggtatctaaggatgaagaaggacattgtcggcaagccggaggggatctgcggcatggcaatccgcccgtcatttccactcatgtgagatttggtcatgtcatggattactattctttcttagtagcaggtctaaagttagtcaacctgtcgttacgtgtgcaacacttgtgaaagagtcattatatatacatgtacaactcttca

SEQ ID NO: 2903 - DNA, 771 bp, Avena sativa
gaggtggtggagccttcaatgtcatccctgattctgtcacaataggtggcaccttccgagcttttttgaaggagagttttaatcaattgaagcagcgaatcgaagaggtcatagtgtcacaggcatccgtccagcgttgcagcgctgtggtggacttcatgaacaaagataagcctttcttccccccaacgatcaacaacccggagctccatgatttctttgtgaaagtagctggcgagatgattagcaccagcaacgtgagagacaggcagccacttatgggtgccgaggactttgcgttctacgctgaggccgttcccagaacatactactactttgtgggaatgctcaacgagacccgcggcccgcaggcgccacatcactcgccctacttcaccatcaacgaggatgttctgccgtacggtgcggccatgcaagcgtcattggttggtcgctatctgctcgagcaccagcatgttaccgctgctaaggaagcacctcacgaggagctgtagatgatgcccttcttgagtgaaactggttaaacgttaactgcaatcgataaagaaaagaggttgtgcgcctagtcaaatcctggcttgcttgatgaacatctctgtacctccaggtgattatgcaacattttgtactactccgttcgaaaataagtgacttgggtttggctagattcacttgtatctacacactaaaatgtaatactccttctgttcataaaaagatgtcacagccctccctcccaaccaaaaaaaa

SEQ ID NO: 2904 - DNA, 728 bp, Avena sativa
agctccaagaggccacgatcttcgacaaagctcattggacattctcctcgactacgcaaccccaaagctccttctaaggctgacatactgctctccccatttgaaaactattctgcagaaatggtttggggtggtggtacatcagatagcctgaaaggaggtttatctcctcaaacttctgtcaaggtcgtgtcgccgaataaaaagagggtatctcccccgcgcattggtactggattgtctccgatctgcaagagcggcaggaagttgatcctgaaatctatcccttcattcccttctctttgtggtgatgtaaataacgtggatcctaagacctccttgcctccttgaactcatcagcatttgtcactttgaggtcatttcattattcacttgttgattccccaaatggccaatgcctcatgttctgcgtcggttctttcgtcctttggagtttgatgaacagccaagggagttttgtttcgccagttcgatttagagccttataagtattccatctatagtagaatgttgaataataatgtaccaaagtatcccttgagagccttctgcctgctagtaactatgtctacactttgtggagacagatccttgttgagttgcacatccctcttcatctgtataattaattatatatttattttatccatgaagctgaaacaaaccatcaagccttggatttgtacttggatcaaaatcggtaaagt

SEQ ID NO: 2905 - DNA, 809 bp, Avena sativa
ataaggatgtcactgttgtcatctgcccactatgtgctaaaggagttcgtctgaatccaaatgaagatgcaaacatcacctgggaggctcatgttaatactgattgtgatccatctaattatcagagagtaacaaagaaaaagaaatgcccagttcctgggtgcagagaagcactgacattttcaaacacaatcaggtgcaaagattgcagcaatgagcactgcctcaagcacagatttggtcctgatcacaagtgtccggagccaagaaaactggaacctaccttccccttttccaacatgctaaggagaagtcagaaagtcgagccacgtacaaacagcagtagcagtagttcctcctggtggagctccagccttttgagtgcagcaacaagtttcagatcatcagcggaagcaggaatgcaaaaactgagcattgccaccagtgaagttgtccagaaggctaaggatgggatcaccccgagcagcagtagcagtgacctcgtggagcaatgtgttcagtgcccagcaagattttccactgtgggggccctaatcgagcatgttgagaaatcccatgggaacaactcacaattgagccgtggcaaagtgacaatcgatgcttgtccaaaatgtagcaagggatttcaagatccagtgttgctcgtggagcatgttgagagggaacatggaggaacatcaagagcataaactactcccttttgtgctctttcgcccagctagatatcgatatgtatctcaatcctttctagaggcataggcgaaacgacagaaggacaagcatacaca

SEQ ID NO: 2906 - DNA, 687 bp, Avena sativa
acgccagggggcgcaactagccaggcctagtctgcaggcgtcgattgatttctcatattcttgacagacttgcgcccaggtgcgaaggccgccccctgtttacaggctttctgcttatattctactagcgctctgtgtctcaggcctagcagcactctttgcttaactacaatatattgtgctggggatggcggatagagactcgtccgatttcaccttctggaaggttgagcaggctgaaaatgatggtcatttggagtcccctagttccatcaatgtggcaagtatgacacttgaggatgttgagggcaatagtgcagatatctcaaaaactaagaagatccaggataacatggaaacagacaattcgattaccgatggaagctcgatcctggaatccagtataaaagaaccacttgtaccaaaaagtagtggagagtctgtgcaatcaaatgtatcacctcaaccaaaatcttcaaagaaatctgctgtacgggcaaaggttcctttcgagaagggctatagtccaatggactggcttaagctaactcgtacacatcctgatctatcagggcttaaggggcagacaaaccggaggttaataactttagagaagttaagcagcataaaactggagattgtatttggacagttctgaaaggtcgtgtgtacaatattggtccctac

SEQ ID NO: 2907 - DNA, 805 bp, Avena sativa
ctttgcacagacgtgaaggtgcattggagatttcacatgagatgcttgaaagactagaggctcacctcacagcgtctggcaagataatggtaacagcaaatatgaggggcaatagtgcagaagaagtggcagagagagttctcagccaaccatcattatgtggattacagggcccaactataagtccagtgtattgcagtcttgatggcaatgtcgctgtggactactatgctattaatatagtagttccacaaaaatcactttacaagtctattcagcaactgagatctattggtggtagcggagtcctggtgtcaaaactgacctacatatttaacgaggagactcctaggtggcgcagacttctttcggagctgggaatatgacttggtgcaaggtcggccatgctctcagacggtggactgtctcagttggcatcagttgtatctgtgcttggtggagcatctacatcatatacagaagtcacctgagttcgaaaactgtatgatgcaaagcgagctcccatgtgaaatgtgtgggactgattgaggaaagtttgatatctaccatcagatattgtgctcagctaatgtattctatatagacaggcactggttggattatcctttttatgtaccaattgatagagttggagtccaggttgttgggtgtaagttctgtagtagtatgtcggatcttaccttttgttggtgcagccctgaataattgggcgaccggaaagcaagaatcccttttgtgtgttggtctctgtggcaagtctattcgattcccttatgaaattctc

SEQ ID NO: 2908 - DNA, 848 bp, Avena sativa
aggtggagatgcagccgtggcacttctggcgcaagtacggcgccaagcagttccaggtggacggccggcccgtggacgtggtgtgggacctccgcgccgcgcgcttctccgccgacgggcccgagccggtctcggactactacgtggccgtggcctccggggaggaggtggtcctgctcctcggcaaccagaagaaggaggcgttccggcggacggggtcccggccgtcgctgtccctccaggacgcggcgcagctggtgtgcaagaaggagcacgtcttcagcaagaagcgcttcctcaccagggccaggttccacgacaagggcaagctgcacgacatcagcatcgagtgcagcagcggcaacctcgccgccgggatggacgtggacatggccatcaagatcgacggcgcagtcaacgtgctcgtcaggcacctgcagtggaagttcagggggaacgactgcatctccatcaacaagatgaaggtgcaggtctactgggacgcgcacgactggctcttcggcaccgggatgaggcaggcgctgttcatcttcaagcccgaggcgccgccgtccttgttgtcgtcggcttccgacgagttctccgacgacgacgagttctccgatttctgcctcttcctctacgcctggaaggttgaatgaatgagctgaatagctagtagctaggtttcctactacatttgttactactactactacattacatcacgttacagagtggacattttcaccatgttatgaagttatgaaccgataactcatactactaccatgtaatgagactggaagaatgtgagtgattgattgattgagctgaggccatattct

SEQ ID NO: 2909 - DNA, 517 bp, Avena sativa
acggatagcaaaggttaccaaagatgcaaaggttaccaagaaaagcgattcaaattgcggaaaagctaatgaacacggtgcaaaatcgtatgatgatgaatctccaaagaagcaaaaagatgcctataatgcaccacggagctctacacctgtaccgtacaaccatgacatggacatgagtacaggatcacacagtgatgagtggcatgcagatttacttggttgttgttcagagccatctttgtgtctaaaaaccttctttttcccctgtggaaccttctcaaggattgcttcaatcgccaagaacagacccatgtcttcggcggaagcctgcaatgatattatggcatactccctgattttgtcttgttgctgttacacttgctgcgtaaggagaaagcttcgtcaaaggttaaatatcgcgggagggtgctgtgacgatttcctttcacatgtgatgtgctgttgctgtgcacttgtacagatggcgggagtaagattcgtggtgcatatggag

SEQ ID NO: 2910 - DNA, 842 bp, Avena sativa
ccaggcccgggcaacgggaagtcccacttcgacggacacagccaggtcaaggacttcatccagaccctcgtcctctacggcgggtacaacgagctcgccgacatcctcgtcaacctcacatccctcgccaccgagatgggccgcctcgtctccgagggatacgtgctcaccgtgctcgcgcccaacgacgaggccatggcgcgcctcaccacggaccagctcagcgagccgggctccccagagaacatcctctactaccacatgatcccggagtaccagacggaggagagtatgtacaacgccgtgcgccggttcgggaaggtgaggtacgacacgctgcggctgccgcacaaggtcgtcgcgcgcgaggccgacggctccgtcaagttcggccagggcgagggctccgcctacctattcgacccggacatctacacggacggcaggatctcggtgcagggcatcgacgccgtgctgctcccggaggacgacaccaagccgtctccgccggtctccgccggccccgtcaggaaggcgcccgccgtcaccggctccagaaagagcaagctccggcgaggcaagttgttggaggcaacgtgcagaatggctggcgtcttcggtcagcgatcgcgattagcgagctgccagtaggagaaggagaagaggaagaagattcatctcatgattgataccgaaacacgacctgaaatgtggtggtgatgggctgtgtgcttggacatggggccgtccacgacattgttgttctttttttgtttattattatatgatgaataatgaatcgggtggggaatgtaaaactggtggttgttggtgtgtccgca

SEQ ID NO: 2911 - DNA, 851 bp, Avena sativa
cgggattccgaatctagataaatccaagtcaactaatatgggtcggagggagtaacttatatatattatcttgatgcagctaagggtgaactcaacaaaatcaatgactgggcatcttataggagcagctggtggaatagaagctgttgcttctatacaggctataagaactggttgggtccatccaaatctgaacttggagaacccagaaaaaatagtggacgtgggcatgctggtgggatcaaagaaggagaggtgcgaagtaaaggtcgcgctgtcaaactcatttggatttggcgggcataactcatcaattctgtttgcccccttgaagtaaactcggcacagtgatccgtttgcttcctccttgtccaattttacaccgtggaactggaactgaatatacaagacttgtggactagctaggcggcttctccatgccgcggatattacatggaggtccgagctgagaagaacatcctgctacttacagtcgagcgaagtactacttacagttcatcgaagaaagtgtccgagggctcacaagcccagctatgttcatatgtgtcgccatcacaggcacatccctatcaagccaagaattgcgtggtgtgtagcctatggcctatatttattgtttgttgttcagtacagtattgttggataatccacctcctccagacttgcccttcctgggcctgctatttttcgccccaccgtctgccagcccctcgtgggtgctctttcctagattttgtgatgagagacccttgcagaggtgctgctgggttttgctgttgtaatgatgttgcacttcattacaagcatgtctgaacttgtcagctctgctc

SEQ ID NO: 2912 - DNA, 816 bp, Avena sativa
agcaatcgtttcttcactcttattccttctgttcatccacatattatacgtgatgaggatgacttgacgatgaaagcgaaaatgcttgaagctctgcaagatattgaaattgcttctagactagttggctttgatggtgacaatgatgaatctcttgatgataagtacatgaaacttcactgtgacattactcctctagcccatgatagtgaagattacaagctagtcgagaaatatctcctcaacactcatgctcccactcacaaggactggtcattggaactagaggaagtttatgtgcttgatcgggatggagaatccaacaagtactcgagatataaaaactctctccataacaagatgctattgtggcatggttcaaggttgacaaattttattggaattcttagccaaggactaagaatagcacctcctgaagctcctgtgacaggctatatgtttggcaaaggcctctactttgcagatttagtaagcaagagtgcacagtattgctatgtggatagaaataatccaactggtttgatgcttctttctgaggttgctctaggagacatgcatgaactaaaaaaagccacgcccatggacaaacctccaagagggaagcattcaacaaagggcttaggaaaaaccgtgccgctggagtcagagtttgtgcaatggagggatgatgtggtcgtgccttgcggtaagccagttccagcatctaccagggcatctgagcttctgtacaacgagtatatagtctacaacacatcccaggtaaagatgcagttcttgttgaaggtcagattccat

SEQ ID NO: 2913 - DNA, 835 bp, Avena sativa
gacgacgatgatgacttcacccagttctctctcgatggcgaggatgattcagatgcatttgaaccaccaccattcagcaagtttgggccgatgaaagcaggccacaggaatccactgtcgaagctaaacgagtgcgacgaggaagatgatgatgccaaggaggttatcaaggatgacgctgacccctctaacggtatgtttcctaagctggtcccttccgtctcaaagttgtctgcatcgctgaaggggactggtttcttcgggaaagctaaagcctaccacggacaccacggaggcattccgaagagcaagttgggtgctaagactaactatagtggagaaggtagcatgctgcaccagtctggcagcaggagcgcgaacgagatgctcccgcccagtgccagttttgtgaagctgtcggacatgggctccgaggagtggaatgcgttcctcgacaagttccaggagcttctcccgagcgctttccaggcacggaagcacgctgctggtgccggcccgcgtccaatgcagaggctgggcacttcctgccagttttgaaaggtagtagaagagaagctattatataccaaaaaaaagaagggtaatgtagaccggaccgaggcgtgcagcaggcagcagcagctgttttcttcgcggcagcagccgcagctctacccactctacgcgccgtgtttggacttcggagaagatagaggaataagaccgtcccttgacatatgttgttgttgcaggagtgtgtgtgtgtgtgtcgttgcgtttgtgcattagttttttgacatatcagaagtacggtttgttctttcatttgtatata

SEQ ID NO: 2914 - DNA, 687 bp, Avena sativa
ccagtttgagatcacaaagagcaggcggtcgtcagcctcgtcttctgctgaaaggacaagctgctattgcaagtgtcatcttcttcagggaactatcaattttcttccagcgcgggtggtttccaaatatctttgtggtccttctgagtggattggtgtcagccttttacattcatcgcattgtgactggtggccacaagggtccaagcaccgagagtggttcagagaattaatggttataccgctcactggaatgaatcgtatgatctcaagattgatcgcgaccctttcgcttcaaggtctccttccttcagcttccaactccgtcacacttcagtttgaactcagtgtctgaactctgaagtggttccatatagtacacttgggattcaaaagacctgcctgcgtactctcttccctcatggttgcacccctttattcttttcttcatgtaatgcagatgctgccctggaacaacaataagaaatggcccattgatggtcatagcatgtacctagctgttcattacttatgttgtttattgcacgcaacatagttgtaacacattcaatatctagtgaaatcagatactccctctgtccgcaaataagtgaattggattttcctagattcacacgtatctagacgtcgttttagtgtgtagatacatgcgaatctaggcaaatc

SEQ ID NO: 2915 - DNA, 617 bp, Avena sativa
gtttcctcaaggagcaaaatcctgatatcaaggttattggtgtagagcctactgaaagtaacatactctctggtggaaaacctggcccacataagattcaaggcattggagccggatttgttccaaggaacttggacagtgatgttctcaatgaagtaattgagatatcaagcgacgaagctgttgagacagcaaagcagttggctctccaggaaggattgctggtcgggatctcatcgggggcagcagctgcggctgccataagggtcgccaagagaccagaaaatgccgggaagctgatagtggtcattttccctagctttggcgagcggtacctgtcgtcggtgctgttccagtccatcagagaagagtgtgagaagatggaggctgaagcatgaactttgcctgatttgtcaggtcctttgctggaataaataaggcggcatggaaactattgctagacttgcacacgttcttttttctcatattgattgtgtggaaacatttatctgtccctttggattggaggagcaatgctcattaaaaaagcagattggaggagcaatgctcattaaaaaagcagcagaaatcacaagatggatatgctgaaggtttaa

SEQ ID NO: 2916 - DNA, 734 bp, Avena sativa
aggagacccagctgactccatttacatggaggtggagataagaaggctatcttttcttaaagatacgtattccaacggtggcatggaaaacaaagtcgtggctggtagcttaagtacttctttggtgtcgagtgccagaaagctgcaacgtgaaagggagatgctctgcaggcaaatgcaaaagcggctctcgcttgtggaaagagagagcatgtacagcaagtggggagtttcactgtcgtccaagaggagaaggcttcaggttgcccgtcgactttggaccgaaaccaaaaacctcgagcatgtcagggagagcgcgtcgcttgttgcccgattgatcgggctcctggagccaggaaaggcgctgagggagatgtttggactgagcttcgcgccgcagcagtccactcgacggtccagtaatagttggagatatggacgttcttctctggactgatccatttgcacattacaagatgcaaatgaacaagacaggctccccttcgtgtttctgcccctcgttgtctatagaatttcagaaacattagtcgttatagcttacttataggcccttaaatgtgtttatgcatgatatttgcgactggtccatggatcgatttcacaccaaggtacagtgtccactgaactatagcaggattaaacacgtaacgtttctgtaagttgatacaaggtgttgttctgtttagaaatgagatttaaatagtgtagaaaaa

SEQ ID NO: 2917 - DNA, 1077 bp, Avena sativa
ttgctggagtatatgagccaatggaaccagatttcgaggttatcaaagttctgactgaattgttggataagttggatattggcatgtatgaggtaaaattaaatcacagaaagttgctcgatggaatgttggagatctgtggcgtgcctgctgagaagtttagaacagtttgctcaagtattgataagctagacaaacttaccttcgaagaagtgaaaaggagctggtggaagagaaagggctatcgaatgaaaccgctgacagtattggcagtttagtgaagacaaaaggaccaccactagaagttttgctggaattgagaaaggaaggtagcaaattcatgcagaacgagggatctgttgttgcattaaatgagctggagatattattcagagctctagaaaaagcaaatgcgattgacaggataagttttgatttaagccttgctagaggccttgattactatactggtgtgatatatgaagctgtgttcaagggcgctacccaggtcggatctattgcggctggtggcaggtacgacaaacttgtcggtatgttcagcaacaagcaagtccctgctgtaggcgtcagccttggaatagaaagagtatttgcaatcatggagcaacaggagaaagaaaaaatgaggtggtccgggctaccgagacggaagttttggtgtcgattctagggaaggacctcatattggctgcagagctcgtaaatgaactgtggagtgctgggataaaggcagagttcaagctcaccaccaggatggctaaccacataaagtatatgacgcaaacaggcattccatggatggtgctggtaggcgattccgagattagggaggggaaggtgaaactgaagaacattagggctaaccatgaagaggaggttctaagagaggattttgttcatgtgctgaagcagaggttatctaacccttagagatgaaatcttgggaagatgtagagcatgtttgtactgggcgatacactgatctaagattttctgcatctccattttgccaatgtgtattgggcgatacattaatctaaaatttcgtgcgtctcc

SEQ ID NO: 2918 - DNA, 906 bp, Avena sativa
ttcgggcaggacattgcttgttgccaatgcaggagattgtcgagcggtattaggaaagcggggacgagccattgagctgtcgaaagatcacaaacccagctgcaagagtgaaaagctcaggattgaaaaccttggtggtatagtcttcgatggctatctgaacggtcagctgtctgtagcaagggcaatcggtgactggcacgtcaaaggttccaaagggtctaaaagccctctcactccggaacctgaatttcaggaggttagactcactgaggaagacgagtttttgataataggatgtgatggcctttgggatgtgatgaccagccagtgtgctgtatcgatggtaaggaaagagctgatggcccacaacgatcctgaaaggtgctcaagagaacttgttcaggaagcgctcagacgagacacttgcgataacctcactgcagtggttgtatgcttttcagcagatccaccccctcaaattgagatcccaagattccgggtacgaagaagtatttcaatggaagggttgcatatgctaaagggtgctcttgacagtaatgcctgagctctcaaattttgtcttcccccgcgttacccttttgttgtatgatctttattattttttgttggtctctcaaagttttgcccagctctctctgctataggtctcggaataagttgtgtagagtcatgttttaaattctgttgaggtgtaggctaatcattttacggaggcgatgatttatttgtaccggctagagtttgattgctcacagtgtaattgggcaatgcccgacattcttattctggtacaaacaacagttattatagctgatcaattttgctctaccacggagttacacttgtcttaagtcatgaactcctttgcttcagatgaataaa

SEQ ID NO: 2919 - DNA, 632 bp, Avena sativa
tccaaggacctacgatcttatccacgctagcggccttttcaccttgtataaaaacaagtgcagcatggaagacatcctcctcgagatggaccgcatcttgaggcctgaaggcgctgttataatgcgggacgatgtcgatgtcctggcgaaggtggacaagttcgcccagggcatgagatggaacacgaagctagttgaccatgaggatggacccctagtgcgagagaaggtcttgtatgctgtgaagcagtattgggttggtggaaatcagtacggctcagcatgaatgagaacatatcctaacatggagaattctgcgatccacccttgaaactggcgtccaggaagtgagataggaagtcatcaggtgacaatggaaacggcctacgcctctccagggtagcaatgaagaaccaaggtttcttccctgctgtcgatcggctgcagtatattgttgtaacaattttttgaatttggttacgtttgtcacgcagtatgaacttaattaagatatattatcacagaaatttattgtattgagttcctgtaattctgctcatggtgcaacttctgaaaagtgaacttttgattgtttgtctttaaaaaaaaaaaagtttaatttaattcgtcgt

SEQ ID NO: 2920 - DNA, 867 bp, Avena sativa
gatgctgaattgatgcttcagaattcacttcatctatgctgaaagtctatgaaaatgctgaatcctgtggatgtctcaccgaggaacttgcctgccaatatgtctcgctctttctgagacttgaaagatttgaggaagctaagaatctcgcagaaaagctctgcagtggtcctcttgcagaggctgcaaatctgtggaacctgagagcttctatagaaataaataggcttggtactgctattaacagtgcttacttaagtgaggagaacctaagttctctgtttgatctatttaatgttgtacttccgaagttatccataaccaaggctgaggttctgtggcatacggccatgaaattgttttcccatgataagatatattttggaaagctggtgaagtgtgcaacgttatcattaagttcagctggtgggagtgattatggagcttcagtctcttctgctattgtcggatgggttttgcagaaggatggtattaaacaagctaggaagatgtataagagatttttggctttgccatgtcccagtcttaagttcttccagttctgcatagagctggaagctaaccttgcatcaatgggaaatcatgatgccatagtagctgcccgcaagctgtttgattcagcaatcaaccagtatccgcaagaaagagaactatggagaaagtactacaacatggagttgaaggtgggaacatcagaaacatcaaatgctatctactggcgtgcgcgcaaggtgctcaatgactgtacggcgcttgccattccacgtagctagtagcgtgtgcttgtaccatgtaatatcatttttgactggtattgatttgtgcgttcctataggcatgtttaag

SEQ ID NO: 2921 - DNA, 508 bp, Avena sativa
gatgattcagaggcagaggacgaaagcgatgcgcgcaaaagggatagccgtgcttcccgcaaggtgcactcggagataaagtttgatgattcggaggcagaggatgaaagcgatgcgcgcaaaagggacagccgtgcttcgcgcaaggtgcactctgagataaagttcgacaaatcagggggatggaattcagaggcagaggatgaaagcgatgccgagatacagtccctggaaaggccacctcctcgaaaagaacactaccgaggaaatggtcatcccgatgagaaggaacctgatgatgacttccctgagccaccaaaggcaaaccttgcttcccgtgttcatccaagcatgcctctggatttcgagaccctcaccgcgcgctttgaggcgctgagatccgggaagctcccttagggcgcgtcgtgaaccatgatgttacttctttgctgcgtctatataatacctgaactctatgctagtagtaggttatagtaattctctagtg

SEQ ID NO: 2922 - DNA, 662 bp, Avena sativa
  modified_base (218)..(218): a, c, t, g, unknown or other
tatccttgaccttcagtggacctctgatggtagccagattatctctgcaagtcctgacaagactttgagggtgtgggatgttgaaactggcaagcaggttaagaagatggctgagcactcatcgtttgtcaactcatgttgcccatcacgtaagtggccacctcttgttgtcagtggatcagacgacggtacagcgaagctctgggacctgcgtcagngaaggggctatccaaacacttccagacaagtaccagattaccgctgtgagcttctcagaggccgcagataaagttttcactggtggcctggacaacgacgtcaagtggtgggatcttcgcaagaacgaagtcacggaaaatctcaaaggacatcaggacatgataactggaatgcagctcagtcctgatgggtcgtacctcctcaccaatgcaatggacaatgagctgaaaatctgggatctgcgcccttatgcaccagagaaccggaacatcaagacccttacaggccatcagcacaactttgagaagaccctgttgaagtgcagctggtcacccgacaaccgcaaggtcactgctgggagtgctgatcgcatggtctacatctgggacacaacatcgaggcggatcttgtacaagcttcctgggcacaacggttctgtcaac

SEQ ID NO: 2923 - DNA, 761 bp, Avena sativa
caactttcaccggcattacaaagtctctccacttcaaggaaaatcgccatcgatttcggtttgctgaatcgcggctgacgtatggtatgattggggaaggtttgtgaagggtgaaaatccatttgtggaggagtcataccagagggttgccctggaccagctaatcaagattgcaaaaattgaggatgatgacatattgatcatgtcagatgtcgatgaaatcccaagtgggcacaccatggatctcttgagatggtgtgacgacactcctcagataattcatcttcagctgaggaattatctttactcatttgagttcttcctggatgacaagagttggagggcatcaatacacaggtacaagtctgggacgacaaggtatgcgcattaccggcagacagatgtgctccttgctgattcagggtggcactgcagtttttgcttccgctacatcagcgacttcgccttcaagatgcaagcctacagccacgtggatcggatcaagttcaagtacttcttgaaccctgaaaggatccaggatgtgatatgcagaggggcagatctttttgacatgctccctgaagagtatacattccaagagatcatcgccaagctggggcccattccaagtacatattctgccgtccatcttcctagtttcctcctccagaacgtagaccggtaccggtatcttctccgggactgcaggagagagaagagtggctaggctttgtggtttacttggcaagctgctgtgctgt

SEQ ID NO: 2924 - DNA, 827 bp, Avena sativa
cttcaccgtcctggctgccaaattgacgagaagcggaggattaagatggccattgacgtggccaaaggcatgaattgcctgcacactagtgtaccaacaattgttcaccgggatcttaaatcaccaaacttgctggtcgacaataattggactgtaaaggtttgtgattttggactttcacgcttgaagcacagcacatttttatcatccaaatcaactgctggaactccggagtggatggcacctgaggtcttgcgtaatgagcaatcaaatgaaaagtgcgatgtttacagctttggtgtcatcttgtgggaactagcaacacttagaatgccatggggtgggatgaatccgatgcaagttgtgggagctgttggcttccaggaccgaaggctggacattccaaaggaagtcgaccctctagttgcaaggattatatgggagtgctggcagaaggatccaaatctgcgcccttcttttgcacagctaacgactgctctgaagaccgtccaaaggctagtaggcccctctcacccggagacacagagccctcctgtgtcccaagagatctgggtgaactcctctaccccatgatgggagggaggcattcacaacttccagtttcggagaactgatgcttgttgcggtccccaaatgtgggcgcgttgtgtagatagattgagcgccccagatgtggtagatgtatcctgttgtgctgccacgacaaagatctcgtggcagccagagagtatttacagagtcgcccatgaagcaacggtcggcagaagagagatccagtctgtctttctctttgtgcatcacaaatt

SEQ ID NO: 2925 - DNA, 781 bp, Avena sativa
gccgaagatgatctgttttggggcccttctgaccactccaaacaagataagaaacagtcagaattcccaagtctttcgagtcagagcagaagttccatgactaaagaccaggctgctccattgaatcgtcaaaagtctcaggctagcaagttgccactttcgacggctcctactgccaacctaaccgggaaagggaagacagagacggcaaacaagcagacagaggcaatggacttcagggattggtgtgacagcgagtggtcgaggctcaccggaacgaatgatacaagttttcttgagttctgcattaagcagtcgactgctgaagcagaaacccttctccgggagaacgttggctctctggaccgcaatggccaattcatcgacaagttcctcaactacaaggccttcctgtccaaagaggtgatcgagacggcattcagagcccccagcaaccgtggccctcgtggggatgccgcctcacgcccgaaccctgttcctgcagccaaaggaggcccaagtgtggaagcagaacaggacgcaggcggaaagaagaaaggaaagaaagggaagaaggtgagcgcagcagtcttagggttcaatgtagtcagcaaccgcatcatgatgggtgagatccagaatgtggattagtagggtctgcatacaacgatggcaccgcgctgtacatactttcggcgctctcgatagactgcgttttgacttattgttgcgatggcaactgagcttatgaggacttcactccagaatgaagaacatagat

SEQ ID NO: 2926 - DNA, 702 bp, Avena sativa
tgtgtctctaatgttacagtaagagatgtcaacatgttcagaacaatgactggtgtgagaatcaagacctggcagggtggtatagggctggttcaagacgtaaggttctcaaacatacaagtctctgaagttcaaacacctattatgatagaccagttctattgtgacaaaagaacctgtacaaatcaaacatcagcagtagcagtatcaggcgttcagtatgagaacatcaaggggacattcacgatcaagccagtccattttgcatgcagtgacagctcaccttgttcagggatcacacttactggagtacaacttaaaccagtgcaaataccccactaccacctaaacaaccctttctgctggcaagcttttggggaactcttcactccaaccatccctcccgtagcgtgtttgcagattggaaaacctgctgggaacaacttgcagtcataccatgacatatgctgaaacacagaaagtaccctcaaccattagtttggtgcttacccgtgagtggtcgttgtgatgcttccgacccctttgcaccattgcttgatcatgtgcatattagcatatacacagttatttcttatgttttgttatcacggcatgtgtgtcacattgcagtaaagcaaacatacatattatcatatgaaatggtcaggcagcaagattatatgtgtgagctgaaaaaaaaaa

SEQ ID NO: 2927 - DNA, 698 bp, Avena sativa
ctcggaagaacggcagagttacttgaaaagattaggttatccggagttgcattcttcaaattttctcgatcttgatttgttatcttcttcgggaaattcctgtgatgaagaagcttttgagaggtcatcactcatccattcacctacggatcttatcagtgttgaatctactacaacatacagtgagcaagggcacaatgacgagggaaggtatgacacagacctatcacgctcaagcagccagctcttggactccggtgactattctgaaagttttgctcaatgggtggctaatggaggcatgttgtgctactagcgctaaagattttgtcctggtggcatctccatataattttgtgagcgctaaagattttgtcctggtggcatctccatataattttgtggcctcacggatgtttgacagctggaacagaaggaaaaaaggtcaggaacaagctgcaatcactggggctggcaatcgcccgaggctggaacaaggatcggcacgattgctccacagatcaaaggctggctttaacaatgtggtaactcagttgaggaatgaagatcatgatggcttggtttggttgggttgggtacaggactccattgctatggtgaagaattgaccgtagtgcaggcaatgacaggcagaagaaatctgattcttttccagggttaggtttagatagacagtt

SEQ ID NO: 2928 - DNA, 958 bp, Avena sativa
tgttagtctccttggattgctgttgctgatgatgctttgcggatgtttggttccgcggtaaataggatgtatggtgcagttgattccagagaaggcgtcgtgcttggtccatcacatcatgggaggattctggctgttgacaggacacgaaatagtgtatcggaaggtatggattcaaagccgcaacagaatgcaagtgagacactcccagcgttgttgtacattccgaggaatgggaaacatgtcaagatcgatggaaatctggttatcaagtccgtagttgcgagtgagagagcttcttcgcgtattgatgggaagagttctggcaaccaaggaaatgaaaagactagtttggcaattcctggccatgtggctcaactggattctggagaagtcatggaatctgctaaaagaataacaaataaactgattgctttgcctcctggagatggaagcatattcagggaggatgatgaattgatgccacaatggtttagtgaagcaatgtctggtcctatgttaagctccggaatgtgcactgaagtgttccagttcgatacatctccggcctccgttgatgcaagtggcattgtgcctgtctactccagtggtattcccaatgcaacacataacttaacagagaacctcccctcaggtcgggctcaaaaggtcaagaccagaaggattttacattccatggccattcctctgcaaggtgcaacatccaaccacactgaccgccttaaagcgcaccccgctaacgggagcttcacaggaaataagccgacttcatctgtggtggtctctgtcctcgcagacccgagagaggacggcgaggggaagatctcttcgaaatcattgtcgcgtatatttgttgttgtccttattgacagtgtaaagtatgtcacttactcttgcgtcctgcccttcaaaaaccatagccctcatctgtgagctg

SEQ ID NO: 2929 - DNA, 846 bp, Avena sativa
ggatgcacagtgaggggccatggagacgagtacaagactcctgcagctcttgccaaacccatgagggattctggcttagatcatacaccagttacaaggtactcttgcccatttgtgggttgcaagcggaacaaggagcacaggaagttccagcctctcaagacaatcttgtgtgtgaagaaccactacaagagaagccactgcgacaagagctatacttgcagccgatgcaacacaaagaagttctcggtcatcgcggacctgaagactcatgagaagcactgcgggcgcgacaagtggctgtgctcatgtggaacgaccttctcaagaaaggacaagctgtttgggcatgtcgcccttttccaagggcacacacctgctcttcacatggatgatctgaaagcaacaggagcatcggagcagcctcaggggagcgaggcgatggacgacatggtagggagcgcggggtacaacttccctggcagcacgtccgacggcatcccgaatctcgacatgaaagtcgatgatactcgtggctatttctcgccgttgaacttcgatccgtgcttcggcgcgctcgatgacttcactcgccctgggtttgacatctccgaggaccccttctccttcatgccctcggtaccagggtcatgcagtttcgggcagcccggtgtagacagctgatggaggtcgtcgccgtcggatcgttgtgcgtgtgatgttatatgtatgacgctggtctagttctccctccattcagggagccattctggtccatgcctcttttcgtaagtgtactttttatgttgtgatcatcaataatgatcaagaacttccgtatagatt

SEQ ID NO: 2930 - DNA, 811 bp, Avena sativa
  modified_base (798)..(798): a, c, t, g, unknown or other
gggatgctgttggaacatactgtcggcaatcttgaccctctctacattgtcaatttagttccagatgggctagaaatacctaaattgcgggatcggcttgtgaaaattgtgacagactatcgaacagaaacttcactgaggaatggatgcaacgatatactaaagactgattgtgttaatcttttggttaaatactaccaagaggctcgacgtggagtctgcatggcaaacatggacgaggaggcacaaggagccagagtcgacgaaggatcttcacgaacaggcgagagatcgtcaagtttacgtactttggagatcaaatccagaacaagatgcggtgctcgatgctgcttgtgcttcgatcctctacctatccaggacatctctgtcattgtgttctactgttgccatgcatatcaccagtcttgcctcgaaggcgggttggactcaatgagatcaaacagtaatgcccgagatagcgacgaaggctcggaggacgatgatggctccccttcggctgagtctagaatgcgctgtgtattgtgcactaccgctgctgcgtaagagagcagcccatatcctgatgtgttgtgttgtaagttttgagccttgtaattattatgctcttctgggggtgatacatacatatgtaacaataggttgattctttgagggagctgtgtccagagcatgagttttgtttgtaaattcgacatgccagatgacttgggcagagttgtacggcatctttttttcttagtgccatgcttgccagatcatccgaagttgttttgaagngaatgagataagc

SEQ ID NO: 2931 - DNA, 722 bp, Avena sativa
atcacttgtgggtctattctgtgaaagatcaccgtggctttggactcatcccaacatacaggccaaggtttacgcaagttgaattcccttctccaatgttctctactcctatggcaatacggcaccttgacaatgttccttgtagcacaagaacaattggggtaagggttcctgagtcagagtatcttactggaagcttggtcgaggctaataagcaggaagagtcagggaaaggagaaataaccacactcaaacggccatcatcttatgatgaggacagagtatatagagcggccgactccagaagggatatggaaagcttggccgagtcaggctagtttcagatgtcctcccgcagactaacgaaaatgatatcatagtaaacaatccagaagcggaacaacattctcccccaactctgatgtcaggaacagctctagccggcaagaatgtagcactaggtcttcgccacttggctcatcatcgagaagcgcaagcaataggatgaccgacccactgggtaaactatcttgttcaagggaagagtcattccacgaggaaagagataacatgatcatgatcgaagaaaggcttgcttctggagctcgggttataatccaatctgcacccttgtgtgaagaaagtgatgacagcacagaatcactgtaagggttgtgttacattttgttttgagctcgccttctttggaatttgctgcatgt

SEQ ID NO: 2932 - DNA, 547 bp, Avena sativa
gaccttcacatctccgttacaatgccatctatcgaggtgggcacagttggtggaggcacgcagctggcctcacagtcggcctgcttggacctactgggcgtcaaaggcgccaacagggaatctccggggtcgaacgctaggctgctggccacggtggtggctggtgccgtcctagctggggagctgtccctcatctccgcccaagctgccggccatctggtccagagccacatgaaatacaacagatccagcaaggacatgtccaagatcgcctgctgagcgggtcaccttggatggacccccctgccagagcaaattagacggaacccaaatcataatgttcgccaccacggtaataattaatccccttcaactttgggggatcaccttttgtgggggtggactttgaagggttcccaacacaggctgtgggcagcatgctcgggaggtgaataggggaattacccctgtcgggtgaaacggtcgtctgtagagtggtgatggttttgcctgggaggagggaggggagagccctgctgtatgtaca

SEQ ID NO: 2933 - DNA, 873 bp, Avena sativa
gatggctgaatcaagatcacgggatattaaaatgaggatggagtctatgctggcagacttgcagagggagaggcgtgcaagtagctcagccttagccatggctcaaagggctcgaagggaaaacgccgccattaaaagggcaatccaaactataggttgcgaagttaatttctcggttgatgaaaaccaagctgacaggaccgaggggatgtcgtattcatctcaaagggaagcagatgctgtatcccagcaagagcaagatgataatgctgacttatctgtatccatatctgcgattgaggatagtttggtatcagagacaccaagcaaccaaatttgcgagtcgctctgccccttacgcacgagagaggggtgcagatggccacatgctgcgtgtgcgcagctaggaagccagtttgttggtttaaaagcgaattttgatgcttttgaccggctatcagtaaaagactgctactttgctccagaataggcgagaccatgtgctcaagtcagttccagatgcactttgactgtttgacagctgccggtagataattttttccacggtggtgcctctcagtttgcattaacaacaaaagatatggcgctgacagcaaatgaagattgattattttgacttgaagttcacgtctaactcacaaattcctcagtgatgtactaatggtctctgcatgtcagttggtattctagattagggtttagctattcgttaagagccaccagggactgaaatagcagccctttgtgttgtatatagttcaaagcaaaataatgccaggtgcaaaaggtagtttcttttacccttttgtttttgtccaaaattcatctgttagcttgggaataagagctaat

SEQ ID NO: 2934 - DNA, 197 bp, Avena sativa
ttctgtctcactattttccttttgtctattattatatatgaccttgattattccttagtgggtaggcttaagttggagagctgcagtttttttgtcaagcctctgtaagttttaatgttcgatcgcagatgaataaggctatttttctatattacctttatttttacttattgattggtaactttgaacaaaaaaaa

SEQ ID NO: 2935 - DNA, 734 bp, Avena sativa
aaagtcaagaagcaagcaagccaacccttggacgtgaacatggaaatgtctagcccaagcaacaaaaagaaaaaacaagatgtctcgattgttttatcaactgccccagaggatgcgcctactcattggcagcagactctcttgtacttatttgaacctatcgagctaaacaaggaccagattatggaaggttctgttaccatatctcagagccggcaacatgcccgcttcctcaatatctgcctgaaatattttactggagatcaatggtacgtcaaagaatctgtgatgcgataacacgggaaacttcgacagattagtgttttgcagataagtgcagatctatttgcaagtttcgcgcatttggactgaagagggacttcatgattgcgaatatatcaacatatgctaccatttaggtcatatttggaacgctggagttttttaggacatggagaaattcctccacaacttcaacaaaaactcattaatccaaatcaggccttagtcattgttcatgagcttgagtaggtcagtagcataatgatcatctgtatctgattgatgaaaaagcatttagaaatttaataattacaggctggccaaggtagtataggttcttccttatgaaaacagtacagttcgtcttatttcatctgattagtggcttagtctttacactagttagccatgcggattgcttccattgtttgtaagaacatgacattcataca

SEQ ID NO: 2936 - DNA, 210 bp, Avena sativa
gaatcatttgactaaaattggtagttatcttctgaactcattggagaatttcctcaaacaagcgagtgaagcattcggtgatgatatttcatatgatggtgattgcccagggcccttcttcagccgttgttatcacagagctccattcatctggggaaatgatcctcatacaagaccatctccatcgatgatgcatacttcttcagctgg

SEQ ID NO: 2937 - DNA, 640 bp, Avena sativa
gttacagaacattaccgatcctgtttccagaattgggaagccagcatgcatatctgcatcaattgcatggagtccaagaagaggtgaaggccagcaggctagttttgctgttggtttcgattcagattctccaaatttcaactcctgcaagatttggcagtttgaagaagctcaccagcgctggcttccacttattgaacttggttcagcggaggataagggagatagagtacatgctgtagcatgggctcctaacattggcagatcatatgagatcatagcagttgcaacctgcaaaggaattgcagtctggcaggtaggcttcaaccctgaatctgatggcagactgtcaacagagaatgttgctctacttcccggccacaatggagaggtatggcaactggaatgggacatgggtggcatgacgctcgcatcgacgggaggtgatggcatggtgaagctatggcaggctaacttaaatggagtttggcatgagcaggctgtgcttgactgcaatgggtcacatgactaagctgtagaagatgtctttagttctgcatcatgaagataggactattgctattactatcttttcataattctgtaaggttctttcttgttaccttatgtggatggtatg

SEQ ID NO: 2938 - DNA, 368 bp, Avena sativa
ggcagcaacatcatcgagatcagtgttccggttggtgccaaagttatttactcaaagtatgctggcacagagttggaattcaatgatactaaccatctcattatgaaagaagatgacatcattggtattcttgacactgatgacgtgaaagatctgaagccactgagtgatcgtattctcattaaggttgcggagtctgaagaggaaactgctggtggtttgttactgacacaggcgacgaaagagaagccttctgttggaacagttgtagctgttggccctgggccattgggcgatgatggcagcaggactcccctgacaatcactcctggaagcagcgtgctgtactccaaatcgcaggaagcgag

SEQ ID NO: 2939 - DNA, 812 bp, Avena sativa
ggtctgtatatgctgtagtcgtttacacacatcgagcagggcaaccgggtgtcaatggggacgcgaaggatctgtcgaccggacttgacgagcttgcgggggcgcacagcaggaaggtggccgcgcttgcgtacgcgtgcgggaggcacgggctcgaggacgagctcagggacgcccgacggtgctggcgatcaaacttggcgcggtgcagaacttaaggcgacgagaatagactaacttctttcgcagcaacgcgcgggcattttactaggaactctacaaaaataaaattgaaggaacgattccgtcagaacttggtgatttgaagaacctaattagcttggacttgtacaagaataacgtttcagggactatacctccaacactcgggaagctgaagtcccttgtattcttgcggctcaacggcaatcgtttgaccgggccaattccaagggagctggctggcatatctagtctcaaagttgttgatgtttctggcaatgatctatgtggaacaattcccaccactggaccatttgagcacattcctctcagcaacttcgagaagaacccgcgcttggaaggtccagaactgcaaggcctggctgtatatgataccaactgctagatggcaaacatgaaggaaaagaatgctagaaagtaacgggcgtacaaggttactggagatcgggtgatatagaatgttaggtcctgcacttgccactttgtaatcctccctacatagctaccactcgtgccttgctctcagcaagaaagttgttgtatgttgtagcaggaagatactttctgcc

SEQ ID NO: 2940 - DNA, 914 bp, Avena sativa
  modified_base (30)..(30): a, c, t, g, unknown or other
gcatcagcttgacattgagacagggaaggnggtttcacagtggaagttcggcaaggatggagctgacattaacatgagggatatcaccaacgatagcaagggcgcacagatggacgcgtctgaatccaccttcttgggactggatgacaaccgattgtgccgctgggatatgagggaccgccatgggatcgttcagaacttggcaaattcgatggagtccccagtactggaatggacccaggggcatcagttcaccagggggacaaacttccagtgctttgcatcaactggtgatgggtccattgtagttggctcattggatgggaagatccgtttgtactcgaagagctctatgaggatggcgaagacagccttcccagggctgggttcgccgattactcatgtggatgtgacttatgatggcaagtggatcctggggacaaccgattcttacctgattcttatatgcaccattttcattgacaaggatgggaaggaaaagactggatttggtggaaggatggggaacaggattgctgccccgagattgctcaagctcagcccactgcactctcatcttgcaggggacaacagcaagttccgcgaggggaggttttcatgggtcaccgagaacgggaagcaggagaggcatcttgtcacgactgtggggaagtacagcgtggtgtggaacttccttcaggtgaagaacagccaccacgagtgctaccagaaccaggaggggctcaagagttgctactgttacaaggtgatccccaaggacgagtccatcgttgccagccgcttcatgcacgagaagtacgacacgagcgactgcctggaggcaccgctggtcgtcgcgacacccatgaaggtcgcctccttcagcatatccagccagcgctagctccgtgctg

SEQ ID NO: 2941 - DNA, 833 bp, Avena sativa
gtacgaatgatcggtgaattggttgacaagaagaagggaaagtttgaccatcttgttattgaaaccacaggcttagcaaatccagcaccaattatacagacattctacgcagaagatacagtttttaatgatgtcaagctggatggtgttgttactttagtagattcaaagcatgcaaggctgcacttggatgaagtaaagcccaagggtatagtcaatgaggcagttcagcaaattgcctatgctgacagaattatcattaacaagactgaccttgttagcgagcctgaagtttcttccttggttgagcgtataaggagtatcaatcgcatggctaatttgaaacgagcccagtatggcaaagttgatttggattatgtgcttggaattggaggctttgatttggagaggattgagagtgctgtcactgaagagccacatgatgagcacgagcatgaacatgaacatgaccatggacatgagcatcaccatgaccacggccacgatcaccatcaccatcatcatgatcatgaacacaaacatgaccatcatgcgcatgatcacacccatgatcctggtgtttcttccgtaagcatcgtttgcgaaggggagatggatcttgaaaaggctgacatgtggttggggaacctactgctggaacgcagtgatgacatataccggatgaaggggatactctctgtcagtggaatgcctcaacgctttgtcttccagggagtgcacgacattttccagggatcccccgacagaacttgggaggcagacgagccacgaatcaacaagattgtgttcatcggcaggaacctcaagcgtga

SEQ ID NO: 2942 - DNA, 579 bp, Avena sativa
  modified_base (552)..(552): a, c, t, g, unknown or other
gggacatgctatgtttggcgcttacttaagggtactcagacaatcaccagctttgagccactccataaactgcaagcccatgatggctacattctgaagtgcctgctttcacctgaattttgtgaccccaacaggtatcttgcaactgcatcatcggaccacactgtaaagatttggaatgtggatggcttcaagttggaacgaactttagttggtcatcagcgttgggtttgggactgtgtattctccgttgatggcgcttacttgatcactgcttcctctgataccactgcaagattgtggacgatgtcaactggagaggccatcagggtgtaccaggggcaccacaaggcgactgtctgctgtgctctccatgatggggctgaatcggcgccttcataagcaacaccgcaacatgatgttctgtacatatgtcgacttgaacacagcacacagctctgctaggttttcagcaaactttaggacagccggtttacatttgattgccgtagtgccgatgtaacattgtatatgcaggcagcctttggggtntgcgtgctgtatgattacattggtgga

SEQ ID NO: 2943 - DNA, 886 bp, Avena sativa
cccgggatcgcgtgcccctgggccgtctggacccgcgcctggaccgccgaggagaaccgccacggcgacgtcctcaacaagtacgcgtacctctcgggccgcgtcgacatgcgcgcggtcgagaggaccgtccagtacctcatcggctccgggatggacccgcggaccgagaacaacccctacctgggcttcgtctacaccagcttccaggagcgcgccacggccgtctcccacggcaacaccgccaggctcgccagggcgcgcggggacgacgtcctggcgcgcgtctgcggcaccatcgccgccgacgagaagcgccacgagacggcatacagccgcatcgtggagcagctgctcaggctcgacccggacggcgccgtgctcgccatcgcagacatgatgcgcaagcggatcaccatgcccgctcacctcatgcacgacggcagcgacatgaacctgttcgagcatttcgcctccgttgcccagcgcctcggggtgtacactgcacgggattacactgacattgtggagttcctagtcaagcggtggaagctggagacgctggagggcgggctctccggcgagggacggagggcacgcgacttcgtctgcgggctcgcgccgaggatgcggcgggcggcggagagggcggctgacagggccaagaaggacgagcccaggaaggtcaagttcagctggatctatgatagggaagtggctctgtagtgttggtctgactcctgagacacagatgaccatggcatgttcttatgtttttccctttttctttgcaaagttagtttatagtgcctttttgatttgggaacatggagggaatgttatatttcaaaatctttaacaaagatggcttggttttgaaacaaaa

SEQ ID NO: 2944 - DNA, 729 bp, Avena sativa
gcattcaagttttcttcaatatgaaagaccatacagtctatgtgagacaaaggccccacctgaagatgttccttgagaaggtagctcagatgtttgagcttgtgattttcacagctagtcagagaatctatgccgagcagatattagatagacttgaccctgatgggaaattgatctcacaacgaatttatcgtgagtcatgtatattctctgatggtggctatacaaaagacctgacaattctaggcgtccacttggcaaaagttgcaatagtcgacaatacgccgcaggttttccagctgcaagtggataatggtatcccaataaagagttggtttgatgacccctctgaccaggaactagttgagttactcccgttcctcgagacccttgtagacgcagaggacgtaaggccactaatctcaaagactttccacggcgccctccagcaggattagatttagatgcatcattgtggtactgatcctgccagtgtacttcaaccaactccatatggtgcgcgtcattcttgagagattaggtataggaacagcactcagccatttatgttatgttggctgttacaaatagccagtataaactgcagtcggacgtcacctgtgtcttgtatacttattactgtttgcctttctgcgtcgcagatccttgtacataaactatagtattgaataaagtgatctgaatccaattttgctacaaaaaaaaaaa

SEQ ID NO: 2945 - DNA, 567 bp, Avena sativa
gaaagggataaacaaccttgcaaagaaggctactgagggagctctgtcaattgatgagatggcaggaggaacattcaccatctccaatggtggtgtctatggaagccttattagcacccctatcatcaaccccccgcagtcagcgattcttgggatgcattccattgtgcaacgccctgtggtggtggatggcaacatcctcgcgaggccgatgatgtaccttgcgctgacatatgaccacaggctgattgatggcagagaagcggtctacttcctgcgccgcatcaaggacttggtcgaagacccacggaggttcctcctcgacatataactccagggccgtccttcactgctaagtgctttgtgcttgtctggaaaataatactgtgcaaatttttgactgatacaaatagccgcgttctgtggaagatgagatttgagttgaggatatgataacgtgtcgtgccctttctttccggggcttcagggtgtagttccctaaacaaatttgctttaattttcaatgcaagagcaaatagatatgatgtcctttttgttagaaaaaaa

SEQ ID NO: 2946 - DNA, 718 bp, Avena sativa
tttaaattgcaatcaaaatattagcttgaatcggtggagccaaggtagtattattttggttcaagcacttgaatcttctattcagggcagacctattgaaccacctggttttgatattctggaggtcatggttgctgaatcggagtctggtagacaaatttaccagttgaccatgatgctaggctgtgctatacacacaattgagcaagatcatcttccttcaatgtttgagcgcacacggttatattggttttatgataaagcatggtgttgacatcgtccccgttgttcgggttgatccctcggatgtggatgacaacacttccactgcagttcctcagattcaacggcggggacccctgagtaggagctcagtgaaggatattcagtacctacagctcagtactccacttcctcggctgcaaatgctagattgaccgtcgggagagccacccgtggggcatcaactggcatggagcatagaggcctttgaagactacaattgcggcactttcggatccgagttgttgacggatgggcgatcgccgtgtggttcctcttgtagtcttcggtgtcagcgtctcgcgttatctacatttttatttcggttgtgccaccttatgtttcttgtttcttgctctattattcagagcctcgatgtactgtgatcgttattgtcaatatatatttatgttccaaaaaaaaaaaaaaaaaaaaa

SEQ ID NO: 2947 - DNA, 893 bp, Avena sativa
ctggacaatactgaagtatcagcaatctcaaattgcaagtgccccgcctcgtgttgtgggccatggtgcaggaccttctgggtttgacaacacctgcattgcagaatgatagtcagtctggtgccgttgaagggaggattagtggttggtcagcaatggaccggcgccgtgccccaccacccccctattgcaagtgtagggaattcttctaagcagaaaagccccctgtaggaaatgatgctcctatctctaaagaccctgcgacatctggctcgaattttttaggacggtcaagtggatcgtcaaggagagctgctgtttcaagtagccgtgatgttgtggcaagtgatacttatgatccttcacgttcacgcacaactgatgcaagccctggggcatttcgtagaatctctggtcctcagagaagcagcccaccagtcgactctgcggagccgaagcgctcttcttcggcacggcactcatctaacccgaagaactacgagtctgccctcaaaggtattgaaggtcttaattttgatggcgatgagagggttcagtactagcgttgaagaattctacttctacatgtgccctgtataaatcataatctgaagataagcacagcatttcctgttgagttttggatcacaggagatgtaaggaggaggatgtgaagtgctattgccagatgatggtcctctggacacagtaaataagtggtcagcccgaggcgcatggaattcagctctcatcataatttattgtggttggtctgtaaatgtctttatattttgtttgtctggcgccccttgagttcatgggtcttgtattatttctattccttcgggtgccaccttgtccagttactgtgtctctggatagccaagatcagc

SEQ ID NO: 2948 - DNA, 894 bp, Avena sativa
agcttgctgagattgtgaatcatggaaagctggtgtctgatgagatcatcataaatctttgtcgaagcgcttgaggagggagaagaaaagggtgaattggggttcatacttgatggttttccaagaactataagacaagcggaaatactcgagggagtcacggatattgatttggtgatcaatcttaaactccgagaagaagctctgcttgcaaaatgcattggtcgaaggaagtgcagccagtgcggcggaaacttcaatgtggcctccattgacattgagggtgagaatggcgggcctcgaatgtatatgcctccattactacctcctgcagagtgtgaatcaaagttaattacgagagcagatgataccgaagaggtggtaaaggaaaggttgcgtgtttaccatgatttgtgtgaaccagtagaggaattctacagagcacgtggtaaactcttggagttcaatttaccaggaggaatacccgaatcatggccgaagctactgcaggctttaaatatagaagaccctgacaacaaaagatccgcagcagcataatttcatatgttagggaccgtattctgtatttgtagcctatgccaaacatagtcgattgattgataagcattcatagcatctctacatagtagttcactgggccattatttgatctggcactcaaaattgtatagctgattgatcatcatcgatcatacgtgttcgatgggcttgctagttgtattctttaaatgcttatgtcttgagaacagattgtaaataaccgagatttgagcttgtagtctgctgataaagcctcttcttggcagaagccaacactgcaaccattctgatgaaaacaccgagcaagcagcagatgattcttgtggtatggac

SEQ ID NO: 2949 - DNA, 752 bp, Avena sativa
  modified_base (354)..(354): a, c, t, g, unknown or other
gcgagatctccggttttcatggctgaattttttggagatatgaaggagaagtgctcgcagcatgtggagatcaaggacatggaccctgtggtattcaaggcgctgcttcactttatctacacagataccgtggcggaattcgatgagaaggatgaggcggccacggtgatagctcagcacctacttgcagctgctgacatgtacggcctggacaggctcaaactgatctgcgaaggcaagctctccagtggcatcaatgttgacactgtagcgacaactctggccttagcagagcagcacgagtgtccacagctcaaggccaagtgtgtcgggttcatcgttagaagtcctgcngttctcgatgctgtgttggcgaccgaagggtacaagcacctggaggcaagctgcccgtcggtgctggctgaccttctcaagtcaagtctgcgcatgggaggaagaactgatgcataattaggtgctacttgaggtctaagacatgatcgatccgtagtctatgattgtgctcgtgatgtatgtatgtctagttaacttgtgcaacgaactgaagctcagctaggttcgtctttgtctgtgcatgttatgcatgcatttctagtaagcaaattgtgtttctctgacttatgttatgtgcaacgttactactttcagtgcccgttcactgtggtatagtggttccagatttttctgagtggcacctgaccagtggtgtgtacagggcttgacaaaaaaaa

SEQ ID NO: 2950 - DNA, 665 bp, Avena sativa
ccgggatcagactacccgttcaaaccacctaaggtcgctttcaaaacaaaggtgttccatccaaacgttaacagcaatggcagcatctgccttgatatcttgaaggagcagtggagtcctgcactgacaatctcaaaggtgctcctctcaatctgctccctactgacggacccaaaccccgacgatccactggttccggagattgctcacatgtacaaagcggatcgaacaaagtacgagtctactgcgaggagctggacccagaagtacgccatgggttaacattcttcagcatgaagaatttggtgcacttttcagagatcctactgtatcacctaggattctcatgtgatattcagcatttaagaaacagcagcatgaaccaaactgaatctaagcttattgtaaatgaagtggtggatggtctacttcaactctttggtgagcattgaaactgttgccatcatgttcctgagtaacaatgtgctaggccaagaacagctgtctccactttgttgggttaatgggttgtcaattgtgcttattccgtttccttgttggtactatgtagtagattcgatttttgtatggcatcagtaacaacgatcagtgtggatctggaaaactactaccggttacaaagttactgaagttgctcatggctg

SEQ ID NO: 2951 - DNA, 499 bp, Avena sativa
ctcgcccagttcgccacgttcggatatgtggttaagtctatttctcaatcctgtattttcgatatcaagccggcgcagtggttcttattgccggcttaatactgtacagcctcccacagccacaaaattgtgggaaaaccttggacgacaggaatgactagctaatatccatttctttgtttgctttatcttccccccttctagataaccatggctctccgctggggcttgaaaggtgagcagagttctcctgattccccgcctgtctgttgtatgttgtatggtagtgtgtcatatatatccaataaaagcggggaagtgccgcaatggatatactagatagaataaagcaggggagcaggaaatatgtatacctgagagtaaggctctctataagttcttactgagagaagcccggagatggagggcactcgcagttttcggacggaagagaaccagggagaagagcaggagcatcatcaccacgggtatgaagagt

SEQ ID NO: 2952 - DNA, 765 bp, Avena sativa
tctttccaggtattgcatctgaggaacagttcctgggccttgttaaagtgaaccggagaagtttgaaaagtttgatggagcgtttgaagagaaagcgatattacagtttgtggagcttaacaaatttcctctagttactgtattcactgatctaaactccgctaaagtctatggaagccctattaagctgcaggtcttcacttttgccgaagcttatgattttgaagatcttgaatctattattcaagaggttgccagaggatttaagacaaagataatgtttatatatgttgacactgctgaagaaaaccttgcaaaaccattcctgacactctatggccttgaaggagataaacctacagttacagcatttaatacaaatgatggttccaaatatctgttggaggcagatattaacacgaagaacctaaaggagttctgcttaagccttttggatggtacactttctccatacttccgatcagaaaaagtaccacaagaaaagggacttgttgaaaaggttgttggccgcacattagattcttctgtcctagaaagccctcaccacgtcttcctcgaggcttatgcaccttggtgtgttgactgtgaagcgataagcaaaaacatcgagaagttggccaagcatttcagtggtttggacaatataaaatttgcacgcattgatgcttctgtgaatgaacatcccaaattgaaggtaaacaattaccccacactgttgctttatccctccgatgacaagaccaa

SEQ ID NO: 2953 - DNA, 885 bp, Avena sativa
ccccaacttaatgactctgtataaaatgatcaccagggctaatgtttcttgtccaccatggttttctaccggtgcgagaaaacttattaagcgcattattgatccgaatccccggaccaggataacaattgcagaaattttggaagatgaatggttcaaaaaggactataaacgaccacattttgagcaaactggagacgtgagccttgaagatgtcgatgctgcattcaatagttcagaggaagatcttgtggcggagaaaagacagaaaccagagtccatgaatgcatttgctcttatttcaaggtcgcagggattcaaccttggaaatttgtttgagaaagagatgatgggattggtaaaaagggaaacatccttcgcgtcccaacgtacaccacaagagattgtgtcaaaaatagaggaagcatgcgggcctcttggtttcaatgtgcggaaacaaaattataagatgaatttgaaaggtgacaagactggaagaaaaggccatttatctgtagcaacagaggtttttgaggttgctccatcgctacatatggttgaacttcgcaaaactggaggggacaccttggagttccacagtttctacaagagtttctcaacagaactgaaagacatagtgtggaaatctgaatctgacgcaactacaaaacagttgcgatgatggcatggaactggatctgtcttctggtgccatatcaatggaccatgtcttcagacgataccgcttggtatttgaatattttttctggcaccaaatcgacagtccatctctagtatactcaaagacagcgcccttctttttatcgagcgcaattgtacaaaagtaatgtatgaagaggccctcccggagatgctccctgtatc

SEQ ID NO: 2954 - DNA, 646 bp, Avena sativa
ggcatctttagctgttcctgttacagatcgtcggacttcaaaacgttcccggagaacaacaacagggaacttaatcagtttgaaagtttctggttctacaacagtctatcagttgaaactcatgatatgggaatctttagggattgttaaggagaaccagaagcttcataaaggccctcttgagattgaagatgattttgctactcttgctgacaagggcattttccctggggatgttctatgggtcaaagactctgaaatgtttgagaaccgttgatatagcaggatgaaatttctgggcagaagtctgatgtactaccggctgaggaaggctttcgtggtacattattgacatcaagtgtatcaactcagctttgtcaggacatagttctgagtgaatgagttctcatgccacctaagtgggcatacatgtattggcatcgcagctggtgacgctttcttagagtaatttgagtggatcgctgagcatcgtggcggtttctgctagcccaggctgatatttttgtccatggttatctctgtgcttagctttcaatcttgtgtatccccatggcaatgtgagggggcaatagagcagaggtagatgtaattacttttcagcgtaggtgattgttactgacactct

SEQ ID NO: 2955 - DNA, 869 bp, Avena sativa
caggttgcagatctgaaaaatagcttgaataccatcaatgctgttgcggaagaggtcaggaactctgtcaagcttaagcgagtgatgcaaacaattctttctttggggaatgcattaaaccaaggaactgcaaggggttctgcggttggatttaggctggatagtcttcttaagctcattgatatacgggcgcgtaacaataagatgactctcatgcattatttatgcaaggttctttccgggaagcttcctgaagttcttgattttgtcaaggatctctcccatttagaacctgcctcaaagatccaactgaaagagttggcagaagaaatgcaagcaataactaagggcctggaaaaagttgagcaggaattggcaacatctgaaaaggatggcccagagtctgagacgttttacaagaaattgaaggaatttcttgctgatgcccaagctgaagggaggtcattagcttcgctttacagttcagcgggaaaaagtgcggattctctagcacattattttggtgaagaccctgtgcgttgtccatttgagcaagttgtgtctactctactcagctttgtgaaaacgtttgaacgggcccatgccgagaacctcaggcagacggagctggagaagaagcgagcccagatggaagcggaacgagcgaagtccaaggtaggaggtgctcacaaggaggcggggtcaccggagccaggagtttctgaacgatgactcgctgtggaagctaggcgccatatttttcactaatttcttttcatgtcatatcatgatcttagcttgatgatgaccaagagtagtttcgcagcactagcctccaaccatgttggagatagccacatgtatatcaa

SEQ ID NO: 2956 - DNA, 803 bp, Avena sativa
  modified_base (47)..(47): a, c, t, g, unknown or other
ttggaggttcattgcaagtgaagaaatgcagatgtcaagtaccgttntgcctaacctgctccattatgctagtaccaagcttttatccattgcaccaaatatcgaaactctttttctagactcactttatgagaaagtcaatacaccaatggtgctgggtaaattcctgcacctcaagtatttggagataaaacttttcatatcaagtcgttctccagattatgacttctgttctttgatttgttttcttgatgcttctcccaacttgaagatgttcgttttgcgtagaggagcctaccatagaacctggtctgattcctggagtcaaaattggtgaagacttctcatcaggaagttccattcggaaacaccgccatggcaagctgaaaagtgtgattatcaatggttttcgcccttggaagaccatgattgagctaacgaggtgtattcttgattatgcgacgtcactaaagcatcttatcctagacaccaccgatgggtatcataggaggaggtttgccaagtgtttcccattgggtaaggatacacttgccgaagcccgaaaggctcttgcagccatcaggacatatattgaggggatagtaccagcaaaggtcaactttaaggctcttgagccctgcaactgcaagaactgccaagatgtttgagttacgttatacggcttatgtctgggactttacgtatctacattattgctacagtttagaactcctcaaaatttcttattctattctatgacatgttgaaatatctaatgttttaaagttgtactgttatcaaat

SEQ ID NO: 2957 - DNA, 699 bp, Avena sativa
ccctggtatgtttgatgtattagtgatgccaaatctctatggtgacattattagtgatctatgtgctggtttgatcggtggcttgggcctaactcccagctgcaacattggtgaaggtggcatttgtctcgcagaggctgttcatggctctgcacctgatatctctggcaagaaccttgcaaacccaactgctcttatgctgagtgctgttatgatgttgcgccacttgcaattcaacgaccaagcagaacggatccacaatgctatcctccagactatcgctgaggggaagtacagaacagctgatcttggtgggaagtcatcaacgtcagactacacaaaagcagtttgtgatcatatctgaacgtcggctgctgtttttttctctcgataatttttctcccctcccctaattttgcttcataccaagaggtgctttagcttcaatggagtggcaggcatcgcaatttctttattgacatggtttaagactgttaaataatcgttgcatttgttctggagaagtttttgctagcatggcaaactagatgaagaatcgtctgtaataatcattggcagcatcgccatgtaatagtctgttcattcttgttattgaagaactggaattcaatctcgcatatctgtagcttattagggaatatccatgtggcttatgattgttttcatcatgcacttaag

SEQ ID NO: 2958 - DNA, 652 bp, Avena sativa
tccgcgtctctggaatccgggtctctgacgctgggggcgccgtttggctgccagacaggtcggagctgaaggggacggatatacccggcgtccgtcgcatgctcggccgctacgtgtcctcggttggcggcgacggtatggactgcgcgctagccgcggcggtgtatggaggagaagggggcgtcttggcgcagctgcgcgagctaaaggcgtggttcgaggtgcagactctgttccacttctattcggcgtcagttttattgatctacgatgccaatgcagtgaccacggctggtggtggtggcggagtaagggtgaagctggtggactttgcacatgttgtcgagagcgagggggtgattgaccacaacttcttgggcgggctctgctcgctcatcaagttcatagctgacattgtcgccgagacgtctgacatggtgtcttcaggtgattcttgaggagattttggattttgggaggtgatacaaaaggtctttctacttgctgctcatggccggagaaatctttgtggtggtggaaatgtcaagcgagtcactggctgccttcgctccaaaattagccaattcgtatattctttttttttttggttgtgaagaaaaatttaggattcgagcatgtactggaaatggtt

SEQ ID NO: 2959 - DNA, 661 bp, Avena sativa
ggtttgcagcctatgagggcacggatgatgacaccgaagcattagggattgctaacaatatgcctgagctcaaagacctccagttgatcggcaacaacctaactaatgatggactgctggcaatccttgaccattgcccccacttgaatcccttgacatacgccagtgcttcaacctccggatggatgatgctatgaaatctaggtgtgctagaattagagatctcaagcttcctcatgatcccatctctgatttcaagtaccgagcttacatgggcagcattggggacaccatggatctgatttcgagatcgatatgtacgacgatctgctcgatgtggtcacggatgacgatgaggctgaatttgatgatatggatgatttcgacgacgagggctcagaatctgccatgtatgatgatgtattcgatatctgaaggagttgtgaccaggactctcggttttcactgaggcagcaactttgagatcaaatgatgcggtgtttccctgtgttggaattctcgaagtttggtttgggcgcttggttaacaggatattgtcttatgtttgtccttctttcttcactcctgttcttacaagaaactagtctactctctatctatgagactgggttgttctattagacaaaaaaaaaaaaaaaaa

SEQ ID NO: 2960 - DNA, 523 bp, Avena sativa
tatccagcaataccatcaaccacagactcagaattcacttaggtcgcagacgtcttcgggcccacagtcatataaggatcagagtctaaagtctgttcagggaacacagactgctccagacccatatagtttacttgcattgttgcatctaataaaagcgaaagagcctggaccaacagctcttgccttagggcttgatttgacaaccctagggttgaatttgaactctcaagaaagtctttacaagacgtttgggtctccatggtcaaatgagccagctaaaggagaacctgattttcagattcctgcttgttactctgccgagcaacctccagcactgcaaccattcatttttccgaagtttcaaaccatgacactattctacatcttctacagtatgccgaaggatgttgctcagttgtatgctgcgaatgaactatataacaaagggtggctttaccacagagagtaccgtgtgtggctcacaagaatccaatgtggcacctcttgtgaaaattcactt

SEQ ID NO: 2961 - DNA, 637 bp, Avena sativa
agcaaattcttgctgtacttatacagtttgtcaaagacaagaagttggaacaccagcaccaatatgatgatgtgaagaagacgtggcttatcaaaagatgtcgtacaatgaatgctaaactaagctatctggagcaccatctcttgcgagacacctacacaaaggaaacagtacctgcgttgcataggatcaggaagtatcttgtggaggcaacaaaagaagcatccaattcctataatgaagcggtttcacgactccgtgagtatcaaggtgtagatccacacttcgatgtgatcgcgaggcagtaccatgagattgtaaagaaactggagggcatgcagtggacgatccatcaggtcgaaatggatctgaagccagcttcatcatgatcacacaggcgtctgaatcccatcactcatggaaaagagacatctcatgtagaagtgtttgttaccctctcaccagaatgctcaggatgtgagtttcgttgaatttgttgtttgtcggctaacggctgagtggactttcaccagagtgctcagcgtatatatggcacttgtggttgtgttaatgtttttactatgtatgtatgtcgtttttactatctagctagaggaaacatgatccatgaatcaat

SEQ ID NO: 2962 - DNA, 816 bp, Avena sativa
gtcgctgacggatgcagccggcttggccgaggtggcctgtactgtctggtcgactgtcttcatgaccagccacatctcccctggtgaatcattcctcatccaccgtggatcaagcggcatcggtacatttgctatacagattgcaaagcacctcggaatcaaggtttttgttactgcaggaagcgaagcaaaacttgctgcttgcaaaggtttgggtgcggatgtatgcataaactacaaaactgaagacttcgtacaacgtatcaaagaagaaaccaacggaaagggtgttgatgtcattctggacaacatgggtggatcttatctccagcgcaacctgaacagcttagcagttgatggtaggcttttcattattggtttcatggggggcactgtaactgaagtgaacttgcagcctatgcttgcccgaagattgaccatacaagttgctggactgcggggcagaaaccttgctaacaaagctcggatcattagcgaggtggagaaaaacatatggccagccatcgtgtcagccaaggtgaagccggtgatttacaagacgttgcctctatcggaagcagttgaagctcacaagctgatggaatcgagctcccacattggcaagatactactgattccagtccatgattgctaatggtgtatcatgtgtacagtaggggtcgttgtgagcaatatgtaactatgcattgacatggcttctatcgtgtaagttgttttctttgtagtgctggtgaaagcggagatatatcttgaaaatcaccggttacaataaatattggaagttggaagtcatga

SEQ ID NO: 2963 - DNA, 657 bp, Avena sativa
cgctgttgctgctggtgtcgaatcccgtcgacgtgctgacatacgtggcgtggaagctgtccgggttcccggcgagccgcgtcatcgggtccgggaccaacctcgactcctccaggttcaggtctctcatagccgaacaccttgatgtcaacgcgcaggacgtgcaggcgtacatggtgggggagcacggcgacagctcggtggcgatctggtcgagcataagcgtcggtgggatgcctgcgctcaagtctctgcgcgacagccaccgttcgtttgatgaggcggcgctggagggcattcggcgcacggtggtgggcggcgcctacgaggtgatcagcctcaagggctacacctcatgggccattggctactctgtcgccagccttgccacctccctcctccgcgaccagcgccgtgtgcacccggtctccgtccttgctgccggcttccacggcatctctgacggccacgaggtgttcctcagcctgcccgcacgcctcggccgcgggggtgtcctgggagtcgctgagatggagctcaccgaggccgaggctgcacagctgcgccgctccgccaagacgctgtgggagaactgtcagctccttaacctctgagtcaggccaccctaatttatctatctactggtgtaatgtatct

SEQ ID NO: 2964 - DNA, 927 bp, Avena sativa
tctgataaattcaaggctggtgtgcttctatctgtggctgaatgtctgaagggctttgtaattatacatgaagacatacgctcctttccagaaattttcatgccaatctcttctttgctgcaacaaattatggaaaaatctcacttacctgccccgttacgagaaatttcccatgaagttattgactttattaagaagagaagtgatgagcattatgcttcaagagacccactccaaatgagaaaacagaagcctgaaccaatcaagcagctcaatcccaaatttgaggagaattacataaagggtcttgattatgatcctgatcgagaaagggcacaactgaagaagctgaagaaacgcctgaagagtgagaagaaaggggcagtgcgcgagcttcgtaaagataattatttcctgtctgctgtgaaagagaaggataggataaaacaagagcaagaaagggctgaaaagtatggaaaggcaatggcttttcttcaagaacaggaaagtgcttttaaatctgggcagctgggaaaaggtagcaaacggaggaggcggtgacatttctcgtgctatagcagttaagttttgttcacacccttcctcggtactggagatagaattaggcatgtacctggtggcctaagcatgccccattttaactgccttttcaacttccaagttgaggacacaaaggaatgctgaagtggatggccaacgtaatctttgttagccatatggagctaccctgcatactagctgcgctcgagccatctgcaatgtatgaaacactttacatggcatacggtcgaccaaacacagatgtggatggaggcgttgtttctcttgcactcaaaaatgagttgctctactatgctgattttgttctccttttcttgatatatcctgtatgcagtgtcacttatg

SEQ ID NO: 2965 - DNA, 569 bp, Avena sativa
tggtattggaccagttgttcctcaagaatgcaacgactgtgggaagaaatttaatgtgggtggaccaatatggtctgctcctattcatgatcaagattgggtactttctacgctgacagacgttaggccaatgaaggacagatatcccgcatacaacaaaattacttcagttctaactactgtatcagaggaattgcatgacattccgttgttttttagtctccacagcatatctggcactgttaagtgcacatctccatctgcagttatgttcaggtcggcagttataaatgcaggatatcagatctcgagcagtcacgttaatccgcttgggctgaagtctgatgccccttgggatgttatttgggacatcatgcgctgctgggtgaaaaatcatcccatcaaggagcaaccgcgtgacactccaggcacggcaatcctttcaaaatcgccacagctagaagcgaatttctctagagcagttgctgccctcagcaaggctcagacgaagaaggtgaagcggttccttccaaaccctgaaacgtcattggggccgaaggtcagggcag

SEQ ID NO: 2966 - DNA, 714 bp, Avena sativa
gctcgtcaagctctaccgcttcctggtgcggaggaccaagagccacttcaacgccgtgatcctgaaacgcctgttcatgagcaagaccaaccgtgcgccgctctcgatgcgccgcctcgtcaggttcatggaggggaagggagaccagatcgctgtgatcgtgggcaccatcaccgacgacaagagggtctacgaggtgccggcgatgaaggtggctgcgctcaggttcaccgagacggcgagggctaggatagtcaatgctggtggcgagtgcctcacctttgaccagctcgcccttcgtgctcctcttggacagaacacggttctcctgaggggtcccaagaacgccagggaagctgttaggcactttggcaaagctccgggtgtaccgcacagccacaccaagccatatgtccgcgcaaagggcaggaagtttgagaaggcaagaggaaggaggaacagcaggggcttcaaggtttaagctgcagtgttttcggcacccttttgtcgtatttctcttgttagttaatcatcatcatcatcatcacctctttgggttaccagaatcgtactgttttagatctcagaatcttgtgcgttgatggattttcagaaccagttaaattttggttccatgtattgcactgggatattactatgtttgcaagccagttatgaatatcgtttctagtaagagcagagtttgtgctgctg

SEQ ID NO: 2967 - DNA, 686 bp, Avena sativa
caactaatgttttccgtgtcaaagaggatgttcgccctatattctgggctaacagaccaaagagttacatttcaaggaccctaggttgggattcagtacccacaaggtcggtggggtgattcccggaacccatcatatggagcgcttactgactaccagttcacacggccacgtggacgtggtaagaagcttcaagaggaatgggctgttccattgaaatctgtgcaggatattaatgagcgattcgtgagcttctgtcaaggaaaacttacaagcagcccatggtccgagttagacggtcttcaaccagagacgaagattattgacgatcagctggtgaacattaacttgaagggtttccttaccatcaacagccaacctgctgtgaatgcagagaaatctgattctcctagtgttggatggggcggcccaggaggctacgtttaccagaaggcctacgccgagttcttctgcgcaaaggagaagctggaccagctgatcgagatgtgcaaggcgttcccttctatcacatacatcgccgtgagcaaagaaggggagacgttctcgaacctccccgcaaacgccgtgaacgccgtgacatggggcgtgttccctggcaaggagatcatccagcccaccgttgtcgactcatcgagcttcttggtctggaaagatgaggcgttmac

SEQ ID NO: 2968 - DNA, 653 bp, Avena sativa
gtttcagcagaaaatatgaacagagaagatggtaatgtgaagaaagccaaggggaaaaagaagagcaaaacaaaaccagatttgctcaaacccaagtctcaaaatcctaatggtggtaatcaggacactgataattgtacccaagatttgatgcattctgatgcgcagacgggaagaattgagcatgactatgcaaatgaaaacaccgataaagttattcagaatggtagtatgctgcaacaggagacagaaaatgccacacgtgatagcacgcttgaaaagaatccccacctaagcatgtttggtgctgatagtaagacagatttgctcattgagaaggaccatgcacacattagcaaagaacaaaggagctctacttctcagacaaagcgacatgcaaagagtacaaacaatgatgtgtctattgatggaaggacaagtataaatcctaatgctgtaagcaaccctgttcagagttttcccatgagtccacaagcatcgaatgaaagcgcttatggcacaccagctgcaaacaaatttagagtagcagttcggaaagttccaagaaaaatttatgaacaggtcaagggcaaatccaaaaaggatagtaagagaggcacgggcacaattttcgatgacaccatctgagactg

SEQ ID NO: 2969 - DNA, 607 bp, Avena sativa
gcgagtggtgttgcacctccttccaacccaatgggtgctggcaggggtgttggtatcggtgctggttctggttatggtggtggaatgggaatgaaccgaccgatggggatgggaatgggaatgaacccacagatggggatgggtatgaaccagcaacaacccatgggaatggggatggggacgaaccagcatccgatggggatgaaccaacaaccgatggggatgaaccaacagccaatgggaatggggatggggatgaaccaacaacccatggggatgaacatgggcatgggagtgaaccaggggatggggatgcgccctccgatgggaatggctcccggtggaatgcctggcgctggctacaatcagatgggggctggttatggcgggcagcagccatatggtgggtacaggtgagattacacgttggcggattacacatcagatgatttgagaaacagtttagcaggcgtttgtattttgctcacctgggttttccttgtgtatgatttctttgtctgggggtataattttcatcacttattcttttttcctatccatgttggatactgtatctactgaaatgtattgacatctggatggatgc

SEQ ID NO: 2970 - DNA, 770 bp, Avena sativa
tgctgtcggcgctaatcctaactggcctaagggtaaacccttttgatgaagacagctggtcagacgaggatcactgcagaaagaatggggattggtattatctatccaaaacgctggcggagcgcgaggcttttgcttatgctgcgaaaactgggttggacattgtaactatttgcccatcattggtaattggacctctgctgcagtctacagtaaattcgagcagtaaagtactccttaattatttcaaaggagaacatgaaaccgttgaaaacagactcaggaatgtagtagatgttcgtgatgttgtcgatgctcttcttttggcatatgaaaatacagagatgtctggacggtacatctgcaattcacctccaataagagtctctgatatgataaccttactgaagaccttatatccaacttatacatatcccaaaaactttacagaagtggaagaaaatattgttttaagctcggagaaacttcagaagctaggttggagcttcagccctgtaggaaagactctgggggacagcgtcgaatcctacaaggcatctggcgtcctgaactgagcatccaactgcaactgggacaagtttggctgttgatacttgcaaattctttctatttcatgtaaacagtgaaacaaaataagtgacataattatcgagagaatcatgttgcacaaaaaaaaaatgttgtgtgcctttccttttggggtttggtaggtgtttggagcaatgtagttgcatgctgctgcatgctgg

SEQ ID NO: 2971 - DNA, 864 bp, Avena sativa
agatggtgtccgccgcgcaggccgtgatcccggagacggagaaggtgctctccacggagctcaagtcgtatggcctcgacgggaaggtctccaccaagctgccgggtttggtgggagaccacgtcaagccgtgcctgcttgatgccttcggtcctcttggcttggaggtcaaatggaatgacctcttctgggcagtgcacccaggcgccgttgcgatcctggacaaaattgacagggtcctccacctggaccccggcaagctgacggcgagccgaactgttgcacgagagtacggcaacatgctcagcgccaccatcatcttcgtgctggacgagcaacgccgccggatgcaggaggaagaaggacagtgggccgagtggggcgccatggtggccttcggaccgggcttcactatggagacaatggcgctgcacgccactagccacctcaaaatgaattaatagctaccacttcatccagcatacttacatgcatattctccgtatcgttcaaatttcattccacaaggactactacctacatatatactcgctatgaaaataaagaattaaacaacaattccgtaggtctagcattattgcagtacagagggtgttgagagcacatgctactagtgacgtcaacaaaaatatcacgtatgtaagctacaagcataactaagttactatactacattgtgttgccagttttactcgttggctttaagttccgcaccttttagttgttgcttatgtacggagtctgcaaatatatgtattatttcatgattttctctagtctattctctcatgtaaactttcattcacaatttcaaatacaacattttattcgaaacgtaaaaaa

SEQ ID NO: 2972 - DNA, 707 bp, Avena sativa
gaaggaggggctaccattgtccaactgagagaaaaagatgtcgaatcacgagagttcttggaggctgcaaaggcttgcgtggagatctgcaagtccagtggagtgccactgctgatcaacgaccgtgtagacattgccctggcatgcaacgcagatggcgtccatgttggtcaatcagacatttcagcacggaaggtgcgggagctcctaggacctggcaaaatcatcggtgtctcgtgcaagactcctgctcaagccgagcaggcctggaacgacggggcggactacatcggatgcggcggtgtcttcccgaccacgacgaaggcgaacaaccccaccttgggattcgaaggcctgaagaccgtctgcttggcttcaaagttgcctgtggtggccattggcggcatcaacgcgacaaatgcaggttcagtgatggagcttggcatcccgaatctcaaaggcgtcgccgtggtctctgctctctttgatcgtgagcatgtcatggcggagactaggaacctcagatctatcttgacgaacgcgctatgctcggtttaggatcttagagctagttctgacctgtgcttgtttagagagaatgagcttttaatttttctggttgttcctcgttatatttggcaataagaaacaaataagatgtgtagtcatcgaccaacaattcagaatcgtggttatggtccagtggt

SEQ ID NO: 2973 - DNA, 740 bp, Avena sativa
gcagctcaacaagattcagcaaagtgacattccactctcatatcatctggggctgctcggcatgcctggttttactgcttatgctggattctatgagctgtgctcaccgaagaaaggagagtttgtatttgtttccgctgcatcaggagcagttggccagattgttggtcaacttgcaaagcttcatggatgctatgttgtgggaagtgctggaacaaatcagaaggttgagctcctaaaagataagtttggattcgatgcagcttttaattacaaagaggagcctgacttaactgcagccttgaaaaggtactttcctgaaggtatcgacatctactttgagaacgtaggtggatcaatgctagatgccgtactggtcaacatgcgggtgcatggtcgcattgcggtatgcgggatggtctctcaacacggcatgactgatcctgtagggatccacaacctctactacctggtaccgaagcggataaggatgcagggattcatccaaagtgattacatcaacttattcccacagtttgtggatgacatggccaaacattacagggatggaaagattgtgtatgtagaagacatgagcattgggctagagaatgcacctgctgcctttgttggtctattcagtggtgaaaatgtcggcaaacaagtcgtgtgcgtgtcacaagagtgaagtatgtgtacattcagatgaatattaaaacctctcgtgattcaaataaata

SEQ ID NO: 2974 - DNA, 856 bp, Avena sativa
  modified_base (268)..(268): a, c, t, g, unknown or other
aatgagtaccgtgatcgtatattttgcctatggcaacagagaagtttagacgacctattaccacctgcataaaggttcttgatatgactggtttgaagttgtcagcactgagcctaatgaagattttgactgcaatatctgccgttgatgatctgaattacccagaaaaggccgagagctattatattgtaaatgctccatatatattctcagcgtgttggaaggttgtgaaacctctgttgcaagagagaacaagaagaaggttcangttttgcatggtagtgggaaagatgaactcctaaagattatggaccattcctccatcccccatttctgtcgccgcaagggctcatccaaaaattcatcgggtggcgtggatgactgcttctcgcttgaccactctttccaccaagagctctaccattacattgagcagcaggcgttgcagcaggagctggtcaagcagggttctttgcatgtagacatccccgaccaagaccccgaggacgccaagattgtagaggccatacaggctgagtttcacaagcttggtgagcagaacggatctgccaatggcgacaataaaataccggtgtccacgtaagatgcgcagcctgcatgtatcaaggcaaatgcgggtttccgtaatggaactgatgattattttcggtgtctgctttgtttgcttgaccaccccgatgttgttttcgttgggtaacaagttagtctcaaatccttgcagttccattctgcaaggctgaggtagaagaagcaaccactgtaatagtagatagacataaccaccacctgttcacctgttgtacactttgaaatgtattgtcctacctcctactac

SEQ ID NO: 2975 - DNA, 931 bp, Avena sativa
atcgcgcagcgcggccctcgatccggcccctggccgccgccctggcgcggcccatgcccttctcgtcggcgaccgcggtgaaacctagctccgacgatgagctcctccgcgtcatcaagtccgagatcaagttcgccgaggactgcgacgaccacgaccgggttgaggagatccccgagaacttccctttcaaaatcaccgacaagaaggggctcaatgacatcactctcacaagaacttaccagggcgaaaagattgaggtcctggtctccatgcccagcctagtcaccggagacgaggcagagcatgaccaggacgaggatgacaaggagaaagatgatgatcaggaagacggcgagaaggccccaaagtccaccatccccctcacggtcaccgtctccaagagcgacggcccaagcctcgagttctcctgcaccgcctacccagacgagatcatgattgacaccttgtccgtgaggcagcctgcagcaaacgatgaggaggagctgatcgcgtacgagggtcccggcttcaatgacctcgacgagaatctgcagagggcgttccacaagtaccttgagctgcgcgggatcacgcccatgaccaccaacttcctgcacgagtacatgatcaacaaggacagccgcgagtacctcttctggctgaacaagctcaaggatttcgtcaagcagtagagattgtgttagaaactatccctagcataagatgaggcaatgaatgtgctttgcacatcctcttttgagacttacgaccctctgaactatactctagagagtatacacataaacaatgtgtgcttaaatcgtagcgtgatgttagtttagagcaccttttcggtaatttgtagagaatgctttgttcggtagtatgaaatgatttttgaggaaataattattctctatagtacatt

SEQ ID NO: 2976 - DNA, 740 bp, Avena sativa
ccaagaagcgcaaacttggatcagtgaggaggttcaagcaggatgaagcacagcaagatcaaggtgaacttcatactggcagacatgagaagcctagcaacgaggatgttgattccacagagggagaaactggtgataggaccaaggggggggattgcgctaaccgaattcatattactaagatcatcaaaccagtgcgctattatgccaccatgacagatgatgtgcagcaagtttcaataacattcaaagcactcaggtctgatgggcaggaggtccttgtggatgacaaggaattgaaatctaataacccattggtgcttataaactactacgagcagcacctccgttataatcccacctcgtgaaaaggacgaacggaacaagttcggtttcatttggtgcatgagttgagatgtctttactacagctttctttatgctagagaaaattgtggtaatatagttttgtcctagaagtcgtgctgaatgtaggaactgaaatggaaaaccagggatatgtaatatgtgctgacaagttattgcagactttttgtggccagcatcccagtcctaggcctcaatgtgaaaaaccagggatgtgtatttgtgaagtgtcggtccaatggggctcctgccgttcgacagatgtaaaatggagcagttgtgtaccttttgctcggcctcactgctttgaattatatgaactagtcgtatgaagacatcttagaaacaaaaaaa

SEQ ID NO: 2977 - DNA, 875 bp, Avena sativa
cgcggggaactcaaccgtggagccgtacattgcagctcataacatgatactggcacatgcgtcagctactagactgtaccgcgaaagatatcaagctgtgcaaaagggagttgttggcataaatgtttactcgttttggacttattctttgacaaactctactgcggatatagcagcaactaaacgatatcaggacttcatgttcggctggacgctagaacccttggtgtttggagattacccagaagtcatgaagaagaacgttggttctcgccttccatccttcacaaaatctcaatctgaatttgttaagggtgctattgatttcataggaataaatcactactattctgtctatgtgaacgatcgtcctctaaaggaaggtatccgcgactatgcagcagatatgtcagtttaccagagaggagctagaactgacccggcaacaagtgagtatcttccatcagtttacccagacgacccagaaggattgcaatttgtgctgcagtacctgacagaatcctatgggggccttcccatttatgtccaagagaatggtaaagcatctagcaatgacatactcgatgacaccgacagggtcgaatacttgaagagctacatagggggaacactgactgcattaagaaatggagccaatgtgaaaggctacttcgcgtggaacttcctggacatcttcgaattcctgggagggtaccagtcagggttcggcctgcaccgtgtcgacttcaacgacaaggcacgaccccgtgaagccaggctgtctgcacggtggtactccggctttctgaaaaacaatggcatccatgtccggagtaggatggacaatataggatctgtttctcaacaatgagtta

SEQ ID NO: 2978 - DNA, 708 bp, Avena sativa
tgcactcatcgaagttctgcctaaacattgccggggacaccccttcttccaatcgtctgtttgacgccatagtaagccactgtgtccctgttatcataagcgatgacattgagctcccttacgaggatgtcctagattattccaagttctccatctttgttcgttcgtctgacgctgtcaaaaagggttacttgatgaggctgataaaaggcgtagacaagcgtcgatggacaaggatgtggaacaggctcaaagaagtggataaacattttgagtaccagttcccatctaagaaggatgatgcagtccagatgatctggcaagcattggctaggaaggtgccttcgatccggttgaaggcacataggtttagaagatcttcaagatctgaaagagcaaacaaataaactggaaggaggtgtatgtatcttatttctaggctaacacagcatttcactgacacttatagatcagttgcatatgtcattgagtattggtatgaaggaagattgtaatctagaagattcaggtcgagtgtttggttataccgattcaggccgagtgtttggttataccttggaagatggactgatagcttaggatttgtcagtccagttgaatgcctgatagcaaggcacatgtttattgcttctgtaacatgtattttgaagtaaactaataaaaaagggagtgatgttatgctagtaa

SEQ ID NO: 2979 - DNA, 791 bp, Avena sativa
agaacaagcaatgcttcagattttggtgagaatggaacaggaacagaaagtgacagaagatgcccgcatagctgctgaacgagatgctgtcgaacaaaaatatattgctcacttgctccaggagaagtatgaagcaacaatgacatcactttccgaaatggagaagagagctgtgatggcagaaactatgttggaagctacgaagcagtaccaggctgggcaggttaaagccgtgcaaaccttcactccaaagtcaccacatgcagacctcgggaagacaaaccaagataatgaagatacaactaacaagaaaatgggcttgctttctaggggtcttggatggctagagaagagcaagggaaagccaaattccgctgaaacgactgaaggctgaactcagtgcggaattaggtagaaaaccatgagccccaacaaggatcttgacgaccatgaatgattggattgcccgatcaccactacaatccttcaaacgagccagtttttgtccgcagggagatcaacctgcatttccgatggaagttttgctgaaattgtacttggtaggtctgaaccgttgcaaaacatccatgtaattttattctccgattagtttcattaagattgtcaatacttagtgttccatttaggagaaagaaaatacacacgaaagccccattgtttttagactagtttgtgagattgtcatagagttataccggggaagagcctgtattatttctcttctgaaagaattttgcaacgcattgtaaaggaaatgatctttcagtgtc

SEQ ID NO: 2980 - DNA, 809 bp, Avena sativa
aagtggtatcggtgaaggtagatattggctttgcaaaggaggcaccagttttgggcattttcggaatgaatgtctaccataaaaatcggctaatcatgccattctggaaggtccttcaagaagcatctagtagagggaggagtgttgtaggtgtactcgaggcaaattttattgagccggcacatgacaagcaagattttgagaggactccactattcattcggttagaaacaaaactaagacagattatcgttgattattggaaagaaaaatgtcatctaataggttaccagccaattgatctgaaattgagatcccagtataaggcgactcttaaagattcaggtagtcctggagcgaagattcagcataaagctttcgctgctcggaagattggagagcatctctcaaatttgctgccggagacatatgatgatgttgaagctgttagactgacagctaatggcgcaggttctgctttacattcgtctggccaagcacaagaaaacagtatggaatcagcaggcttggaagaggatctagtagatgtcggctctcatggtgtacttgaccccaacttcagtgagaagttgagtgaagaaaatctggctctgttcacaaggcgtgaagatctccggcaacgagatacacagttgaagcagacggtttgtcataacagtttagaagataagttagcggtggagatcatatgatgccgcctaattagatttgattattctttgtagattggtgagctggagcgtgaactagaggaaacaaaaaggagtgctctcatcttgctgctgagc

SEQ ID NO: 2981 - DNA, 814 bp, Avena sativa
tatcgcaatcatatatgcattatatgcacgaattacgccttattcacactgatctgaagccagaaaacatactccttgtgtcttctgaatacataaagcttccaagtaccaagaagaattcacaagatgagatgcacttcaagtgcttgccaaagtccagtgccataaagctgatagatttttggtagtacagcctttgataatcaggaacataactcgattgtttctacgaggcattacagggcacctgaaataatcttaggcttaggctggagtttgccatgtgatatctggagcgttggttgcatcctcgtcgagctatgctcgggggaagcattgtttcaaacacatgacaacctggaacacctagcaatgatggagagagttttgggtcccgtaccagaacacatgatacggaaagctagttcatcagctcagaaatactttagacgagggacacgtctgaattggcccgaaggtgctgttacaagggaaagcatcagagcagtcagaaaactacaccggctaaaggacctggttgcgagaaacgctgaccattcgaagacatccctatcagatttgctatacggtcttttaagatttgagccttcagagcgccttactgcccaagaagctctagaccatgcgttcttccgaagtccagccccaacatgacttgttgctaggtcatgttttcactctgcccctcgatgcgagaaccaggcctatagaagcaggcacagaacagaaggcctttatccaatctactaccatgaagatataatgctcgcggtggtgataatctgttgttgtt

SEQ ID NO: 2982 - DNA, 534 bp, Avena sativa
aagtctgcttcatttggctttgtggaggaattatttgaagagggctctgcgttgttggaagaaaggttgggaaggaattccccgtcaaaagcaaatgcgcccccatttcgctgtgcgatctgccaagtagaccaagttccattcgaagatttgatcacagatactgatggcggttactgttctgccccgtcaacaccatgggctggtccttatctttgttcaggctgtagaaaaaagaaggatgcaatggaaggtaaaagatctagccgctcgactgcatgcagttgaaagtaccgatatgccgcattggcccctgtccatgtgaagtagtattctggtttggaattctgctcgatgtaaaaaagaagagaataaactgtttgtcgctggatggaagtattatttggtgaaactaactgtactctggcctgaaatgaacaaattgggctactaacaaggtttggcgtccatcaacagcgctgatgaaatttgcatccgcgctgagaagatggctcccagaatttcaagacttrg

SEQ ID NO: 2983 - DNA, 539 bp, Avena sativa
gggtgattcttcttgggttttcagtgatgccccgtcccggagaaatagcatttgaggtcatcatcttcttgtcattcttgatgatgctatcctgcacaacaattgggatactgttgctggtatacttccctgtggcagattcattggcactccgaaagataggccgcagggaaataacagagatggtgccgtacgacgattactactatgaagggtcatcgcttgtggcgcaccagagcttccgtgaaatcgagcggaactctgacacgtcaacaaagcgtggctccatatccttccgcacaatgatcagggaagaccaacttccgcaggatggtgtagatgagatcgggttctcctcgcgcagcggcgtccctattggatcatcctcaccttcaggttcttcaccaagtgccgctatgctacctctcaaggaagtacctagatactaagtagtgttcacctgtggctttttgcccttgtgctatgtgctctcctttcttcttcctcttaccacctaccttaatgataacaagttttgt

SEQ ID NO: 2984 - DNA, 843 bp, Avena sativa
tgaacagaaggcatttgcgttgagataccagactgctggaatgctggagactgttcttagagccggtgtgcttggagaagatgataccggtgaagattcccccaaaaacttgaagataccttctcgtaaaccatctatcgtatgtgagaattgtctttactcccttgatggcaagggtcgagtaagagcttttcacataagtgacccaaagggagtgctcgatacacttattgttttttattgaaaatcagggctcccgtagtgccacttaccgactctttgactgatgatcctgagattcccagcaacaataggataaatgccctgcttggaagatgggagggtcattctgtgacaaagaggagtggggtgtatggagcgacgcttgatgaggctgatacgattgttctccttgaaatggacaacgatggtcagctgattcaggataatatatcaacgaaaaccggaactagcacaacaacaacggtccactggacaggagtagcaaataacaacttgcttcagtttgatggaggatatgaaattactttgctacctggagggatgtacatgggatatccgtcagacatcagcaagtgcattgagaggttagattcttttcatttggagctctgttggatggaattcccaggaaagaggcagcggcttgtgcggactttcgatgcagctggtctggctgtttcgtcgacctacttcatagagaccaaagtatgagtccgtgagtcacagctttgcttattttgtacaaaatgtaatgcaccgattttgtgagttttccaataatctcactggttagtgtcatggtacattgttcagtacatg

SEQ ID NO: 2985 - DNA, 699 bp, Avena sativa
atgttttaattcattgcaagagtttcattcacagcgaatgatgtcatggctgctggcttcgacggtgttaacggtttcagctttcttgctacagttattaggtatgcctttcagcaagcctctctatacagtgagctacatgctactcaccggtggagtgtctggattccttctagttgctgctgtactacatagttgatgttatgcatatcaagaagccattaattctgttccagtggatgggcatgaatgctcttatagtctatgtcctggcagcctgcgagctgttccctacgctccttcagggtttctactggcggtcacctgagaacaacctggtggacgcgacggagtctctgctccagatcatcctccattcgaaacgttggggcacgctggcattcgtcttcgtggagataatcttctggtgcttggccgcctgcttcctccacatgaagggcatatacctgaaactgtagtagaaacatgtaagccccacgtctgcatatcggacctctccctttgactaagttggtcgatatctgctgtgcatcattcgttgaatcgattttgcttggatatggtccgtcctgccagatatgtacagtacataggaagttgttgatgatgggccgtttggttggttgctctacagtttgccttctctggttgaccaaatcatgaacgaaacaggaggcg

SEQ ID NO: 2986 - DNA, 851 bp, Avena sativa
cacaatgctgcaagctctcaaccatgccaagaacggagttgatatagtctctggaactcgagtccggacacattttgcgagaccaaattttaagagggtgctatctaaagtagcctccaaacatccttatgctaagataggtgtattctattgcggagctccggttctggcacaggaactaagcaaactttgtcacgagtacaatgccaaaggcgcaacgaaatttgaattccacaaagagcatttctgagacgaggtaaattgtgcacaataggaaaaataacacaggacagtgttgtatgtatatgtcgtgtttgcttgttgcgcactggattcgggggagcaaaggaagagagaagcatctagcgctttcagggtgcgcctgcagctagttaccagtggacacttgttgcttggggatactcggatacagtaagagcaccgagaaaagataacttggggatcatctgttactgcgtacatacacacgacatcagatgggttctaatagtacatatctcggttttgcatcggcgagggcatgatccctgcaaagaagttgatctcctgagtatggtctatggtttggactacgtatgctgggtgatgtaggacagagggaaaggccaccatgtacacaagtctgggtaactgtatatttgcatgcagccgagttgtcatcaggccacatcaagtttgttctaactttgtaattatacacagatatgggaaaacaaacagggagtacagtttgaaattgtaattagtgtttgtaggtttggtagaggtttggggtctagattggggaactgaagcctgtaatcgttgtgttcttgtgccacgagagaata

SEQ ID NO: 2987 - DNA, 960 bp, Avena sativa
gtgctcgtgttcctggtgctcttcacggtgaagattgtgaaagaggaaaactgggaaacattcatcgctgattcattgctgtatgcaaagggcctactattggcagttacttctgttattgattataggttaaccatctgctacttactgggatttgtcgttatatatgctgtagctcaacaaccaccttatgatggtttaggtgattcaaatcatctaaccccgttgcaactggaaaccctgctaactgaagagccaaaaacacggtttttcctggctgagttccggacttcctttttagcgaactgtatacaagcaagcagcgttatgcctgaactctctaacatatattccaacaagaacatttcttttggaatagttgatctcgggcatttcccaaatgctgcaccgaggtttggaatatccatgttggatcatcttcccacatatatactgtttgacaaggcgactgaaattgctcggttcccagaaattggaaacgcaacaaaagtattcgtgccaaaagttactaagaagcttctctgccagcactttgatcttgacaggcgactgattgaatacctatctacctagttgatccatcgtctatcccaggtgtctcaaatgggaggtgccaattcagacaagataaatggaccggacatttgtgtggcagccatcacttcacgggggtatcttcaagtttgttttattcgatgggtcaggttgcacccatccaatccaaggccagtatacttagtggcgacaaatatgtttctgtcacttcttgaattctggagtgttatagcccctgtagagatcttgtaatgatttaccgactatgctctgcactgcagtagtggtcaatccagacacgaatcgtttctgcagagcagtgtgtctcggaatttgttcggatctcggcaccttttcccaagtggtactggcctgctaggtagg

SEQ ID NO: 2988 - DNA, 832 bp, Avena sativa
aatagctccacgtgctaaccataagctactctttaaatactatggcccttttcgagtggtggcaaaagtcagggagacaacatacaaattggacttacctgctggttccactattcatccggttttccatgtctcacttctgcgaaagatgttgacggatggtatgcctacttcctctaccttaccttcagatactgaccatctagctattccttttaagatcatgtctacgagatggcgcaagaaagcgaatgcagtggttgaacaagtacttgtacaatggacatctggtgatgctggttctgcaacttgggaagatcgagaggagctaacaagccgctttccacgagccctagcttggggacaagctggctctcaagggggaggggtgttagcatacccaatgatggcagtgtacactctaagggcgacgacatggacgatggaggagagacagatcattcaaacataagaatccaacaggaggaaaggaggacgacgcggcccatgaagcccaaccgcaagtatgtcggaccgacgtgggtccagtgaagctaatacatacccgacacgaggcgatgggagggccatccagaaggatcacggtggcgaaacggctctgtctctcaccctcttgcttctctgattcccatccttgattctctgttcttccaatttcctggttgaatcattgtatctggattattgtgttgttaatcaattcgaatcctagagagaaccttacgctgttgggcagtcatgtccagatttttgcgtacactccccatgcgaggctgcgacagctttgtcgtcttgaccaaaatggatctac

SEQ ID NO: 2989 - DNA, 910 bp, Avena sativa
gaccaatccatcgattccgattggagtgcttaacatgacaatattccgtcagggaaaagaaattgaccttattgttggaactgatgtaagagatggtaatggttcaacacggatggtgaattggtgtggatctataattcaggatcctcattcagcagtgcgtgcacttggctttttgccagaggaaggtcatggagtttatgttgctagatggtgtcatggaagtcccgtgcatagatatggtctctatgctctccagtggatagttgaaattaatgggaaaccaactccagatctggagtcctttatacaagtggtgaagggattggaagaccgagaatttgttagggtgaaaaccgtccatctgaatggaaaacctcgtgtgctgacattgaaacaggaccttcactactggccgacctgggagctcacctttgagcccgcgacggacacatggcagaggagaacaataaaagcgctgcagccaactgtggtttgatttaatctgctgtgttgtgatatttacaacgggccttctctaggaaggccaagtatggaggtgaggaaatcggaagcactcgtcaatgtcggtgagcttagaatcctgcattgagcaggataaagggtgggtactaggatctagtatataattcatagatgacatatggatttcattgcctgtggataattagactgtggggtgtcttttatatacctatatattgctatattctttcttcttctgtagaaggaataaactcttggcgtcgtagctatcatatcaccatttttctgcaaagcgtgccgtttgcagtttggatatgatgcaagaacattgagttgtgcaatgtgtggaccaatgtaggtacaatgatcaaattgttttgcactggttatatagttgcatgag

SEQ ID NO: 2990 - DNA, 589 bp, Avena sativa
ggagaaggcgcggcagaaggcggacgtcgtggcggaccagagcgacatcaacgagcagtccaaggcgaagatgatcgacaagatctacaggaaggcggtgtcgacacagagacccaagaaggagtacgtggtcgccaagaagggcgtccaggtcagggttgggaaggggaaggtgctggttgacccgcggatgaagaaggacaagagggctgagaagaaggggaagggcggcaagggcaagggtggcgccaagggcggcaaggggaagaagggcgccgccgctgctggtggtggtggtggtggccagaagaaaggaggcatgcgggggaagaagcctggtggcaaagcttcgcgttgagtagtagttcaacattggcatggatgaacaactaggctctgccggtaaatttttgcgtgtccagctttattaagccggcaagtcgggggcaggtatctgtgttatgcaccatcattatactatagcgatttcacatctgcctcaaagttttgcagcttgagttgttaattgtgtacactactggacaataattttggggttcccggaaatacatccgctatgttagaaaaa

SEQ ID NO: 2991 - DNA, 558 bp, Avena sativa
tagacatcagcaacgaggttaaatttgcatggaaaattcagagggacatggcagagcgtgggcacagccttgaaagcatcaaggctagcattgaagccaggaaaccagattttgatgcatttattgatccgcagaagcaatacgctgatgctgtgattgaggttctgccaacccagttgattcctgatgacaatgaaggaaaggtgctgcgtgttaaattgatcatgaaagaaggcgtgaagttcttcaacccggtttacctcttcgatgagggatcaaccatcaactggatcccttgtggaaggaagcttacatgctcttaccctggcatcaaattttcctatggcccagacacttactttggccaagaggtatcggtgctggagatggatgggcaatttgacagactagatgaactcatctatgttgagagccacctaagcaacctctcaaccaagttctacggggaggtgacacagcaaatgctaaagcatgcagacttcccaggcagcaacaacggaacaggtctcttccaaaccatcgttggtctgagattag

SEQ ID NO: 2992 - DNA, 735 bp, Avena sativa
ataaatgtggctgtacaaactgagctatggattgtttgttccagtagttagggacgcagacaagaagggacttggtacaattggtgaggaggtgaagcagctggctcaaagagcaagggataacagtttaaaaccacaagattacgagggtggcacgttcactgtttcaaacttgggaggtccttttggaattaaacaattctgtgctatcataaaccctcctcagtcggcaatcttggccattggttctgccgagaagagggtgatacctggcagcttggatggtcagtatgagttcggttcctacatgtcagtaacaatgagctgtgaccacagagttattgatggtgcaattggtgcggagttcctgaaagctttcaagggctacattgagaacccgaccacgatgctgctgtaaattcaggaggatgaaatctattcttgtcaaagttctagaataatgcacagaatggtgctgtctcagtttacataacctggcatggtctcgtgggacctggaaccaagagcatagagcagtcaacacaggatgacctgattttggattggaacatttttctgttcgttcctcccttgtgtttcttcccactgttaagccgcaaagtagattctgagttacatgcgctgttgagctctattttttgtcggttttgtgccactgagaaactcttgaattataggttttgcctatttttctatacatacgcaaacttgacc

SEQ ID NO: 2993 - DNA, 870 bp, Avena sativa
aaggaagaaacgcacgaggaagtctagagcaagtgctgaaggtgcttctggagagaagaaaaggaggaagagccggaaacaaacagttgaagctgagaaagagaatgatgaagaagatgctggtcctgctggttctgaagatgtaccaatgggagaagatgatgacaactctgaagagcaagaagatgctgggagtgatgaagagcctgaggagactccagctaagaaaaaatcaacggatgtgaaacaaggaaagaaggaagctgggtccaaggcgaaagaaaatgatgcatctggaaagaaggcttcgactaaacctgcaaaagcaaagccagatgtagaaccagagagcaaaaagcctggcaagaaagccacaaagagttcaacaaaggaaactaatactcctgtggataaggccaacaagaaggtttctaaaccaaaaaaggatgagaaagaaagccaaagcaatacttctggtgctgtgaacaccaagtcacgcaagaagcaaggtgccaaggcatccagtgaaaataaaggaaaaggcaagggtagcacagatgctgtgtcagccccaaccactaaacagttgcatgctgtggtcagtgacatattgaaagaagtggacttcaatacggcgactttggcagacattctccggaaattaggagctcacttcaagatggacctcatggataggaagtctgaggtgaagcgcatcatagaggaagtcatcaacagcatgtcggatgatgaaggcgaggaagagaatgatggagacgcagaagaaaatggcaagaaagagaattcaaaggaggatcctgatgaggatgagaaataagcggtgatgggattggaccaagctcctgtatt

SEQ ID NO: 2994 - DNA, 639 bp, Avena sativa
atcttctgcttggccattcagcggcaacagcacaaatcagtttcaagctggtgctccaaaagactggcgtagtggtgactggctctgtagctgtggatttcataactattcatctcgtactcagtgcaaagagtgtaatgcacctgtcccatcaggcatggcatctacaacaatgaaaaccacaggagcagatacttctacattaggtaataagcgtttggcatcagaggagctggttaatgactgggatagtaaaaggctaaatccaggaaatgctaattatccactttcagaccgagccggacagacagcttattcggggtatgacaatgggaactcaacggcatcaccctctggacaagtttcagctatgcctggtgtacttggacaaggagcaaaatggcgtgaaggagactggctatgcaccagctgcaacaatcataattatgcatctcgtgcattttgcaacaggtgcaaatctcagaaagaatcttcagttcatcctggtgcgctatagcttgcttgtgcttttagcgacttgcttatccaagtgttggagttccctggctctgctgcagctgattagtagctgcgccaacagggatttgttgtttgtttgggattttgtctgcagtgctt

SEQ ID NO: 2995 - DNA, 715 bp, Avena sativa
tgtggacctctccgactgcttcgaccccaccattgacatggtagccatggcgtgcgctgccgtcgaccgcgccgacggccgcctcgagcatttcagcgccgattgtttcgtcaatgatcagcttctcttccacatcgccaacagaactaccggcttgaaaagccttcggctagttaactgcatgaaagtctcatccaaaggcttggttgctgtgggcaatcgatccccacatcttgaggaactagagcttaccacctgctccatctacatttcaatgaaggctgttggccgagcattcccccagctgaagcgactgcggctgaacaaccggtgggtcgatattcagtgtgaagaacgttttgacaaccgccgtgccttgcaaatagctaggaacatgcctgagctacgtcaccttcagctcttcgccaatcggctccgcagcaatgcacttgctgcaatccttgacaactgccaccacctcgagacccttgatttgcgtcagtgtttcaacatccagattgacgcgggactgcgagcgaagtgtgcaaggctcagagacgtgaagctacccaaggactcagtcagtgactatgagcatgagtcatatatcgagacactctcgctgaacaccgtcccacttcttttcccgtaccatggtactggccctgtcccgggttatgatgacagtgatgaggacgaccaggaggatgatttg

SEQ ID NO: 2996 - DNA, 529 bp, Avena sativa
actctgggggtagaggtggtttgcaggagtcacgattcattgagaagcttgttaaaagtgagcgtcaaatagagggccttccagacaattgcaaccgagttatggtctggaatttcaacctggaacctcctcaactcaactatcctgccggatggtcattgtggaacaaccttgaggtcaacgtacctctaacatagaagtcttgccgccgttgctgcactgtgtacaagacagaagcgtgataaactattgtaatggcgcagaggctctgaatttcgactttgtgttgtccacaagtgccgcggccctgctaactgatgccctcctgaacagcctgtgcaacagggatcaagaaagtcatagcgccgtggtctgcctccagcaagccaaccctattagcagccgcgaccaagcaaacctgcctgaccaaactttttcttctttttgtgtactctctattctttgtgtgctcttgatttccctctgtattcgtcagctacaaaatttcctgtagtattttttcacggtc

SEQ ID NO: 2997 - DNA, 712 bp, Avena sativa
ttcggggccggctgcttctggggcgtcgagctggtgttccagcgcgtgcccggggtcacccgcaccgaggtcggctacacccagggcgccttccacgacccgacctacgaggacgtctgcaccggcgcgacgggacacaacgaggtcgtccgcgtccagtacgaccccgccgcctgcaagttcgacgacctcctcgaaaccttctgggccaagcacgacccgaccacgcccaatcgccaggggggcgacgtcgggacccagtacaggtcagggatctactattacacccctgagcaggagaaggcggctctggagtccgcggagaggcaacagaaggtcttgaaccggaagatagtcaccgagatcctccctgctaagaggttctacagggcagaggagtaccaccagcagtacctggagaagggcggtcgcttcggcttcaggcaatccgcgcagaagggctgcaacgaccccatccgctgctacggatgaacaagcatgatgaccagcaagcaaataggcagcactttatagtcgagagagagggctgcctgaataaggtcgggtcacagctgaatttcactacagttttctcagcttaatctaaggattgtaagagacgagctatttaccattgcacttagtatgtgattaccatgataccatcgtacttagtggtactttgttggttggagttttatataatcaaaaa

SEQ ID NO: 2998 - DNA, 787 bp, Avena sativa
cccgggaaagagtcgagcatttgaacagctccggtctcttcaagctgtgtgataaaggttcacggttgaatgggaacacactgaagttattcagcagatggatcggaagttggggaatacataattggtgatgcaggataccctttgcttccttggctgctcacaccttacaaggaaaatgacctctcagattccaaagtggagttcaataggagacactctgcagccagtgccgtcgcactgaaggcgctagcaaggttcaaagacacatggaaattcctgcagggagagatgtggcgcccggacaaacacaagctgcctcggattatccatgtgtgctgcttgttgcataacatagtgatagacatggaggaggatgcagccatggacgaggcacggatatcggacaatcacgacgcaaactataggcagcaggtgtgccagttagctgatgagaaggctgtcaatgtgagagacaaactatctgagcatttgaacaagagctgacaaaataggtcagtgaagaatgttacttaggtgctgctgttgatttgtgtgctgcagttttgcagctgggggtcttttgatgcactgttttgcagagttgtggccaatcttaactgttgaaactcgtttgcaatcatcttgttggcgctccatgaaaatcatttactctttacaagatcagttgtaaacttcggtaacaactatcaacatggtttacaagaaatttgtagggcacttttgattcacatgatttgaaaaatcccgcaatttctacgactaa

SEQ ID NO: 2999 - DNA, 841 bp, Avena sativa
gattgtgagcaaggacaataatattttggagtcattccatgcctcaaatcaagcatcaactcttcagttccccaattattcttcacttgagggatcagtatttgaaagatttcagcctgacctcatcaagaaactcagcaccagttgtctggtcatgcaaaatcacaaatggggtatatctccaaagagatatcgggagaatggtgccttatcaagtttcttcaagattctgactacatcccctgatgaaaatggcgaggtttatgtctcaactgtagaagcactgaaatatccaatcacttgcactcagtggcaccctgagaaagccatttttgagtggggtaaaccaatgattccacacagtgaggatgcggtacaagtgactcaaaattttgccaactattttatcagccaagtccgcaagtctccgaacaggcctcctgccgacaaggtgcaagacaaccttatttataactacggccctacattttccgggaaaacttcgaaatccttcgagcagatgtacctcttctcctaagactggagccgatgcttgcaactgcaagtattgtactgttgtattgtgtgccccatactgttgtactgtactgatgagaccttcagttcagtactagtggtagatcattttagactttattgtgggtatccgcgtacaggaggaacagcattggtagctatggtgtttgctgttggtggagtaataaggagcaatcctccgaaatgtattcatctgtattactcaagctcgttgtcgcttgatacactttgtaatgttgaaaattccaaatctgaataccaataggttttttgtggcawgcct

SEQ ID NO: 3000 - DNA, 690 bp, Avena sativa
gctatacagaaagaacaagatggggcaaacaaaaagggcagtgcggaaggacaaatggaccaatcagaagacgaatcggatgcagatgaggctgtgatcgaacaattggaggaaagtagtttggatggggacgagcctgtgatagaacaactggaggaaagtaaggaacctgagacagaagtctcagtaaatgtttgatttagcagtaaaggccagtggcactgtctctgattttagaaggtaccaatactgttcatgtaaatacagggatggtgctaatgtacttgcggtccttgcctgctgaaacagtacaaccatccaccaccatcgctgcctgggcagtcagacagaaggtggccctgcaaagtcaagaagctggtagctgccatcttacattctggtctagagccttgaatcatctcgcaatgtgccgatggaatccactaatcgtctcagaaccatgcaattaagtgagtcagtgccagccatggtggttgataataaggtttgcttgtattgcccggtgtggcattgttgtctagaagattttgcttcggcgctgtcattcccatgtcccggtcagtgttgtggagaagatcggttgtatcttgttgatttttgacctttgcctggaagagcctaataataagagggtgtcgtgctattcactcttggtagaaagaaaaaaaa

SEQ ID NO: 3001 - DNA, 466 bp, Avena sativa
tagtttccatcggtggagcagaggcagtagctagaataaaggaggtgatgatatctaggtgtcgaaagttaaaagaagcagagcagatcatgaggagaggcccacggccttcaaggaggaataaatgacacgcggtctggagcacatggcttcaggatctgtaggttggaagacccggggacagcaataatcgatgcatgcctttgatcgtcttgctggctactacataaatctccatgtctgcttcttttatctgcaatccatgctgatgccgataaccaccgaacagctccaagtccaagagtctgcacggaggttaaatacttggccacagcttgcgaccgagtcttaacttacaaggcgtacatgacattgtaattatcgtcactgaagtgagtagtagcaatttatatcgtgtgtcacataaatgacagtaacacatggccttcactgcaacttgtgtatg

SEQ ID NO: 3002 - DNA, 870 bp, Avena sativa
cgaagccatgatcagatatcatcaatcctctggctgatgcattcagacctccatgaacccaagttttcccgagcttttgaatgtctttctactatggctgcttgtgtagagccagaagttgtagattcaggatatggagaagaacgtagaggaaacatatctttccttgagcataactattctaaagcaaagttccatgtgcgcctgaaacgaaggaatggacgggtgaaacatctgcatgaggagttacatgtcgagggatatgatgtaaaatttgtttctgcttcttctttaagtatggaagtgaaccaaaatctagtgcctaaggttcagttcaatcttgatctgtcagaaaaggaaagaagtgacagggcaaatgttgttcttccttttgaacatcaaggaaaaggtgagccaatccgtatatatgacggccggcgatctctcctggaggctcagcaagatacaaatttaactacaacaactatcctggacgaaataaaagttcctaaatctgcaactgcgaagggtgaaattcattacattcgtgattctgatgatgagcgacctgactcggatgaagacccagacgatgatttggatatttagccacaatatgagcccagtttagcttattgggctatcaaatccaaggtacattaggtgcttgcgaaaaagactaggaggtgattccctttgcttgggtgccgagtgcaaacttgatgattgaattatttaagcatctgtgtagctttgtcagcactggaggacaaccttggtagtatttgaatgctcaaaactactagatctgttatcagtagtctgttgagtaaaaactatcgcccagattttgtagtgtttggtgacgtg

SEQ ID NO: 3003 - DNA, 651 bp, Avena sativa
cgggatcttccttctggttgcttccgccgagcaacttccaatcccccctcgattccgccagcccgatcgcttcgatcaatctcgtcgccgcctgcgtccttccgtcggttggagatggccaagacttccttcaagctcgagcaccccctggaaaggaggcaagctgaatctgctaggatccgtgagaagtactctgacaggattcctgtgatcgttgagaaggctgataagtctgatgtcccagaaattgataagaagaagtaccttgtccctgctgacctaactgttggccaatttgtatacgtggtgaggaagaggatcaagctgagcccagaaaaggccatcttcgtctttgtgaatagcaccttgccaccaacagcttcgttgatgtctgcgatctatgaagagaacaaggacgatgacggcttcctgtacatgacttacagtggcgagaacacgttcggctctgtctaattcgtctgagctaccactgtaaataaaaaggaagatcagtctgtcgtcatcttccatgtacatgcttcgtctctagtatgctgctgcaggattgctgtcatcgtttaatgcgtctttgtgtttggtgtcctattatctgaaagtcagtcagaacggcccgtaaactcgtaatactac

SEQ ID NO: 3004 - DNA, 917 bp, Avena sativa
cggtacttgcaactggtggtgaggatgggcatttaagggtcttcaaatggcctaccatggaaagcatcattgaagaacctgatagtaaaacatctattaaggatcttagtttcagttccgatgagaagtttctagctgtgaataggagcagtggtccatctcgagtgtgggatttaaggtcaaccgaagctgtggctagtctgccaagagaagcaggagaaatgtttggattctgcagattttgcaataagcctgacaacagtcagatcctctttgttacagcaatgcaaggtgattatgggaaaataatatcttggaatactacctcatggacgagaattggatcaaagaaaataactcgtgaggcaatttcagcatttgctgtctcgcctgatggtacacttctagcaattggaactattgagggaagcatcagcgtacttggttcaagagacatgcgagtgcttgtaaaagttaagaaggcacatcttggcattgttactacgttggccttctctcaagattcaaggaccgtgctgtctacttccttcgactcaactgcaagggtgacatcgactgcaccccaagagtactggtgtgagcctgtggtccatgatactagccatcatcctcgcaattttggtatattactatacacagcacaaagaagatctcttagcaatgctgccacaatgaaatttttgttgggtctcttctgatatctcactctgctcttctgctggagataaaatgatgtatcgtgtcagagctagagcaatttttgtatttattgtcgaaaacgaagtgaccatttgtaggctatttatcatgtcacgctggtaagtatagaaatggacaagttctctgggtttgtaaaattgctggccctttatgagttatatatctcctgtaagccc

SEQ ID NO: 3005 - DNA, 549 bp, Avena sativa
tgaagttgcagggattgctgagttaaagaaaaagagttccaaatcaaaacggccaacaatcaagacattgtttgagagcatggatgaagatgagcctgtacatgggagtttcttaaatatgttgccccataaggagggacagccttcgtctcactcaagtgttccaccagaacaataccaacctcgacgtaaataggatatggaggttttaaaaagtaaacaacagataagtaaaacgagaaaaaaaatagctgccttttggtcttggttaccctgtccaacttttgtaaattctaaccgatgctttctttagtgaaattgttaaaacaaaatccatcctccaaatagtatggtgtttgattttggcagcgatgcttgttgggttcgctgtatttggtttgacagtctctgcgatgggtctcgggctattactggctacaacataagtgtatacttgttaccagctctgacgagcatgtgtattacaattaaatccacctgcttttctgaacctttcaaagagattgtatagcttgtgggagaaaaaaa

SEQ ID NO: 3006 - DNA, 769 bp, Avena sativa
agatgatggtgagctcttaaaaatctctagagtgaagcggaagccagtaaacacaggggatagcaaacatgcagatggggagcttcgtaagaagacaaaagatagaaacaaggatcacttgttccaagatttctgctttgactagtctggctagcaaacacaaggattcacttgcctctagctcgccaaattgtgatgccaatggtattatgggggagcatgctacacattctgatgagcaaccacattccatagacactgcagaaacttcacgacaaattggaggtgattgtattaaagccatgggaaatttgcctagtgagaaggcagtaaataccactaaaacaaatgattcagagccctattcagtgagatgacataattgacaagttttcgtgattctggggccctgcacccaccatgtcagtgcttgccaacaggaagaaacaagaacgtgtttggctctggagaaggctggatgcattttaatctcaaatccgaaagcatgatccgaggtgatgttggtctcacttgtgtgtatatctcgagtgaaatagcagctagcatcacaacctgtaaagttatttttcctagaaggaaagataggaaactgaggatcggcatggaatttggttcagctttgactcagccttgctcctgcagctgcactgtcttattatatccatatatatgagcttatggaggagcagtgaatatccactttttcctattatttctttcttaggatcattgactgagatgttggtgt

SEQ ID NO: 3007 - DNA, 774 bp, Avena sativa
tggcgatgcaagattgcagtttggggtttgcgagcctcagccacgactctattctccactactggtcgaggcagatgctgggttccgacggaggaggatctgctgcttcttcctcttcgtggattcagcgtggatccatccatctcaagagctttcttcctgttcaaattcacaccaaattacttatgctgatgggatctgcggagggcagtgatatcgtgttcgtgatcacgggcccgggcttcaccaccgaccatgacggcatctaccagattaatctcaattcactacactggaagaagatatggaagggagaagggttcgtcaatttgcttccatacatgagtttctaccatcagtcgtccgtggtgtgtcctggagcaagctaggagtgctatgtaacactgatgttacacatggttatgtttatgattcttaaattggcaatttatctctttgttcgaatcacactcccaatccatgtttagccactctactttggtggtggcgcattgaaagcatatggttgaatatgcttatataagggctggaggccacactctcatcaaacccaaagatgaccacttggagggagacatgcatgggtcttgtgatcaattgtgtttgtattcagcacatagttatttgagagcagtggtgcttgttttcgtatagtgttgttggcgtttgttagtaagctcgacaatttccctgccgtgtgtatgcaggtgaatggaatatcttgtaatgaacttctaatttcttgtcttatca

SEQ ID NO: 3008 - DNA, 936 bp, Avena sativa
gctgcactgggtccaagccagccaaacccaatctcaaccttggtgctgttggcttgacacctggctcagctggaggtttagaagccctgaccgctatttttgttggtggcctcccctattacttcaccgaggctcaagtgcgggagttgcttgaatcctttggaccattgcgaggatttgatcttgtgaaggacagggagacgggcaactcgaaaggatatgccttctgtgtatatcaggatcttaatgtcaccgatattgcctgtgctgcccttaatggtatcaagatgggagacaagaccctcactgttaggcgagcaaatcaaggcacttctcaaccaaggccagagcaagaaaccatcctgttgcaggcacaccaacagttgcagatgcagaaaatcatgctccaagttggaggagctctaccgacaaaggtggtatgcctgacccaggtggtttcagcagatgaactgagagatgatgaggagtacgaggacattttggaagacatgagggaagaagggcacaaatatggtaacttggtcaaagctgtgatccctcgacctgaccccagcggcatggctgttccaggagttggaaaggtgtttttggaatatgcagatgttgacggctcgaccaaggcgaagaccgggatgcatggcagaaggtttggcgggaaccaggtggtagctgtgttctatgctgaggacaagtttgcggatggagtttatgatgactagatgaaatgttctgcctagttgacacccatatatctgtgtttacttagtttttaaattgcatatcttatgtggaaccatgtgctagtttttaaattgcatatcttatgtgggaaccatgtgctggatatatgacctgaaccttatttgataagtacatttatgctctgcagtttctgaatttgaaaaccccagttta

SEQ ID NO: 3009 - DNA, 759 bp, Avena sativa
ccctgacgtacatcgcggcgctggtgaccctgcagatttttctacagctaaacagagtgaacaccaacacctcgatgctgcccatgctgttcgaaacaacaggttccaggagcagagctgccctcgtcggtaaactggtgatagtcttggtgaactcgtgcggcatccttgggtctgcctacatggtaaaacaacacggtcgtgcggcgacggtcaccgtcggggtcgttctgatggtgttttgccagatggcgattcccatgatcctggagttccacatcgggctaggcggagggagccggatgcccagggtgtacaccgccgccatgttcctgctcacctgcgtcctctcctgcggcctcagctggtcatggggctccatgttctggaccgttcctggcaagaagttccactccgccgggcagatcgccggcgtggctctcaacctggccttctgcttcgcccagatgcagtatttcctggtgatgctgtggcggctgaggagcgccgtcctcgcctactatgccatgtggatctggtcatgatcacatttggtttcagcccccaaaaccatgcatcgctagctagatgatcgtgatttgctgtcgacgactgtgtggttaactgctgatctagtagtttggtgtatcgttcgcctgtaagatctgtagtaggagtaccgtctacagatgaacaacatgtagtagtgacattcagtccccacagcaatcaatcgtatcctctatattataagccttt

SEQ ID NO: 3010 - DNA, 530 bp, Avena sativa
  modified_base (409)..(409): a, c, t, g, unknown or other
  modified_base (423)..(423): a, c, t, g, unknown or other
  modified_base (447)..(447): a, c, t, g, unknown or other
  modified_base (464)..(464): a, c, t, g, unknown or other
ttaccaagctcacacattttgtcaagggttaaataaagtatattgagaaccagaaccaaccaaaggcacatcataacttcacaatacataaaaaatttcagatttgtagcagcaaccaaatcataaggatccaatataccaggcatcgaatcaattcaaattacccagaggcgacagaatgatccatagcctagtgcaacttaatttaggcaacataacaaaactgcaaccagtgaaagtactcattaaacctacatagcctccgcgaaagacgtaggcaatgttcaacaacttgattcaacttgattcgaaagcagtacagttaaggcaacagcattttacttcgaaagacaggaaaaacaccgctcagcgcagcctcctggcctcacgctcagactcgagcagggtnaggatgtcaccctnacggacggggcccttgacgttccncatgatgagacggttcnggtcatccaagacttcactctgacctgggtcacctgacccctggagccggtgcggcccatcacctt

SEQ ID NO: 3011 - DNA, 880 bp, Avena sativa
ggatgagggatcgagatggcgcccatgaagctttacgggatggcgctgtcgccgaacgtggtgcgcgtggcggcggtgctcaacgagttcggcctcgacttcgacatcgtccccgtcgacctccgcaccggcgcccacaagcaccccgacttcctcgccctcaaccctttcggccagatcccggcgctgcaggacggggacgaagttctctacgagtcccgcgccatcaaccgctacatcgccaccaagtacaggtcgcagggcccggacctggtgcccacgccgtcggcgaagctggagacgtggctggaggtcgagtcgcaccacttctacccggcagcgtcgcagctggtgttccagctcctcatcaagcccatgatggggggcgcgcccgacgcggccctcgtcgacaagcacgccgccgacctcgccaaggtgctcgacgtctacgaggcgcacctcgccaaggagggcaacaagtacctcgccggagacgcatacacgctcgccgacgccaaccacctcagctacatgttcatgctcaccaagacgtccaaggcggaggagctcgtcgcctccaggccgcacgtcaaggcatggtgggaggatatctctgcccgtccagcgtggatcaagaccgtcgccgccatcccgctcccgcccagtcccggcgcttgagggggccggcaggggcaggccggcgtgccggtgctgcgttcgtgcatgtgggtttgcctgtttattagctgcgctgtggcgtccgttgcctgctgcgatccgtgtgagtttgcttttgcatgtttagctacgagaacggaataaaagaacgattatattttagtttacgatggaataaaagatctgtgatgtatgtttcgac

SEQ ID NO: 3012 - DNA, 578 bp, Avena sativa
gctggtggagtggttgttgactggcctcatagttcaaaagcaaagaaatcctaccttgtcctcacgtgtggttcaccttctgttcatacatctcttccaaaggcgaaaggtcaaaatggtgagatgtgcagcagtgatgatgatgacgacgatgatagcaatgatgaccaaacagttggcacatatggacgagaccggcggtcgagcaagaggcgtaaggtgaacaagagcaacggtaggggcaaggattggctcctgaggaaaaaggaacagatgagaaagagaggacgcgaggtgcccgctgacacgaaatacacggggcggaagcggaagacccgcttctaattcggtagcgggtggggtgcctatgcaccgtgtgattgctgtttgccggtcttttagttgtagctcgtcataagaagcaaaaatgttctgcttgagagtttgctggattgtgttgcctttgtataacgtagggtgatgttaaggatagttgtttgttgtggcagttttgacaatgctatcatgtttgttgtacctttaaatgatagttggttgtttcatgtttgacaaaaaaa

SEQ ID NO: 3013 - DNA, 573 bp, Avena sativa
gcaatgaagatcacccaacaacttggaccaacccctatcccaactgctaaggagattgatgggatttatttggacaagaactatgatgaagctgcggagtggctgaagctgtttcaacaagattggaagaattatggtgtgatcgtgatgtgtgactcgtggactggacctactagtatgagcatcataaacttcatggtgtactgcaatgctcggatgttttttcacaaatctattgatgcatctggtcaaactcaaaattcagaatttctctacaaagagattaaaaaggttgttgttgaagagataggccatgagaacgtggttcaaattgtaaccgacaatgggtcaaattacaagaaagcttgtagaactcttgtagaacaaccgaaatacaatcacattgtttggcagccatgtgcagcccacacggttaacctctacaagtaagatagttgcaagtttatgaagcccgtgggcggaaggtgctcttgtttgatgtaagaccgaagratgggagaacaagaagaaatttgaagtctctgtgtttgcatttgatgttgtgtgttgaac

SEQ ID NO: 3014 - DNA, 972 bp, Avena sativa
acgccgtggtcggcggctgccactgcgtcttccacaccgcttctccggtcctcccaaatgctaaagatccccaggctgagctgattgacccggcgctcaaggggacgctgaacgtgctgggctcctgcaagagagcctcggtggggagggtggttctgacatcatccatggctgccgtcagggtgaccgggagagcaagaacacccgacgtagtcgtcgacgagacatggttctcaagccctcaactctgtcgcagagatcagagatggtatgccctgtccaagacccttgcggaggaggcggcttggactttctccaaggatcatggacttgacctagtcacgataaacccaggatgggtcgtcgggcccctgttgcagccgaaactcaatattggcgccgaagctatcatgaaactaatcgatggaacacctacatatcccaacttaactaatgaatgggtgaatgttaaagatgttgcgatggcacatgtccttgcttatgaagccccatcagcaaaaggaaggtattgcatggctgagagagttgcgcgctattccgagcttgtaaagatcatacaagatacgtacccctccattccggtaccagacaagtgtgcagatgacaaaccatttgtccccaaattccaaatgtccaaggacaagataaaaagcttgggaatcgagctgaccccactagagacgagcatcatggagactgtcgacagcttgaaagagaatggatttgttagtttttgacatggctagctatgaacaacggaaggcaattcttgccatcgcagtaatgggaaacatgaatcgttgattgctagtattttgtgctctatgctgcaagttgtaataatgtaggcgaccatattatttcggtatacatggttgcactgtgtccagttttaacatggggagtaacagtgagatgctaaatttgtcaattgcagaagttcacaataga

SEQ ID NO: 3015 - DNA, 922 bp, Avena sativa
tgcttgtgctgagcatctgatagaaaacaaatactgttcgaaagaaagctttgcatcaacgggaggagtgcaggtggcctattgatgggtgctgtcctaaatatgaggcctgacttattcaaggcggctgttgctggggtgccatttgttgatgttctcacaactatgcttgacccaaccatcccgttgactacagctgaatgggaggagtggggtgatccaagaaaagaagaattctattattacatgaaatcgtattctcctgttgataatgtaaaagcgcaagagtatccccacattctggttactgctggcttaaaagatcctcgtgtgatgtactcggagcctgctaaatttgtggcgaagctgagggagctgaaaacagatgacaatctcctgttattcaagtgtgagctcggcgctgggcacttctccaaatcggggagatttgagaaattgcgagaagatgccttcacttacgtgttcatcctcaaggccctgggcatgactccaacaaaggcttcaggaaaggaagtggaacaaaggcaagcccaactctgaaacaacgatgaggaatctgctcctttaaaccaggactcggtcagaccaggttacctaccggagcagcagcagcaaagcaaagctgaactaattaaatcaagccctttgtcgatttcagaagaagttcgacaaacagtgctggaatagaaacgtcaacaggaaatctgggttgaatgaccggcaatccttccttgtattcattctagctactgtagattgattcgaattagataaacaacatgagtacttttggcgatcgatgatcgatccttggacaactgattggctttgtggtggttgctccttcgagtggtgtgagatcaagtgtgggaagcaaacaatgtaatattcagtcaactgg

SEQ ID NO: 3016 - DNA, 724 bp, Avena sativa
tgagcaccttcaagaagatgtttctaggacaagcagtttatgggccaattattaattgtgttttcttctcatataatgcaggactacaaggtgagaccattcaagagatcattgcgagattgaagcgggatttaattccgaccatcaaaagtgggatcatatattggcctctttgtgacttcatcactttcaagtttatccctgttcatttacagccgctagtaagcaattccttctcgtttctttgaaccatctacataacatacatggctggcttgaagaaaccagaagtagaggggatcacaagctcgtagtaatattcgaatgacttcagtttgactgagtttctgccagttattctggaaggaagtcttcatggggattacctggaattatgatgggggcagtcaataccactactaccccatttaagctctcagtattcaacgactaaacagagatagactgcttcctaggtgtattccgttttcagtagggtagtatccaccaggcttgtagtttggctaaagaatttctgtatggatgatagaatgcactaggcacttcttctatcatttccaagacttttcatttttgcactcagttgtctttagccagtcatgcagttgttaggttaaattgtgcgtttccttacgataaagttgacaggacaatgttgctttaagatgtctacatacgatgcatcatttgttggtgaaaaaaa

SEQ ID NO: 3017 - DNA, 799 bp, Avena sativa
ctgctgcggccggaccgggtgcgcgcgctcgtcaacctcagcgtcgccttcatgcccaggaacccctccatcaagcccgtcgactacttccgccgcgcctacggcgacgactactatgtctgcagattccaggaacctggatttgaagcaggcttcgctaattttgacttgaagaggttcttcaaaatggcactaatagttcagaccacaggttcctctgctatgtcccttaacaaaatgcaggcaagcaacaaggaaataacattgccttcctggctttctgaggaggatgtcagttacctagcaagtgtatatgcaaagactggctttggtggtggtcttaattactaccgctgcttagacctgaactgggaactgatggcaccatggacaggagcaaaggtgcaggtgccaaccaagttcattgtcggagacggcgacctggcataccatcacccaggagtcaaaggctacatacacaagggagggctcaagagagatgtgcctatgcttgaggaggtggtggtcatcaagggtgctgggcatttcatccaacaggagagggcacaggagatcagtgatcacatctatgactacatcaagaagttcgacacaggtctttcgacaccaaaattatcaaaattgtgagatggttgatgcacatagttaataatcaggagactcatgtgtgagtatgtggccgtgagaacttgtatgcaactccaaaacctttagcctgtgaatttcttcaccggaaatagagataacatgaggtctagttgtacacttacagaaatgt

SEQ ID NO: 3018 - DNA, 519 bp, Avena sativa
cattttcatgatgtatttgccatcatcagcgacatttgcaccacccagtggagatactaaaacaactgacggcaacgctgaatacaaagtaggatcactggtgcagaatttggtgttttcaccactcgtgtgtaacattatctttgtgataattgtctgcataactgagcggagaaggctcagaaaggatcctctcaacttctccaccttgaacatgattttcgaggtcatcagtgcatatggcaacgcagggctatccactggttacggttgttctaggctgcagaagatacacccagagagcatctgccaggacatgccatacagcttttctggatggtggagtgatggaggaaagtatgtgctggtcttggtcatgctatacggaaggctcaaggtcttcactatggccacaggtaaatgttggaaaatacggcacagctgaacaagactactcgaaaggcaaccgtatcaaattagtataactgcccttggatcagagtggatacaaatatatat

SEQ ID NO: 3019 - DNA, 964 bp, Avena sativa
atggaggcgtaccgggtggaaatggacgggaagttgaagacgaaggtggaggaactaaaggtgctgggatccaagaaggcggagctggatgcgagggtggcgtctttggaaacagagctcgcattgtctgtgactaaggcaggggggttagaggctgaagtgatggcaaagaagaaggagtttgatctgttgaagggtaaaagtgataagctccaatccgaggttgcagcggcagaggagaaacatagcatgtctgcagcagaggtagagaggctcagggtggaattgggtgcgttgttgaatgcaaaggaggttgtgtccaaggcattcgacgctgagaagactgaaatcatgaacgaactggagagcctcaagaggaaggtggaggaaacccaggctgacaaggaagcagctgagggagcaacacgtgagaaggatgctcaaaccgttaagctgagggccgagctggaggagcttcacgtttccatgtcacagctccaaacatcctgtgatgaacttgataccaagcattcacgcctgcaaagcgagaagaattcggttcagaaagcactggatgctgagaaggctgaagcagggaagctgatgtcgaaaattgagacattggagaactgcagtggtaaaatggacagtgagattggggagctgaggattgcattgaaggaaaagaatgggaagatagaagtccttaccagtgaggctgaggtgctgcagctcgcagtggctgaagcgcagaagaggaacaagggtggcatctgggcgtgggtgtatgctgccactacgaccatggtggccgcaatctccttgatctatgccgccagggcccagtgaaggagtgcacttttctttttctatgttcaatcctctttttacatgcttatcagtatgctactcgaaatggtcaggttgctatctagctgtatcgctatgtgatgaatcggctggt

SEQ ID NO: 3020 - DNA, 818 bp, Avena sativa
  modified_base (103)..(103): a, c, t, g, unknown or other
cgcagctcaaggcgcagctgacggacagctacaacgggctcaccatcttcgcccccaccgacgccgccttcgacgcgctcaaggccggcaccctgaacggtcngccaaccaggaccagatccagatgatgctctactgcgtgctccccaggttctactccctctccatgctgggcaccatcaaggacaaggtcaacacccaggcctccggccacagcgggccctacaagtacagcatcaagccctccggcaacaacgtcaacgtctccaccggcgtcaagggcaacaacatgctgctcaacagcgtcgtcagcaaggacttcccgctctccatctactccgtcgacaaggtgccgctcccctacgagctcttcgggccccagccccccaccccggcgcccgcaccagcacccgcgcccgcgcccgccaagtccaaaaagaagaagaagaaggccgccgacatcgccgaggagcccacctccgacgagaccaagaacgccgcctcgtccctcaccggcaggtgggtcgccgcgctcggagtcctcgccgccgcggtcctcggcggcgccttctgagaaggagatcgagaacggaaaggtggtggtggggtcattcttccttgcattgagttagtgtggtgtataccaattaccaagaacatttgatgcctgtaccatgaacactgtgatgatgtgtatgtccatcggctttattctttcttcttttctttctgaaacacttcttcttctctgaattcttgttgatttgtatcctgtaatttatgtgatatactagtgcttcttgaattcatccaataac

SEQ ID NO: 3021 - DNA, 643 bp, Avena sativa
cgaagacacaggtggaggtgatcaaggggctgtactctcagctcgcggagatcctcaaagagtgccccggtcagtcttacaggtaccatggggactggaggactgagacacagtccgtggtgtcgatgctagcgttcacgcactggcttgagactggtggcctcctcacgcatgctgaggcccaaaataagctaggattgagctctggagagtttggcctggacgttgaagactacctgactgggctgtgcttcatgtcgaatgattttcctaggtatgttgtgaatcgagttactgctggtgactatgactgtcccaggaaggtgctaagctttttgactgatctgcatgcatcatttaggatgctgaatctacgtaatgacttcttgcgtaagaaatttgatgggatgaagtatgatttaagaagggttgaggaggtattttatgatgtgaagattcgtggacttgtgcctgtggagtcaaaacaagaggttgctcagtcatgaaaggctgagtgatgcctagcgtttagttggcacgttgaagtttatgttggaacttgggagattgattctaaaaagattatgcttgtgttaagatgatgccttttataaccatctagatgttgtcatcatgtagtaac

SEQ ID NO: 3022 - DNA, 690 bp, Avena sativa
catattgttggctggaggacatcatcaattagagggagctccgaactacccaagtgggttgattcaacaagcaaaatttacccacatattgtatatgaggaactatcaaaagcagaaactcttgatcagtgtgctgatattactgttgtggacaaggacaactacactctagaagaactgcttctgagaggacttaagcgtgtgtcatgggaaaaggtggatgttagcttccacaatagcaaagtaagatctgctgcacacagtataattcaggtaaaagaccccatcgtgcatagtgaaggtgcagacatcataaagcatattatcgaccatttcgttatctagtgaacagcagatctctggaaagaaagcttgtgccagcacgcgcaagttgctaactgatgagtgagccaagcctggtgagcacgtttatggtgatcccaggaatgaagtgtctgatagatgacattcaagaaaggcggaagtgttctatagatcaagtaaatatatagagaggtcatgccctggttgttcactaatcatttgtggttatgtatatgctgtgcggtgtaaccgcaatatcagctttgtccatgtaaatgttcaccactgttttattaatgttgatcggttgatgcacctttttaagggaccaacgtcgttaaagatgattgtttacagcgagtgcat

SEQ ID NO: 3023 - DNA, 641 bp, Avena sativa
  modified_base (633)..(633): a, c, t, g, unknown or other
gcaaaatcatctacgtctgcagggatccgaaggacatgctggtgtcgctgtggctcttcgccagaaccatcctgccatgcgaggacttctccgagatgttcgaatcggcttgccagggcaaggtcatcgacgggcccatctgggaccatgtcgccggctactggcgcgcgagcaaggccagcccggagagggtcatgttcctccggtacgagcagatgctgctcgaccccgttgccacggtcagggcgctcgcagggttcctcggagtgtccttctttcccgccgaggaggcggcggggtcgccggcagacatagcgaaactgtgcagcctggaaacactgaaaggcgctaccggcaacaacacaggatccactggggccttcttcaagttcccgcatcaaacgtacttcaggaaaggggtggtgggggattgggtgaactatatgacgcccgagatggcgcagcgctttgactccatcgtccaggacaagctccgtggatcgggcctcactttctagaacaaaccctgcagcttaatatttccagtaatgcacccaaataatgtactactagtagaagcacacgcgagttgcttccctgcgccattgcttgctagtgttacaactctgttcngtttcatg

SEQ ID NO: 3024 - DNA, 964 bp, Avena sativa
tggagcttggtcgtcctcttcaccgttctgtcattggccgtcgagatccctacctgactgctgtcatgcagaagattgaccagggtgggtgggttccgcttgtgttcgctgcggccatcctcctggtcatgtacgtgtggcactacggcacgctcaagcggtacgagttcgagatgcacagcaaggtctccatggcgtggatcctaggccttgggccgagcctcggcctggtcagggtccccgggatgggcctggtgtacacagaactggcgagcggcgtccctcacatcttctcccacttcattaccaacctaccagcgatccactccaccctggtgtttgtctgtgtcaagtaccttcccgtgtacactgtgccggccgacgagcggttcctcgtgaagcggatcggccccaagagcttccacatgttccgctgcgtggcacggtacgggtacaaggacgtccaccggaaggatgacgacttcgagaagatgcttttctgcagcctgctcgtcttcgtccggctggagagcatgatggaggagtacaccgactccgacgagtacagcgccccggatcagcaggagctgatcaatgaggtgagtagcaatgccgacctcagctatgcctcccgtgactccattgtcccggtgcgcaccccgaaccgtggctcagggggacagacgacgataacgccagggttccagactgtgggcgacgaggtggcgttcctgaactcgtgccgggacgccggggtggtgcacattcttgggaacaccatcattcgggcgcgccgggactcgggcccactaaagaagatcgccatcgactatgtctacgccttcctgaggaagatctgcagggagaacagcgccatcttcaatgttccgcatgagagcctgctgaatgttgggcaggtgttctatgtgtagttataactgaatgtaaataaatgtgtgtagat

SEQ ID NO: 3025 - DNA, 816 bp, Avena sativa
tgaatttcgattgaagcaatattttggagctgatgcgcataagcatatccagcaagtgaaggttgctatcaaaaccctgtttacagaatattcagctgaaattgaagataatgttgatttcttgtcacaagaaccaaatggtgaggaagttgtggctcatgacaccctttcagattgggacgaacatataaagattaagaaagctggaagccgcaatgagctgcagcggtacctagatgaggacttccatcctcgtacaacagactttgatatcctaaattggtggcgtgtgaactcttcaaggtacccaacacttggaagaattgcccgtgatgtgctagctgttcccgcttcaactgtcgcctccgagtctgcgtttagcacatgtggaagagttattaccgatcatagaagtagcctggcacctgaaacggttgaagcactgatgtgctttggagattggattaagccaaaaagttcttccgaagcaagcacgtcatatgtggtttcgtaatctagatgatagaatcttgccacactatgttcagcattcagattcatctaagttgatattgcttgaggagcacaatggatgatgtctacattataccagtttgaattatgtagcatgcggttctagactttctattagtatctgatcttgatgtttgtaatatttttcaactaatttgagtgtattatgatctagtggatagtaccttgatgtttcatttgtactattcctttcttttgaaattagttgtctcaactttgtctagattcatatgttaaacttgtatgttggatgggtaatgt

SEQ ID NO: 3026 - DNA, 603 bp, Avena sativa
gaatccttcagttttagctaacctaagggccaacgttgctcttctgcatcaaggactgtcaggtacaccagggcttgaaatttctagccatcttctgtcacctatcgtcttccttaagatgaagaaatcgacgggttctctgaccactgatctagagcttcttgaaaccattgccgagcaggctttgaaggaagattcagttttcgttgtggcatcgaagaggtcaactctggacaggtgcaagcttccgcttggaatccgcctgtttgtatcagctggccacacggaatcagacatctctaaagtttgttcatctttgaagagggtttccgcgttggtcctttcagaccacatttgatcccggattacctgcaagacgggagagagtttggtcggttttcgacgccctgtgtactctaggccgagtttggttggcaaatgtacataacagttatgtacatttctagactgatgtattcatgttgttggcgaaaattttgtaaacgttgcggctggagctggcccatcatgtacatttgacttgtttttttttagaagtatcatgtacatttgactgatttccatgttgtaaaccagatacat

SEQ ID NO: 3027 - DNA, 716 bp, Avena sativa
accttgagaagtttgggcagtcatttacgggtccatcacatggctgggaagctggctttggtctacccaaggttcttggggatgttatcgagtcaatagctggtgcaatttatattgacagcaagtatgataaagaggtggtttggaaaagtatgaaacagctattggagcctcttgctacgccagagaccgttgagtgtgacccagtgaaagagctgcaggaatattgtgatcgcagatcttacagtaagtcttacacaacaacccacaaagatggagtttcttcggtggttgcagcggtgcaggttgaagggactatctactcagcaactcaaaccggtggtgataagtctgtggctaagaagtatgcagcgaagttgctgctaaaggatctccaggatgcagaactaagacgtgccaacgatcattcagccgtaactagcctataggtacaccaatcaaagtttttgtcggatcctgcttgtactttacaaatgtgccggttgatctgttgtgcagatgtgcttgtgaatattcagcttcttcaaaatctggcatgtctcagtgatctggactgcacacatgtaaactagggtctaagggcatagtatcacatagccgttgtacttacatagatgctacatttctacttctctacttgtacagttgaaatcatattatttagtggaaagagtgtatttctagtgagggaaaaa

SEQ ID NO: 3028 - DNA, 631 bp, Avena sativa
gctatttcagcatcaaacactggcggtgcctgggacaatgcaaagaagtacatcgaggctggtgtatctgaccatgcaaaatccctgggcccaaaaggctcagactgccacaaggctgctgtgattggtgacaccatcggggatcctctcaaggacacctctggcccctcgctcaacatcctcatcaagctcatggcggtcgagtcccttgtgtttgcccccttcttcgccacctatggaggcatcctcttcaaatatatttagagggagaagatccaacagacgatcgcttaattattttttgctggttgggagcgtgctacttcatccatatgtcttggagctcctttagatgacccattatgcgccctccttttgttacccatttagttccttttgttatccatttagttgttactggtcttcttccatcatgttgaacttatctagttttcattctggtagatgtagtagtagcagagggtagcgaaatcgatggtcatggtttgggcaagagtgtcatggagagtactgttctgtctgtaggtggattgtgatgacgatgatgagtcttgtatgaaactggggaatgttttgtctgaawaaaaaaaaagttaaattaaatcgcgat

SEQ ID NO: 3029 - DNA, 875 bp, Avena sativa
ctggctgctctcagcttttatcagatatgcaggcgttcaaggctgcaaacccgggatgtgtcttggaagatttcattagatggcactctccacctgattggtctgaagattgtgcagcaagcaatgggacagtaggagaaggctcatctagacgtggtcggctaagtgacagaatgcaaacaaaggaaggaaatttgtggaaggaattgtgggaggcagcaaaacctatacctgctgttgaacaaactccaatatatgatgaagatttggctgtggagagcatatttgatgccttggaagttattgaaccagtaaaactgtttcagcagctactcgcagtaattctttctgtatgcctcctagcagctgaatcactagtaccagcaaacagcaacctgtcaaaattattctacgactgtaaagactacgttattagcatttaccaagatgacatgtcaaaagaaaagttggatgagatctgcaaggtttatgagacgatggaagccataataacccaccctgaagacactcttcagatcatgcagcaacctgacgaaaagtctgcggagaataaacaccgcttcaatctcaagctgaactttgctgtgaaagatcgccaacctctgtggaagcgtgcatcaaaggatgaaaaaaagacgtcgccgaaagacgagaagaaatcaccagatgaaaagaacaccagttttttctcaaaccttcgtgagaagaaggcttcgatattttcaaagaagaacacaaaagcgtcagaggtgctgccaccgccccttcatcagctttggggccacttgatgagacggaatggacgattttgtagttgagattacaggatgtttccttatgtacaacttgtagag

SEQ ID NO: 3030 - DNA, 757 bp, Avena sativa
gctgcagcgtgcacagcgtgagtacaagcttctcttcgtataccttcactcccctgaccacccggatacccctgcattctgtggtggctgcctctgctctgagccggtggccgccttcataaacgagaacttcgttgcatggggtggtagcatcagaaggactgaaggattcaagatgagcaacagcctgaatgcatcacgcttccccttctgtgcgctagtcatggcatctacgaaccagagaattgtgctgttgcagcaggttgaggggcccaaatcacctgaacagatgataacaattcttcagagagtggttgaagagtgcactgcgtcacttgttgcttccaggattgaagctgaagaaagattaatcaatcaacgtttgcgtgaggaacaagatgctgcttacagagctgcacttgaagctgatcaggcccgggaactccaaaggagagaggaacaagaaatgcttgaaagagaggctgcagaggctgagagaaaacgtaaagaagacgaggaagcacaagccagggcagtccaagaagcagctgaaaaggaagctgctcttgcaagaaggcggcaggagaaggcaatggctctgggagctgagcctgagaaagggcctgacgttactcgggttcttataagatttccaactggagagcgcaaagaaaggagattccacagttctgccaccattacctccctatatgactatgttgattctttggattgttgaaagtagagaagtacagcc

SEQ ID NO: 3031 - DNA, 861 bp, Avena sativa
tgggttagtgctgttgcatcaagaaaaggttccgatttggctgcgtcgggagcagcaaatggtgttgttcgcctttggactattcacctgattcaaaagggatgcagccattgttcgacttggcactggtatttgtactcacattgatctactaattagttgttacttgctccataatgattgtccctaaatcttctttgtatgaccctgctgcaactttgatctgtaatctgtcatgggcaggatggcttcgttaattctcttgcaattgcaaaatcgggacgcttcattgttgctggtgttggccgagaacctcgtcttggaagatggggtcgtgtcgcgacagctaagaatggagtcgcaattcatcgactcagtctacaagatgacagtgaggatttgtaggtagtagtcggcgcattgagaaaccctgcggcttgttcatacactgtcaagacgagaaagactgtaccaacaccatgagtgtcacacttgcagctgaaagatctaggaaggttgggccacaagcttcatgcatgccacagttctatgatgcaccggcttactgttccagacagccattgctaaacaacgcaatttctgcgtggaagccaggatgaggaggccttggatagttggatgtagcatgatttgatcagtaatttctgcagcaggtgtggttttgtaaccctcttgcgttctacctgatatgttcgacacaggaaatcactgaatcgatgaggttggataaggcaggagaaacagtatgtttgtggccttcgcttgggagactatgtgtaatagcaaattttgatggctggtaatgatcttgatgaaactagaaaatttattttacaaaaa

SEQ ID NO: 3032 - DNA, 593 bp, Avena sativa
tgctattggcaatgcagattgtgtggtcgttgttgtcgatgcttgcaaagtgcccgaaaagatagatgaaatgctggaagaaggtgtgggaaacaaagatactaaggtccctgttgtgttggtactgaacaagaaagatatgataaaaccaggagaaattgcaaagaaacttgagtggtatcaaaaattcactgacgttgatgatgttatacctataagtgctaaatttggcagtggagtggatgatatcaaggagtggatattatccaaactcccgctgggtcctgcgtactaccccaaggacatagctagtgaacaccccgagagattctttgtgggggaaatagtgagggaaaagatttttcttcaatataggcaggaaataccatatgcatgccaggttaatgttacaagttacaaaagcaggccaagtgccaaggattttattcaggttgagatacttgttgagagggaatcacaaagaagcattatacttgggaaggaaggaaaagctataaagacgttggcaacagcatcaaggcttgatatcgaggatttccttcaaaagaaggtttatcttgagatagatgtta

SEQ ID NO: 3033 - DNA, 774 bp, Avena sativa
tgctcaccaagaactacgaggcccgggtgtcggaccacggcctgcccacgctcgtcggcccctccttctccccgaccagggtctccggctaccgcgcccccgaggtcaccgacatccgccgcgtctcgcagaaggccgacgtctacagcttcggggtgctcctcctggagctgctcacggggaaggcgcccacgcacgccgtcgtcaacgaggaaggcctagacctgccgcggtgggtgcagtccgtggtgagggaggagtggaccgccgaggtgttcgaccaggagctcctcaggtaccagaacgtcgaggaggagatggtgcagctcctccagctcgccatcgactgctccgcgcagcaccccgacaagaggcccaccatggccgacgccgccgccaggatcgacgacatccggcgatccggccagcaccagcagcaagccaccaccgctacagagagccccgccaccgacgagccttctctataacaaaccaaccaaccggcattgtgatcctactacacctccgttccgttcgttccggaccaaaaaaattgcttagttctttgcacggatcagatctccctctctccccctcctccggctacttttgcaacttgtgcatgtcttgattatttttcccctcttctttttctttttcttttcggccttttttctcacgggctttgattcgattctctctatagcagcacatgtcactgtaagctttgattcttggaaagtaacacccgacgatgcctgtaactgtaaaaaa

SEQ ID NO: 3034 - DNA, 830 bp, Avena sativa
tgggaagagcagcattcgtattccctttatcttttatatccaacttaagtaaaaaggaggcccgtctgaagatttccttcagactaacaggtaataatatggtgggcaggtctcatgagaggagcagtttcaattgcacttgcttataacaagtttacaacatctggtcatactgcagtgcgagttaatgctatcatgatcacaagcacagtcattgttgttctgttcagcacaatggtttttggcctgcttacgaagcctctgattaacctcctcatcccaccaaggcctgcaaatgcagctgatatctcaagccagtcattccttgacccacttctgagtagtttgttgggttccgacttggacattggccagtacccccctcaaagcaaccttcagcttcttctcgccataccgacccgctctgttcatcgcgtgtggcgcaagtttgatgacagattcatgcgcccaatgttcgggggacgaggcttcgtaccgtttgtgcctggttcgccggtggagcggagtatccatgggcctggccttggtgccctgggcaccgtgacagaggcggcagatgaccatagttgagtaagttggagctcaaaaagtgcaagcttttttgtgtgtaaataaatgttcagataccacacaattttgttcctcgagcttgttgatgtattcgttagtgtatcttgtgcagatagtttatatagaaattacttaaggtgctacagtagttttctggggcaattccagatgttcattttgcctgtaatttcattgttgcgcagacataacaatcagatgctggatatcactgtagcatt

SEQ ID NO: 3035 - DNA, 469 bp, Avena sativa
cggaatgctgttggcccatgttaccagggggcatgattttgctgtatgggtttcgttcctttctctcacaatatttccatatgttcgcaaattacaaggcagtgcagtcactttcacttagtacactaaattatgagagaacttccatcttgctgcagtattttatggatgatggtaaagttcttacaccacaacaggtttccaagcaagaacatattcttccattttggtcaacctggcggaaagtgcttagaattaaacttccacatgagcttgttcacttaggtgctaaagcctcaactcttacgcactctgatatgttggtaattgcgaaaacaagatcctactatacaaatgccaactacttttgtctggacaaggaaggcagtgttcacattttcatccacaagcaagcagtggcaactgatgttttgaagtccttcatacatggactcgtcttagcacgtat

SEQ ID NO: 3036 - DNA, 472 bp, Avena sativa
tggagactttcatctttgaagtacatcagcctgacatgaagcatgattcaatcatcggtcatagatcacatctgaggcagctgccagaacaccgttatgacaacctaaaaagtgtgatgatcgctggcttctgctctgccaagagcttggtcgagttgacatgtcaaattgttgagaacgcatcgtcgcttgcatgccttacattggacaccactcaaggctgttatagttctgatggggtcggtaaacctggcatttgcgttcctatggggagggatagtctcgaggaagcccaaagagcgcttctggctatcagaacacacattgaggggatgatcccctcgacggttaagttaaatgtttcagagccttgcagttggtgccatgctattgaacattagatttcaatggytgatcatgtaaaattacaatgtttgtcctgggttgtttcttaaatgcctagttttgtgtt

SEQ ID NO: 3037 - DNA, 660 bp, Avena sativa
ctgtgtcaggagactacctaagcaggatccgtttaccaggtgatgatgcaaaagtaccaattgccccttctggcttgtttcggttgccaacggactcgtttccccaaaacgaggcgtgttctaatgatggctatggctcaaagttcactttgacatcaagtcagcagaccatcttttcaagaaaccctgctagtcatatgatgtcaacttcatctcattcccagtatggttcaggtttctcagcgaatccatattatgattctcatagttcaatgttatcgtcaatgtctaccaaaggggatgcttctttcattccagaaattctaatgtccagcgacgattcaagaagaggaatgcgttctagagatgcaggcatgcttacccagtatggtactgcttacaattagtagcttgagtgtagcagctatgcatgtttagtgtcccaatatagtcgttaagctagatgctacttgttgcgtcatatggtttcataataatgtattacactgtattgctgtccaagaacaaattttgtttataagcagcgttagcttctctcttatgccctcgtggcgcattacaaattgttacttgctgtcagtgaagacatgcaaaatcatgctaacaaaataaagctttcctgtagttaggtaaaaaaaa

SEQ ID NO: 3038 - DNA, 573 bp, Avena sativa
ggcacatgattctggaatcactattgatcaagtaaaggacaggttacgatcggtgctttctctgactgacgtcactcgatttccactaccgaagaatccgcaggctgtcatatttgttggtgcaacggatgacggttacattcccagacactcagtcttgcagctccagaaggcatggccgggctccgaagtccgttgggtcacaggaggccatgtgtcctcttttttcctccacaacgactcgtttcgcaaggccattgttgacgcccttgacagattatagcagcggagggtgctcatccttttttctgtgcgattcttgtgtagacattgttatgacactggttcaactccgcaggctcgtgatagatacatctcttcttcgtagagtatatatttttaaaaagatagccaagaaatggcatattgattgttgtaacttaaatgaatattgagtatgtttcccttaggttgggaaaatggctgtagatcacatttgtaactcgtaacgccatacagtatattgttgattgtttaactggcaataagatcattcacaataaccaaaaaaaa

SEQ ID NO: 3039 - DNA, 1036 bp, Avena sativa
tgaggaagcaagcacaatggttcaaccatcattgagaagggaaggattttcttctgtgcctgatgtcacatgggaggatgtggaggtctgattcattgaggaagaatttaaccggtgcattattcgttgtatcaagcaccctgaacagtacagggatttcggagtgaacatgcaagctgggtttttactgtttggacctccaggctgtgggaaaacactaatagccaaagcagttgcgcatgaggcaggggctaattttattcacattaaggggcctgaactattgaataagtatgttggggagagtgaatcagatgtaaggaaaatattcacccgtgcacggaccaactccccatgcatcctattttttgacgagatagatgccctgacaacaaaacgagggaaagaaggaggatgggttgttgaacgtctcctaaaccagttacttgttgaactcgatggtgctgatcaacgtcatggtgtttttgttattggagcgacaaacaggattgatgttatagatgaggctgttctaaggcctggtagatttgggaagaaacattttgtccctttacctggtgccaacgagcgggctgctatattgaaagcacatgctagcaagaaacctgtctcccaagacgttgatttgggcgcacttgcacaccgagaggagtgcaataatctcactggtgctgacttggcatcactcgtgaacgaagcagccatggcagccttggaagagaggatcgagttcctggataatgggatgtcatcaatgagttcatctggtctgattgaactctcgcactttgaacatgctctatcgaaagtaaagccatcagtatcagaacagcaaaggagatactttgacatgctgtcgaagagatattcggccgactgatccatacgccgtgcatcttggtgtgcctacaaggaccactctgcagttttcttgctcatacgagcgagttttattttgtacgcgaggggcaacccgtcatggagatgacactgcagggcatgcgacgacatcagc

SEQ ID NO: 3040 - DNA, 612 bp, Avena sativa
agattgatgacaagccctacactgatgaacctggcccaagctcttgcttaccataagacgtgctacgaggacatgcccttgcaagattcacaagcgacagaggagcagcagacaattcagaacctttgcgatacgcttcggaccatcctgaggttgtagacatccatgagcaacggctacatccttgaagaatcgtccggcatgctgaaacgctgcggtctcggaggcaggtgctgctgacctaggatttttcatggcgggcatcgggattcggctctaccctggggttgtctcggatcaaaaggcaggcacagcatggcgtgcagactgcaaatcggagccggaggagcttttgatccgttttatggtcctggctggaagctggatgcacgcaaggaattctgttctggagacgtgaaatttttgtcccgtgtttatatagcctctaggttgtggtttcagtggctggtgcatgtacagatcgcgtagtgaagttttggtaatccaattttgtggcgcagatggcgatccaaaccgtggcatattgtaggttggacagatgtagtggtaattgttttgtcaggagcataaaagaggaattatgactagtga

SEQ ID NO: 3041 - DNA, 706 bp, Avena sativa
aagaggaggttcttgcactgcagttcaagcatggatccaggccagtgcttctttccacgggaagttgtaaaagacatcaggacaccagtatttgttcttaatccagcatatgatgcctggcaggtacaacatgtgttggcacctgtagcatcggaccctcaacgatcatggcaagactgtaggttggacattagcaagtgcagtcccaaccaacttgaaattctccaaggttttaggaaagaactgcatgacactatcagcgaactgaagcagaaaaaggactggggcattttcgtcgactcctgctttatacactgtcagtcgttgaactcgttcacttggcactctccatcttctcctagagtcaacaacaagaccatcgcagaagcagttggagattggttctttgacaggagagaggtgaaggaactagactgcgagttcccctgcaacccaacgtgccacaacctggttttgctaagcccttcaaaggatgaagttgcgaccctttgtggtgttgtaaattagcaaattatgtatacaagtttttagacttcaggccaaatgccgccggtattgtccaaagtctccacgcttgggttgaattagttatgcacgccaatgtggtgcttcatggcttgacccacagtcaaccgacagtccatccaaagcagtgtgatttatttacatataatgccattgctgc

SEQ ID NO: 3042 - DNA, 826 bp, Avena sativa
cttccatggtagggtgatgcacgagataggtattgaaactgttggtcaaggtgccctcaaacttactggatttctgaaggagctaatgcagcgaagaaatataccttttgagtcactatacactgttcggacgatcaaagagaaaatctgctacgtcgcggctgattatgaagctgaactacgtaaaaacacacaagcttcctgtgaggtggatggtgaagggtggttcactctagcggaagaaagattcaagatggcagagatccttttccagccccatattggaggagttggtgccatgggcttgcataaagcagtatctctatgtatggatcactgttacgatgcggaggtgctcggtgatcacagctggttcaagacggtcgttctagcgggtggatcggcatgcttgcctggtttgccagagaggctggagaaagagctgcacaaacttcttcccgcatacatttcagaaggaatcagagttcttcctcctccgttcggcacagactctgcctggtttggcgcgaagatgatcggcactgtgagcactttccctgaggcatggtgcgtaaacaggaagcagttccaccagaaggcacgccgcagcggttcatctgtagtgaacgcatggcaatagggcctgatcgccggagctatgaccagcaaagggagggaaagaatgaggagattatttgtggctattattcacatctgaagttatggtacagagctgtacagcaccagtccccagtgtacagatatggtcacatatatacaagattatacagtatatgggtaaatagaacacgattgatttgttgct

SEQ ID NO: 3043 - DNA, 946 bp, Avena sativa
cttcggggttatatttgcatcagtggagtacggcttgctcattgcggttgcaatatctcttggcaagattattcttcaagtaacacggccaagaacagctttacttggtaaccttccaagaacattgatctataggaatgttgaacaatacccagaagctaccaaggtgcccggggttctgattgtaagagtggactcggccatatactttacaaactccaactatgttaaagagagaatcctgagatggctgagggacgaggaagaacaacagcaggaacaaaagctgtccaaaacagagtttctgattgttgagctatctccggtaaccgatattgacacaagcggaatccatgccttggaggaattgctaaaagcacttgaaaagcgcaaaattcagctgatccttgccaatcctggaccaacagtgatccaaaagctgcgagcgtcgaaattcactgagctcatcggtgacgacaagatattcctgtcggtcggcgaggctgttaagaagttagctccaaaggccgagaacgtctgaagaagatgcatcgagagatgtacaggaagagcaaagagagatgttgaggtgtgattttaatagagcacaggagtaaatggaggtttgtgcagaaggtaaataatggaggtgcgtggagttggatctcgtcaggtttgcaagatgtggtcggcaaaaaaaggataagatggtggcctagtagtacatcagtgtgcgtgccgtggtgtgtgtattgacaagcaattggctattggtagagggtttatttcatgatgatccattcttggtttttgcagtttatggatctgcacgacgtacttcctctgtttcaaattataaaatgttttggtaggctaagatagcccatcaacacttcttataactcgaaatggatgtagtatatgttagtgttttgtactttacagt

SEQ ID NO: 3044 - DNA, 831 bp, Avena sativa
gagcagcctccaaagtttgagttttatgacccaaaaactcccttcttcacttcgcctcggtacctgccaccaacaaagtccgacaagtgcaggatcaaggaagccatcatttcacacggctgcttcctgcgcgagtgcaccatcgagcattctatcatcggcgtccgttcacgcctaaactctggatctgtgctcaagaacgcgatgatgatgggcgccgatctgtatgaaacagaggatgagatctcgaggcttctgtccgagggcaaggtccccatcggcgtcggggacaactccaagctcagcaactgcatcatcgacatgaacgcgaggatcggaagggacgtggtcatcgcgaacagcgagggcgtccaggaggcggaccggccagaggaaggatactacatcaggtccgggatcgtggtgatactgaagaacgccacggtgaaggacggcaccatcgtgtagactgccgcatgcaccgggcagctgcccggggctgtcgacctgaatttcattcagacgaggaagaagataggggtccctagtgggacgggggaagttcggagctgggccgaaaccgacggcgcaggcaggcaagcatcaatagcaaagcaagtagtaatagtagtagtagtctttcttcccctgtaataataagctgcgtgcgtccagtcaaagtggcaacagactctttcgggggatcgatcctgtaaataacttgaaaatatgggatttccgtgcctccgctatgaagttcttgaatgactggatcactggctcaccgggcatgtttaatttggtctttagcccaagcttgtgctaccaaaa

SEQ ID NO: 3045 - DNA, 871 bp, Avena sativa
aacatgcagaacttccagaacagagatgcacctcctgggcagcagggattcaacagccctccacctggccagaacccgggcatcatgcctccgccgccaccggctggtcagaaccgtggcaacaatcctccaccaccaccacctccaccatatactcaaggtggcccatcaaattatcaatcccaaatgcagaacccacaggcagcatatattacaggccgttcaccccaaatgcagaacccacagtcagcatacaacccccaaatgcagaacccacaggcagggtacacacagggcggtgcgccccaaatgccgaaccagcagacagggtacacaccgggcagcacacccaacatgccgaaccagcagacagggtacacaccgggcagcacacccaacatgccgaaccagcagtccggctacatgcccagcggtgctcctaactatcagcaaggtggtccagctggctaccaaggtggacctgctgggcatcagggaggtaaccaagtttacccaggatccaacatgcctagcggccctggaccagcccacccaggtagcaatcctggataccaaggtggcaacgaaccatctcgtgatggttatggctatcctggcggctacaacaacagtgcacaaggtggctataatcgacagtaaggaaggagcaggcaacctgaactaccaatgagttggcgcagagtccacaaatgaactaattttcctgtgaagtgttgccagtataattccctagaagatacgatgtgtattataaacccaagtcatgggatgttttattgattctcgttctagtgacctaaatattctgtgactcagaaacttcaatatagcccatgagttctgttgtacc

SEQ ID NO: 3046 - DNA, 632 bp, Avena sativa
caccaagtggaaaaacattggcttatgcagggcacagttccatgatttatttcgttgatgatgttgaagcatctcctgccgcacaaaatttggcactgcgcgatctgcctctccgtgatattcttttcgtttctgaaaagatggcgattggtgttggatttgactgcaatcctttgatattttctgcagacgagactggactttggagtttcgtcagatatttggatgaaaggaaagttactccatctgcttcaaaagcctcacagctctctgaagccctgggaaagctatatggccaatcgaggcaaggtagcagtgacactgttgaaccatcgaagcctcgtggcggtgctcatgaaaactgcataacttgtattgtacccttgagaaaaggcagtgagagtattgtcaagcggttcagcacatcaggattggatggtaagatcgtggtgtgggatcttgaaaaccacgtcaccattacacagtagctggtggatggactcgcggcgcctcatgacgtaaaccatttgttggcagcaggccctgcaggttttggaagagatccagggccaggtagattgctttaatttttgttgtacctgtacacaaaccatctcttagccagctagtac

SEQ ID NO: 3047 - DNA, 562 bp, Avena sativa
  modified_base (522)..(522): a, c, t, g, unknown or other
acaaggcggccttattggaattgcacttgattccaagtggtatgaaccattgtcagatgtcgatgaagatagagaagcggcagcccgggcattggactttgagcttggatggttcttggatcccttaatgttttggccactaccccgcctctatgcagaaacttgtaggcaacaggctgcctcaattttcagatcaggagtcacagttagtatcgggctcactagactttgtaggcataaaccactacacgacattatatgccaggaatgacaggatgcgggtcaggaaacttgtaatgaatgatgcttcaaccgatgctgctgtcatcccaactgcttacaagcatggaaagagaataggagaaacggcagcatcgagttggctgcacatagttccctggggcatgttcaatctgatgaaacatgttaaagagaagtatggaaatccacctgtgttcattactgagaatggtatggatgatgcaacagccggttttcaaggttagcagatgtcctgcaagntgataaaggatacagtaccacaacgactatatgtctagcc

SEQ ID NO: 3048 - DNA, 818 bp, Avena sativa
cacggaaccagatcgccgaggcgagcagagcaatggcggccggctaccgggcggaggacgactacgactacctcttcaaggtcgtcctcatcggcgactccggcgtcggcaagtccaacctgctctcccgcttcacacgcaacgagttcagcctcgagtccaagtccaccatcggcgtcgagttcgccactcgctccctccaggtcgacggcaaggtcgtcaaggcccagatttgggacaccgccggccaagagcgataccgtgccatcactagtgcatactaccgtggtgctgtgggagcgttgcttgtgtatgatgtcactcggcacgcaacctttgagaatgccgagcgctggttgaaggagttgagggaccacacggatccaaacatagttgttatgctggttggcaacaagtctgatctccgtcatcttgtagcagtccaaactgatgaagccaaggcatttgcagagagagaatcactctatttcatggagacttctgcactggagtccacaaacgtggaagatgctttttccgaggtcttgacccagatctaccgcatcgtgagcaagaggtcagttgaggcaggtgaggactcggcttctggtcctggcaagggcgagaagatcaacatgaaggacgatgtctcggcagtgaagaagggtgggtgctgctccagttgagccacactgtattatttttgttgggcttgtgtgatgttagctcgagctatcgcctttccagcgacctggaattttattagtagttgtagcaagtattatgtcctagaggagtttgttgctgaactgagaggt

SEQ ID NO: 3049 - DNA, 709 bp, Avena sativa
cggtcaaggccggcggcggcggcgaagagcgtgcaggccggaagggcctgttcgtgaagatcaacatggacggcgtcccgatcgggcggaaggtcgagctcaaggagcacggcgagcgtacgccgacctctctgccgccgtcgacaagctcttccgcggcctgctcgccgctcaaagggatccagctgccgcctccgatgggaatctcctggcgatcgccggcggggagtacacgctggtgtacgaggacgacgagggcgacaggatgctggttggggacgtcccatggaagatgttcatcgccacggcgaagaggctgcgggtgctcaagagctcagatctacctgcctcgtcgctgacagcagggagcaggaagaggccagctgcggccgactgctgatcgagtgaagaccgaactcgcccgacaacgcatatccgctttgtaaagcggcctttttgacgcgaattaatcaagggattccctgttctgctgctacgtagtacagttcgtggtatgaggatgaaatcacggctgtaattagagccgtgtacgggtgttgctactgctactgctacggctggtggtattttggatgcctgtgtatgtctaattaaaactcttctccagatgatctaatcttaatattagtatgcttcttagtatgatggctcgaatacatatgaaaatgatcttgcctgtagtaggaaa

SEQ ID NO: 3050 - DNA, 965 bp, Avena sativa
gaatggtacttgaacgtgagtcctatgcatgaaaaacctggtgctggaactccatatgttgctctttggcttatgctatccagagaaaagctgaagcgagatcacacggtgcatgcagtgtttgagttgtcaatatacaaccagtcaaaaggaatgtattgtggatgccaagctaactacaacttcgatttcaagaataactactcgaaggagtgcttgattcctcttaaggagctactgaaatcatctgcttttctagttgatgatagctgtgtctttggtgtggagatattaaaatcgatgtctcttctcctgaaagaggctgttgtggttcatcagaagactaccacagtgcagaacctctttgtccagaacaagggattcatcgaagggacatacatctggtccatggacaatttcccagaattggagtctaagcacttcgtccgttctcctacatttgaagttggcggacataaatggtacactggcatgtatccgcgtggtgacaagttcaccactgattccctctccctgtacttgtacctggatgcctctaagaagctcccagctctggaatctaagaaggtggctgtaatgactctctcgatcctggaccaaaagaatgggaaacacttgactagaactgcaggtctctgggtgtgtgcaaacggctggggatgggctgacttccttggactagagaaactcaaggacccgtctggaggatatgttgtaggatcgaactgcgttatcaaggcagatctcactctcgttgggtcatccactgagggccagatctagctcatggcctggtgaagacataatgccctttcatcctacgggctagacttatgtacgtatgagataatgttgtagtagcagtactaagaatttcttggacgattagtattgacctgggtttgagaagtgagacgataatttacgtcatatatctctacgtc

SEQ ID NO: 3051 - DNA, 709 bp, Avena sativa
aggaaatgggcatttcagttgccatcaagcacaagaagatcaatgtgtcaaattctagagtagcatgggaacacgagcaattctcgaggtttagggtgactgcactaactctttcggaattgtctacccctcctgaatttttggaaagcactggtggtctgtatgacacgagagaatcagcagatgttgagtcgataacaagaactgtcagattagtttctgagagtctcgcgagacacatctatggattgagaggaaggaacattgaagtttttgctgagagcagcagcttagccatcagtcctcactacatccagtcctggctggatcttttttctcggactccacgggttgcaccttttcttcagaagaatgatccctttatcgcggcacttaaaaaggaactatcggagcatactgctgatgtgcatgttcaaaatgacgtccttgatggcttgttcactttctatgatgcaacaaaatcaactttaaatgtatatcaggttgcaagtgttacttttgatctgttgttccttctggtgcttggttcctatctaattgttctcttcagtttccttgtaatcactacacggggcctcgacgatcttataaacatattcagacggcctccatcacgtaaagtacaagggaaggcataggctagatcgagttccgtgtattagtaacgagaggacgagcgcatgcctag

SEQ ID NO: 3052 - DNA, 707 bp, Avena sativa
ggagctcctatcacgaagtggagtcactgtaaaaggaaaacaagcagttgtggtagggcgtagcaacattgtgggtttaccagtatcgctgcttcttctgaaagcagatgcgaccgtctctatcgtgcattcacggacccctaaccctgaaacaatcgtgcgtcaagcagacattatcattgcagcagccggccaggctatgatgatcaagggggactggatcaaaccaggcgctgcggtcatcgatgtcgggacaaattccatcgacgaccccaccaggaagtccggatacagacttgtcggtgacgtggatttcatggaggtgagcaaggtcgcaggtcacctgactcccgttcctggaggagttggcccgatgaccgtggcaatgttgctgaagaacacagtggacggtgccaagaggggtatagtctcatagatttttcatctcaccgcaacccatgtgctgtgatgtggtaatgcgaggatattgtaactgagtggccttgacaaatttgtgcctagtctcaccacaatccatgcgctgtctgatgtggtaatgcgaggatgttgcaactgagtggcctagacaaatttcttctttgttttgttcggtcttgcattatttcaagaacaaacagcactcactagtctgtagctagcgtcttgtttgataaataaatgcagtacctatgtgattttctcaaaaa

SEQ ID NO: 3053 - DNA, 822 bp, Avena sativa
ggcaaagtctgtttatgacaagctgtggaatggttcttacttcaattatgatgatgcaggcactaaagttagcacctccattcatgctgatcagttggctggacaatggtatgccaacgcctgtgggctctctccaattgttgacaaggacaagtcacaaagtgcattagaaaagatatattctttcaacgtgatgaagttcatgaatggtaaaaggggggcattgaacgggatgtggccagatggcactgtggacatgtccacaatgcaatctagggagatatggccaggcgtgacgtatgcgcttgctgcaactatgattcaagaaggcctggttgaggagggattcaaaacagctgaaggggtctatcatgctgcctggtctccagaaggacttggatacgcgttccaaactcctgaatcttggaacaacgacgacgggtaccggtccctgtgctacatgcgcccgctcgccatatgggcgatgcagtgggccctctcaacaccaaagctccacaaggagccccatacagatgtaacacaagcttccttccctaagacccagttctcgtatgcgcgaattgcaaagctcctgcagctgcctgaaaatgaaacgtccaagagtacccttcgagtgatctatgagatagtccggaataggtttagctcatgatttaagggccgctacctgcctgaatactgaatgcccccattgctgcaacattgatgaatgtgattgttggttgcgaacactggttatctgtcagcgcacatttgtgcgcagttattggtaataaagctgagatccgtgtcaacttacaa

SEQ ID NO: 3054 - DNA, 795 bp, Avena sativa
cagttttgtctactggagctcaagctgtatgtctccttattcaaagttcacaggagaataagccattggatagttttcctgcaacgttcatggtttccttgtaacagatacctaatgacttatgttgtttttgttgtacacacagatgatctaattgttgacccaaggaactttgagtggctgagggaagcaaattgcccagttgtagccgatgtaacacatgctctacaacaaccagctgggaaaaagcttgatggtggtggggttgcaagtgggggcttacgggaacttataccatgcatcgcaaggactgctgttgcagttggtgttgatggtatcttcatggaggtacatgatgatcccgtgaattcaccatgcgacgggccaactcaatggccattacgcaatttggaagagctactggaggaactgattgctattgcgcgagtcaccaagggaaagaagccgttcaatatcgatctaacaccattcaaggagtgacctggcacagtggatggagaaagacaccttctcactgcccaatgtggctgtatcaggacaaaatcactctttgtgtactgtacattttttttcattcaccaacggttgctgctatctttgttggactgcctgttatcttcttttagaagcataagctttgcagccgtagatcagtgttttccctgctgaattgctccaagtcaaagatgacgtgttatcttctttgtcttgattggcacatttcttgatattttacatgatggagtaaaggagcaagattacatgacaaaaaaa

SEQ ID NO: 3055 - DNA, 899 bp, Avena sativa
acgtcgacctgagcgtctacaagggaaggttcttctcattgtttaacgtcgcgtcccagtggtaagaattaggaattagcatctccgttttggctatgagatatcttttcagttttacatacaggcacagcgcgtttaagatcgaattgtcgctgcatagtccacatcaaacagatggtcaaattggattagtcacctgctgcctactggtgcttgattctccaagataatctggctgacgtagacatctaaaaaataatttttcgtagaaaacagtacttcttcaactgctaattgttgtttctgaccaattgttccagtggcctaactaactcaaactacaccgagctgagccaggtgtacgagaagtacaagggccaaggacttgaaatcctggctttcccgtgcaaccagtttggtgggcaggagcctggcaccaacgaggagattgtcgagtttgcctgcactcgcttcaaggctgagtaccccatttttgacaaggttgatgtcaacggcaaggaggtatcccccttgtacaagttcctgaagtctagcaaaggtggtcttttcggcgacagcatcaagtggaacttctccaagttcttggttgacaaggagggtcgcgtcgtggaccgctatgcgccgaccacttcccctctgagcattgagaaggacatcaagaagctgcttggggtctcttagacctgctggttggaggctgtagaaaaatcagcacttctgtactacatcggtgctataaacattaataatgttgtgttgaataaaattatgtacccagcatttcagaggttgcgagtctgctacattttccacatcctactatgtacttgtatatgtcgtgttaatgaatttcaaatattgtatctgttcggccgccc

SEQ ID NO: 3056 - DNA, 794 bp, Avena sativa
tgactacttaaggcgggaaatactgcatagttatggctttgagcatatgtccttgttatacaatctggaaaaggctggccttgttaagaggcaggaatcaaggagtaattgggttggtattagcagagctctgcagcttatagtcgatataaaggatcctgaaaagcctgatgatatatcatacatcttttctggatatgcacctctgagtattcgccttgttcagcatgcagtgaggtctggatggcgatctattgaagaactgttaaaattattgccaggtcctcatctggatttgaaaagaggtgtttcgaccattagttcatcggaagtactgccaggttccgtgggacaacagagtaccgaccgggttggtcatcgctcccttgttctggttgtgtttattggcggcgtaacatctgctgagattgctgcacttcggttccttagttcacaggaaggaatgggttatgacttcctggttggaactacgaaggttatcactggcaacacattactgagaccaattatagccagcagcaaagagggaatgatttgatcatattttgctgtgcatacccggtcttttattgtacaaagcagtgcgcactcgagcccaagaggggtttccttccttcattctggctctgttattctgagaccggaaatgttgaggcccgccatcttctgttcatttgaggggccttgtttttttcggcgaggtacatcatatggtgtatatatcggcatctggtacaaataaggctgcactagataccgccttagtgctagat

SEQ ID NO: 3057 - DNA, 592 bp, Avena sativa
gtatgcctatgaattccatgaatcttccacaaggtcctagtctggctatgaatgttatgaatcgtccacaaagttcaaattcctctatgagtgccatgaatcttccaccaggatcaagtccggccttgaattttgcaagtgccccagcaaggggtatcacctattacaaaacccttatccatcaacatggaggggagaggaaggacccacctgaacaacagcaaatgcaacaacaaacacaatatggaatgtaccaccagtccgctccctcacaaactgatgttattaatggtgtttctatggttaatagagataccaaaccgaggccaatgaaactgtgtgcttatttcaatggcccgaggggttgtcgcaacggtgctagttgtactttcctacatgacttgtcagcaccgccgaggcaggacggctcaaaaagacttaagctggacaacagaatagccggtcgaaactgagctctgattggtactcaagttttgaccgttgtttggttgagtgtcttccacatgcatcgttcagtaaatattacacctgctagctccctgtatgtgctccatggtgggcggccgcaaat

SEQ ID NO: 3058 - DNA, 886 bp, Avena sativa
tgtcttcttgttgtcttagtcgtccttcttaattctttgtccctttttgctgatatacttctttcttgcctacgttgtgtaccgcaatcagtttatcaatgtttactggacaagatacgacacaggcggtctgtattggccaattgcatacaatacaacaatattctctatcgtgctcacccagatcatctgcctcgctgtctttggccttaaaaaatccccagtagcttcaggcttcaccatacctcttatcatcctcactcttttattcaaccagtattgcagaaagcgtcttctgccattatttaggacttttcctgcacaggttttgatagacatggacagagaagatcagcgattgggcagaatggatgacattcaccggggccttcaatgtgcttactgtcagtcccctgacactgatgacatacctttggaaggaattcaaacttccagtacagatgaagataaatgtagcagctcaggtgaatctagttgcaaagaaccagtaagtgacttgtctcacccaacactgaaaggtctccctgttgatcggctacggaccgcggtgagatcactagctttcatgatcagactgcagaagagagggttatcagcatagcccaatcgctcaaccaccgtttgtaaatgtacaaacttgcacacattgtgcacataggacacggcgtagagacggaaacagagcatctcctgttaagttgcgagggtaaaactgtgtgttcgaatgaatgcccgcgcaacttttcagaaaattttggtcatacgaaagaaaatattggttcttcagtttccacccaaggcttgctgatgccactcccacttttctgtaacctcggttaaaccggttcttgcaaatgaaagcaat

SEQ ID NO: 3059 - DNA, 436 bp, Avena sativa
gctcaacaacatcatcaaaatggaggaagaggaggatgcttcaacggacctttatccaccaactggccggaataaaccacatgttgatctgaacacacttatgagagttacaacgagaccgaagaaggtcttaaagaccacaaatgcttactttattgggtgacacgtgagcaaggttcttttgtattggttcaaaggagtcatgaatgagattgctgagttggatcaaaggaatatcattgagatgcacaactacctcacaagcgtttatgaggaaggggatgctcggtcagcactcatcaccatgcttcaatctctgaaccacgcaaagaatggtgttgacattgtttctggaactaaggttcggacacattttgcaagaccaaattaggaaaaaggtacctagctaaaattagcctccaagcatccgtatgcc

SEQ ID NO: 3060 - DNA, 587 bp, Avena sativa
caacaaccgcttcaagagggaggaggtggtcatcaacggctgggagaccgagcaggtggacaaggccgtcgcctggctcaagaagatcgagaggaagcttgacgagcagcgcgccaaggcggtggagaagacgcagaacgacatggcgaaggcgcgtcgcaaggcggaggagaagcgggcgtcggcggaggcgaagcggggcctgaagctggccaaggtgctggagctggccaacttcatgaaggccgtcggcagggtgcccaccaagcgctccttcttctagctccccggtcgccgttgccacctcctcgctgccagacttctctcccttctgaaccctgtccgtttttgcccacggctggtgtgtgtgctgcctgctgcgtccgatacgatcgagaacctaattgtaaaaaagatttggaaatttctgttggcgttgtgtactactgtagtagtcgtagctgccggtgatgttgtgatcaccaaccaggtggcgttttttgtgggcttgtatatgcagaactggtgtggatggacagtatgtttgctaggaacttgcaaacattcagagattttggtaacaaaaa

SEQ ID NO: 3061 - DNA, 763 bp, Avena sativa
aacaggcaacacctaggccggataaattcatctcaacagactcattagttcattgctggcgagtctccccacttccagatcttggaagaagtagtaacaccccatccaacattcaggaacttggtcagaatggcagcatgtcccaagcaaccttgcatgtgaatggccccaggatggaatctgtctcaagctttacatcaccatcaaaccagattacatctctgggaaatgagatgcagagccaagtagcatcactagctagcaatgcccttccgatggtattcaaacaggatgcagcaccattcagctttacaagcagcacaaactcaagagaaatgctgaataacaaccttgccttcagcaattcaggcatcaacacttcattacctaaccttcacatagacagttcggttgtgccaaggcagggtctggatggcggtaatgcaggcggtgttgcctctctgcagggtggcaggattgatcagcaaactgccggtaatcagctcaattacaccaatgatctcatgggttcaagcaggctgcaaaggggtctcagtggcggcttggatgacattgttgttgacatgtttaggccggataatgataatggcggtcttttcatcgatggggactggcagctggtctagccggtctctgttcgccaagtccatgcgtgagatttccggcgtttgtggtgtctgctgctgatttgtccgccgtgcatcgcctgctcaagctgttcatagtagcaagccttcaccac

SEQ ID NO: 3062 - DNA, 717 bp, Avena sativa
ctagcttcagagaactgtagcgaggttccgaaacagagcagcacgcatccatgcgtggaatttgcctctcctgctcatacagttccaactttccatccgtatgcagataacgtgccaactccaaaaattactgccagtgagaagaattttctgctgtctgtgcttgggctggcctcacccgggtcgaagccagacacttctcagcagccttcttgcaaaagggctcttcttaacagcctctgaaaggggtatatataatcttttatgcaaatacattttgcattttaggcttgcatgggattcatcaccaagcctgccatgctgaggctccacagcatgtataccttggctccctagatctaattttaactagggtagttctccctacctcctatatttgcatcaagtgtgcgtgtagctcatgtcgtagtccagttgtttgtactaggtctcgacagtttggtttgttgttggttgtacatatcgcattggaggcggtgttgtagtagcatacaggattcgaagaagggggcgatgtgccctgagagttacaacttgtattcaaaatatagaataaggcattctttgtgtaattaactcctttgtaacttttctgtccggtgcggaatatatcggcttggtttgtggtgtgatgtaatgactttcttcttattggacatatgtggttgaatgaactgtttatatttctaccaaaaa

SEQ ID NO: 3063 - DNA, 570 bp, Avena sativa
  modified_base (567)..(567): a, c, t, g, unknown or other
gcctcatgctatcagtgtgacaccagaagagcaagaggcaattgggcggctggaagccatggggtttgacagagcacgtgtcatcgaagcatttttcgcctgcgacaggaatgagcaattagctgtgaactatcttcttgagcatgctggtgatgaaaactagagagagttactttgatattcgcttgttctgaatatctgaccaaaattgatcgtgaccatcccgagtgtctacgctagttgagatgaagctaacacgcagctgaacagattatctctttgcacaacacctaggtttacttcctgcctcgggcattttaaaaacttgtagaatgagcacttttattgggacctatcggaatgacggagtggtactttaatgttgtttcctgtcagttctccggttgatattagtggcggtgaacatcagttcggatgatatatttggtgaacatcagttctattgatatgtcgttcagtaccarcttggttgtatatagagatagcacaacagtccgcataattagaaacaaacaaaataatataccactgattggagtaaaaaanaaa

SEQ ID NO: 3064 - DNA, 750 bp, Avena sativa
agctgatagggcaactcaggctatcccctcgagtgttggttggtcacagcttggtggaaaagtggctttgagtatggtagaacaagctgacaaaaccacttccccgtcctgttagggtatgggttcttgatgctactcctggtaaagttcgtgctgggttagatggtgaagatcaccctgctgaacttattgagttcctcagaagaatgcctaggcaggttaattcaaagcaggaagttgttgatgctctcgttaaggcaaagttttctctggatgtcgcacggtgggtggcaactaatctccgacgaagcagtccagtaggactacgatcttcctcaggcttctcgtggatattcgacttaaatggcatctctgagatgtataagtcatatgaagatactaacttgtggagggttgtagatgatgtgccacggggagttcacatcaatttccttaaggctgaaagaagtttgcatagatgggctctcgaggacctccagagaattcataccgcggaggagctggctgcagacgagggtggaggagttgaaatgcatctgcttgaagatgctggacactgggttcatgcagataaccctgacgggctcttcagaatcctttcatcgaccttccgcgtcgagacttccgtaagaggggtgcaggactaaaaaggttcagaaatctgaacagtgctgcaacatggccagctcaagtgggtacgcctgacatgaagacgatacagaagaattg

SEQ ID NO: 3065 - DNA, 564 bp, Avena sativa
tgaagaatgcatattccgttcaacaattgaggaagaaaactggatattccaaaaagcagttctataatgaagcgtttaagatatacaaggaggttaacatgcttttcgcacgaggagacatatcatctctccggaaagctgtgacagataatttgcattctgctatgaaaaatgaaatcaagagaagacaagccaagtggaagtctgtattactgggaattggtggagcctgctgtaaacataagaactttgagggctcgtatgattggtcttgataaaaaggaccttgacaaagctttcatacagcttacgcttgagtttgtcactaagcagaaatatgaagcctataattcaaaaggacaggttgtgtcaggcgacaagtcaaaggaggtactcgtgaaagagatatgggtgtttgaaaggtcccttttccaccccgacgcatactggcgtgtatgtgggcagattaagctgtgataatctcttgacaaagcacatttcgccctacctgagtagctgagttgaacgatggcttctctaatgcacagcagtcccaaataaaca

SEQ ID NO: 3066 - DNA, 740 bp, Avena sativa
cgggatcgcctcaaccgaacctcgccgcggcaagactctgagtcaggaatcagtaggactccgtccgtccgtcgccgtcgccatgaccgtggaggtgtgcgtcaaggccgccgtcggccaccccgacacgctcggcgactgtcccttctcgcagagggtgctgctcacgctggaggagaagaacgtgccttacgagatgaagctcatcgacgtcagcaacaagccccaatggtttttggagatcaacccagaggggaaggtgcctgtgtttaacagtggtgatggtaaatggattgctgattctgatgtgatcactcaggtcattgaggagaagtacccaactccatcacttgtcacccctcctgagtatgcgtcagtgggctcaaagatcttctcaaccttcattgcattcttgaagagcaaggacgccactgatggtacggagaaggcacttgttgacgagctgcaggcactcgacgagcacctaaaagctcatggcccctacatcaatggggagaacgtgtccgctgcagatctgagcctggggccgaagctcttccatctcacggtcgccctggagcattttaaaggctggaagatccccgaaaaccctgaccagcgtccatgcctacaccgaggctctcttcagccgggaatcgttcgtgaagaccaagccagccaaggagcacctgatcgccggatgggcgcccaaggtgaacccgtaagctcccgctgcctgg

SEQ ID NO: 3067 - DNA, 902 bp, Avena sativa
ccgggatagcaactgaagttagatcctacaatttatgatgctttaatcaaggaaaaggtggcagtgggcgatgttatatacattgaagccaatagtggtgcagtgaaaagagtcggtagatgtgatgcttttgctacagaatatgatcttgaagcagaggagtatgtcccaattcctaaaggggaagtccacaagaaaaaagaaatagtgcaggacgttacacttcatgaccttgatgccgcaaatgcccaaccacaaggaggacaggatattttgtcccttatgggccagatgatgaagccacggaagactgaaatcactgagaagctgcgccaagagattaacaaggtcgttaacaggtatattgacgaaggtattgcagagcttgtacccggtgtgctgttcattgatgaggtccacatgctggatattgaatgcttctcttatcttaatcgtgctttggagagctcattatcaccaatcgtaatactcgctacgaacagaggaatatgcaccgtaagaggaactgatatgacaagtccacatggtatcccagttgaccttctagataggttggttattgtgcgcacagagacatatggtcctatcgagatgatccagatattggctattagagcacaagtggaggagattgacattgatgaagacagtcttgcatttctgggagaggttggtcagcagacatctttgaggcatgctattcagttgctatcgcctgctagcgtagttgcaaaggctaatgggagagagaagatctccaaggctgatcttgaagaagttggtgctctgtatttggacgcgaagtcatctgctcgtttgcttcaggagcagcaagaaagatacatcacctaaactactcgtgcacaacaatgtccaagaat

SEQ ID NO: 3068 - DNA, 718 bp, Avena sativa
catcatatcttaggaatgagcgcctaatattagatagtagactcaaggtggaagagaagtttggccttctttctctatatgctatcacataatgcgtcatttgaagatctacaattggagtttgagcatagtggatacaccttccacaagtatatattagagttctttgacattattcccatcctagcaactcgattttgtgaggcctcgatacattgatgaaccgcatcccaagatttctatggacgatcgcttctttccatacttcaagaactgtataggtgctatagatgggtctcatgttcctatcagtctatctcctcaatactaagctccatggagaaataggaaaggctctcttagccagaatgtcatgattgcttgcgattttgatctaaacatcactttcatttcatgtggatgggagggttctgccaccgatgcaagggttttgagttctgcaatactcaaaggtttcaaagtaccaaatggaaaattttacctagttgatggtggttacgcaaacacccagtccttccttgcaccgtaccggggtgtgcgctaccacttgaaagagtggggacatggtcgccgtcggccacaaaaccataaagaattgtttaatctccgtcatgcagtgatgagaaatcatgtggaaaggctcttgggaatactgaagaagcgattccctattcttaatgttgcaaccttccatcaa

SEQ ID NO: 3069 - DNA, 727 bp, Avena sativa
cttttctgtctgcctgttcaagttcttaacatcctcagaattcttcgtccctgttgtgcatctgttctatattgtttgtgtcattcaggcactggtaacgtgctatggagaagaaacttttgacagatcaagctttcgagattgccttcttaacgatgtttgccaggagatgtcaggatatgatattgctagagaatattttgtatccaagtacatcgatccctcttgtaatccaaaagatatggtgcggagattaacacatccttatcttcggaggtgcgcgttgctttgggagctgctgaagtcgtcttcctcagcacccttatacgacagttccaatatttgggaagggtcacatctttactcagatagtagcatagcagaaggcaattcttcactggcaatggatttgtatggagtacaagaactggaaagcctgtttcaaattcagtcactggacctgatactcaaagatgactccgtacatctgcttgcattaagatggtctcaacatttctctgaagactacagatctcgcaaatatagaggcactctcttttctacccctgcagtaccatttaggctgatgcagttaccagctgtgtaccaagttctcctagaaagatatgtcaagatgcaatgtcctgattgtggttctgtgcctgatgaaccggcgttatgtttgctttgcggtcaagctttgttcgcctagttggaaaccatgctg

SEQ ID NO: 3070 - DNA, 547 bp, Avena sativa
gtaccttatggaaaaggaattaatctggatctttggccacattcctgggttttctgccaacttgccatctgtgattgccaaactccacgctgacaaaggagaagtatttatcaccaccggcgtcattctcaccatcttcacaaactgaggataaacagtggaatttctcttttgcatttatctggaacaccgtagtatggctcgtgctgatgaacttcttcattaagatcgtcacatcaacagctcaggattatcgcaaaaggcagcaggacatagagatggagctcattaccggttcctcgtccctgagccattctaaaactaactaacgaagaaagttgttgtatttattcagacgcaagttgtgaatgttctcctcagtagccttgacgcctggctaagccctatgcagatggtacctgcgctggtagaagttgtattcttctgtacagtgaacagatacatgggcctcgctaacctgmccccragagatggccgcaacctttgtcattgtgcctctctagaggcagttcctcgaggagaatca

SEQ ID NO: 3071 - DNA, 643 bp, Avena sativa
caatgtggcaaaagcagctgctatcgcatcaatgtgcgtacaacctgaggttgcacaccgaccgagcatgagcgaagtagtgcaggcgttgaaacttgtctgcagtgagggtgatgagggtcttggttcgggaagtttcagccaggagttggcggctcatactacagcggtttatgatgtatctggcatggaagcggagagggtgctattatctgaaatgtttggctccacacctgtcttcactccagctgctgattcaggttctttccgcaagcattccagctcaggccctctgatgacaggcaagaacaagaagttctggcagagattgcgaagcttgtcaagaggtagtatgagtgagcatggtgcctcaccagattttgagacacgctcacagtgtagcaataggtgagtttttttctgttcggcttccagtctcgacaagatggatattatgttgactggacaaagagtttgaagaccttgtttgtgtacattatgcgtgtggaggtaaaggctgtatatagttcaggtctttaggatcatcagagtagcagaccgcatcatgagttgtggatcaccggagtctctaataagatctgctccgatttgtggctcgttttgactggtactgccatactgc

SEQ ID NO: 3072 - DNA, 660 bp, Avena sativa
ctgcatctgggccggcattttcctgtggtatgtgttcctcctgatatacggctcgatcacgccatcattctccaccacgttcttcatggtgttctcggaggcgctgggcggcgcgccggcctactgggtggtgaccctgctggtctcggtcgcagcgctcatccccttcttcaccctgtcggtggtgaagacgtggttcttcccggactaccacaacaagatccagtggctgcagcacacggccaggcacgacgacccggaggcggagctgggcagggtcctgcgccagttctcggtgcggtccacgggcgtgggtgtctcggcgcgccgcgacgccaagctcgtccgcgtcaacagcaaggtcttccatgcggaccagtcgtcattacattcgcaaggtggtgaccagctggcgtagcatgccctagctagcggctctcctgtaaatatcaccgagtgttgattgattgcccgagctagcagctcccctgtaaatatcgcaagcgttgatctggccaggtgtacgttagagactgagctggttgcggagattagggttcgttcaactgtacatgaggaggagtgtattgaattttgtttgtactagacagtagctgcgaaaggagggatatgtaagtttaggatacatatcacttgatt

SEQ ID NO: 3073 - DNA, 558 bp, Avena sativa
gcgcaaggtggacctcaaggccttcgcgggccacaccagctccgcctcctacgaccagctcctcgcagcgctccaggacaagttcatctcacacttcactgtccgcaaggttgggaatgaggagatgaagctcgtcgacgcggtcagcgggacggagtatgtgcccacgtacgaggacaaggacggcgactggatgctcgtcggagacgtcccctggagaatgtttgtggagacctgccagcgtattcgtctcatgaaaagttccgaggctgtcaatctagcaccaagagcagctcggtgagatgcaatccttgtcctcttccaaaaccgcttaatactaaggaatgtctttgctcgtcgaggttcttccacaagtctgagagagaaatgtgtacagccatctctgccttttgttccagcatcccaattgagttcagagagtgttgcagcttgtaattccattaccagccagtaatatcttctatatctaagatggagaggttgtgatgctttagaaatataatacctacagttgttcttataatagacctcgacgga

SEQ ID NO: 3074 - DNA, 915 bp, Avena sativa
aagagttaaaactcagcatggtgaaggctgcagtgtccatggcttctagatgtcagtaaagtgccggaaattccatttgcaccaggcagagggttttatgaatcaaaatgtagaggtgtctgagctatcactggaagcaggttttaatatcactcacaaaataaacaaactgtcctttgggacagaattccctggtgttgtcaatccacttgatggtgctcagtggatacaaccggcgtcagacgggacatatcagtacttcataaaagttgtccctacaatttatactgatataagagggcgaaagattgactcaaaccaattctcagtgaccgagcactttagagatggaaatgttcatccgagaccccaacctggagtatttttcttctatgatttctcgcctataaaggtgatattcacagaagaaaatagatcgttccttcactacctgacaaacctgtgtgctatagtgggaggcatcttcaccgtctccggcatcattgactcgttcatataccatggacagaaggcacttaagaagaaaatggagataggcaagtacagataatttatgagaaacctggaccacacctcacattttccaagttttgtggctcgtatcgaggtggatccggtatatgcgctccaaagacatgagacaccgcgaggttgcacggccatcaaaagtgatgctattgcacgttagttgatcaaaacttgtacaaggacagaataggctggtcttgggggcaagtgctttgatgtccatcaggggcgactgtagttgaatggccagaactggcgcaatgctgtacttggtaacttgggagtcgataggtcacagaattttctcctgcaattgcttgcttcactcaattgtgtcacatcttcctaacaatgtttagtcccgtt

SEQ ID NO: 3075 - DNA, 267 bp, Avena sativa
taatagtaggggataacaattggaaacattaagagtgctgatgcttgatgttaactgtcaggtgttgttaggatcataggagtgacaagcgtacagtgtagcgaatgtgcattacgttatgaataaaacttctacttttctgttttgaattatatgtaggtacaagtgttttctttatcagcgccaatttagttcttgtttgtaactggaacgcttgcgtgaatgtattgtgttgtgtgtagtgatgactgaattttacgaaaaaaa

SEQ ID NO: 3076 - DNA, 933 bp, Avena sativa
gcggcggctcatcgaggcggagaggcccgacctcatagccttcaccggagataacatatttggggcagtgcaactgatgcagcagaatcactactcagagcaattagccctgccatggagtacaacgtaccatgggctgccatattaggaaatcatgatcaggaatccacaatgacgcgggaggaactgatggcattcatgtctttgatggactattcgtggggatcgtgaagtggtcgatggaatcaaaacttatggttggatcaaagaatctcagcttgcttggctcagtgctacttcaaaagaacttcagcgaaattttcatgcccctgcactagcattcttccacatcccaattccagaagtccgtggactgtggtatacagattttaagggccagtatcaggagggagtggcttgctcatcagtaaactctggtgtccttggcacactcgtctccatgggagatgtaaaaggcgtctttcttggtcatgaccatcttaatgatttctgtggtgaccttaacgggatacggttctgttatggtggcggctttggttaccatgcctatggaagatctgattggcccaggagagctcgtgtaattcataccgagctcaagaaagggcagagatcatcatggatgggggttgagtcgatacggacctggaagttgctagacgatgataagctttccaaaattgacgagcaggttctatggagacatggtgaagatgactctgaccacaatgtctacttgtaaggcctggagtctaagatctctgtgtatgttgtataacatgtctgatcaagtacagtacttcaattaggttagatcaactcttggcaagctggtttgccatggaccacactagtcaccacatttgtatcttgttgatatgcaaatcccttgtttgggttgttgaagccagt

SEQ ID NO: 3077 - DNA, 839 bp, Avena sativa
ttttgcagctgatgtcaggctcaccttcaacaatgcgataacctacaatcctcgtgggcatgcagtgcatgacatggccattcaactcaacaaaatgtttgagtctagatggaagacagttgagaagaagttagcttctgccactgctaagccacatgttgaggttgccagggctgactcaaagaggagaaagacccctcctgtggaccgcagtgacttgtcaattgagtgcgtcgggccaactgagattgtgaagccgaagatgacatacgaggagaaagaatcctttggaaactgcttggcttctttgtctgaggatccagaacatttacctagccacatcattgatttgctacagcagtgtattcctaacaatgcagatgagcatggcgatggagagatagagattgatatccatgcactcagtgatgaggttctatttgaactgaagaagcatgtggacaagtttatgcaagagaaagatcagcagcatacaaaatccgagccttctgagaatgaggctgtgggtgtatctggcctcagtcactcgtccacagatccgtgcaaaggtggtgagcctgttgaggaagatgtggacatttgcggtaatacatccccgatactgatagagaaggatccacagatcagaactagcaaacctggtagcccaagtagttccagcagtgactctggatcttcttccagcgattctgagtctggcagtgacaccgaaagtgaatcggaaaaagttggtagcccagcaaagcttgcaaagagtgttacagcacctgaacaaccgcagagcaagaaagagtgatgttattagccctgttgatgct

SEQ ID NO: 3078 - DNA, 667 bp, Avena sativa
  modified_base (592)..(592): a, c, t, g, unknown or other
ttgatctgcaggatagagaaggcaatgtaagcatgaattccagaggtgaaaacctcatgatatggaatgaaacagagtgggaatatcaggtgcaaaatctacttggtggattgactcagtcaggattctgatggaaaaggtgctgtttggaggcgaaattcgcgaagatcagaaaattcggaaaaatatatgaaaaatcctatttttccagaagacgaaggatgccagaaggaggagtggagttgggccatagggggcccacaccaccccctggtgcgggccaccctaggccgcaccaccaggtggtgtggccggcctgacccacctctggctctcccctctggcgtatataatcctcccgaaaccctaatattcggggagcgatcacagaaagattctccgctctgcgggacggaaaacaccgagagaaaaagatctctccggcagacagcattctgccagggggaattccttcctgaagaggggagatcgtcgccatcaacaccaccatcaagctggacttcatcaggatcatcatcatcatcatcaccaccatcatcaccatctccataatgctgtaacaattgggttnaaccttgcatagttcttagggaaaactttctcggcgttgattactctttgtagttgatgctattgagtgaaccgt

SEQ ID NO: 3079 - DNA, 733 bp, Avena sativa
gcaactgtgattgagcgactgctcgcactctccatgggtggcaccaaggtgctgaaagactgctatatatcattgatggagtcctgcattcatctcaaggacattcaagaggacggggatgacgatgatgaagcagaagatgatgatgacgatgacgaggaggaagacaccgacgacgacgatgaggattcggaggatgaggacgtgcgagaagagacggaagaggaattccttgcaagatatgcggctgctgctagtgagtcaatcgaggttgtcgaggaaggagacatagatgatgaaacccaagacattgaattaggttacctggacgaagtggaaataaaacaggtggttctttcactgttgcagaaacatatcacattcctccaagcgcagagtctgccagatgatctaattgagagaattgcagaaacatttcctgaatctgagcagatgtttcgtgctcatcgacaaacttagtgttatacctgtgcagattttcttgtccaaatttgctttcaatgtttgttttgagctttcattggcttgattctatttgttgttccttagacattctgctgcttgtttgtgctcgtagataaaatgtactagtacaacaatttgttactggggtctgcaacaattattggtggatgtaacaatttcattatttttattacatgacttaatggtgcaatatttgtcaaatctttcgtctgtgagacggtttata

SEQ ID NO: 3080 - DNA, 789 bp, Avena sativa
cgagtccggaggcgacgacagcaggcccaactacgggggcggcgggtacggcgacgagacccgcccgcaccacggcggctcggcgcccccagcggccaggcagaagacgtaccggatcatctgcaaggccggcgaggacagcttcagcctcgccgccagggacggcaaggtctgcctcgtccgaaccaaccacgacgacgacacgcagcactggatcaaggacatgaagttcagcaccagggtgaaggacgaggaaggctacccggccatcgcgctggtcaacaaggccaccggagaggccctcaagcactcactcggccagtcccaccccgttcttctgacccgatacaacccggacaccctggaagagtcggtcctctggactgagagcagggacgtaggggaaggctaccgctgcatcaggatggtgaacaacatctacctcaacttcgacgcgctcaatggcgacaaggaccacggtggtgtgcacgatgggaccaccctagtgctgtgggagtgggcagagggcgacaaccagcgctggaagatcgttgcctggtgatcgacgcacggcaaggtctgttggttcaagcagcaccgtcttgtaataagcggaagtactgaatgtttctggaataaaaggatggtgcccatgtcagcggtgtgcctgttttcttttgttgtttcattattatcgatttgtaatgatgaattattggaccagttgtgtgtgagatcatcagttcgtaatgatggaaaaaagcaccagtgcttcttacactacatact

SEQ ID NO: 3081 - DNA, 930 bp, Avena sativa
ccgggatcgactccggcgccttcgaccgctcgccgtccaccttccggagctccatctcaagggacagctccgctcgcttcccggccgtgcccgggaggtaccacctctacgtctcctacgcctgcccctgggcgtccaggtgcctcgcctacctcaaactcaagggcctcgacgccgcaatcgggttcacgtcggtgaagcccatcttcgggaggaccagagaatccgacgaccatttggggtgggtgttccctgccaccggagacgaggagcccggcgccgagcccgaccctttcaacggcgccaagaccgtcagggagctctatgagattgcaagcacgaactacacggggaaacccactgttcccgttctgtgggataagcagctcaagactgtcgtgaacaacgagagctccgagattatccgcatgcttaacaccgagttcaacgacatcgccgagaatcccggcttggatctcaacccggctcacttacaggaatccatagatgaggtcaacgatttggtctacgatgccataaacaacggcgtgtacaaatgcggctttgccaagaaacagggtccatatgaggaggccgtcacaaacttatacaaggctctggacaagtgcgaggacattcttagtaagcaacggtatatgtgcggcaaccaactcacggaggcagatgtccgcctgtttgtcacgcttataagatttgatgaggtttatgctgttcacttcaagtgcaacaagaagctcatcagggaataccctaacctgttcaattacaccaaggacatctaccagattcctggcatcagcagcacggttaatatggagcacataaggaagcactactacggaagccatccatccataaacccttacggaattactccccgcacggccccaacatcgattacaatgctcc

SEQ ID NO: 3082 - DNA, 642 bp, Avena sativa
gatcaacactgacagaggtgtgatgatcggcgatggcaagtcacggttctctatcgacggcaagccaatttaccatttcgttgggacttccaccttcagtgagtatactgtcatgcatgttggttgtgttgccaagatcaaccctgaggctccccttgacaaagtctgtgttcttagctgtggtatttctactggtcttggtgcgtcgattaatgttgcaaaaccgccaaagggttcgacagtcgcgatatttgggctaggagctgttggacttgctgctgcagaaggtgcaaggattgcaggagcatcaaggatcattggtattgacctgaatgccagcagatttgaagaagctagaaaatttggctgcacagaatttgtgaacccaaaagatcataccaagccggttcaagaggtactcattgagatgacaaatggcggagttgaccgcagtgtggaatgcactggcaacattaatgccatgatacaagcatttgaatgtgttcatgatggctggggtgtagctgtgctggtgggtgtgccacacaaggacgcggagttcaagacccacccgatgaagttcctgaacgagaggactctgaagggcaccttcttcggcaacttcaaaccgcgcacagacct

SEQ ID NO: 3083 - DNA, 943 bp, Avena sativa
tgccaactaaaaacaacagaagaatgagagcaatcgatcgtgagatctgcacaattctgcgaggaattattggaaagaaagacagagctattaaaaatggtgaaactagcagcgatgacttgctaggattgctggtggagtcaaatatgcgagaatccgacgggaaagcagatctaggaatgactactgaagatataattgaggaatgcaagctattttactttgcaggcatggagacaacatcagtgttgctcacatggacactgattctgctaagtatgcacccagagtggcaagagcaggcaagaaaggaagtgttgcaccacttcggaaaaaccaggccagactttgaaaatttgagtcggctcaagacagtaacgatgattctatatgaggttcttaggttgtacccgccagcaatctttcttaccagaagaacatacaaggcaatggagcttggtggcatcaaatatccggcaggagtgaaccttatgttgcctatcctcttcatccaccatgatcccaatatatggggaaaagatgcaagcgaattcaacccacagaggtttgctgatggcatctcgaatgcggcgaagcatccggccgcgttcttcccatttggagggggtcctcggatctgcatcggtcagaacttcgcgttactagaagctaagatggctctcagcaccatcctacaacgcttctcgttcgagctctcgccatcctacacccatgctccgtacaccgtgttaaccctccacccacagcatggtgctccaattatgctcaagaagatatgaccatgcttcccattgggtagtaaatttgctcacatgttgtgtttaatttaaaattggaacattgagctgaataaacacaacaacgggtttacatgtgtgtgtgttttgtaagtcgggaatgaattgaatagtatagttatctg

SEQ ID NO: 3084 - DNA, 648 bp, Avena sativa
acacaacctatacaaatggtaccagtcctccgccctctccttcttcttcagctcaacctaatcatcctcatcctacccgaccataatatactgtaaccaggtcccgggatcgcgcctccacttccgtagcgccccacgtgatcgcagatccgctccattgtgaatccgtcgccatgtcttccagcgaggtcgcctgcacccttgccgccctcatcctccacgatgacgggatccccatcacctcagagaagatcgcgaccgttgtgaaggcggccggcatcaaggtcgaggcctactggcctgcgctgttcgccaagctccttcagagccgcagcgtagatgacctgatcctctccgtcggatctggtggaggtggtgctccagctgctgctgctgctgcaccggctgcaggtggtgccgctgctgctgaagaaaagaaggaagagaagaaggaggaggccaaggaggagagcgatgacgacatgggcttcagcttgttcgactaagaagttccagtcccgtttccttctggaaatcgcatatgctaaagactatcttatcttatttccttttaggtctaaaaggtttttggaggatttgatatgttgtgttactttgaatttcgtacccatgcaatgagtacttaca

SEQ ID NO: 3085 - DNA, 837 bp, Avena sativa
gtggagaaacgagcagttttgggttattggtggtgtctctgcccatctctttgcggtgttccagggacttctcaaggtcatagctggtgtggacacgagcttcaccgtgacaacaaaggctggagacgacgaggagttctcggagctgtacacgttcaaatggacaaccttgctgattcctccgaccaccctgctcctcctgaacttcatcggcgtggtggccggcatctccaacgcgatcaacaacggatacgagtcatgggggccgctcttcgggaagctcttcttcgcgttctgggtgattgtccatctctacccgttcctcaagggtctgctcggaaggcagaacaggaccccgagatcgtcatcgtctggtcaatcctccttgcctcatcatctcgctcctgtgggtgcgcgtcaaccccttcctcgccaagaccgatggccctaccctggaggagtgcggcttggactgcacctaggagaacaccgctgagcagcttatgtgaattccctcacccagtgcgtgtgtgtgtatgatgcccgaaggaggatttttgcaggtttttctttgcccataatttatttttcctctcccctgaaatgtagatagaaaacatgcaagtgttactctcgttttgtactatggtggtagctgggcctcgtatatgctatattgggcagacgcgggatgccgcggcaaccttgtgcagttatgttcggccacgtaaaaacaaatacaatcggttcatgtgttctttctgtttattgtactatcagcattctttatttgttcagtggacaaaatgtatgtatcttgagtgagccgaactggga

SEQ ID NO: 3086 - DNA, 648 bp, Avena sativa
gttaatggaagcctagagaatgggaagtttgtcattggggatgatgaagctgatgagtcagagcctgaacctgttagccctataagtgactgggaagacagtgatgctgagaaaaacagcgaaggcaacaaagatattgatgaggaggagtacttggctcagtttatctgcctgttatatgacaagttgttccgtgagggtgtcacggtggacactgctcttcaacaagcgctccgcgcacatcctaggttgaagtacacttgccatttacctaatgtttgtagttagtgacatccacaagccatacaaattatgaaactaataatactacctccgtttcaaaatataagatgttttagctccctacacactaaagggtgcctagatacattcatttcgcaaaagctaaaacatcttatattttggaaacggagggagtagaaaaaaaaggatcaggtggatttggttagagtttatttctgaggggttatagagtataccagtgtccattgtgcaggcggagataagggaacgtaccccaattgaatcttttggcgatttgccattgtaaaactgtagtacatagatgatctactaatggagactgatagagcaagagaaataaaggatgggaagctttagtaacaa

SEQ ID NO: 3087 - DNA, 545 bp, Avena sativa
tttcggcctgtcctgggttcttcgccctggggagtatgcagacactgcctgtggcactcgtttgtacatggccccggaagtcatgctatttcagaagtacgatgacaaagtagacttgtggagtatcggtgctattctctttgagctcttaaatggctacccgccattccgtggtagaagcaatgttcagatgcttcagtccataaatagaactagctctcttccattctcgtcactcgtcacgggcagcctgcatcctgattctgttgacgtatgcaccagactactctgcgcaaatccagtgcagcggatgtccttgcaagagttcatcaaccacggcttcctccgaccataagtgccagactgagactgaagaagatattggcgctgggaaccataggattgtacttgagtggctttagacactggcaatgtgaacttgaagtttagaactggttgatctgtttactgaacttgactttctgtatagaaagtgtatgaatatctaggaaatttaaaagtacgaaaggtcagtacatttgatg

SEQ ID NO: 3088 - DNA, 443 bp, Avena sativa
ttggtccttaagggcgtgcagtgcatgaactttctgctgtcttgggtgttgatatttcactgcgtggatagaagcttgcaagtttggagcgatggtaccttttatgggcaatatttgctctatcttgctgctggtagctgtttctgaatttacctgcactttgcattgttttgcaaagagccggatgagcgaaggttcagctccagattgatttcagtgttttcaatgcaggccacgtgctcagagcagtcgtcgcaggccgcatggtcggtggcatggacgcgtgcggcatggtcggagcaattgtggcaggccgcatgatcgctggcaatggacacatggagcatgctcgaggccgtcaatgtgggcggcgtgctcggggccgtcaatacaggccgcgtgccagggatcaaggttactttgacgcaagtagaaatcggatc

SEQ ID NO: 3089 - DNA, 729 bp, Avena sativa
gatgacttggtggatgttgacactgaactggtcacatcgtcaccctcccttaatggcagtgcacctgaaactttaattggaagatcacaggatggaaattctttaaatataactcctccagtgctggtttctgcaatgaaaggaagccgagcaaagcggggtatcgtcactaacttgagtgtttcatgggcccctgatgtttatgatcctcctgtcacttctgactcacacactgtgaggccgcaccatagaagttcaaggaagagcaactacaaatataagccaccaaagggcaccagcagcagccgcagtagcagtggcagcaaaaaggacaagaagcattctcaccacagtagcagcggcagcagcagcagcagtaaaagagataagaaatcttctcaccgcagtactagcggcggcagcatcaggagcagaattgacactagtgatcctcaacatggcaaggcgtatggcagcagcatcagcagcacaaatgacactatcgttcgtgaatacgataatttatctctatggctgccaccagatagtgctaaaatggaagaggccgtacccccagcacctgtgctgaagaccatggaacaaatcaagcgtagcgtgagcagctgcaaggagccgcctttaagcatgctatctcgccaagtgtctgcgaagtacaaggggatgtttcctttggggtcagaccaactagcttcttgagcatatgtgtga

SEQ ID NO: 3090 - DNA, 742 bp, Avena sativa
agccaggtgatgcccaaagctcggttcagagaatcttgcaagaaatgatgtcatcgcaaatgaatggtgctggccatgcagggaatgacatgaagagaccaaacggccttgcccctggtattaatggggttaactgcttagttggtaatgccgtcacaaatcactctggaatgggaggaatgggatttggtggcatgggagggtttggttcaaatcctgcagctagtggactgagaatgggaatgacaaacaatgcgatggcaatgaatggtaggatgggaatgcatcacagtgcacatgacctatcacagttgggccagcaacagcagcagcagcagcagcatgacataggaaatcagctgttgggtggacttagagcagcaaacagcttcaatggtcttcactatgactggaaaccctcccaatagagtggctggagacattatttcagtatgatgatgatgatgatgatgatgatgcagctgccctcactgggttcattgattatggcggcatcaatggcagcggcgcagcgccatagtgccccttgggtcaaagcatttgtgcttttgctccagttgtgccatgaggaatcataagcgacggcaagcacctgagctggtcagtgtatgtcgcaacagttagtttagctggttcgctgtgtattatgcaaccatgtcactgagctacctgcctcagttatcttaccaaaagatgagttaaaaggattatgacctgccag

SEQ ID NO: 3091 - DNA, 618 bp, Avena sativa
ggtctaagaaaggagccaccccaacccctgaaaactttcttcctgttgacattcctgctacttggggagcaatggagaagttatatcactctggcaaggcccgtgcgattggtgtgagtaacttttcttgtaagaggatggaagatttgcttgccattgctagtgtacctccagcagtcaaccaggttgagtcccatccaggttggcagcagatgaaactccgcgaactttgcaagtcaaagggtgtccatctttctgcatattcacccttgggtaaacctggatctcctgcatctatgggtaaaggttttctggacaatcctattattgtttccgttgccgaggagttgcagaaaacccctgcacaggttgctctacgctggggtcttcaaatgggccacagcgtgcttcccaagagcaccaacgaggcaaggatgaaggagaacctaggcgtgtttggttggtctattcctgaagatttgatggccaagttctctgaaatccaacaggttaagacgctgagagctgagttcgtcgtccacccccacgggtatctacaaaaccgtaggagggaattctgggatggtgaaatctgaagcgtctgaagttctacctgtt

SEQ ID NO: 3092 - DNA, 799 bp, Avena sativa
actatctggagatgatggaagcccatctagtgatgcttgaatgccagctggcgatgctagaggctcatttggagatgctggatggccattaggactccgagattgacccggcacaaattccgccgcatgaggattcattactttaggggatgtgtttgcttctggaaggacttcaccacttggcaccacaggcttgttgcgaggcacccggtgccctgatctgttgaaccctccagctagacgtggaccataagggacccttgcagttgcagattggtgagggtgcttacggagagggatggataacattgggggtacattggctggtgatggcaatagtcctccatgttctctgaaacctggtacagccattgaaccaaaagctggcacagttgctggactgaatggagcagcggcagcagaaagcttactggttgtctctttggcaccttctactggtgaatcattcttttcacttccagatgatgaagatttctcattttcagctccactagacagctgttcttggttatcctctcctggatctctttcatcatcattggaggaagaatcatttgcctcagtcaaaactggtgcttcttcatttgggacgtcagcttgtgctgctgatggttggttcttctctgtagatgtctccactgaatctgaggccttttcagcttgatttgatcctactgaacaattggcttgttcactgtcagaattggaagatttgtgttcatctgttgcttttgatacttgtgaattattatcctttggtgacacttttattgttcca

SEQ ID NO: 3093 - DNA, 500 bp, Avena sativa
cggccgccgtagaactccgtgaggcctccgcggggggcggagactccgttcgcgtcaccgagacgccgcagcccaactccagtgttaagttcagcgtggaggtgcctccgtcaatatgccaggaatgctaccagaccactcttatggagtactcaaagcgtttcaaggtccctggatttcggcctggaaagatagttccagaaaatgtacttttaaactatgttggaccacaacatgtacgggctgctacagttgaagctatcttgagacatacgcttcctcaggcattgtcctcggtggaagataaggcattagaagattctgtacagattctcactaagtttgatgatatgaatgagtctttctccctcgaccatgtgtttagatatgatgttgcggtggatgttgttcctgaactccaatggttatctgaagacaaatataagaacctcaaagtggttattgaaatagatgaaattgttgatgctagaaaggcagct

SEQ ID NO: 3094 - DNA, 613 bp, Avena sativa
ttggcattaaaaagtggcggcgtatatgaattagcttgtgagcatgtacattcatgctgtgtcctacttgcaaaggtggataaattcaagatcaatggcaaatggcatacatggattgattatgaccgattcaatgaactggtgacatctggaaagccttttaagagcagtgattacatggctatgacaccttcttgggcggtctatggcgctgatgaaggtggctttgatcctgatcaagctcgcttcaagaaggaaaggcgccatggagctgcagcactcaaaggctaaccttgaccaatcctatcagtaagcgagggatggctgcttccagagactaacatacctaccgcatcccaggagtcaaaattttggaatcaagaattgtgagggagtggcgccttgctgtgtttgtttgtctctcaatacctacagtgtttaggacatgtacctctgttcttttgacccccgaaaattttctggtagtgatgtttcctgatcccatccagtgcggcgaatgtacaattgagatatcgaaaacccggtttaaggtatttgtatggctggttgctgagacgttgatggttagttcttcctatttaattcacagaac

SEQ ID NO: 3095 - DNA, 534 bp, Avena sativa
atggcaaccttgatttggccttggagtattatgctcaggctgcttctgcaatgggtggaggggaggtatcatggattggtcaagggaatgctgatcaacagcgtcagcggagtttaatgttgaagcaactgctcacagagatactactaagggatggtggtattcaacttttgcttggtccaagtggaatgggagaagaaggacaactaaaaaggtacatgatggattggagaagtaggcagcagttcttgcttgaagcggctcatcggtgtcaagaggccgggctgtatgacaaatcggtggaaatacacaaaagagtcggagcttttgccatggcacttcagacagtaaacaagtgtctatcggatgcaatatgtgccatggcacacaataggttagatggcgaaagccgtgctgtttctctgattcaatctggcaatgagattttggagacagccagatattcttctgaagccagtgttcaagcaaggatctcatttctgaacagcaaattgtactgagacagcttgaagc

SEQ ID NO: 3096 - DNA, 430 bp, Avena sativa
gacgccgagggcacgcgtctgctcaacatcaccgtccttcagcgcctcgaccccgccgtcgaggacatcctcatcaccgccggtcacgtgaccctctacgacttcaacatcgacctcaaccaatggagccgcaaggacgtggaagggtcgctgttcgtcgtgaagaggaacacgcagccgaggttccagtttatagtcatgaacaggcggaacacggataatctggtggaggatttattaagtgattttgaatatgaacttcagcctccatatttgttgtaccgtaatgctgctcaagaagtaaatggtatttggttttacaatcagcatgactgcgatgccgtagcaaatctttttggaaggatactgaatgcttatgccagagttcctccaaaagcaaaagtgccttccgccataaggctgttcctac

SEQ ID NO: 3097 - DNA, 639 bp, Avena sativa
caagaacaaggagcgagcagagttccttggcaggattgcattttactgctttctcggctccaatacctgtactagtatcattgagctagctgagctccaacggctatccaaatcgacgaagaagttagagaaggagctcaagggccaagagctgtacaagaacgagcaatatcggatgaagctgcagaagtccaacgagaggctcctcgccctcatcaaatcgagcttcgacattgtcgtcgcggtcgggctactgcaactggccccgaagaaggtcacccctcgcgtcacgggggcgttcgggttcgccagctcgctcatcgcttgttaccagttgcttccagcgccagccaaatccaagtgatctactacctcgagccaggccgctgatgcaccgggttgctagttgctatcggccttatcgtcgccgatactgataagaaataaatctggacggaactgtcctcacgtacgtgtagcagatagctggggatgattgttgtgcaatcccatggcccatctcataactttgttgatctacctttcctagacttgattacatagtacgctgtatttgtatggtcctgggagcagggagccacttcaccaaataattagtcctcgtgttcagaattcaaa

SEQ ID NO: 3098 - DNA, 697 bp, Avena sativa
gctggatttcgaagagttcgctgcctccgccatcagtgtgtatcagatggaagccctggagacctgggagcagcacgcgcgccgcgcgtacgaactgttcgacaaggaaggcaaccggcctatcgtgatcgaagagctcgcatcggaactcggcttgggcccatcggtccccctccatgttgttctccaagactggatcaggcacgccgacgggaagctcagcttcctcgggttcataaagctcttgcacggagtttcttcccgatcgatcccgaaagcctaagataaaaacaccattcttgcatcatgaaccaaccaaggagatagctggtggctaagccaccaccaatctcttactggtgtctatgtgtgtgtgactgtttgaggtgaccggaggaggatggctcggaaccgaaacggaagaaatgtcaacggtcttgtgcaagaggtaaaaagagagaaaagtcaacggtcttgttatgcctactacagtagtagtagttagtagtactgcttgtacccctcctccccctgccacgtggattgatgatggttgttgtactaaggaagctgtgtagacgaatgtacagatgaggataggaaaaaagaaggaatatgaattgaaagcgctgctgttaaggcttgaggctgctgtttgtcaatgtctgtctgcactgttgttgttgcggcgctctct

SEQ ID NO: 3099 - DNA, 796 bp, Avena sativa
agatgtttcgatacagcactatccattgcacctggaataactttgccaccgtatgtctttttcattcgcttgtaattttgagcaagcacagtaaaagcagcaggatcccatccatatccaccaactatatgcaaatgatcggtcacacagccatttgctggctgcaaattccctgaccttattgctgcattaacagcatcttcagccatgcttctataggttgtccattttccacccgtgatagttataagccctgggtagtcttcaaatacaacatgatctctggaaatactttccgtgttctttgctgatggatccatggccaatgggcggataccactccaggcagaaagaacatctgaacgcctcacctgaacattaaggtaatcacatatagcatccaatatgaactgtatttcatcctcatgtggttcagggagcattgttatcgctgtactagaatcagttgtcccagcaaccgtccttcccagccatggcagcataaatacaactctaccatcttttgttttggggacaattaaccccatcccttcaggagaataataatcaggaagaacaatgtgcaccccactgctgggacagatcatgggtactacattattgttcgccatcttccttacagagtcacagaatgctcctgatgcattaaccaccacctttgcgaatgtgtcgaattccttacctgatagtgtgtcacggatgcgtgcaccaatgaccctctccccagattcatccttaatgagggagaccacttcagcataattgagaacagctg

SEQ ID NO: 3100 - DNA, 547 bp, Avena sativa
gatgcgcttcaaagtgctcgtcgaggaggatgttggaggacttgacatccctgtgtactatgcgggggttgcagtcatggtgaagataggccagtccttgtgcagcgccgactgcgatcctcagtcgtgtctcccaatcaagtttcactttctttgacgggccgtggagaagatcccacagggaaccattttccatgtaatcatagaagagtaggtttccatgaggagagagcgagaagccatgaaggctcacaagattcctgtgccggatgctaccaactgtctctagttctgtctcaaactcacgggcaccgtggttatactgactgtagagccgcttgacagcaacggccttgccactcttgagtacacatttatacacagtacttgaagcgccatagccaatgatgtatttctcactcaaattctctgtaagcctcataatatcttcgtaggtatggatagccatgtccatttggaggagaactatctttggaggtccttgcactggtttctcagaagcttcgacaagtggctgtgatcccgg

SEQ ID NO: 3101 - DNA, 594 bp, Avena sativa
  modified_base (22)..(22): a, c, t, g, unknown or other
  modified_base (102)..(102): a, c, t, g, unknown or other
ttcaacatcattgtcagttacngttttctcatcagcatgctgatcagtaccagcttcagaagcacttgctttcttgctttctttttcttctgtttggcttcngaaatgtcagctgaggactcttgtgtgatgcccttttcttcatcatttaccttctcattgtccacagcactcatcttgtccttggccttcttctttttcttcgaaaccatgccattttcagcatttgcctcccctgatggctcagtaatgtcgccacttttccttttcctgtcctcattactctttgtttctttcttagaactaccctttgaactctttgattcagatacaggaaatccatcttcatcttcactttccaacgattcagcagttggagttccaacagcaagctgaagtccagaactgtccccatcttcactggattgtctcttgcctttatgtccttcaccaccagcaggtttgtcatcctcttgatctcctcatgacaacagaactcttgcctctaggctggttgtcgtacatcaatcttcatcatcatctgatcatatctgaatcaaatctgaatcatcttcgctgtctgtgctcatctgc

SEQ ID NO: 3102 - DNA, 830 bp, Avena sativa
ctgttgctcaaaccagaactacggagtacaatgctacggattccacagactgtacatgtaaagttgtaaacaatagatttacttctcatgatcttcattcgagctgtcaatcttgatgacaaggggttggtgcagatccgagggagaggccaccacaggaagctgcgaagttcctatatcagcctctccattctcagccagcgccttgtccagagaagatttcgcaactcttgtgacgcatataatcaagagaatggacatcacaaagccagaaactatgagaacccatctggtagttgagatctcactccacccatgagtcacatcggatagatcttttagtgttgttcccacatataccaaagcaagagtgattggcatcattcccagccaagaagccagcatgtattctaaaatgccaacaggagtgacagacaacaggtagttcaacatgttaaacggaagtagaggtacaagccttagtagcaacacgatcttgaaaccagacctttggatggcaatagctactgcttggaacttggggtaatctttgcacttagagagaacataaggtcttccgatcgttctaccaagcaaaaatgcagcagttgcaccaagtgtagctccaatggaatcagcaacaaacccaacaggcaggccaaatagatagccacctccaagtgtaagtattgaggctggaacagctaagactgtcaaaggaatgtaagcaagggccaataccacaggaccccatgcccccaagttctccttgatccaaacaaggaagtccttcaaaatcttctcaacgggagcgtgaagagcgcgacgcc

SEQ ID NO: 3103 - DNA, 1051 bp, Avena sativa
agatgtcatgctatatcgtatagctcttgcagtattcaggtcatgctgatttcaagcagctgagaggcaaagacttgaggagccagcttctgatgtcggttggaaaatctgtgtgctttgattaacaacaacctgcggtgctacgaactttcatcagagctaagtagcagcacactggaagcactttcggagaactatgctgaacaggttaattttgaagacacttgcaaaggatttcttgaggttgccaaggaagcggtccttcagactgttggtgttattttcgaagacccaggtgtgcaggatttgcttgcaaaggtttaccaaaaagactggatggatggaatggtgaccgaatatctggttgcaacatttgctgattattttggcgacgtgaaactatatgttgaagaaagatcatttcgaagatttgtggagtcttgcctagaggaaacaatagttgtatatgttgatcatcttctcagtcagaaaaactacataaaagaagaaatggttgagaggatgaggctagatgaagaagtgcttatggatttcttcagagaatacactaatgtgacaaaagttgagaacagagtacgggttctggctgatctaagggaacttgcttcagctgaaagtctggatagtttcactctcatttatacaaatattctggaacaccaaccggattgcccgtctgaggttgttgagaagcttgttgcattgcgggaaggaattccacgcaaagaagccaaggaggtcgtacaagaatgcaaggagatatacgagaactctctcatagatggcaatcctccaaagtctggattcgtgtttggcaaattgaagtgcctaacagtacggaaaggtatatgggggaagcttggacagtgacaacgcgctactgaacatagtaaagtcacgtaccaagacagatttgtttcttgtttgctaattcttttgttcgtcttttgagcctgtcgtcggtgtcacacttacccgtgtgtgtgagccttagcatgagaagagttagaatgtattgtttctatttggt

SEQ ID NO: 3104 - DNA, 797 bp, Avena sativa
catacagtggagtgatgctgtggttctaaaccaagacactatgcaaacaagtttagatgaatgtagcagtctatgctgggagggtactgatgagcggatcgaccttgttgccctttctgctaaagaaccaattcttttctacgatgaggttaccttgtatgaagatgagttagctgatagtggtatttcattccttacagcacgagtgcgggttatgccaactggttggtttctgctcttgcgattttggcttagggttgatggtgcgcttatgagattgagggatacccgtttgcattgctcttttggaagcaaggagggcgcaaaacctgtggtactgcgtgaactctgctggagggaagcaacatttgctgccatgtctgcggaaggatatccttcggactctgcggcatatgcagacccgaatctggttgctcgtaagcttccggtggtgatgcagaagacccaaaagctgaagataaccagttaacctgctaagacacttttaccctgtggttcatccacgactattcgacggtggttatgattctgcttgcatgtgttgtagatgtatggttcctgttgcttttccaggttcttgtgaccggcgagtcatggcaagcgtagcctgggcttatgaactttgacagatagcagcaactcactggcagtttcttcatgcacgattaaataagatactagcagtcttcagttcatttttccatgttcatcattgtactcaacaactgggagcttgtttttgtgattaagagaaaactgggctcgcycatcatgtc

SEQ ID NO: 3105 - DNA, 349 bp, Avena sativa
  modified_base (303)..(303): a, c, t, g, unknown or other
gcgacatgtgtgaagtttggaacagacgcaaagtacgttgccgtaggttccatggaccgtaacctacgcatatttgggctccctggagaagagcaaatggaggaggcaccgcaatcaccggccaagtgagtagacgatgcacattctcaatcttgtctgcaggcccaaccaatttttcattagaagatggaacctcgatcgttgactgcttgtaaggagaagcacgtcgcgaaggtggaagcgtatcccgagccacatgttttttgtaattccaactccagttgatgatgtttgcgcgaaacntgttagatgtacaaagtattttccaggtacttggacatgctgcagt

SEQ ID NO: 3106 - DNA, 737 bp, Avena sativa
gctgatgaccttcctaggatgcatgccaaggattcaacaagcaagacaagtcgtagagaggctgatcaaatgcatgatagagaaagggaagaggaaaagcggctaagaactgaagcaaaaagaaagcatcggaaataggttcttgcaagaattttgattgccacataagaagatttcacttgtgggcgcccatgacgagctgtgaacaatagctttttcttgtagcgggaagctctatctgggcatatttgaaccattgagtgtgtatgtctcactccatggtttcctagaaaggtttgctggatctgaaaggggcacatgatcaatccttcagctgtacttcatcgatgctacacaacatagctgttcagatgcaaattgttatgaacaatgttgagtgcaaggaacaaacatctgggccatatagtcgtttatacaagttgtcataatattttaacttggaatgcgagaaacaaaaattaatgggccattattaacttgagacgaattcgctctagccaaggatgagcagatgttggttcagccatttttgtaattcattttgtactagctgaaggcggttttgttgtagaaagcatttgagtttcctattttgcactgtctaggaagagtagcagggggagggcagattgagtaggttgtacatgtatagttacagtggtcgggagaacagttgtgttgtagttctcactgagatggtagcacttcatacaaac

SEQ ID NO: 3107 - DNA, 843 bp, Avena sativa
  modified_base (310)..(310): a, c, t, g, unknown or other
atgcctctcaggaagcagattctcaggacactaatgagaatgctcaagaaggtgaaagcaaggtatctgaacatcatgatggacatgtcacggaacatgacaatcactcaccagaaagcaagacatctgttgaagagcatgacattacagctgtagctggagatgatgcaccacctgagacatctgcagtacctacaaaaagagcaggaccctacttctgtcaactctgaaggtttatcaaaggaggaattgggtcgcctggtagcttctcgctggaccggagaaaatgtagatgatgttggcaaaacgntaagaagggccatgatgatgatgagctggatataccagaacctgcagatgcagcacttgaagatgagcatgatataccagaacccgcagaagagaattatgctgggtatcattcagacgttgaggatgataggcacaaatacgacgatgaagagttaactaatgtttcagatgatgaatatgttgataatcacgaagaacctgatgagtcttataaatctgatgatgaccagaaaagtggttaccattcagatttaagtacctcaggacaagcatcatggttagacaagattcagcaaactgtacaaaatgttttacaaaaattcaactttttcaagacccctgttgatttgtcagaggcttctcaagttcggaaggagtatgatgatgccagctcaaagctgtccaacattcagtctaggataacctctctgacagataagctaaagcaagacttcggcaaggagaaggagttctattacttctatgaccagtgctttgagggcgaaggagggagtattatttatctggtag

SEQ ID NO: 3108 - DNA, 935 bp, Avena sativa
ctcgagaacgtatctcggccatgggtgtatatctctggccccacaatcaaccctactggttttctttacagcgatgctgatatacgagagctgctctctgtgtgtgcgagatttggagccagggtggtgatcgacacctcctcttctggtctggagttcaaggatgatggccgcatccagtggaatttggatacttgtatctccaccgtgaagccatcaaagccctcgttctccgttgtcctgctcggagagctgtccttcgagctgaccacggcgggcctcgactttggttttctaattttgagtgactcatccttggttgacacattttacagtttcccaagcttgagtcggccgcatagcacgttgaagtacacattcaggaaactgttgggtcttaagaaccagaaggatcaacatttctctgatctcattgtggagcaaaaggagacactgaagaaccgcgccaaccagctgatcaagacacttgagagctgtggctggaacactcttggctgccacggcggcatctcgatgctggcgaagccgaccgcctacattggcaaaccgctcaaggtggacggctttgagggcgagctcgacggccgcaacatcagagaagccatcctcaagtccaccgggctgtgcataagcagtagcacgtggaccggggtgcatggctactgccggttcagcttcgctctggagagcggcgagttcgaccgggccatggactgcattgcccggttcagggacctggtcctgggagccggcgttcaggtgaatggtaagtaggcagagggcttgggtggggtcaggtgggcgaagaaactgtaaaacctgaagatttaagcactcttatctttctttgcccgtttgaaactttggagaactctgttttggttaaggaataaaagcacgaaatctctgctgta

SEQ ID NO: 3109 - DNA, 699 bp, Avena sativa
aagctcaacagcttcatggattaaattggggtaacgaagcattccatcaggaatgcgtgcagatcttcagatgcttgaaggggaagtactgtatgagaagcttggggctgagacctgggtgcatgctttcagtgtcgccgatctgccattgacgcctgctgagaggttcgccgcgctattccgtgagcggccaaggtgggaatggaaggacctgcagcccttcatcagggacttgcgtgtacctggcacgtcttcagaaggattgctcatcaagtatgcgagaagaacacaaccaagtgctgatgctgatcctattttcacttctagatgatcagcctatccttgtgctacatccatgctttgatgctggtaaactgctggtgttggtgttgctgcattctggacatggttttgatctggatactgccaacaacagaatactgctgccgctgcatttcaggcatgcttcatattggggatggcgcaagaggatttcctctgccatacagggagtctgatcctgattctggtgtgagcatttaagttactgaacttgttttcagttttgattagcgacgcaatacctgatcctgggtgcacatttgtcgtgcattttcaatatattctgaatgttaacatgtaaggttggtccgagccggccatgattctcagcagcaaattattttgtcatggaagtac

SEQ ID NO: 3110 - DNA, 725 bp, Avena sativa
  modified_base (178)..(178): a, c, t, g, unknown or other
accgtaatgcctcaggacgagcctgcgttgaaccaacaagagggccagctcaatgaaaatgttgagacagcagctggcaacctctccagtatgaagatcaaaatcctcagcaagctggcaatgctcctgcaggctcggggttccttgaatccattaggttcactttttgctggggttnttagggggcagtgcttcagatggcatagtttctttcttctccatgtttagagatgtccgtgatcatggtcaggattacgctgacccgcctcgaaatgaaaatgaacaggtgacatagaagcatgaagataaagatgaaggtgtaccgaaagacagtatgccaaccgcagtgggtgattgggtgactgtcctatgttcttaagcagattgtggtacccgagcaccccctttcctggataatgacgaatatacatagcaactcacagacccgtgtcggctggaaatgccatgttatctctgatatgttcatctctttttggttgttcggtaaggttgctgagctgtatctattagtgatatatgtacattcctaccgtctcaattggatgcttgttcaagtcttgtacaaaaatgactgacttggtcgtgagtgttgtgcaaattcattttgtactcctataggtcgaggggcaacatgtactcctataggtcggagtagtattgcagaatgctactaatgaatggtatgacttgttggawgttgcgcg

SEQ ID NO: 3111 - DNA, 719 bp, Avena sativa
agctcatccgtggggccatcgacttcgtcggtataaaccactacacctccgtgtacatcagcgacgggaagagcagcgccgacaccagcctccaggactacaatgccgatatgtcggccaccttaagaatgtcaaggaatgatagcggtactggtcagtttatccctatcaacatgccgagtgatccgcaagggctgcagtgtatgctcgagtacctcacagacacatacccgaccgttcctatctatgtgcaagaaaatggctatgggcagctcttggtggactcggttaatgatcataacagagtggagtacttgagtggctacatcggcagcacactcactgcactcaggaatggagccaacgtgaagggatactttgtttggtctttcatggatgtcttcgagctgctagcgggccattatttgcgatacggactgcactacatcgacttccaggatcccgggctggcaagggagccaaagctctctgccaagtggtactccaagttcttgaggagtgaaattgggataaatatcgagagcgtggttagtcctgacgcaaggtcgcatgatcaacaatgaggctaactagcagtgcatagagatatatattcaggttgaagtggctagaaaaacagcataagatcagagcgttgctaataacttctcttgttcagtttgcaaagagatatttattcgtcttagttgatcatgatt

SEQ ID NO: 3112 - DNA, 692 bp, Avena sativa
ttctgttggactgcacttcttgtcatttgaatcgttgccatttcctcgtcggggtgcaacatctgttctaccttctcaatatcctcattgtaacccttcaggaagaagtcagaacagttcttacgcacaccatggtcaaatggatttctgaaccgaccacctgggcctctgagataactgtacctcagggcatttgccatctcatttgtagttatgtttccagatatctgtgacgcttgaactaatgttagagttataacgccaaagaaaaggaagagatccattacaagaaaagacaccacccaaggatggtttgtagctgaatagtcaagccatccaccaaatgatgctggggaggctggatctcctacgattcttatgatggccgtaacaccagtaatgatcatcgcagaaacttctaggataagaaacataaagaactcccatttgttcttctttccaatgcaatttgatacccaaggacagtgatgatcgaattgctcaacacatcgatcacatgtagagcagtgttttgagcgtatgggcctaacaattttgcaagtaatacatagttgagaccaattgccagcaagaagttctgggttgtctagacccctcttcaacaaaggttcatcatctctttgactttgcgtgtctcttacattcttgttgatgtaaccaggatccttcct

SEQ ID NO: 3113 - DNA, 780 bp, Avena sativa
cccgggatctctgctgcagctcggattccatccaccctcgagcaatggcgtcggtgcagctctgcggtgccgcggcggcctccgtccaggccatccgcgtccccacgtcggcggccatcgggattcgcccggcgcgaagggcgtcccacgggctcgtcgtcagagccgccactgtcgttgcccccaagtacacgacggtcaagcccttggccgacagagtgcttctgaagaccaagtctgccgagctgaagacaactggtggaatcttgctgccttcgactgcccagtctaaaccgcagagtggtgaggtagtcgctattggagagggaagaatcattggggatagcaaagtggaagtcagcatccagattggagctcaggttgtatattcgaagtatgctggaacagaggtggagttgaatgactccaaccatctaattctaaaagaggatgatatcataggtattctggagacagatgatgcgaaagacatgaagcctcttagtgaccgtgtacttatcaaggtagctgtagctgaagataaaactgctggtggtctgctgcttaccgatagtgttaaggagaagccatctattggaacggtcgttgccgttggtccaggccatctggacgagcaaggcaagaggatccctttgccggtctctgcaggcagctccgttctgtactccaagtacgccggcgccgagttcaagggtgccgatggcacaaactacatcgtgttgagggtatccgacctgatggcggtcctctcctgagccg

SEQ ID NO: 3114 - DNA, 1027 bp, Avena sativa
cgggatgggaaggctgtcgttgtcggaggtggctacatagggcttgagctcagcgctgcactgaagatcaacaatttcgatgtcactatgatatacccagagccgtggtgcatgcctcgtctctttactgccggcattgctcatttctacgagggctactacgctagcaaaggaatcaacattgtgaagggtacctatgcaagtggttttgatgctgatgccaatggagatgtttctaaagtcaagctgaaggatggaagagtactcgatgctgacatcgtcatcgtcggagtcggtggcaggccaatgacaggcctcttcaaaggccaagttgaggaggagaaaggtggactcaagactgacacgttcttcgaaacgagcgtcgccggagtgtacgccattggtgatgtggccagcttccccatgaagctctacaacgagccgaggagagtggagcacgtcgaccatgcccggaaatcagccgagcaggccgttaaggcgatcaagggcaaggagtccggcgagacggtggcggagtacgattacctgccctacttctactccagatcgttcgacatcgcgtggcagttctacggcgacaacgtcggcgagtcggtcctgttcggggacaacgacccggcggcggccaaggccaagttcggcacgtactgggtcaaggacggcaaggtcctcggcgtgttcctcgagggcgggtcggccgacgagtaccaggccatcgccaaggtcgccagggcacagccgccggtggccgacctggaggcgctcggcaaagaagggctcgacttcgcagccaagatatgaagatttgtacattttgtgtttgtgtctacgtttcctagttcttcgctcagcagtgagattttattttttggaacttgatgttgtgagtaatgacaccacttaggcttgattcgaataatgtttttagcatcgattttattagtctccttatcgcatccatgtacaaccgcttctacatacgaaggcgcacgcaatcaaaatacca

SEQ ID NO: 3115 - DNA, 663 bp, Avena sativa
cagaaagcttaggtactccagttgtaagatcaccaaggctgggattggagggcctctggttgacttcagtggcagacttcttggcatgaatttctatgataagaaaataggaacccctttcatatttagggactgtattattcgagttcttgaacattttgaggggaaaaggaccgctgatgaatctggcaatggtggtacaccaatcagttggcctctacccaaaccatgctggcgccatccagtcgacgaggtcgaagattcgctcccacccggcgatggggaaaagtcgggcccgtttggattcacatatttggatggagagagagtcaactacaattagatgtcatcccgctcttgttctgctctgtttgatttgcgtcaatctggtggacatgtttgtttcagcagttatgagttgtgtatcttctagtagccatattcctgtattttggtgttcacgtatgggagtgcggagtgcctatacctcattcatagttgtttgctagtttctgcgctagctggacattttccctgtgtttggaaaacatttgtatgtgcaaacagacggagtgaactatatgcatgtagtaattatttatctgcacgatgttgtcaaagttgaaatttctattgatcccatttcggtggtatttatagtag

SEQ ID NO: 3116 - DNA, 859 bp, Avena sativa
cactcagctgttctctttcatcaatatacaacttttaacagtcttcttactagtctagatcgcgattaataacttttttttttgttagaaagtgactgacaatatatagctccagtacacacataggttcatacaaacacaagcattacttagcagtacacaaataggttcagacaaacaccagcattacttagcagtacataaatatgttcagacaaacagcagcattacttagaagtacacaaacaggttcagataaacactagcattactcagcagtacacgcataggttcgtgcaaacaccagcattacttagcagttcgcactataggtacccatattaacggtcaacagttcaaagcaggaaactaagctatgtgtcaatcaacggttctccaggtgatcttcactctaaccgtggtggattcatcgggattcacaactttatccaccattccatgatagcaggaatcgaagctgtcctcccacacacaagacggcagcttctgagaaactcctccgtcacctttcagggtcccttccatacgaagatcaaggtaactgtgtatctcaactgctacaactgaactcattctgcagccagcttccgcaattccttggtacagacgaatcacatcactgaaaccactggtcttggcatagagattcagattaaggccacaagcaggagcgcggaggatctcaatatcaacaaatgcttgtaccgcgttaatcagcaccaggaacttcacatccagtccacacttttccccataaatacgtcgattcgcaatgaacgattttgatttcaacatgttgctgaattcagcacatccttcaatcagaaggtcgtctttg

SEQ ID NO: 3117 - DNA, 871 bp, Avena sativa
gaagcagacggcggacaacaacccgcggctccagcgcgcgtacgtggcgcttcaggcgctgaagaaggccataaccgacgaccccaatggcctgaccaagagctggtgcggccccgacgtgtgcgcctacttcggcgtgttctgcgcgccgtccctggacgatccctgtgcgcgcacggtcgccggcctggacctcaaccacggcgacctcgccggcacgctcccgttcgagctcggcatgctcacagacatcgccgtcctccacctcaactccaaccgcttcgccgacgggctcccggaatccctccccaagatgcaactcctctacgagctcgacgtcagcaacaaccgcctctccggcggcttcccgcagcacatcctctgcctccccaacgtcaagtacgtggacatcaggttcaacaacctgtgcggccccgtgcccccggccatcttcgacaagaagatcgacgcgctcttcatcaacgacaaccacttcgacttcgagctgcccgacaacttcggcaactccaccgcctccgtcatcgtgctcgccaacatccgcctccgcggctgcatccccccgagcatcgggcgcatgggcggcaccctgaacgagctcgtcctgctcaactccggcatccggtcctgcattccgccggagatcggggcgctccgcgagctcaccgtgctggacgtcagcttcaaccagctgcagggcccgctgccggagtccatggccgggttgcgctctcttgagcagctcgacgtggcgcacaacgagctgtccgggcacatccccgggagggcatctgcgcgctcgccgcggctcgccaacttcacgtactcgttcaactacttctgcggcgagccg

SEQ ID NO: 3118 - DNA, 554 bp, Avena sativa
cgctcttacatacagagtctgtacggtctgggcgcacggaggatgctggtggccgggctgccgccggtggggtgcctcccgctgcagctgacgctcgcggagctgcggcagccgccgaggccggacggctgcatcgcggaccagaacgcggcggcgcagagctacaacgccaagctccagcggatgctcgccgagttccagtccgcttcgcccgggtccagacccgtctacgccgacatctacacacctctcctcgacatggtcgaccaccccgacaagtacgggttcgtggaggccagcaggggatgctgcggcactggcctgctggagatgggggcccctgtgctccgacatggtcccgacctgcgcgacgccgtcccagttcatgttctgggactctgtccatcccacgcaggccacctacagggctatcgccgagtacttcctcaagagcgacatcatccggttcattgattaagtgcggctcagttcagagatactagtctcctagagtccgtgacaaggcttagatttgcggcagacagagttcgttg

SEQ ID NO: 3119 - DNA, 577 bp, Avena sativa
gagcgtggaagcaggattcttactatactggacaaactaaaggaggaaagggaacagagagaaggaattgatgtagaagaagacggagaggcttcagatctagtagaagaagaagatggtgactgggatggagatgagccagatgaagaggacataatttatgtaaaatagcccactacgtcttttagaagcttgatcaccattcgttcaacttccgaactcatcagttctcttagaagttagttccatgacggtgagaaaccactgctcaccttgttggcaacagtctccagagcatctcaacactggaagagctttacggagacatctaggcatgccaaaccctttccttcgaggctggtcaacccgtagagatatcgaaagcagaattcagagtgtgtcttatcatatgatgttcactagatcagtatctgaccatcaatgagagacagtttcactgatgttcatccttctatgtatgctaactagtccttgttatgtgcagctgctgtgtgtattgatcttaccgaacaatggagccacttgcttttcagttttcattttctgcttgggttgg

SEQ ID NO: 3120 - DNA, 830 bp, Avena sativa
gcagcctagaaaaatcttctttcctcaggcttgattcttttaccgtgcaatgcatcatcacagtgctcaaggaggatttgccagcaccaccagcagcaaaggtcccggctaaagatgcgcatgtgtcatcgcctagcttgcaacagcacctagctgaactcctgcgcagtgggctgggagcggatgtcacatttctcgtgtccggcaagtccttcgccgcacacaagcacatcctcgctgcaaggtcccctgtactcatggcagagttctttgggcacatgaaggagacgagctcacaacgtgtggagatcaaggacattgatgcggtggtattcaagccattgctttacttcatttacaccgactccgtggaggaatttgatcagctggaatctggttggcagtatgaggcattggcgattttggctcagcatttacttgcagctgctgacaagtatggattggacaggctcaaggagatctgtgaaggcaagctctctgacggtatcaccgtcgacacggcggcgacaaccctggctttagccgagcagcacaactgcccgcagctcaaggtgaagtgtgtcgagttcatcgttagtactcctgaaattcttaatgctgttttggcaacggatgggtataagcatctggaggcaagctgccctacggtgttgcctgatcttctcaagtctgcgcgtgggagaaagagttgaagtctgggtaaccataattctgaagctctagtgttttcatatattctctattatttgtggtcgccatgcatgtatggtctagaaccttgtgtctgtattcacctaaaatggagaact

SEQ ID NO: 3121 - DNA, 844 bp, Avena sativa
ggaaaaggatagacttgctgttgaaagggctacaagagaagcccacgagagggcatttaataacgctcgtgagaaggcagaaaaaatggcgttggacaggattgcggcagcacgccaaagggcttctgcagaggctcggcaaaaagaagagagagcaaatgccgaagctcgcttaaaagcagaacgggctgcagtcgagcgagcaactgcagaagctcgtgagagggcaattaaaaaggctaaggctgagaaggctgcagcagaggcaagagaacgcagggaacaaatcagatcttcttccaaggatattcgacaggacacacattttcaaagagcaacttctagtggttccgtaagaaacccagattctagtagcaaagtggttgatgccgagtcaggtttaaggcataaagcaagaatagagaggcatcagcgcacaaccgagcgtgtgtcaaaagcacttgctgagaagaacatgcgcgacctgatggttcagagagagcaggcagagaaacaaaggatggctgatttcctggatcccgaggtcaagaggtggtcaaatggaaaggaaggaaatctgcgagccttgttgtccacattacaatacattcttggagcagacagtggttggcagccagtgccactaacagatctcatcacagctgccgcggtgaagaaagcctaccgaaaggcaaccctctgcgtccacccagataaattgcagcaaaggggcgcgacaatcaggcagaaatatgtctgcgagaaagtttttgatcttctcaaggatggttggaacaagttcacctcggaggagcgctaggacagatgggcggaatcgacgacg

SEQ ID NO: 3122 - DNA, 889 bp, Avena sativa
acagcaaagaggacaagcataaaaggaagtcattttgatgggtatcaaccgcaaacatccagactacatggcctttaaaccagaaaagagggtacaggagcctgttgagcagccggatgatgctgtcgctgaaggtagcggctcaaaccaactggaagtggacgaaacttataagccaagttctcatgtcaaccccatattcttggctgttggagctgacacagggaggtactacagtgcatcagaggcgtctgatgtggttttcagttatgtagaaaaggaaaatctggttaagccaacagacagggccaaagtgattttggatgttacattatgtgatgctctgtacaaaggagcagtcaaaaagggttccgcataccctagtgagatccacaagaaggatttgggatcaacatttataaaccgcatgcaaattcaccatagagtggctagaggaaacgaggttgtcgttcgcaagggtgccatacggacagttcagatcatgacagaaagaaggcaggggaacaagaagatgaccagggtctctggattggaatgctttttgctggatgccgactcgttggcttctgaactacagaagaaatttgcatgcagcaccaccacagctgagcttccaggaaaaaagggacaatacgaggtgttggttcaaggcggagtcatcgaaaacctcgcgaagcacctcgttgaccattacggtgttccaaagagatatattgaggtttatgacaaaacaaagaagtaggaggggagccgactaccgggagcgccgaccttgttgatatctggttcacggttgctgcccttgtgattgtttcatgaggctgcatgtttccagatgtagatgaaggcagggtctgaaaattgtcag

SEQ ID NO: 3123 - DNA, 766 bp, Avena sativa
agatggcagcagctgggagactacaagccacgaagatctgcagggctcaagcttttctcagaacggaaacagaagtgaaccttcagtcaacaagatatgtgacacaatctcctggacgagtggaaacgattcagaggatgggctgaatgagctgagcaatgtatacttggccgacatgaaacagcaacacaagaagaaacagtcagcaatatcaaagctctggaggtccccccctcagaaaaactgtgaaatccatgaggaaaatgccatggaactgataaactcgatgactggcagactatcaaatggcggtacgtattatgctaatgaaggtgcggatcagatagtgggcctgagctccccgggcatggagcgatggagctcgccggactccatgaacagccagctcgaccgtggcttcagaggctgcatggagctggttcagaggcagagcctgaaagcaaagcttctagaggcccggatggagagccagaagatccagcttcgccacgtgctcaaccaaagaacctgaagctgcaaccagggaagagtcggatgcgctcagttacgccatgaaataagtccaaggacacgatttaccctgatattctctcttgtaacgtagtgtacttcattagctagccgtatgtagcctcgtagcctgatctagcaatagtgatgctgtctcatttgtgttcttacatttgacaggctgtagtaatgtttcgtcgttgctgtgtaattgtagcagtaaactgcattgttc

SEQ ID NO: 3124 - DNA, 726 bp, Avena sativa
gggatctccatttaattatttcacctatggagccgcatttgcagaagttgagattgacaccctaactggggatttccacacaaggacagctgatattgtcatggatcttggctattcaattaatccagcaattgatattggccagattgaaggagctttcatccaaggtttgggttgggctgccatggaagagctaaaatggggggatgacagccacaagtggatccgacctggtcaccttttcacttgtggtcctggctcttacaaaataccctctgtaaatgatatacctctcaatttcaaggtttcactgttgaagggcgttccaaatccaagggccatccattcatccaaggctgtaggggagccaccattcttccttgcctccgccgtcttgtttgcgataaaagacgcgatcacctcggcgagggccgaggagggccatctggactggttcccccttgacaacccggcaacgcctgaaagaataagaatggcgtgtgttgactccattacgaagaaatttgcgagtgtatattaccggcccaagcttagtgtatagtggttactgccacggtaggtgatacacagaaagtacaatgtctacgtgttacgtgttgtactgtacagtccagagccgttgtggaaaataaaagtacaggtaaagtataaatttatgaattagaaatacgaatatcacatacttttgttacctggaacaaaaaa

SEQ ID NO: 3125 - DNA, 893 bp, Avena sativa
gcgcgcagacgctgctcccgctcaccgtcaagcagattatagacgcgtcgcagaccaacgacgacaagtccagcttcgccgtcaacggcacggaggtgtccacggtcaggcttgtaggacgcatgatgaataagaatgagcgggtaacaaatgtatcgtttattcttgatgatggtacaggcaggatagaggtgaatcgctgggaaaatgagacgtctgacacagaagaaatgaatttagtcaaggatggtgactatgttattgtcaatggtggcctgaaaggcttccaagggaagcgtcatattgctgcttattctgtgcggcttgtaaccaattacaatgacataacacatcactttctgtactgcatttatgtgcatctggatcttgccaagtctaagaggtcttcgtcgcagccccaagtaaatgctagtgcatcaacatggaaccaaggtccacccactaataatcaggccccgacattttctgcatctggaaatactgctgggaaagagttaaatgatttggtcatgagtgtgttccatgacccagtacttggaaacctggagcatggagtaagtgtcgatcaggtcgctagccgtcttaaactaccagatggagtggccagatcgactgttcaacatcttgctgacattggcaacctttatccaactatcgatgacaaccacttcaagtctgcactgaatggttgaacatgtttggatccctgtggtgctattaatatgatataagcactctgcaagacttgtgtttgccatatatgtatgtgacctgcaactaagatctttaggttatgtttggttgtggagccaactggatgtaatgtcatggttccattccattggaatatgtcggttccattctcagtgttt

SEQ ID NO: 3126 - DNA, 664 bp, Avena sativa
  modified_base (614)..(614): a, c, t, g, unknown or other
accagtttaagtgggtcgaccaataaaactaatgccaacggtcttgtggaccggtcagacggcaactcaggggtagaatcctcgggcaatgataatcctggctgcaccaactctagcagtgctgtgccgcctaccaacattagcgagttcgtcaactctacagccgatgctgcagatggtaaccatgtcgataaaaacgacacaagaaaggattcagagaaaccggcagatgttaatgcagttgaaaacggtggtggaatgcattcagaagaaccagtgaaggttgcccctaaacctcttcggcgaggccggaaaagggcggttaggagggattagctagagcagaagcacctgccgcatgccatattgcccagtactaatattaacggcccaaaaaagggcggtatgatacctaggttaactagagctagtgcccattgatgtatctggcggatagcgcgtcatgcacccacgcattgtatcaatgttgtatcattattgtaggcttcacagcggctgaccacgtatcacggtctagatggtgtgattactaggatcagtcagtagctgagttctctttctgtttcgtctaggtgtgatttgtattatgggtnttgtgagtacagaggaacagctgtttgattattacttgtattgtattatg

SEQ ID NO: 3127 - DNA, 729 bp, Avena sativa
atcactttatggtaccgaccgccggaattgcttctaggtgctacaaattatgctgaagctgtggatatttggtctgttggttgcatattcgtcagaatttttgctgaggaagccactatttccaggcagaactgagcaagagcagctctcaaaaatattcgaactctgtggatatccaaatgaagacaactggccaggcgcatccaagctaccattgtacaaaacaatccatcctgcaactccgaccaaaagacgtgtgcgagatatacttaagaactttgactgccatgccgtggaattgattgatcgcatgttgatccttaacccgtctcagagaatttctgcgcatgatgctcttagtgcgacgtacttcatccactatggcgaagaaacttagagcttctgttgtctatgatggattaagctccttgacttaggtgtaagtactgaagtcttgtttcttgtgctgatcttggattagggctagcgatgaattgatttgtctggggtctttttagcttaaaatatatatggatgtggtgtatacattataattgcgaccagactttatttaactattaattctttagaagtaattcttcatctagtttgatatggtaaacaacatttatggagactatattaagtgctattgactataaatcttgctcttaggagctccggtgctgatgatatgctactaccaggaatctaatataaagttagtac

SEQ ID NO: 3128 - DNA, 938 bp, Avena sativa
agcacaactgtgacctctccgctactgacggcaatggggagcctcagagcctaccggcagaagacaccactggggagcctcagagcctaccagcaaaagacaatgatgcaaaagagttctctgttgacgacatgtgcagcgtattcagcgggatgaacctcaaaggagatgtgtacgtcgaccctacggagtctgatattagcccgaggaagagattgatcattgccgggaggaggagaacacctgaagaagaggaacacatgcgtggtttcaatccgagggcaccaaatttccttccgttggaactggacccggactcggagaaggttgatctgaagcatcagactgccgaagaccgtaagaacgccgaagagtggatgatcgattacgcgctccggagggcagtgaataatttgggtggtcgaaagaagaaagtggagcttctggttcaggcctttgagaccgtcctgccacacgacgaagacgagaagaagaacatctcgcccacgaggcctgtccaggcttgcaactgataatagttctagtagagatgagctaacgaggttggactaatcgtgatattgacgactcgtgagctgctaactcggtggtcgctgcaatattagtgccagagacctgctccagtttggacgagaatataactacttactagtcaccatggatcgctcgctagagatctctggttaaggtggagctcagtagttccttctccacatggagaggttaaactagtaccgataccgactgatgaagagtttcctatctggttgttgagctgcaaaggagccgttcagcaaccgagccgtgtatatatgtctcctagtcgtaatgctttgtgccgatgtttgtgatttgtgcaaaatttctggctggggcgcatgaggtgctgcacctgcatggcgcattgccagaaacca

SEQ ID NO: 3129 - DNA, 807 bp, Avena sativa
cggctcctccctgttatcatcttccttcaggatctcttgcagccgcggtgcctgcatcgtccactcctcggaagccagaacgtgaatatgaagatttttcagctgggtggcgaacaagatcggcgggaagcaagaggcgagccggatcgcgtccagttcatccggtccttctcgtgctaatgtgtcggaatgtcgaaacgacgagttcagtgattggccacaatcattgcttgctattgggacatttggaaataagcagatagaggaggaagcacaagtgcagaacccttttgaggatgggcagtccaagcaagacgccgtcaagtttacagaggaggaagtagacaagatacagaaagaatttgaaatgatactagcaagcaaagaccaaacggaaacttacgactcccatgatgagaatgacaatgagaagcagatggaccggttgatgaaaaagaaaataatcagaagtaaatcaaacgattcactggcaaagaaaagaaaaacactgaagccaaggtcggtagcttcactcctcaaactgctcatgcgtaagggtggctttgcgactgcggttccggatccaaggaacgctttcccccaatcaagaatggagaagctcctcaaggcaatactgcatacgaaaatacacccacaaaatccttcgccgctaccacctaagaggcatttggactggaggccagatgagaaagaaatcaacgaatgcctcgaagatgcactcagtgatctagaggatgatggggaaaaatgggtcaaaactgattcagactttatcgtgcttgaaat

SEQ ID NO: 3130 - DNA, 902 bp, Avena sativa
ccgggatcgcctcgcctcgccagcatgggttccgacttcaaggccatccctctgatcgacatcggcccgctcgtcgagaagatcgatgaccccggcatggccggcgacgagggtctgctgggcgtcatccggatgctggacgacgcttgtaaggatgccgggttcttctacgtgaaaggccatggggattccccgagtcgctactgacggaagtcagggacgtcacgcgcaagttcttccatcttcctcacgaggaaaaactgagatcaagatgacgcctcagagtggctacagagggtatcagagagttggggagaatgttaccaagggtaaacctgatatgcacgaagcgattgattgctacacgcctatcgaaccggggaaatatggagctcttgctaaaccaatggaaggatctaacttgtggccggatcacccaccaaattttgacgcgctcctggagaactatataagtcttctacgagatctttcaagaaagatcatgcgaggtatagccttggcattgggtgcgccgttggatgctttcgaagggggaacggcaggagatcctttctgggttctcaggctgattgggtatccagtctcagctgacatcccgcaagaacaacgcactgatactggatgtggagctcacacagattatggccttctgacactagttaaccaggatgatgacgtatgtgctcttgaggtcagaaacctgtctggcgagtggatatacgccaaacctgtccctggaacctttgtttgcaacattggtgacatgctgaaggtttggtcgaacgggatataccagcccacgctccaccgagtcgtcaacaactccctcgctaccgtgtatctgtcgccttcttctacgagtcgaacttcgatgctgccgt

SEQ ID NO: 3131 - DNA, 807 bp, Avena sativa
cctcgctgcttgcctttttctttccgccgcggcaaccgtgagacgacccacccgcccgccccgccccgcccgatcgagccataattccatccattcattgctgctccctcgcgcgcctgcgcgtatataagcgcggccactagggcgctcgtggaggtgttgttggtcaccatctctcggctactagctaggcgcgcgcgcgagatcagatcggcggccaccatgttcagcgggacgcagcagaagtgcaaggtctgcaccaagacggtgtaccccatggaccagctctccaccgacggcgccgtcttccaccgggcatgcttcaagtgccaccactgcaagtccaccctctcgtttagcagctactcctcctttgaaggggtgccctactgcaagccccatttcgcgcagctcttcaaggagacagggagctacaacaagagcttccaatcacaatcacccgcaaaatctaccacggagaagttgactcctgagctgactagatcgccaagcaaagccgcgggtatgttttcggggacacaggacaaatgtgccacttgtggtaaaactgcataccctcttgagaaggtgacagttgaagagaagtcctaccacaagtcctgcttcaaatgctctcatggaggctgcgccctttctccatccaattacgcagctttggagggcattctctactgcaagcaccatttctcccagcttttcaaggagaagggcagctacaaccatctgatcaagtgtgcgtcggtcaagcgggcagaggcacaaacagcactggacgcacaagcagcg

SEQ ID NO: 3132 - DNA, 855 bp, Avena sativa
atcaaagctgcatcggacaacaggatacaacatctacattggacacgcacattggatattcatttcgttttcttatcgtctttattatccttctcgaccactactggagctgcaggtatgctgaaccaccactctctcaaccttctggtgcacctctctgtgcttgctctccttagaggggagttattggtgaacacctccagaaacatggccaggacaagcaatcttgtgggcaggaaggcaaggcttagagccatcatcaccagagcaaggatagctttatcggtagcctgagatggaaaagccagcagtaaagctcttatcttcagaagaacaatatttgcatcctggacaagctgttcaactttggaaatggcattttgaacagctaagagctgctccattgtgttcattgaaggtggagatgacaccttgacctcgatcattggctttccttgactggttaatcttgtcaggagcatgaacgctgctgataacagtaggaccataacaacaaaatagactatccatcccctgatgataataaaagaagatagcaagcaaaagaccaatgacttcagaggctcatcccataatgccagcgataccaaaaacctccaaatctcacttaccggagataacaattcctgatgaatacaattaataattaattccaaaattgcctatagaaaactgatatttgacagacatggttagtgccatagtattgaaaacataaaccatctagcagtgcaaacatctccgacagaatatagattcggtgggcatataagaacagtggaaaacaaggatatcgacgaaagtccaaaatacctaattgattcagcagacata

SEQ ID NO: 3133 - DNA, 503 bp, Avena sativa
agcgtttcctaagatgcatgtcaaagaaagcattgttttgttaatgcatttctaaattctaagtgtagtgtatttacagctttgacaagagaagtgtggttttgataagtttattgtccttattacaaatcatttttaggacataccgaacattgttcattagtagagtaatattgtttatatacaacagagctcatctattagaaattaactactccgtatgaaaatagaaatccacttgcacaactgcaaagggaaaatggaggagctaagaaaacagggtaacgtcctacttccatatgtcgttctgcagcgaggaagatgcataggattgcttcacgtgtacattttttgatcgaagtaaatccgaggcgttgatgccaaattacagattgtggcttctacaatgagctattgtctgacaagaaagtcacttttgtcaagtgaagggagagaagcttattttttcttgcaagcagaagagctgcaacttcagcctaaag

SEQ ID NO: 3134 - DNA, 801 bp, Avena sativa
gcgattgagattgttgctgagatggctgcgatcggatttggcctgtcaaaggatgcatttacctctttgatgaaggaggggccgcacctcctagcaccaactggaagtgatctggagcgccatggttctgagggcactgtttttgctgggttccattatgatcttaatttcttgaccatacatggccgaagtaggtttccaggcctaaacatttggttaagaaatggtaaaaagatggatgtgaaggtccctgttggctgtcttctaattcagtcagggaaacagttggaatggcttactggtggtgagtgtttagctggaatgcacgaggtagtggtgaccaagagaacattagaggctatagcattagctaaagagcaaaatagaagcctgtggagggtctcgtcaacactattctcgcacattgcttccgatgcgacgcttaaaccactgggccactttgctgaagcaaccaatgctcctaattacccaccaatatctgcaggggagtatgtcgagcaagagctctcggcaattaatctgaaagggaaggttgcactctaggtgtgtaggctcctgattgatccaatgactcatacatggtcagaacgcgaaatgcgatactagaactgaggttgcctcggatgattccctatgcaacccttccatgtcatgttaagtatgtccatttaatcctcttgttaagatatagtgaatgactaaatgttcgggtgtactaaactgatgctacttgtgaaaatcaaataaatattgttaactgtgaaaaaaaaaaaaaaaaaa

SEQ ID NO: 3135 - DNA, 778 bp, Avena sativa
caactacctggaaggtatcttggctctaaatcatcgcgtggacggaggaattccccaagaatgtcacctgttaggagagaccgttacagctcacgctactcgcctgactgggagggttcttattctccctataacagagggcgatcgcgctctcgacatgacaggaggcgatcatactctccctctgacaggtcatactctccttgcgacaggcgcagatcctactcaccttacgacaggcgcagatcatactctccctacgacaggcgtaggtcatactactcacctcgccatggtcatcgctaccgctcgagatctccatgcagttacagaagggggtggtcacattcctatgaccgtcctgtttcaccatactacagcaggcactattctccacggaacagaagacgcagctattctcgcagtgtgtcaccgtgcaggagctactcacgcagctgctcgccagtatcagaagaatcaaggagctgttctccgaggaaaggatacggcgaagaaaacaaaccatcgcgcagcaggtcctctggcaagaggcgctctagggaaagctatgctcacagccgcagctcgtactccaggtctatctctagtgagcgctccaacagctcagctagcgcctgatgggtttaggcagcgccgccaccgtattttgttgcgaccctttggatttacaatgccatgtacaccagtatgtatgttatgtttatgtacgccatggacaactatattttgtcttaattctggacccacaagccatgca

SEQ ID NO: 3136 - DNA, 500 bp, Avena sativa
ttcgactaagaatgcgaatttgaggtatctaagtagtaaatattgctgttcttgtgattttccaatgatatgtcaagatattaatctgtagcctttcatgaattcaatgcatgattgtgataagaattatatgtacttaattgtttttgtgcctctttcttgatcagtatcagtagtggtagctcttagtcatgtaatgtcatgaaatgttaatatgcggtgaatcttgtgctttaggccgaagtttgaagaagcctgaagccccatgtgactcttgccatctcaaccttaagcttcagttcacatcactgcatacttctgtttctacgtccaactgtattcttgatgctgcatgatactgcattcttgggtcattggagctgaatctttcttgctatgttgtcttgtaggtgatgactaaaccgagctattaaatcgtgtcaatcagtggagaagattcatgtggttgtcgcaaaggggagaagtatagctaggactag

SEQ ID NO: 3137 - DNA, 730 bp, Avena sativa
aggatgatgaatcaatgactatgactgatgaaatgacaaggagaaactggaaattgcagaagtgaacacagagatactgaaagaaaattctgagatgattaatgagtacttctctattcacattgaccaaagcggcaacctgaccagacttcctgttgtacttgaccagtacacgcctgatatggaccgccttccagaattcgtgctgactctggcaaatgatgttacctgggatgttgagagagattgcttcagaacggcagcagctgctattgggaacttctatgcacttcatcctcccatccttccaaatccatctggcgatggcattcagttatacaagaaaagtaaagattgcatggcaagtggtgaatgtgatgacgatttaacaaacacagatgaagatgaaattgatcaagaactgcttgcggaagcagaagcagcatgggctcagcgcgagtggaccatccagcacgtcttgtttccgtccatgcgacttttcctcaagcccccaaagtccatggcaacagatgggacgtttgtgcaggttgcttctctggagaaactctacaagattttcgaaaggtgctagctcgacacaaatcatcacgagatagaaggaagtaaccgtagcgtgacgttggtccgtgtgttttgggtagcattgctaatatttgaagagcgagcgaaatttgactccacttctgaactgaaatgtgcgtagctttct

SEQ ID NO: 3138 - DNA, 711 bp, Avena sativa
ttcttggttacttcagtcattccaggaaattttggtccaaccgaagaaatacaatcagacagaggcacattgttagtagttaactagagactcgggactattcacatccggaagtaacaataaccagtctcggtgcgttagttcatataagtagattgtgcgttttcaacacgaaaaagaagacctctatgcaaaattctcgttcaagattggatgtgcaatggtcgaggcagcacttctctgtttttccacggtaagaaatgaaagaagcctctgtcttcatttcatatgctgcgctctccagtcaacagcaaaatccgtgttgccgtcttcatcatcgcttgatgagtcgctggcgctagactctgtgtccatgccaacaggtttgctatttgctttagcattccgtgtggcttttgactcggtgagctgtttcttcagcatatctactcgctgcctgtactcctcttgctctaaagtcaagtactcttccctctcagcggcagcatcaatctcctcttcttcaaggcggtcatcaacttcctggaggttctcctgaatttccttttcaaattctttgtacgcatcattgatgtcaacttttggtggttcaataccacgtgcacggagatccgcatctttgttatcaaagaatccttctggcagggcaccttttacttgagcagtttccacattattttgctgcttgag

SEQ ID NO: 3139 - DNA, 796 bp, Avena sativa
cgcgcctcgccgcgctgctgcagagcatcccgcagcgcaagatcctgttcacgaactcggaccgcgcgcacatgaagcgggcgctggagcggctgggcgtcgacgaggcctgcttcgacgacgtcgtctgcttcgagaccatgaacccacacctcttcggggatgcctccaacgccaccgaccgcacggtggtggtcttgaaaccgtccgtcgacgccatcgtcgccggcctgcgtgccgccggcacgaacccacgccgaacgctcttcctggacgacaacgagaggaacatcgcggcggggaaagccctcggcctccgcacagccctggttggcaagagggtgaggagcaaggatgcggactacgccctcgagagcatcggcagcctgcggcgagccatcccggagatctggggcggcgtcgacggcgagctgcagcccgaccacaacgtggagaagaacaagagcatgagggccgagctggacgccgtcatccagcccacgtcgatccaggcctaatcatcaatcgcgtcctaatctccaacagtggagtcacagtcaccaacctgtccatatataatgcatcactaataatggtccatctcccatcttgtaatgtgcaatcatgtaaattatgttctgattcctgatgccgcgtgtgtcgtctgagtgtgtatatgcttgtacctagctgacagaacagacagttaggcacgactctgatcagcactgtgtgttgtaaagcaaatcaattaatcaagtgcaggacgagtcatgtttcacgtagtaaaaaaaaa

SEQ ID NO: 3140 - DNA, 790 bp, Avena sativa
cttctaaatctctcactcatccccacttcactccactcgccgccgctcactcctcgacccgccgacggcaatggcgtcccttcgcgtctccctcctgctcgtggccgtgctgtgcgcgctcgcggcgtcgtccgcctccgcttcccgcgatctccgcccgcgccgcacccagttcgtcgtgcgcggtagcgtctggtgcgacacctgccgcgccggcttcgagaccccggcctccacctacatcgccggagcaaaggttagagtagagtgcaaatcaaagttgaccggagcccagacatgcaccttcgagggtcagacggaccacactggtacctacaacatccccgtggacgacgagcacgagcatgagctctgcgagtctgtccttgtcagcagcccagacatggggtgtgccaagacagttgctgggcgggagagggcccctgtcttcctgaacaacaacaacggcgtcgcctccaacgtccggttggcgaatgctttgggtttccagaaggacacccctcttgctgcatgcgcgcaggtcctcaagatgtacgaggaagtagacgaccgcgtctgagaactcctgtcgcagaaaaggtaatgtattactaggtgatgtgtgaaattcctctgaaacgtatatgtattacgaggaccaaaagtgtcgctgcttgtgtgcttgacatcatataggtcagcacttgtgtatgtactctgtgggatctgcggttgaactggtggaagtttgtcatatcttgtaaaatcgacatgctagctcaggctagct

SEQ ID NO: 3141 - DNA, 786 bp, Avena sativa
gagatgcttcaaggattggaaagtttgggttgtagcattaaaagtgaggcaacatcatcagcagatcagagctcaaagggactcaagagacacagggattgctttggggttaccgaagaaggaaaactgtctcctaaaaatacaatatgcatcaagatttttgggcaggctgaaagaagggatccacaagttagagaagcatcggtttctcttgcaatggctggtgagtgtcaacgcggaaagttactgtacctcgaaaaccgagttgcattggcaaagatattgtttccaatcgagacaaaagtagcaatgaagattgctcaagtggatggtactttggaatttacccttggttcctgtgcaaatccacctctggggacacaacgggcaaccattgatctaaatataactcctttccaaatgaaggatgaacacttagctcggatcagagtcctctccaaaacagttgaactcggtaggcgcttcttcccgcgctgttcaaatgttctggacaagatcacggatgatgaaaccgaggtttccctccgggatactcccaccgagaagaagaggaagtttcatgatctgcaggacttgcttctgaaggcattcaacgaggacaaggaggattttgacaggtcggccgtttcatcttcctcatcgtcagcagcgtccattggatctaggagtttgacagttcggcctaagagatgagcatcttggcgccatttttgccatattgataactggttttccgtctgaaactgctcgtgagatgcttcttct

SEQ ID NO: 3142 - DNA, 717 bp, Avena sativa
gtacctccgcctgggctacgcgatccggacgctcagggaggagatcccccgacgtcttcaacaaggagcccagctttgatatctacagagatgatattgtcttcagagaccctttcaataaatttcagggcatcgacaattatagaagtttattctggggattgcgctttactggacgtatcttcttcaaagcattatgggttgatatagttagtatatggcagcctgctgatgatcttatcatgattcgctggattgcccacggcgttcctcgagtcccctgggatggccatgcccgctttgacggtgcctctgtgtacaaacttgacaggaatgggaagatctatgagcataaggtacataacatcgctacaaacccaccaacaaaatacaaggccttgtcggttcaagagctaatcagagctgttacctgtccatccactccaaaaccaacttatttcgaggcttcatctcaatcttcgagtgtggccccgttttcctcgagattgtcatggatcagacacaatgttcccttgtgccatacgctttccctagcaaatctgggagaagggtagcgtgggtttagcacttacaaattttgcctttttgttgtattgtagtgtactgtgtcactaattagtactgaatcataactgttgtatatatgtacagtgataaatttatacagaataaagttgctctcggttgagatgtaaa

SEQ ID NO: 3143 - DNA, 914 bp, Avena sativa
caggcagtgagactacttcagtttggttagaggtttctgaagttcaaggggatgatgtggtttgtgtgatcaagaactcagctaccctggctgggtcactcttcacattgcactgctcccagatccatatcgacttacccacactttctgatgaggataaggatgttatgaaaaaatggggtgctccgaacaagattgacttcctctcgctttcttatacaaggcatgcagaagatgtgcggcaagcacgtgagtacctctcaaagttaggcgatcttagccaaactctgatttttgccaaaatcgaaaatgtggagggcttaaaccattttgatgaaatcctggaagaagcagatggtataattctatcaagggggaacctgggaattgatcttccacccgaaaaggtgttcttattccaaaaatctgcgctccacaagtgcaacatggctggaaagcctgctgttgttactcgggttgtggacagtatgactgacaacctcaggcctactcgtgctgaggcaactgatgtggcaaacgcagtactggatggtagtgatgccattctccttggtgctgagactctccgtgggttgtacccagttgagactatttcaacagtaggcagaatttgtgctgaggcagagaaggtcttcaaccaagatttgtacttcaagcggaccgtgaaatacgtgggagaacccatgactcacttggagtccattgcttcctctgcagtgcgggctgctatcaaagtgaaggcttctgtcatcatttgctttacctcatctggaagggctgcaaggctaattgccaagtacaggcccacaatgcctgttctgtccgttgtcattcctcgcctaaaaacgaccaactgaagtggagcttcactggtgcatttgaagcaagacaat

SEQ ID NO: 3144 - DNA, 888 bp, Avena sativa
tgttctggtcctgtggatagacgcaagcgtgtcgtctttgatgcgctcctttggcgtcctgcaagcgaaggcagcaggggtcaggttaggaggagtgatgcgctaagttacatcaaacttcttcgtgccgtttacatacctatccacggggctagtgacatgctcgaaatgcatggggagtctgaccctaccatggtatcctacacggagttccttgaaatgttcaatgatcctgactggggattcggaatcctcagcacattagtgaagcttgaagagagcgatcatgtccgtcacggcagccacacctgctccgtatgccgatatcctatcatcggctcacggttcaaggagacaaagcactcgtttagcttgtgtaaccgatgctacagcgaagggaaggttccgtcagcgttcaagttggacgagtacaggttcatagaatacagcaacgagtctgaggctcttattgacaagtgtatgtgctttaatctaaattctaagacgctggaagcagatgcttgatcgttggaacatttggtcgagttcttgagcacgaacctgtgtatgccctttgtagttgtgaagatgtcctagttagccctcctgccctcttgtaaactaaggagctgtgtttctggagttgtctaaacatgttccaatcctgaacagtgtgtatgggagtaagagcatgttaattccaaatacactcctcttactatctcggttccaacgccaccaaggcttggaagtgtttgtgttctgatctaatctagtcacagtgttttttgtaccgatctgaggaaatcttctgtcctaatctacctgtggttcatatgttgaacaaactgaggcaggctaattccaggttgaataatggatgcgtgc

SEQ ID NO: 3145 - DNA, 477 bp, Avena sativa
cacgcacaagacgcaggcaatcaccagcatcgccgcggcctggcacgccgacgccaccatcaacacccaggacttcgaccaggagaaccccaggacgcccggcaaggcgtacctgcagccgcaggtacccctgagcacctcctccggcgacgacgagtcggatgacgacgagaactccccgagcgaggacgacagcctcgacacctcctccaaattcacgtctttccacgcaacccacatctcctaccagaagaggcaggctctagtgacctacctggagaacaaccgcgcgggcatcaccgtgttcggcttcgtcgtcgaccggacctggctacacgcgctcttcatgatcgagttctcgctagtcatgtggctgctcgggaagaccatcggtatatcttgagtgccagcggctgtctccatggatatatgatccagctcktatccctgttcatcctgctgctatcatgtactgtc

SEQ ID NO: 3146 - DNA, 711 bp, Avena sativa
tgccacgatcacggaggaggacctgatccagccccctcgaggagcgcgcacggtggaggggctgcggctcaacacccgcgtcggcgtgcagtacctggcggcgtggctgggcgggtccggctccgtgccgctgtacaacctcatggaggacgcggccacggccgagatcagccgcgtgcagaactggcagtggctgcgccacggcgcgacgctggacgccggcggcgtggcggtgcgcgccacgccagagctgctcgcgcgagtcatggaggaggagatggcgagggtccgggcggaggtcggcgccgagaggttccggcggggacgctacgctgaagctggcaagatcttcagcaggcagtgcgtcgcgccggagctggacgacttcctcacgctggacgcctacggcctcatcgtggtgcaccatcccagagcgccggcatccaagctctgagaacctggatcgagaacactgcggcatgcatatacgaacctaagttggccttgttgttgcttacacaataatcatctgggaaactgggacagtctgtatctaagttgccttagagtttctctgtcatgtttcttagtactgcttggatcaaagttgccttagagtttctctgtcatgtttcttagtactgcttggatcaaaatccaactagcagtataaataattccgtaccagaagtgaaaaagctgaatgacatg

SEQ ID NO: 3147 - DNA, 401 bp, Avena sativa
cgaggatttgcacagttccaaacataaggatgtacatcagaagacgcagaaactgaatggaagctatcaagactcggtctctcaggagttgaagaagaaaacgtgccaaaaacgccaaaaataccaatgaagatgagattgaggagggagaactgattgaagataactatcaggatactgttccagcaagcaagcttaacaaacgaaggaaagcagttctgcggtcagtgattgaagcaagctcagcaggaatgtcaaaaagttggtagcgacaaaggagctgcaaaggaatgtggcaataaacagatacttgcggcgatggaaaagatgcaaaagaagawgggaggaggttcaaagaacctgttgttgaccaaaggaggaagacattggcaagaccgaac

SEQ ID NO: 3148 - DNA, 869 bp, Avena sativa
gcttccatccatcatctaatactatcctctttctattggagctagctgcttaaaaacaccactctccaccttctctcttctctaaagatccgatggccgttcttgttgctagacagggccgcgagcttcagcggtacagcccgcgcaccggcggtcgcatcgtggtcggctgcatcccgtacctggtgcgcgacgacggcgagcttgaggtactcgtgatcagctcgcagaaggggcacggcatgatgttccccaagggcgggtgggagcttgacgagtccatggacgacgcggcccggcgcgaggccctggaggaggccggcgtccgcggcgagaccgggagcgtgctggggtactggcactacaagagccgccggtacgaccagacctacgaggggtacatgttccctctccacgtcaccgacgagctccagcagtggcccgagatgacgtcccgcaagcgcacctgggcaacggtagagcaggtgatggacggatgccagcacgcgtggatgcgggaggcgctccagcagctcgtcgaccggcacgccaaggtgcagtccgctctgtgacggtgaaccaacaagcaagcaaagcgagcggtgtgtgtgtatcggccgggcttggttcgcgcgagaacggacggcgcgcgcacgtggtcgatcgtcgccagcatctctcccttcattcctcggtgcagcggcaggcctgccggcgtttccggtcgtgtagaagaccggatcggagcatataattggccacccttcgtcggagagctagattgagatccaggacgatgtgcccgcgcaagtgccgacgctggcgactctttctttgtgggtgcggagtcgtcgtcatcgtcgtcgtgg

SEQ ID NO: 3149 - DNA, 508 bp, Avena sativa
gccatcggaaacccatttggccttgaccacactcttacaacaggtgtcattagtggattgcgtagagaaattagttcagctgcaacaggacgtcctatacaggatgtgatacagactgatgctgctatcaaccctggtaacagcgggggtccgcttctcgacagttctggaaatctgataggtgtaaatactgctatatactccccttcaggagcatcgtctggggttggcttttctattccggtggatacggttggtggtatagtggaccagcttatacagtttggaaaagtgacaagaccgattctggggataaaatttgcccctgatcaatccgtggagcagcttggcctaagtggagtgctcgtcttggatgctcctccaacggaccagctggcaaagcgggtctgcaatcaaccaaacgggatgcctacgggcgtctcatcctcggggatataatcacctcagtgaacggtacgaaggtagggaacggaagcgacctgtaccg

SEQ ID NO: 3150 - DNA, 833 bp, Avena sativa
ccgtgctgttcatgaggctaagtggatgaatgagatggagatcagcatctatgattcctggtttgatccagtggtgtcgtcactcccaggtcttatcccagatggatttatttatttaagagccagcccagatacttgccataaaaggatgatgctcaggaaaagatcagaggaaggtggtgttagtcttgactacttgcaaggtctgcatgagaaacatgagagctggctatttccatcggaaggaggaggccgtggtgtcttatcagtcagtcagctacccatgcatatggagggttctttgcctccaggaatacgggatcgtgtcttttacctggaaggagatcacatgcattctagtatccagaaggttcctgctctggtcttggattgcgaacctgacattgacttcaacaaagacatacaggctaaacgacaatatgctcagcaagttgcagagttctttgaattcgtgaatagcaaaaaggaagctccatctgagcaaacaagcagcgagaaggactgtatgaatccacagatcatgttccccaacaaaggcggtttgtgggtccctggaggtgtaccccctttcacaagctctgcaatgaatctggatttcagaagagccatgtcttcatatctcccaacttaagacttcagcttcacgagtaagtgggcctgtttggttgaaagtgattaactttttgcctaacttggcctgtgtcctcgaaaagaagatcacaagtgtggcaagcttagctaaacagaccatgtggctaagaaagtgtggtgaaccatattgtggtagtgaaccaagcacaagacactcagct

SEQ ID NO: 3151 - DNA, 388 bp, Avena sativa
tggctgtcggatttgacccatgagaggtatgaagttagagagaagaagagttccaaaaagagggctagagggactgaaggctctgtgcatggagagcgattcagagtagaggtggaagagggatcaaatttttttcacctctggtggaggcagaaaaccgtacttaggtagcaatggcggttctttaactagacaaacctaagcagctaatttagtggggagatcaatacctgtcccccctctccttgttcaccccctgttgtatgtccatgatccatcctttctcttttttcgtaactcccaagaattgtcatctggaaccctgggcaatgagcaaagcagtaatattagaccattcctgatctagtgagtttgcagttcagatagt

SEQ ID NO: 3152 - DNA, 601 bp, Avena sativa
tgcctccgtctatgctccaatttctttccaccagctcctctgatgtttgaagaacagagatggggagcaacctgccattgctgctgtaggttccctgaaaactgtggatcctgaccaaattattctcaagaaaatcgtcttgactgggtatccccagagagtctcaaaacttaaagcaatagtccgttacatgttccacaatcctgaagacgtcagatggtttaagcctgttgagctgtggtcaaaacatggccgacgtggccggatcaaggagactgtcggcactcatggttcaatgaaatgcatattcaataccagcgttcagcagcatgatacggtatgcatgagcttgttcaaacgagcttttcccaaatggccagaacagctctatcagatctaagacgtgcttctggcgccaagtagattgtatccatattgtagagatggagcagtgacgtacgcatctgatgcaatcggtgtggcgaactagaatgcagcttatataccaagaggggagactgagcatgcttgtttgtgtcgttttggccgtaatttttaccaccattaatacctccatataatgtattgtttgttggaaaaa

SEQ ID NO: 3153 - DNA, 789 bp, Avena sativa
tgaaacgaacaagtaacacttccaagtacagataatataagccgcaaaatattttacatctgtcacttactcaacaacaactatctcaagttatgagataggggcaatactaaacctagatattccaagctaggctaaggaaaaatgggactgttacagtatctcagggcttctaaacccccacacatgtcagtcagtttgcctctgccaggctatccaggaagccctgcagctccctcaagccttctgcagatatacttctctgtacccgaggcctagggactgttaggacaggaggcgccctagagttgaagcacacgacaactacagaaaggttgtcgccgctctttctcttgatggcctcgtcaactaagtctttacagcaagcaacagggtcgttgtgctcttggagcctccggcgtgcaaagtccaccgcgttctggctgcggaatacgtcccagataccgtcacaaccgatgatcatgaactcgtcctcctcggtgagattcctcaccatcacctcaggttcagcactaagaggcccaagaccatcacatgcttttagtccttccatatgccagtccccaattgctctagcgacattgagcagcccattcaggtatccgtcgtcaacataaccacccgaagcttcaatgcgcatcttctctctgttgcaagatggcttgtaggtccctggacatctcaatcgccttcccacggcaacatatcactgctctacaatcaccagcatttgccaccagaaagtagaacctcccagtgatgagtgca

SEQ ID NO: 3154 - DNA, 491 bp, Avena sativa
aggaaatcagcaagctctctaaggtgaaatcacacctttcagaggttaaaggaatcatgatggacaacattgagaagatattggatcgtggcgagaagattgagcttttggtgggcaagactgaaaccttacagtcccaggccgacaacttccataggcatggcagagagctgaggcgcaagatgtggcttcagaacctgaggtttaagctgatggtgggtggtggcgtcgcttttttgatcctcatcctctggctgatggtttgcagggggttcaagtgctagagttcagagtcctcacatgttaaaaaaacaaaggagctcagagccctcattcgaccttttctttcattgtcattcagtgttctgtttctcttgtcatgtgaatatagtgaccctaattctgccatgttcctgatggacttatctggygtggaccctaattccggaggagtatgatcatcgagatctgaaatcttgtgtaagctttgt

SEQ ID NO: 3155 - DNA, 563 bp, Avena sativa
gcgccctccagaatcgctgcctcctcacctggaagtagctttgattcgcctgatctgcaccccttccgtatttcctcatccacggctgatgaaatgcaggtggccatgccacatccagctcacattgagtttacaaggtcgacaagtgatggatatgaagcatcaggaggtgaagacagtgaccgcatcccgtccagaatcgtgcacaggtcatccaactgggctaactcaattctacattctggtcaggcagccccagcgcctgatcagcacttgccgtcatatgaagggtttcttaacaacaccaggtcaagttagttagatatgcgtcgagtccatctaaccaagttagaatggtatgaagaatctgggtggtgttggtccctatagaatggcagcaatgctggcgaaatattggctagtttatggtcgtctaggattaggttttgttagtgatggatgcagttcatctgatgtttaattcatgtgaaatcgttagtgcrttgcttacagtggcattctcttgtcctggaaaacgtgaaagattcgttgcagattgacaa

SEQ ID NO: 3156 - DNA, 645 bp, Avena sativa
caaggacaacaaacactcgcattcatatgactcggttgatacgtcgtcttgttttggttcttctgtgcactatggtggccgagactattatggcagctttacacctaagcagtccccagaatataatgattacaaggcagctaataaggatcctgtcacggattctcacggcgactggtggcaaggatcatttaactactaagcaagcttggtgtcatctcccttgttgaacaaggaaatcggaggggagatgttgaagctatattttccttgatagtatcacttaccttacatagtggagtcacattcgctcattctgtggtggcagtatttggatgcatcatcactcctgggccgatgtagtgtgtgcctttacctttatcttccatagtttgtgtgctttagctttggaatgtattgaagttacaagtacctcaagagttaggtcgcaggttgcataaagagtccctgttccattctgccaaatctaggcagtctggtctccgactccctacatatcaagcctgtctgtcctgtactgtcggatcctctctccagaccagaagcgctggagaagcagtgatcatttacattgtaatcacaagtgtactacctaaaatattatattcttaggaatatcataag

SEQ ID NO: 3157 - DNA, 778 bp, Avena sativa
ctttggggctttctcaaacttttctcctcatccaattcacatgcccgacaaaaaggagattgtttgacatggtcaacagtggagcactattaccaggcacataaatttgctggtgttgacaatcctcaagcaagagacattgtgaaagaaataaagaaggcaaggagtcctgaagaagctgctagaataggaaggacccgacaaagagaattccctgaattggtacggccggattgggagtccatgaagatcgatgtgatgtacagagctctaaaatgcaagttttcgagttatccccacctgactgagatgctgctgtcgacggctggctctgttcttgttgagtcctcgccccatgatttgttctggggcggtgggcgtgagggcgaaggtctgaactacctgggtagactgctgatgcaattgagatcggagattctgggaacggttcgaacgagcgccgaggtagcagattctgcttgactgacgagcttaggcctgcaggttcttgatagagttatattttactccggtggacgacaccaaatttttctgcggcattggtattattaagaattaatatgcacgctcataaatcgattcagttcacactccaaaaacagttcaattctagttcttatcagttcatctctacgatttgtaaggctctacaaagcaaatattgcttaaagtcatccaacacacaaatggttattggatgcatttcaaactatacaattggaatggttcaagttatgtgtattttgcaacaaaaaaa

SEQ ID NO: 3158 - DNA, 544 bp, Avena sativa
atctggagtactggataaacttttggccactcaaaaactggatgagcatgacattgaaggggcaattcatctgtattacgacatcctttctcagccttgtttgatctgcaaaaatataactgatgctgagctattgcacaaatactctgtgttgcattctctttctttggacaagaggtgtaagattgtcagggactttcttatcgctgctactgcaaaggactgtagcctcatgatgtgctttcggccaagagagtgtgaaacaccagattccgagtatgattcagtatttctcaagtcagtgaaccgaacctatgattacaaggcgcattttgttgatcttgatgtgaaacctctggacaagatgccacattatttcaaattggaccagaagatagtcgatttctacactaaaaatggggaggccgggctggttccatgcgattctccaaagggaggtggcaccagctatgacacaaaggttcagccacaacattgaggagctcgtttgtgcctctggagtggaagtgtgctcacgagatcg

SEQ ID NO: 3159 - DNA, 593 bp, Avena sativa
  modified_base (548)..(548): a, c, t, g, unknown or other
atactgcagggtctgtatcgtttgtttgccaattctgaaccagaccttgcagttagagataatgctgctggtgctattgccagaatgataatggtgcaacctcagtcaattcctctcaaccaggttcttccggtgtttatcaaagctctgccactaaaagaggatcatgaagaatcaatggctgtctacagttgcttatgtaatttgttactatcatcacatccccagatccttactctagtgcctgatgtggtacatgtctttgcccaagtggtagtatccccggatgagagtgatgaagtgaaaacaattattggcaaggctgtttctcatttgatatccgtttatggccagcagatgcagccaatactaagtgctctaccaccagctcatgcgaatgcgttggcagcatttgccagtagaagatgatcttcagagaaacaattaccttcaaaattttgtgctgctggagtgtttttgttaaagactgtccttctatcagatatggttggaatcgcccaagttttgtcagttggtgccatttgttnaagatattgttagctggatatggatatggtttgagcggcatagcc

SEQ ID NO: 3160 - DNA, 768 bp, Avena sativa
ccaatccaagtgcagaagtaggcagctatgtgaactcttctgatgtcttgaaggattcgggcaccaataaacgcttgaggtcagggccctgtgggaggctgacatctaaagcctgtagggagaaagtgagaagagacaagctgaatgacaggtttcatgaattgagtactactttggatcctggtaagccagtaaaagctgacaaagctgctatcctaagtgatgctactcgcatggttactcagcttcgctctgaagcacagcagctaaaggatactaatggaagtcttgaagacaagattaaagagctgaaggcagagaaggatgaacttcgtgacgagaagcagaagctgaaactagagaaagagactttggagcaccagatgaaacttatgactgcaactccagcctatatgcctcatcccaccatgatggcctcaccattcgcgcaggcaccaatggcacccttccatccccacgggcaagctccaggacagaaattgatgatgccatttgttagttacccaggatatccgatgtggcagttgatgccaccctccgaagtggacacatcgaaggacaatgaagcatgcccgccagttgcctgatgctcggaccgtttaaatcatgtgaactcgtggtaacctaaaacagcatagttgttcgatccattgttgcgcatagtctctctaattcaaattagactattgttcacacaatggtagtttttattgttgaggagaatgctgtcatttgttcgcaatatag

SEQ ID NO: 3161 - DNA, 705 bp, Avena sativa
caaccttagaatgctcacatgccctgcaactgagatggtggatggttccggagtgctctactttgagcaagcattttggagagctccggaaaaacctttccgacaaagattttacatggtaacgccatgttcaaaggagatgaaatgtgacgttgagttgagttcctatgcaattagagatgttgaagagtacaagaatttctgtgaccgtccaaaagatcagagaccacagccagaggaagtaattgcggatatcgcagagcatttgaccaccatacacttatcacgatgtgagcgtggaaaacgctgcttatatgaaggatcaaccccacctggaggttttcccaacagttggagtggtgcagcatactgtacgtctgatctgtccattcacaagaatggtgaaatacacatttgggacaagggttttgatgatgatggaaaccaggtttggggaaccaaggctggtccatatgagttcaaacctgctcccaagtccaactatgatgacatgttctcaccgttaaatttctccgcccccttgtcactagagaagatagagagctcatatgcaatcgatgaccagtagatgagtagagttcatctaattttttgattagagaataccgtaacagaatagctcctgaatttttaccacccgggatataatcaacctcattggttgtcattggatgatgatcatat

SEQ ID NO: 3162 - DNA, 718 bp, Avena sativa
tcaaatcaagttaacagtggcagtataagaatgctgccatatgagagtgctgcattaatggattttccaagattttatgaagcaaggcatgcgtatcggatgaacatatagatatggggctagatatagacagcatgagttatgaggagcttgtggcattggaagagcggattggagatgtcagtaccggtttgacagaaagctacatcaaagaaaatctgagggtaaatttgtatgttccaggggcagcttgcatacctgataagtccctgtgggaatgatgcttgcataatatgccaggaggagtatgaggcaagagaagttgtaggaaccctcgattgccgccacaagtaccatgccgcgtgcatcaagcagtggctgatggtgaagagcctgtgccccatctgcaagacaacagccttgtcagcagatagacgcagcgggtgacatatgccagttaataacattattggtcatttaccgcgacagaggttccattcagttttgtacataagacatgttggatgatgcggtgttacctgtaatttcctattcgcttttgttgtggacataccccataactgtacagtcagaatatgttcattctgtagactgctgtagaccctccatggtgcctgaacagctctcatcatggcattcctagatcttatatacattgtaattaacttggttcgtttcgtgaaaagaatttgggaaa

SEQ ID NO: 3163 - DNA, 585 bp, Avena sativa
tagatatcaccgcacctgagcaatgtccacctgaggggaggcttcctgatgctggcccacgtttaccttctgagcaccttcgtgaggtcttctatagaatgggacttgatgacaaggaaatgttgcactctccggagcacatacacttggaagatcacggcctgaccggagtggctggggcaagcctgaaacaaaatatacaaaggatgggcctggtgaacctggagggcaatcatggacagctgaatggttgaagtttgataacagttacttcaaggacataaaggagaaaagggatcaggatcttctagtattgcctacagatgctgcaatatttgaggacgaatcattcaaggtatatgcggagaagtatgcagaggaccaggaggcattcttcaaagactatgctgaagcccatgctaaactgagcaatcttggtgcaaagtttgatcctcctgagggattctcgttggacgatgccgcaccggctgacgagaagaaagttgctgatccagcaccagcagatgataccaatggagcagcaacagcagatgataccagtgaagcagcacctacaagcctgag

SEQ ID NO: 3164 - DNA, 815 bp, Avena sativa
gcaatggactatgcaattctggcaaaccttttatttgggttgttaggtcaaatgaggcacataagttaacagaagagctcaagatgaaatgtgagaagataggattaattgtttcttggtgcccccaactcgaggttcttgcacacaaggccattggtatgctatcgcatatttttcctttctttttatataaaattgtttaaagagatgataaaaagtcaaagtaataatagcatgttaactttattttattaacatatttgcaggttgtttgttacacattgtggatggaactcaacattggaggccgttgctagcggtgtacctcttgtgggtattccagattgggctgaccaacctaccatctcaaagtatgtggagagtgtgtggggcatgggtgtgcgagtgcggaagggtgaaaatggattcatagggagtggggacatcgaaagttgtattagagaggtgatggatggggaaagaaaggatgaatacaaaagaaatgctatgaagtggatgcaaaaggctaaggaggccatgcgagaaggaggaagttcagacatccatattgttgaatttgctgcaaagtacaagtaaccgtaatattacagaaatgattttttgcttcaagataagaatgtaggtagttatttcagtcctacaaattaatgttttgagatggcataattttgggcatgtttctcttgaaaggaaaacgaaaaaggcggcaaagacacaattgagcgttgtgttttggcaaacgcctcatatgcaatgtatatgtacatgaaaatagagagacagagaaatacgat

SEQ ID NO: 3165 - DNA, 836 bp, Avena sativa
actagtagaaatagaacatatttgcctgttccaaggacatgttgagaacattggcaacctgaagcaacactatggtctgagcaagacagcaaatgaggttaccatcttgattgaggcctacagaaccctccgggacaggggcccgctcccagccagccaggtcgtaagagatctcagtggaaggttcgctttcatcctgtacgacacgctgtcgaaatccactttcgtcgctgctgatgctgatggcagcatccccttcttctggggtgtcgactctgaagaccaccttgtgttctctgacgatactgagcttctcaaggcaggctgcgggaactcattcgcgccattccccaaaggctgcttctacaccacctctggagggctgcagagctttgagcacccgctgaatgagctgaaggctgtgccacgggtggacagccagggtcagatgtgcggctccaccttcaaggtcgatagcgaggccaagaaggattcggggatccctcgcgtcggcagcgccgctgattggtctaaccacttctagttcaatgacccaattgcgttgctgccattccctggtgtaaactgtcaatcttgacactgaatcgctgagacctcactacgttttattttaatcagtttacggacactttgcacaatgatgttccaataaatgtatggtcagatgagtaatgatacttctgtaagttttcggatattcaaagaaactctgatggcactttggtggtagagattttatctatcccacatacgtgtttcaataaataaagttcaatgaaggttccatttggtactaattcgatttgtagaaaaaa

SEQ ID NO: 3166 - DNA, 701 bp, Avena sativa
ttggactgcaagcaattcatcaagcattatgacttggaagaggatttcttgcctcagaagcaatccttgttgcacatctggtgccaagtggagctattggatcaggttgctgatccacccagcctcccagcggagcttctaacacttccgcaaacagctaccgttgctgatctgaagatggaggctacaagagcattccgcgatgtgtatttgatgttgcagagctttgtagcaaaccagcttcttgattgcccatctgcaggtgacacaactcaagtcaaactcttattcggagcgaaagggactgttcacatccaaggcaagtgtgttggaggtgagcgcagggttgcaatttatcggatggagaggggtgtggacaaatggacagttaattgttcatgtggagccaaggatgatgatggcgagaggatgctatcttgtgactcgtgccatgagtggcagcacactaggtgcgctgggataggtgactttgatcaggtgccaaagcgatatgtgtgtgcttcatgtaaattactccacaagcccaagatgtatagtagtttctctaacaaaagatgtaatactgctggctcttttagtcatgccagcggtgggctgtggaggtctcacatcagttgacatgtacatatcaacaacaatgatgtccccttatgaaaaatgcaagtttttgatggccaaaa

SEQ ID NO: 3167 - DNA, 878 bp, Avena sativa
ctggttagcaagctacgagtcactcgatacatttgtcgttccgcgatcatcaaaaagctttatgaggacaacgagtatgctctctacactgtaacattatttgctaaggttgttgacaactttaaggtccatgctcgtgagaaaggtttccaaatccgtgattttgagtatagtcccgaagcacaagagagtcggaagcaagagctggaaaagctgctgcaagaccaggaacttatgaggacctcccttttgcaatggtgctatgccagctatagtgaggtattcagttcctggatgcatttctcggctgtccgtgtattcgttgagagtattctgagatacggcttacctgcacggttcctgtctgttgttctggcaccatctacaaagagcgagaagaaagtaaggaccatcttggaagggctctgcagcaatgccaatagtagctactggagatctgaggatgatgtgggcgtagctgctggtcttggaggcgagacagagtcccacccttacgtttcattcaccataaatttcgtctaagcgtgcagcatcttccttgcctatctgcgcagtcaggcaataactatattctcgagtataatacagtgtatattatttgtaatacgccatttttttcttggtatatcggtctgtactgttctgtaggagacgagccggtcaataatgtagtttttcggagaacctgaaacatttcctggcacaagatggatattttattttctgcagtactgcaactgctagtttttgtgcagtattgaattattggaccttgagagcacctgtggatactacattcttgtaagtttgatttgccggttaataataaaaatcatgttgaataacccagttcatcg

SEQ ID NO: 3168 - DNA, 751 bp, Avena sativa
tcataacaatggagacctgacaagaaaataatgagtcaccttagacaatgtcagcctcgtaattaatagttagtggatttacaaatcataaacaacattcctttccagggctaatacggagaaagaccctgacaaaagtcggtttctcctttttacatatgccagtgtacctgacatggatgtatctcagttttgcacatcactcgaactacacccagtctatgggtctacaaaaaagttggcaaaaccctaaccgcatctgctaaacaacatagcaaacacggccgagtcactaactggaaaggctgttccacactcgtggggatgtcaaacgtcatctctgagctgacgtcaagaaaagaagctccttaccatccgcatcagatcactgggcggcgactcgatctgctttcggacatactcatgtgtaggcaccttgtcgacatctccccagctcgccatggtagggcacgaggacaacatcttctgtgcaaccgatacgatatcgtccagagtcacttcatcaatgcgctctaagaagtgttggctccccttccctgaactatcaatcaggatttgccgcccaatgtcttctgtatgatgtttcctggattcgaggttctgtaaaacggacgaaatcgtcaaatttttcgctcgaatgagctcagcttctgtaacttcaccaggtattgcaattactgtcaattcgtgtatagcaatatcaacagccttggcgacaagattggatggc

SEQ ID NO: 3169 - DNA, 759 bp, Avena sativa
ttgaatgctacgagcacaaccaccttatcactaaggttcaaggagatggtgtaatagtagcaacacctactggcagcacagcatactcgactgcagcagggggttcaatggtccatccaaatgtcccatgtatgctgttcactccaatctgcccacattcgctgtcatttagacctgtcatcctacctgattctgcacggcttgaattaaagatcccagatgatgccagaagcaacgcgtgggtgtcgttcgacggaaaaagacggcagcagctgtcgcgaggagactcggttcatatatctatgagtgagcacccgctcccgaccgtcaacaaatcggaccaaaccggcgactggttccgcagcttgatcaggtgcctgaactggaacgagaggctagaccagaaagcactgtagaaacgtgtggcacacacacacacatacggaccctagcatgctcctgtacatacatagctcaatacatagataaactcctcatgttagaatagatgatcttttctctctgtagtagcatatgcaacaatacaggagacaggcagctccatggctttttgacctgacacctgacagcagaatcgcagatgatggtaagattgatagtgtttgtaattatccgctatgtaaatcaacggttatttctgggctcggcagaagatgatagcgcaagtgaatcacctgatgccacattgtaatgaatccctttgaggaactgagggaatatactgtaactaaaggccgc

SEQ ID NO: 3170 - DNA, 717 bp, Avena sativa
attgagtacctattaaggatggttttggacactgcaaacactttggactcagatggagacttagtccgtcagatattcgataaagaaatcgataaccaccatgaggagaagcttctgatatgtcaaatctcctgctcaaacatccagaagcttctgcggtctgagtatgagctggggacagaagggagcactgaattgttcttgcagaactggagggagagcttcctgcaccagctcacggcactgacaagcggctatcttgaaaaggaggggaaaaccgattggatcggcggcatcggcaaccacaaggatgtgttcacatcagtgtatgcaaatctgctcggcctgtacgcgctcactgaatcaaggtcgctggaacaaccggagggcaggcatgaatcgtatctgcaagagttttcagatctgaaggggttcatcacgccattcctgaagaatcctttgatctctaacctgtatttgctggtgaagcgatcgcatggggtgttcggatcccaacataagccagaggaccaagtgggaagttttgatccgtattttctgctcagatgatttttctcatgtacaatttgattctttacagatagctataactctgttgtagacctaattaccaattgttttggtacaaccgattactatatgtgagctgtatttctacagccaagttttgcagccactgttgtacttatgttacaa

SEQ ID NO: 3171 - DNA, 803 bp, Avena sativa
  modified_base (168)..(168): a, c, t, g, unknown or other
gatacatccctggatacccaagaattgactcgtgcaacagctatcttattacaagatatgacggaacaataatcaatgcaaagccatggcatttgggtggcgaaacaagggaaataatgggatggttcaaatccagttgattactgtacagcgccacccaaaagcccngagagcaactctgatcgggcgtggaggatgcttaacaagcccctggagaagagtcacagtgaaactttgggaggtgcttgaacggcgaaatccgctagcttttggccattttgcgaaccatccaccaggagggtcgactcctaatgtcatgatctgcccatatgatttcccattgacagagaaggacatgcgagtatacatccctaacattgcgtttggtggtgaagagcccgttacaatgaagaggtttggctccttctggttcaagtccagaggttctgctaaacaaacaggggagtcaccagttctaaagacgctggtgctagtgagtacaaggtccgtatgtgatgaagagctctttctgaactaccggtacagcagcacaaaggcgcgaccagagtggtataccccagttgatgaagaagaggataagaggagatggagctagttctgaacctcttagctgaaccaactcgcatgtaatgttttgccaacagttgtatggctgtttctgtgaggccgcaaattgcaacagagcactggtaaactccagaaaaccgttgccgcaattcttttatgtcttcaatccacatgctgcttgaggaagtaagtgcctgtgctagacttttctcgca

SEQ ID NO: 3172 - DNA, 755 bp, Avena sativa
cgcgagcagatgatcgacacctaccttaacaccctcgccaccgtcctcggcagcatggaggaagccaagaagaacatgtatgccttcagcacaaccacctacactgggttccagtgcacagtcgatgaagagacatcagagaagttcaagggtttgcctggtgtcttgtgggtgctccctgattcctacatcgatgtaaaaaacaaagactatggaggtgataaatacataaatggtgagatcattccatgcacatacccaacctaccaaccaaaggagcggaggacctcaaagtatgaaagcagacggtatgagaggcggagagacggcccccctgccagcaggaaaccaaaacaaccagccactaaacctgagtcatcgtcttcttcatgagctttgcaggcatttactcacgtactgaaacaaaagggtgtgcttaattctatatcgcctcgtgccaccaccatgcactggtgaagctgctagccacgaaaatccatctgaagcccaggatatgatgtaacgcttgaacaagcgacctgcgccgctggattttggagttttagatcatgttgatattttgagcgaccttgacatctgaatgtaacagtagactgaaaccttttgtccatcgaaaagtgttacacttcaaacatctgtgatatttttctgtaacaattagtcgtattcctgattgtctgaatttcttccctttgagactgattgaaatgaagtttagttttggaccaaaaaaa

SEQ ID NO: 3173 - DNA, 535 bp, Avena sativa
  modified_base (489)..(489): a, c, t, g, unknown or other
acccattaggaaagctctatctccaatttcttccaacgtgatggctctcgagcagcagatagctgatgatgtgaattgcccttcttcattggaaccaaaaactccaatcggagcatgcaatgtagttgagaagattccagttggcacacctcttgataaatttaatgcactaggatctaacctgaaggaatctcttattcaacaatatcttgatttcttaaatgttgcgaacaaggatgagctacaacaactgaaaggtattggtgaaaagagagcagagtacattcttgagctccgggaggattcgcccagaccattcaaatctctatcagacctgggaaatataggtctatcatcgaaacaaatccaagacatcctacgtaaaacagccactggaatcttcaaatgaccactagaatggactgtcccctggaaaatcacacaatggcaattccctgaaaattactaggattcactgctctaattggngatgtattgtaccatattgttcaaccattggcgactcataacctat

SEQ ID NO: 3174 - DNA, 868 bp, Avena sativa
gtatattccataagcaagaccaatttggcagacttttgccaacatttattcaaataattgagttaacggaagaggaagaggaggagtactggatggttgtatctgcagtatttgagggcaaagaaacctctagtctgacttctgaatcgagcaacgctgatagatccacttctgaccttccaatctctacacccttgagtgatcctatcaacaacaaggtgcatttgctcaggacaatgcttcaatgggaggagcaagtacgccgtcgagcattgcttgcggagagaagtctgggcgcaagaacgctcaccgaaccaatcctccgtgaggtggccatcatctgctggccacatgggaagataatgaggatgagtactggcagcacagccgatgatgccggtagaagaatgggtgtggatgggaagctgctttgggtcaatggccagctcgtgtcgcctcaaaccgagctcaaggatggagatatagttgaagtgcggacgtagttgcgattttcctccacccatttctcaggttaatttgtcagattggctcactgatccggggatgcaacaggctagggaatgttatgcagacagctgagacctcgaagtgtacagtccatatgtggaaaataattgatggaaccaggaatcctccttcaaaagagggaagcaggatttggatacagggattaagagtaacaaagtgttgtattctgtacatatgcaaccaggtaccaactgtaacgtgtccttgttcatagtagtagtgtaaaattcagatgtaaacctgtagtaagtaatgtgtacaggcaattctctggagtgtcaatgattctctgtacataatggagactgttcagtgtgtc

SEQ ID NO: 3175 - DNA, 873 bp, Avena sativa
cgaagagaaccatatttagagggaaaatagagcaaacaacaaaggatgaatgccgcgaagtttttggtctctggatcaggcttgcccatgatctattgaagcaggatagcagctctcgcttagaaagcagcctccacctcaaccaacactgccgttcaatctgagcctactctgaatattgaaaatcctttggaaaataaagtcacatacatggcttctgcaccattggattctggtttaagtacccttgttcctcctgttgaacatcatcaacaaaacatcgaaagaggctctttaacatccacgtcacaagaattgtggggttcaatcgtctcatatatgagatcgagtcaatctggtcctgttttggcagtgttgctagtggccatcattatcttgatgcaggtaataatcatagttgtactcgctagatccccaaaggtcatcatggttagtcctgaggcctctgtaagtagctttggttcttatagcaaggagagcatggagtgggtgcagaagcgagtcagcttactaagcgaggagatgcagatggcggaggcgcacatggataagatgcgacacgagtttgcctggctcaagtctcacctcgaaagactggagaggttgaggagcagctcgtgactggcaaatacgactgcctttaggtcaaggtgaatatatatgttgttggctgcgtgcaatcaagagctatgtgatgtgatttgttgtgtgttgaacgtacagttacatgagtacaggttgagcgttgttgtagaaatgttgccttgaggcgaaatcctggtatagcattggtgaggtgtatatatacatgaactgcgcccactgtgcccgggtgtgtattattagacggca

SEQ ID NO: 3176 - DNA, 792 bp, Avena sativa
ccgggattgatgttgaggccttcttaactttttataagtggtttggatgtgtaatacgtcttggctgttttggttgaaaaaatgatcatttcttgtgcaggttcatctacacccttctcggcctcgggatcgttatgtgctcgctcacttgctctggtcatattgctgcagaaaccgcaaacgggccctgcctctcttgtcacatgatcttcgtatttttgcttgtcgtactggaaggtgcgatcaccgccgatgtctttctgaatagcaactgggaggaggacttcccaaatgatccatctgggaattttgctgagttcaaacaatttgtgaggtcaaattttgacatatgtgaatgggtaggcctctcggtggtgggtgctcaggcactatcaatcattcttgcaatggtacttcgggcccttggtcctgaccgtgagattgactacgacagcgatgacgataccatccccgcaaggttgcctctcctaagaaaccaggcccagaatggtccaaactatttcgaaactaacttacctcgtaggagtgattcatggactgtgcgaatcttagataaggctaacagataagtttttactgacccctcatggtgaaccctccagaaggagcaccaacagtgttccgggtatgatcccctgaggttacggccaacatgaggacatgatactttctctctgaagtagcgaggattgatatgacggcgtggtaccaaaaatggctagttttattgcctttagacatgcgcaaaatatttgagtagcatgtaactaa

SEQ ID NO: 3177 - DNA, 535 bp, Avena sativa
gtgggaatgtggcattcttttcaatcgggatgggaccgatttgttgggtcttgtcgtcagagatatttcctataagactacgagctcaggcatcagcacttggtcaagtaggtggtagagtgggcagtggtctggtttccatgtcattcctctccatggcccgtgctatatctgtcgggggaatgttcttcgtctttggagcaatctcgactgtctcagttgcttttgtgtacttctgtgtgccagaaactaaagggaaaactctggagcagattgaaataatgtttgaaggtgggaaaggatggaaaggaggcgaggtcgagctcgaagatacacaacacttaatacagggcgacgtgaagtctgcctctctaggttagtataatcagtaacaagacacttcatgccattccatgtgttcaaatgctcaaacagcctcgtcctgcttcagacatgagattaagaaatgatcaagctgccttttaactacttccgatactgagctcaataggtcataggttgtaacatagatgat

SEQ ID NO: 3178 - DNA, 694 bp, Avena sativa
ggaaaattaaactgccacggagtgagccatggagctgttacaatactgccgcttccattggtcagtctcagggacgcttgtatgcgtggcagatagatactcagcatgactgccaactcaatgtttgggttcttgaggaccatgaaagtggaaagtggaacctaaagcacactgttaacgctttggaactgttcggaaggcgtcgtcgcaaggatactcaggcctataagatgtttgcaattcatcctgaatgtaatttgattttcattactgatgaggaggcgatgacagtgtcatatgatattgataatcagaaagtacatgtcatcagcacttctgaagagttcttggagggtctaccttatactccctgttttgcggaggaataaccattagatggtcactaagagtcagtgcagcttgacagtcttatcatggcaacaagaatcagtggttggtatggatgtaagcttctagttttatggcactggcttggacatgtcccaactactatatctacagtttggtattcctatctgttggttagcctagactctgtatgggtgatgcttagttgtgtcaatgaacctagtcattctatttgctgtcatgactcatgtagtactaattattgtgaccacttgtctgctcttggtgtgggtaaatgtaagacagcagtctgagtacattatct

SEQ ID NO: 3179 - DNA, 670 bp, Avena sativa
tttttttgagcaacttcacctcagatgttcagcctcagaacttaaaaattctactgtaggcataataaaaataatccaagactgaacatgcatttcacaaacaataaactgagctccactgataacccgtcaatctgtttaccactagaaaacgaaagagacagcactctgttttcaagtcacaagcactgcatgatacaagttattgaaaaggttgcgagggagtacactgcaaacaacaagacaagctcctaactcagttcataagcctaaaaaatccatcaccacgcgccacaaaggcgcaaggcagggcaagaactagtaggggcgatatcggcggtggcttccttcaccgcctcggccaccgccatcccgtcggtcaccacgtcgaggagggggtggaggaggcattccacctggctgttgcagaacatatccaaggcgaccatcagggagcaccatcggtaccatcctcatcccggctggtgctggtcctctaccatatatcataggctggttgaatccaggaccaccaccataagcaccatatggatctcccatgtatccaccataaggaggaagaggatagttaggacctcctccaggcttgaatgaatggtcaggtttcttatcacccaatggtttggccatggaaacttcaagcgctatc

SEQ ID NO: 3180 - DNA, 876 bp, Avena sativa
agaagcaatcagtaacaccaaagtacagatttcaaaatgggattgtacccattaaactagtccctaactttaagttcacttttacatgaaatacaaggaccatgtgttgatcactgttgagtaacttaatgggtccatgttaggaggttgtcagtcaatgtctttccaggcagcttttcaactggtgaggcattccagtcagtcatacccacaacagtacaaggcaccctgccatgaagctacaaaggctttcgatcatcaaccagtttagcattgtgatgtttcctccgaaatcatgaaggaaaagcaccagcacctctacgaatttacctgtgactcaggactctacagccattggactcggcagagaggctccatctatggatacttcagccactacatcagaatgggtgttatttaaaactggcatctccttctccctccaaattgcatgaacttcatcagttcggaatctttgagtaaatgttgactcctccaggggagtggtgacaccatgtgcatatgccagtaaaccagtgtatgcaatcatcgcgccattgtctatacaatatcgatcatcagttgcgaacagcctaccccctctctctgagcacataatcctcatcatctcttgtaaacgttcattgcatccaacaccaccaacaataagaacgtcctttgaatcacaatgtgccatggcacgctcagtgatttcaacaagcatagcaaagagagtttcctgcaatgagtagcataggtctgcaggtgtgcactcgttacttttaagcttctcaatcgctgctgcttcgatgaagctcaatatgccactaaatgacacatccataccttttacaacataagggagatcgatgaact

SEQ ID NO: 3181 - DNA, 595 bp, Avena sativa
tcagtgcagacgagatcgctacaactcagcattatgtagaaataccagatgctgttgatgatggattcagcatttcccatttggaaacagtggccctgctactgaggtgggctacgatctgcctaatcaggttcaggacatggataagatggataaatcagtcttcaatgtgaaagagatcacaagcccaaagaagccagcagaccagctttccattggcacaacacataaagtaatgcacctagatatattgaaaggaacaaaagggggacatctgtctgaggatgaagcgagcgcgaaagattgccatcctttcagcaaggcgagggatgaaatatctctaaaacccatagaggtcaggaagaaatctccgcctggacaggtttgctcagatgctgaaattgagtacaggagggcgaggagtttgcgagaagccaacagtgttttgtcatggcgcagtacactgtcaaggcagctacagtaatggcgctctagtataaaggataagtttcagagtttcctagcctagtgcgcatggattcgagatgttagaagagtaatccgtagcagtcaaagagtagcctgtactacatat

SEQ ID NO: 3182 - DNA, 685 bp, Avena sativa
ggctgtgaagaccaagacctcaagtgttgcttgggggtcttggtcttcacagccgtcgccttgggattggtgtttgttggttcttgcaatgaggagattgcacaatctatcatatttttcttgatggagcgcagtgaggccgagctggcagaaccgattatacgcctgcttccagttgcacttggtcttctgtatcttgggaaacaggaaagtgtcgaggctactgcagaggttgctaaaacatttgatgagaagatcaggaaatactgtgatgtaacacttatgtcgcttgcatatgctggaacagggaatgtgcttaaggtccagaaacttcttggtatatgctcacaacatcttgacaaaggtgaaacacaccaagggccagctgtccttggaattgctcttattgccatgtctgaagaactaggatctgaaatggctatacgatcactcgagcgtcttttacagtatggcgagcagaatattagacgagcagttcctcttgctcttggtgtactctgtatttcgaatcccaaggtaaatgtaatggacacactgagcagattgagtcatgacgcagatgctgattgtttcgatggctgcaatcatctcacttgggttttattggcgctggtacaacatgccagaatagctggtatgcttcgtaattctttcgagttactac

SEQ ID NO: 3183 - DNA, 912 bp, Avena sativa
tacaggcactgcagcacggcccaactgcagttcaggtagcaaaacagtttctctaggtgtcaggtccaagaaggccaaacgtgcacatccaggagttcagggtatcagtgtaactaaaaacgatagcacaaaccacagaaggacgtccctgatcctatattccacacatcaagctcactcttcacctacgtgtgtctgcacgacgaaactttaacttaaaagcaggtacgagagcttcattacacgtggcgatgttaggtcagacttcagttgctagcgggcaagaaaactgtatgacggcatgtcctcaatttgctgaatatcttcaagcaatagctctctctcgagctggcgtcgtgtggatttaataacagtattgaaatccatatatgtagcgtgcatttcaagccatttctgatccatcagcctaaaggttatgcagtaaagaatgtcaaaggctcggtcattttctataagtaaatttaggaacactgctccaatcaaagaccttggcttaactgcttgaagatcaagcatctgaataagcatgaacgtaatatttacgccagctacagcaaatggatattcccacaatgctctgtcaccattctgcttacaaaggagctcctcgaaggattttggatagtttctagcgaagtaaagtaaattctccaaagagataaagccaccgcccctgaagtctgtggagggatctttcccttgccatcccatctccttccactggtctgaaactagtcctagaagttcagttccaggaaaagaagcatgccaaagggctttcaatgcttcctgatgttctctattttgactatcgtaaggcacctctatccggttctgtaatcttgcagacactcttcctggaccggggtcagatcgaaggaaatgcgagcg

SEQ ID NO: 3184 - DNA, 781 bp, Avena sativa
tcccatgaggaagcatggcatggtgcctgatcatagcctttttgaggcactagcgacatgcttgattgccattacacccaaggatcactacaagagactggacgaaggcagcattgtcatcaagaagtcaaaaacctttagcttctgcaaggaaggtgtgcttgttgaaggcgagtcttcaccgataaagagcgatgtagtgatcttcggaacaggattcaggggagatcagaaaatcaaggacatgtttgtgtcagaatactttcagagtatagcagttgggccagcatcctcaacagtgcctctctatagggaatgcatacatcctaagattccgcagctcgcagtcctgggttactccgagagcttgacgaatctctacaccgcagaacttcgggccaagtggctggcgcatttcctggatggtggattcagattgccaagtgttaaagcaatgcagagtgatatccttgagtgggagaagtttatgaaacgatattctcgcggctactttcgtaggtcctgtattgggcttcttcatatctggtataatgatctactatgcaaggacatggggtgcaacccaagaaggaagaatggcttcttcgctgagttatttgatgtctatggtcctagtgactacattaatcttcaccccaagtaaagagagggttcggggctttgattttcatgcacggcacttatcaacccatatttgtgtctgccatagtaccgcttggcatatttcacacgtttaataaatcttcttatacatagtaaa

SEQ ID NO: 3185 - DNA, 944 bp, Avena sativa
tgtacagccacagttttctacatcttggtcagaatgtagcgtatgaatcactccatgaattgctgaacacaccgggccttaaatcaatggccacacaattaactcatcaagctacatacagagatccttgcaccccgaggggattttcgcgcatgggtggagaggttaaactttctgccagtgttctcgagtcgaaggcagagtacagcccttttgctcatgccgttggtaacttctctgagtgtagatctgcagtgagaacactattgcagaaaggacaagagaaatgtatgtatcatgattgctgtctgggagcagcatttgtaccagatctggaaggaaaattcttagcaactgagaatttctaccacacctcgaagttctttgggctacgttccaagtcctttctttctgatctgatgctagctggggagaaattttgccatggggactggtcaaacataaaaaagaagtaccgttctttcaacgagggggaactgctccttttttgcttctcttcggcgtatattgtggccttactgcatgatactcttaaagtgcccatggatcataagagcattgatgttacaaatcaaattcggggtgtcccagttgactgggcattgggcgctttcgttgtacaaaagacaccaaaccggacagacatggtccatcctgaagtggagaagaccccacctcaagacaatataccacatggagaaaggctggtacatcaccagggtcagacgatgagcctcgcgtctcgtcgctgggagttgatggagctcctacgatggggtaccagtgaccgtaaatgtaaatattcctgatctgattattttattgcagccactgtatggttcgacatgccgccttaccgaaccgtactgagtgtaagcagcccttttgtatattatgactgactagggttgctcagggccggt

SEQ ID NO: 3186 - DNA, 897 bp, Avena sativa
acaccatcgtcatcatctccttcctcgacgtcttcggcgacggcgagtaccaccctcgacatctccggccacgacacatccaccctcggcgccgacatcaagcactgccagtcggtggccctcgtctacctctccatcggcggcttcggcaaccgctactccctcccgaccaaccagtccgcgctcgacctcgctgaccacctctggtacacctacatggccggccacaaggacggcgtgcaccgcccgttcggcgacgatgtggagatcgacggcatcgacttcttcatcgagcacggctcgcccgacaactacgatgtgctggccaaccgcctctggagcttcaacaagggcttccgggccaggacgcccgcgcagctgtcggccacgccgaggtgcaggtacccggaccggctcctcggcaaggcgatcgcgacgggcgtcattgggcgcatcaacgtgaggttctacgacgactcctactgcgccgcgcactggcgccaggagtgggacaagtgggcggcggcgtacccgacccaggactaccagctatacgttgctctgccggcctcggagaaggtggttgggtacgtacagcttaagagcctccatctcggcgtgctcccggtgctacagaaggccgagagctttatcgggttcaccatctgggatcgctacttcgacaggctaaccaactacagcagctccatcgttaagtggacttgacctttgctccgtccatccaagtcgtgatcatatatcttttgtgagttgtagcgtgctcctctttgtgtctgatgatcgtgttgtgtcatgcatatagtaattaaccaaataagtatcgttgtgctgtgctgtggtgtctgctttgattaataaaatgaggcatgtccaaga

SEQ ID NO: 3187 - DNA, 968 bp, Avena sativa
cagctacgcttcgtcaaacgtcaaacccacggagaagaaaccaccacaaaccatccaatccaacctccccccggtccccgctccgccagaggaaagcattcggaagcaatcgaccaagcagccggcgccggcgacgcggctgaatcggatccgaccaggtccacagatcgccccccctcaccggcgccggacgatagggtccatttccctccccgcgatggcggatccgtgggcgcgggagcacggggaggcggcgcggctggccgaagacgtggcctccatgatcgccgagcgagggacgctcccgcagtccggcccggaggccacgcgccacgcgtcggccatccggaggaagatcaccatcctcgggaccaggctggagagcctcgaggggctgctcgccagggtgcctcccaaatccatcactgacaaggagttgcgtaagcgccaagacatgctttccaatttgaaatctagagcgaaacagatggcggcaggtttcaacatgtcgacatttgcgaacagggaggatttgcttggtgagactaagaaagctgccgatgacatgagcagagttgctgggttggataaccaagggattgttggccttcagaggcaagtcatgaaagaacaagatgagggtcttgagaagctggaacagacggtgctgagcacaaaacatattgcattagcagtcaatgaagaactttacctgcatacaagactgattgaagacttaagcgatcatgttgatggtacaaactcacgtctccagcgtgtgcaaaaggggcttgcggttctgaacaagcgcgtcaagggtggctgctcctgcatgtccatgctactatctgtcgtcgctatcgtgatgcttgtggtcattgtctggcttctcatgaagtatatgtaacggtgtaacctcagtccaactcaaataagtcccaaatgtacatactttcaaatacaatact

SEQ ID NO: 3188 - DNA, 609 bp, Avena sativa
tagaaccgtggttatggtggacctgtgatcaaaggatttggtcgtggttctaaagtactaggaataccaacagcgaacttacctgcggaaaacttttccgatatactgtcagagcatacatcaggtgtatattttggctgggctggactttcaacacgaggtgtatataagatggtcatgagcattggctggaacccttattttgacaacacagagaagactatcgaaccatggttgcttcatggttttgatgaggacttttatggagaggagctgcgccttgctattgttgggtacatacgacctgaggccaactttccttcacttgagagcttgatagagaggattcatgaggatggcagaatagcagagaatgccctagatttaccggaatatgtcaagtacaaagactcgccatatttgagaaaccctttgcagcagggcaccattgctaatgggaacgaggcagagcaagaagagttgaagtgaccgacgcttcgaagtgcctagagagaggctgccgcacatactcccatcttttcgagaactttgtctgggctcttgtatgcccagcagtgacagtattctacagtaccatgtaaaattcgg

SEQ ID NO: 3189 - DNA, 667 bp, Avena sativa
accagctatgccgttcgccctcccgttgaagctgaggatgaagctttcctatcctgcacaggggaaggacaagggctggaattggtgcaatgcaggggaggtcaaggaggaagctggtagcctccaaggggaggaggtgaaggagaaaggtggcacctgtgcaggcgatgtgaaggcggaggctgtgacctgcgcaacggaggtgaagattgaggctggcacctgtgcagatgaggccaaagagggggctgctagctccgaggtccaggcggtgaagccaatgtgggcgatcatcaccgggaagcgcaagaagcggtcaggctgtggcacacgtgtcggcgccctccacgcctcctctgtttgtgtcgaggaagttggcggcgggacctgaaggtccaattatccgtaattactattgttagagctttcctcttctgcttagcatcattagaaccttcgtatcctgtaatttctgttggtgttaaacttcttgatgtcaaaacctgtgactgcttgtcatatgattggcgatgatttgatgtatataccatcctgtagtatgattgatatagtcagatgtgtaatgaaaactgatctactatatcttgaataaaattcttttatgagatatatggacctgtcatcttggatcaatatgttatttcag

SEQ ID NO: 3190 - DNA, 567 bp, Avena sativa
aattaatctgcaataaaacaatcacagttctgctacgggcgaaaacaacaagatggcagaagacttaaaataagcatagtgtctcggtgcacaagcttattcagatcacagaaaatagttacacagaagtctttcaggactgcacatcatcaacaacacacagaataccgacaacaacaggctaaccctaagtgtacaaactatatataaacaggtgcttgttcatctattctcacagagaagattgcggacctccacatctcttccaccttccaagtttctcgcaacccttgcgcggtttaatagcgagctcattgtcttccatacaaacagccttgaaacccagcggttccagtaccttctgatagtcagcaactgtattattgtatggtggccccccttcttgatcactgattaaatatatcaaagtgataagctcgccatctggtttcagaaggcgactaactgtctctgcccaagcttgcctcaagctcggatcaagtgcacaaaagaacgtataatcgaaaataaggtcaaatggttcacttggtatccacttgaagaaat

SEQ ID NO: 3191 - DNA, 930 bp, Avena sativa
gcttggccactggtaatcaatttagatatcttatacaagccatatattgcattggactaataaacttgcaagatatataacttgattatcaatagccaagaaacttaaaaaaaacagtgcccatatgcctttttctcttaccatccccatatgtcttattgttaccttattaattaactatatgtggatggtaagagaaaaaggcagatctcaagttgaaactgagaaaggaatatgtagagacaaggaatagtgttactccttcggtagaacttgactcacatcatttgtcctgtccatggtttctttcagagtttcaacaagagtttccacagggctattttcatgtacttcggtgcccatgtctgtactttccactttgctagccatgcttgtgcctcctttcataatttcaaatggattttctatagggctgcattcatctactttgatggccatatctatgttgcccttaatttccgctggaatttcagtagaatcatatgtatttaccttactttcagaaggagagatcaaatcttcattagttttggtatttgtcctgacagcttctatcgatgtccaaaccttgttaaatttactgtgcttcttgctccgcagatggccagccatggttacattgctatcacacctgactttgcagcggtcgcaccacatgtaattgttcttctgaacaacttcatgcatcgctccatttactagtatgcatattttcttaggtgcatcacaagggtctgtgacactcttattcccagtgaccttccgcacgttgtttttgtcatcactgatcaccttcctggccccacaatgggccaacttcgccttatgttttcttcctttaagatgctcattcagaccagcttcacaagttgcagtcacttggcatagtgcacagctccagtccttggt

SEQ ID NO: 3192 - DNA, 712 bp, Avena sativa
ataaaaccgtcaaggtctggaaccttaccaactgcaagctgcgctcaaccctcgccggccacggtggctatgtcaatgccgtcgccgtcagcccagatggctcgctgtgcgcctcaggagggaaggacggcgtcactctgctctgggacctggccgaggggaagaggctgtaccagctcgaagccggctccatcatccactcgctctgcttctcgcccaaccgctactggctctgcgctgcgacagaggactctgtcaagatctgggacctggagtccaagcacgtcgtgcaggacctcaagcctgaagtcccggtctccaagaagcagttgctttactgcacaagcttgagctggagcgctgacggaagcaccctctacaccggatacactgatggaaccatcagggtcttcaagatccaacctggatacggcggctacaactagataacaggaaacctgtcgatgggtatgcttattaggagccttggtggccaaacggttgaaatgcccgtcaagtttttggctcttctagggcagcagattatctgcctggtactttgagtcacttgttttgtttcttttattatgcttaggtttgttgatgagcacattattcatcagtactattgaagagaatctgtcatcgcaccattgtttttttgaactactactccaatatactcccgactatttagcatccccattccaaa

SEQ ID NO: 3193 - DNA, 1005 bp, Avena sativa
tagcacgacaccagagtcaaacggtgagcagctaaccaaaccactagcggaacaatttacagagctagtgtggcgaagaactacgagcgctaggcagcgacctgacctactaacttcaagacatcaccagataaccggcatctgcgcgtcgtccctgcagatcaagtcctccagcccggccatgaaatcagtcccgtctgtaatagccgcctcgctcaacatctcgtcctgcagcaccctggactgttgcatttcagcaacacaagttgtgagcctttgatactgctccctggcttctggatattgagccatggagtgcacacgggcgagtgctctctgcagtctggcctcagcctgccttttgccgtcctgcaagaaatcatattcatcttccgcctttgcaggttggatctgttgtgatggaccttcaagctgattcccaggacgaatgccacgcaggccaggtctctttctcctccatctcaggataactttctcgacgataccgactgaccaaacgacttttcgatagtttttcctcacttgatgtccacgcacatgagcctgtaatttgacaattctctggcgaatgatcataaactcccttctccccttccaacctcggaacttgttctggatacgaacagcagcagaatgcaaatgtgtatcgtgttgtcccggtttgacatttttaagagaaacaagcgaaagtgtgtgttcatcagataatccacaatcgtcatctccatattccacaaccttctttctgtggaatgactccaccctgaatgcttgaaatatcctagctgcagcttgatgggatttacggacagcacttaatgaaccttgtagtgattcagcgtgggaatcctctacagcaagctgggaagaattggtttcatcgagattttcagcaactggtaatccataaacttctttgacactgctatcctttgattcccttatagtaagttgtgacagatggctcgtcaaagcagattctgc

SEQ ID NO: 3194 - DNA, 828 bp, Avena sativa
cgatgaggactacgaggctcggatcacagatgttgggctcacaaggctggtccggatggcgccaggtgaggaggagatacaagccccttcctgaacggtgactttggggagtttggttatgttgccccagagtatgctagcaatccagttggtaccatgaagggtgatacatatgcatttggggtcatattgttcgagctcgtgagcggacaggaggctgccactgtgacaagtgatgtagtgggtgaagggttcaaggggacattggtggattgggtatatcagctcaagagctctggccgaattgccgatgctgtggataagtcactgagtgggaaaggccatgactcagagattagtgagtttttgaaggtagcgtttcaatgcatcgttgctcgcccaaaggagaggatctcgatgtaccgggtttaccacactctgaagagtattggaacgggccgtgatgtttcggagcagtttgatgaattcccgttgacgcataacaaggacgactcggacaccatgtaacttgtggtgatcgcgcctcagattgtgaactgcttggtcaggcttaatatgctacttgcatagtcctgccactggatttgattgggggtatgccaagccaaccacaagcacaccataactattgcgggatgctcggcccggtcatggcaccatctcatgttgagataatcatgtaagctgtaagattagtctgtattgtcctttaaaattattgctagtgcttgtagtatctctgtggaactgtaattcttgttgtgtctaaatcctgatatcaccttccttcttggaacaaatagcatg

SEQ ID NO: 3195 - DNA, 774 bp, Avena sativa
ctgatagttcggaagctgacagtatggcagagaaggccaaacagcatttgccggtcttggcaatgactgccgatgttatccaggccactcatgaggaatgcacaaagtatgggatggatggctacgtctcgaaacccttcgaggagaagcagctcttccaggccatgaagaagttcttgggacctagcacgtccagctgacgacaatccacacattcctgtgtacattgattgggtggagctctgactgaacggaggcagctatgttttgtgcactccctttgccgaggatgcattctgattctgatgctgcccgttggtcgtagcttttctgaggtctgcgcgacgatcaagttcgtggcgagggcttgcgatcgaggcaacagaggtgtacatgtattctattggcaggctctgttttatctcgtaatctaggagaaacatatgtcgagagtgagaactgcatgggcctttggtgctgttggagcagcatgtgtactgcatgcgtcttgagcatagttttgttgtacagcttcgattggtttttcttctccagtccgctgttgagcccatgagagacatgtctgctaggtgtaaggctgggaaaatatgagattaattttttggctattttacaccgtactggaaacgatccggtatgtgtggattatgctgatgtaaatggctcgattgcatttccacctggatatgtattgggaaggaataatgaatcgagtatggaaatgtatcaggagggaactgttgaatacgaaaa

SEQ ID NO: 3196 - DNA, 877 bp, Avena sativa
ttcctcggcaagaagtacatatatcttgggctattcgacaacgaagtagaggctgcaaggttcctcagcttggattccccccattgatgcacaataaaaaaacaaagttgattcaatttttttcctccatccaccaaagtgtaccgactccaatctctttctctttgttttctcttcttccttttcttgttccgggaaatcagggcttacgacaaggcggcgatcaaatgcaacggtcgagaagccgtcaccaacttcgagcccagcacctatgagggggagctgctcagtgaagttgctgccgaaggcgcagaagtcgacctcaacctgagcatatcccaaccttctacccagagtcccaaaagggataagggcagccttggcctgcaactccaccaccatggatcatttgaaggctctgaactaaagagatcaaaggtcgatgccccccctgagctagtcgcgctccctcatcggtacccccttctgaccgagcatccaccaatctggcatggacaatcatatccagtatttataaataacgaggatgcagccagagctaatagcaggaggccagaggcgggcacagggggtgttccaacctggacatggagggtgagccacactcctcccacactacccttgccactcttctcgtcgtcatcgtcttctgcagcatcatcaggattctccaaaaccgccgcaacagctgcccccgccgccccatcgggcacattccggttcgacccgatggcgccatcgtcatcgtcaagccaccaacaccccggccgtcgctgaaaataagccaaactgtaaattttccgggaagccggtgcattttttcctctccggcatttcagcgtcttcggccttgtgc

SEQ ID NO: 3197 - DNA, 653 bp, Avena sativa
atcactctgaaggaagaaatggcttcagctagacggcatttcgacgacaaactatccaagagcgacgctgagatcagcaggtacaggcaagagctcgctgctgcatctgagaagctgctgcaagaggagtccaccaacagcgcagaggtcggtaagctgcaagaaacgatccagagcaccaggggcatgctggagagagtttctgaagagaaaactctggtggaggagcaggtgagggagctggaggaggcaaacgctgaagctgaaaagcagaggcaggagctgatccatgctgctgaaacactatcggaggataaattcagacacgaggctgaaatcctgacgctgcgccagagcatggatgacctgaaaccagaattcgagaggattgccgaagagaagtcgatgctgaagtcgtggttcgtggatctggagcgcgtcgtggagcggggaaggagcgtcgtcgtcccggaataacccggtttagttgaacattcagtagctaggatttagcaaacaagtaatgctttcttattcttggattcttggctgagatgtaacatcatgcaaaaccgagaaatcctggcatgcatcagtatgtgttctcttggatatttgttgcctttgtgaagtgatagttggtaatgatgcta

SEQ ID NO: 3198 - DNA, 770 bp, Avena sativa
ggacttcaactggtatgaacctcttaccaactcaactgaagaccaagcagcagctcaaagggctagggacttccatgttggttggtttcttgatccactaataaatggtcaatatccgaagaccatgcaagatatagtaaaagagaggttacctagtttcacacctgaacaatccaagttagtcaagggctccgcagattattttgggataaatcaatatacggctacctacatgacaaacaacccagcgctccagcaaacaccaacaagctactcatctgattggcacgttcagtatgtctttcagagaaatggcgttcgaattggaaagctggcaaattccaattggctttacatcgtcccgactggcatgtacggatgtgtgaactacataagggagaagtacaataatcccacaatcgttatatctgaaaacggaatggatcaacctggaaacctgacccaggaagagttcctgcacgataccgcgagggttgagttctacaagaactacctcaacgagctgaagaaagcgatcgacgatggcgcgaacgtggtcggctactttgcgtggtctcttctcgacaacttcgagtggctgtcgggttacacgtccaagttcggcatcgtctatgtcgacttcaagactcagaagcggtaccccaaggactcggccaactggttcaaagaaatgctgcaggtatcaggggcaggggcgaaggaagggtcaggcgctcctggcaccactcaggctggtccaggcgcttcag

SEQ ID NO: 3199 - DNA, 569 bp, Avena sativa
gtgctatgttggatcaggccaaccgagcgaagggtgaggctgaagcaattcttgccaggtcacaagctactgctgaagggatcagaatggtttccgagtccatgagtgccgaaggcagcactgaggctgcgaacctgagagtcgccgaacagtacataaaggcatttgcttccctggccaagaatacgactacaatgattcttccaagcgacgctggcaacccatcagctatgatagcccagtctctgaacatatacaagcatatcttcaagtccagcgacccgaaaggagggagccaccaggcagaacaagctgaggaagcagatcaagaccagccttctgtgaccagcgggatgccacctcttggcgatcatggcagtactttcactctgcagaagggcagaagtccccagaactgatcagttcaagtacctcaagggaaccctttttggtccatcctttctttttccaaatgatggtgttagataggagggtgttactgaaaacactagcagcattagaggtttcgatcttcggcagttgattcaagagatgttgagttggtttag

SEQ ID NO: 3200 - DNA, 414 bp, Avena sativa
ctggaggttggaagaagattgtaaaagctttcggtaatgacattttgttggaaaatggagaaattgaccgagcttgcttaggtcagattgttttcagtgacccaatgaaacgcaaacttctaaacagtcttttggccccaaatatttcatttggtatattctgggaggtactaaaactgtgggtgaacggatgcacggtcatagtcgtcgacatcccgctcttgttcgagacaaagatgaaccgatggacagacccggtgattgttgtatgggtgggatcccaaaacacagatcgacaggctcatgtcaagagacgggtgcagcgaggaacaagctcagagcaggatcaatgcgcagcttgcgctcgactggaaagaagtccgaagcagacatagtagtcgacaattccggctc

SEQ ID NO: 3201 - DNA, 800 bp, Avena sativa
cttttatcccttccgcctcccacgcgcgacgccgccaccgccgttgccgatccttcctcgtcgcgttcccgcaatcttttggccgttgggggttttgagaactgggtgagcgttagccagaatttttgatccctcatcaaccttcgcaggactgggtcatactcgttgcccatcatgcaggctagcgacaggttcaacataaattctcagcttgagcatcttcaagccaaatatgtgggaacagggcatgctgatctgaccagatttgaatgggctgtgaatatccaaagagacagctatgcatcttatgttggacactatccaatgttgtcatattttgccattgctgagaatgaatcaattggaagggagcggtatgaatttatgcagaaaatgctgcttccctgtggcctccctccggagagagacgaagactgaggcggcggcgggtactgtactgccaccaccggcaggcaactgcgtgtgattgaacatcacatcctgaacatcgttcaatctatcgaatctaaatgaaccagcacacatgtcgtgattggcagtgcttttaagttgctatatgcttgacttgatgatgctcggtggcacgccccagttgagcatgagtacctcccaggagaggtgagttcactgctcggacacatgtttgacccaaaaaaaaaaaaagactatacaccccatgtaggagtgcactgtgacacgttgggatgtcaggcttatatccggtaaatttccatggaacttgacatgaaacatgccttagtttcgttcgaaggaaaaaa

SEQ ID NO: 3202 - DNA, 742 bp, Avena sativa
ctgacgacttgcattctgttgtctcgtatctttatcaggaaaagtatgatgtaacagctattgttggtcacagcaagggaggagatgtggttgttctgtatgcttccctgtatgatgatgtccgcacagttgtcaacttgtctggccgattttatttagagaaaggcattgaagaacgcctgggcaaagaatttattgataggataaacaaggaaggttacattgacgtcacaggcaagtcaggaaagtttttatacagggtaacaaaagacagcttgatggaaagattgagtattgatatgcgtgcaacgagcctttccatcagcaatgaatgcagcttcttcacagttcatggttcagctgatgagctcattccggtggaagatgcacacgagtttgcaaaacatatactgaatcacaaactcagggtcatcgagggagcaaatcactgctacactgcacatcgtaaagaactctccgacgctgtagtggatttcattatgttctccaaggcaggggatacctcgttagcagaagatgaatgagttctgataaaatgctgcggctgacttctgtacaacttttatgctttactgacgatccgctatctgaacaaggcagttgaagactatggccgttctacttctattttttagtgtttatttttcaaattaaaaatgcaataagaaaatatgaaggtctttatcagaaatccctttctacacccgggtgcatatgcacc

SEQ ID NO: 3203 - DNA, 691 bp, Avena sativa
gaatggacaggcacggcctcagggaaaccaagctcagttactaggttcaaccgcccctcatagttcggctgcaccgtcgttaacgactggagcatacatgatggtctagccccaccacgaagattgttgcacgcgcacaaggccttcacatgcaggcaagcatgagcggcggcaactggttcatgtgtcacaacatagtgttcatagatgacaggtttaagggatccacccttaaggttcttggaaacatacaaggagaacaaggtgaatgggcgattattggtggtaccggagagtttgcctatgcaaaaggtgttatcacctacaaacgatgcgatacaggcaccagggagcttcatatccgcgttttgtgccgcacctttcggaagccagaggcccctgtcgtgcctacccctacagggcaggccattgctccgaatgcataatgcagctgatgtgcatgcacccgatgtgcccgcctttgctgggcaggaagtcgatgtgcttcccttctgatccaaaaggtccatatatgtgcggacattggtgacattggcttcttcggacggcatactagctttcagtcggacacccgtaattatgtcaatcaacttggagttttatgtgcttcatccagtgtaaacagtttgctatttcaagtcatgctttcgccagctccattatcctttta

SEQ ID NO: 3204 - DNA, 712 bp, Avena sativa
  modified_base (318)..(318): a, c, t, g, unknown or other
  modified_base (329)..(329): a, c, t, g, unknown or other
gtagaagttttctaaatcagcggcagaacatgaatgtgtggcagtttgtgcagacaatgaacgggagatatgacttgacagaagagctgaaacagctccagtgtagaaccctgattttcgtcggcgagaactccgagttccatgccgaggctgtccacatgacatcaaagctcgacaagagatattgtgctttggttgaggttcaagggtgcgggtcgctcgtaacggaggagcaacctcacgcgatgcttataccaatggagtacttcttcatggggtatggcctctacaggccaagccagctggacagcagcccgngcagcaccctnagcccgttctgtatatcgccggagctcctttcgcccgagagcatgggagtgaagctaaagccgatcaagacgcgagcaaggctcgatgtgtagcgcgcaaagtgaataaatgtggcgcttagaaagctgacctggtggtgagagtttaggctaacctgtaccaaggtgcgcgtgttgaatttttttggaagtataaagcgagataattgtgttatactgtcaatcatatagataggaaatggtaggtgatattggtaggtttgggtgggtggttctattccattgatttgtagcctgtaaattgttacatcattgtttgtcagcaacaaaaaggaaaataagtaggggaaggggaaggtgacctagttcccaatacaaaaaaa

SEQ ID NO: 3205 - DNA, 685 bp, Avena sativa
caacgtaccaagagcaagttcacgttttgcagcccagccaagactgcagagactcttttcagatacatcgcgccggagcaggtccctgtccaatttggtggcctcttcaaagaggatgatactgagttctcaacttctgatgttgtcactgagctcactgtgaagccttcttccaaagaaactatcgagattcctgctactgagaactccacggtcgtgtgggaggtccgtgtgcttggatgggaggtgagctacggcgtggagttcacccccgacgcagagggcggctacacggtcatcgtgcagaagacgaggaaggtgcccgccaacgaggaaccaatcatgaagggcagcttcaaagtcagcgaggccggcaaggtggtgctcaccgtcaacaacccgacgtcgaagaagaagaagctgttgtgccggttcaaggtcaagggttccgccgaatccgcctgaggcaaggctctggctgggctggctctgccgatacattcaccgaccaggtccataccgccaccatttgaacatgcgtcatgatagaagggaacaaataagatcttagatggccgtttgtgtttggttctttgatttgttgggttgctgctgtttttggtaggtatcagacctgtgtaatgtgtttgcttgaaaccgaagtgggcttgttctgttctgcgag

SEQ ID NO: 3206 - DNA, 883 bp, Avena sativa
agatgcttggaaactatagttgctgaagcagatcttccggacctccctgaaccaatcccggaagaagatgacgacgaacatatcagtagtatttctaaccaagaagttcttcataataatgaatataacgcagaccagggcaacgaaaataatacttatcaggaaaacgggaattgtgaaataaacatggaagaaaaggctgctgaagagaatgccacctatccatcctcagagaaacccgagaatggagataatccctcctcacaagatccaaatttgtgggagggtgactcgcagtttctgttagattctcaacagcttgcagaaaatttagcgatttgtgatgagttccttcagagtcagacctcatgtggcgatggggatgaaccaggtgtgatcaagcctcgcctgtccgtttatgcccagttgccagtagaggccttgaagaaagatctggaggaatacaaggacttgggcccctcagatgatgcttgtaatcccgagcttgaaaacgcagctgaatttcggttgagccaaatcgaattttcacaggacagctttacggcatgggttggtggcaagacgaatgactgacgtacctccaatgcactgcagcactgggcactcttagcatgaagaaacacctgaagccttttccgcgagacagtagtagagtgatgtgcagcaagcatcatctactgtagttccccgctacgcgacgaggtggttattttgtctcggtgaatctgagttgtaacctaaactggcggctgtatatgtgcggcgagtttagacaccaatgacttgctctcatgcattacaaagtgtaaattaggaagacgggtgacaggtgttcatgctgtgcactgatgactgttcagca

SEQ ID NO: 3207 - DNA, 722 bp, Avena sativa
ccgggatcttggcaaacaaacgatggtctttctggaaatggtgggcttggtgcatgggacagttaccaaatgcttcccactagattaaagaaatttgataatatcggtctcatagaagccattgtcagcagtgttctttcaacagggcgtgttgacctccagcggaagctattttgtagtattcagctggttggtggcgtagctttaacagcaggccttgcaccagttgttgagcaaagggttcttagtactattccatcaaatcaaccagtcgaaagagttgtggtattacagtcagggagaaatccattatttatcccatggaaaggtggtgtgatcttgggcgtccttgatactacccgtgatgcttggatccatagagaagactggattaaaaatggtgtccacgttgggagtggcagaaaatacaaggattcatattttcttcagtcgcaagtgatgtgttactacaacacatagcaggtggtctgaataactatcttggaatgcagtttgtgggctgcaactgtccgcgtaaactctcggatccatgctgagctgagcttgccaaggggcatggcgaagagacctgggtgattattgaaggcctctctgctgtctccccttttcggccagaagtagtagggattagaatcgtagggatatttaagcacgctatctrttttcagggtgattaccagcccatgttgtaagtggagtat

SEQ ID NO: 3208 - DNA, 721 bp, Avena sativa
taccgtgagatcttggagtatcatccacagatgctacaggagtacatgaaaggtggagaacagcttagcttcctctatccaagtgggttgatcgctttaagcgacagtttgcacacctagaggagcattacagcaaaggggaacgtggttctccactgcaaagaaagcatgcctccttaccaaggcagagagtaggtgcatcaaatgatggtaataatgaacaacatgctagtgatcaggagattggtgcagatcctgatgtccatgctactgaaagccctccaaagtcacaaggcccagggcagcagcatccatcgggtggccagaatggcgtgagtccacggagctaccagaagagcgcaagcattagtgcttccaagtgtgtcgttgtcaatccgaataaaaagccagagtatgatgaagaaatctctgaggaaacggaagaggccatcgatgaactgtccgaaaagatctccaagatggacccctagtatagcaacaacaataaggacgatgaaaatggatttccgcactgcatttctgtcaggtacaccagatgctgataatccaatccagtagtgcagtcttgggaaggcggaacactgcactgcaagtttggatcttgggcgccgcaacataagggctaaaacatctccaactagctgttgcggtgaccttatgttcctgtcgtgcatacgaaggaggtggcctgcgtgtataa

SEQ ID NO: 3209 - DNA, 650 bp, Avena sativa
ccgtcgccgggcagcagcttgccgtcccacccacggtcttcgccgccggctcggtcatggactcccgcgcacccatcacgcgcctcccgcccacggcgtacctggcgctgcgctccgccttcaggagcaggatgacaatgtaccgcatggtgcctcccaaggagcacctcgacacctgctacgatttcacaggggttagcaccataacgctgccaaagatcgttctggtgttcgatcggaacgccgccgtggagctggatccctcaggtgtcctcttcgacggctgcctcgccttcacctccagcaccgatgaccatgccaccgggatcatcggcaacgtccagcagcgtaccatcgaggtgttctatgacgtcggtggcggggccatggcattccgccgtcgcgcgtgctaataaactaccaattttaatatataattttgtcatcacctaaataaaccggtcatgttgctcccaatatatcgtaagcttgagtgtgcaatgaagcttatgagttgtaagctatgttgactagcccaaaaagaactctaccttttgggccatctttgtgttttgagtgtggccgtcctaattgtgcagatcaaatatcgtgtgaaccacgtttgaagtaatataagtcggtgttatgat

SEQ ID NO: 3210 - DNA, 781 bp, Avena sativa
cgtagtttcttcttccccggcggtggccacgacccagcgtctcttactctcctcgagattcaccatgggttatgtaggcactggattgcttaagggcctgaggagagtcttagagcagcaaaggaaatcagttgatttatgcagaaaatcacgagcttggacttctactattctttttccgatgttgatgacaagggtgacatgggtgacgatggtgactatacagattcaaggaaagagttagaaccccaaagcgtggaccccaagaagggttggggattccgtggcgtgcatagggctgtaatatgcggcaaagttggacaagtgcctgtgcagaaaattttacggaatgggcggacagtaactgtatttactgttggaaccggtggcatgtttgaccagaggataattcagtctcaagatacgccgaagccagctcagtggcatcgaatagctgttcataatgattatctaggtgcttatgctgttcagaagttggtgaagaactctgcggtatatattgagggtgatatcgaaaccaggatctacaatgacagcattgatgatcaagtcagaaatataccggagatctgtcttcgacgtgatggcaaggttcgactgcttaaatctggagagagcgctgctagcatatcactagatgagctaagagaaggattgttctagttacagagaatcagtgatcactgtcagcacaagcaggtcataactcagtaatcagtgtggtggagtcgggttcggaagtaaggggatgcatgatgcg

SEQ ID NO: 3211 - DNA, 630 bp, Avena sativa
caagattgcaaacatcagaatcagaaggaactttgcctttgtccagtatgaatcacaggaggatgctactaaagcactggacggtactaatggaagcactgtgatggacagggtcatttctgttgagtacgcacttcgtgatgatgatgaaaaaaggaacggatacagtccagacaggagaggtggacgtgatagatccccggacagaagggacaatcgtggtcggtctgcaagtccttatggcagaggacgggaaaggggcagccctgactatggtaggggcagggagaggggcagcccagactatggcaagggtgggaccagagatagccctgattatgtccgtggtggaagccccccgtttgtcagcaagggcgatgcaagggttagccccaagtatgaccgtgaacgtagccctgcctatgaaagggcccgcagtcgctcacctgctgatagggactgaaactacatgcctgcgctcattcccacctgcttcggacccgtggctgtgctgttgtagtgatgctcaagctggttaatttaggcagccagaaactcctgtaatatctctactagctagctctacctgaacatcttgttgattttgattttgaactgtgatgttagctc

SEQ ID NO: 3212 - DNA, 874 bp, Avena sativa
cggcaccactggggagcacggagacgcgaaagcgggaggtggcagccttctttggccagacctcccacgagaccaccggcgggtgggctaccgcccctgacggccccttctcatggggctactgcttcaagcaggagcagggctcgccgccaagctactgcgaaccgcggcaggactggccgtgcgctcccggaaagaagtactatggccgcggcccgatccaactatcctacaattacaactacgggccggcagggcgcgcgatcggggtggacctgcttaacaacccggacctggtggcgacggacgcgacggtggcgttcaagacggcgatctggttctggatgacgacgcagtcgaacaagccgtcatgccacgacgtgatcacggggcagtggaggccgacggccagggacagcgcagccggacgtgtgcccggctacggcgtgatcaccaacgtcatcaacggcgggctggagtgcggcatcgggcaggatgcccgggtggcggaccggatcgggttctacaagcgctactgcaacatcctcggtgtcggctacggcgacaacctcgactgcaacaaccagaagtcgttcaacgtcgggctctcggcctcggctgggttcgcggcgcagtgagaccgcatcgccatgagtcctggatcgatctatgcatgcgtggcgtggatgtggccacggaaataaatataaacaaataatctcgagaagtgatgtatgggtaaataaatggatgagcagtcttcacaacatttgagcgtgtatgtatatgtattccgtgatgcacaggctggagatgtcttcaccctttattaaatgaaatatggatgtgtttgtgcawttctttatgtaattgt

SEQ ID NO: 3213 - DNA, 821 bp, Avena sativa
gactgatcatagaaagatacttaaagattacaactatgatgaattaaagaagcaaaggaagaacaacaaatgtcttttggcgcgaactaggaagatagaatgaaaagcttaagaagatgaacaaacagctgatcaaagccatagttgcctctgatattctcattggtaaagtatctaattcttacaactatgctgaattaaagaagcaaaggaagaacaacaaatgtcttcggcacgaggtaggaagatagaatgaaaagcttaacaagatgaacaaacagctgatcaaagccatagttgcctctgatattctcatcggtaaagtatctaattcaaccaagcgcatccaagagatagtttctaagaacttggctccaagccgatcatagatggtaaacacaatgctatcctccttgatgtctagaacatggttgctgatcttaaacgacacgaggatgggtcaactggcatgctccaagctacatgggcatatccactttatgaggacttgtctggagacaatgctagcttggacaacttagataatgaagaaaaaaccactagaagtgtgaggctctcaacttttactccgatggacgcgatatatacgaggatgaggaactctactatggatgcgattatatatgaagactaggaactctactgaccagtgcctagattgctgcatgtggtgctccattatggttctgatctccattatggttctgatctaaataattgttgcgtcttagtgtcttctcccttatgttggactaacacctccgctgtgaaccttggtgggaaccctctatgtcctggaa

SEQ ID NO: 3214 - DNA, 981 bp, Avena sativa
gtaggtacacggttttatgatgtgcgattggtttcatcaaacacattgcagggttatcacatggacagcgtttctgctctaacgttttatggcttttcgattcgagagggtatttacacaaggaaaacaaagaagaaatgaagaaggctacaaatgagaaacggcttgaagagtaaaaaagcttagtctgccgcacgaaacagaagtttttttttacagtatatgtatggtgcttcttgtctcttcttttttcctgttctgttcccggaatatctttacatgatgatgcacttctctttctttgactcgcttcttgccggcggtgggacatttgacctctgctgccttgggccaacaacaagtcctggccggcctgcgccatttgattgactaggtgcctgctgcgtctgtgtctgttgctgctgctgttgttgttgctgtagctgctgctgctgtgatggaggctgctgccgtggagattgctggttaaattcctgttgttgaagttttatagcgaactgcagatccgagtctccagatgagtccggcagagtggaatcgtcaaattgagcaaggtagtcagcagtagttgtcatggcctgctgttgattccacgaatcatttctgggagtttcagccttaaatggtgtgaagttactagtgagaaaaacccccatctccattcacctcatctaacttttgccataccaaatcactttggccgaaaaaaccctgatcagttgctaagagatataggcttccattatacttgaacatagtgttgaagtggttattacggaagaagacacaaagctctctttcattaagaccctcttgcagacagaacaaaccatagacagtcagctggttagcagtgctctgcagaaagttatcaatcaggtcccattgatgatccgcagctccattttccaagcactcactacttttcccagtcttgtcagcctgctcagcgagaaccac

SEQ ID NO: 3215 - DNA, 990 bp, Avena sativa
caaagccgccgcggcgatcccaccgcctcccgtagatcgagcagcgcggcggcagctggaagcagaggggagatgaggaagcgggagagggagaacccgtgcggggtctgcgggcactaccacaagtgcgaggaaggggagatatgcggggtttgcggccacaggccggcggcggcggatgcggtggccccggcgaggctggactccgccttcccctccgaggtgctccctggcttcctcttcctcggcagctacgacaacgcttctcgctccgaggtcctcaagacgctcaacatcacccacatcctcaacactgtgccagattgccataatctttaccggaattcattcacttatcactgcctccaagatgacagaactctggattttgatggtgctactcagtttctagaagaatgtgaaagagggcaatcacgtgttcttgtccattgcatgtccgggaaaaacaggtcagctgctgtggtaactgccttcttgatgaagtctaggacgtggagacttgcacaatgtttccagtgggtaaaagatcggcggccacaggtccaactaacagaagcttctcagagccagctggctgagtatgaacagaagctctttggacccaacgctgccacgctagctcaaactgcggttctaactgagtcatttccttcgctcggatttggtttcccaaaaccatcaggtgacatccaagtgcccgcgttcaaccagactcctgtgccatccatcttcgagcgagccggcccaaacaatgttcccagtaattttactttcggagccgagggttcaatgggagttaattctgcagggaacaacaatggcgcagttgccccagcttcgactgacaaccagatggacagctcctaagatgacttaacaggttgcctatcatttgtttcggatgcatattactgctaggtctatcgaatatgtcttctggatgtttttgatctcaccagattgagagat

SEQ ID NO: 3216 - DNA, 1043 bp, Avena sativa
cacaagattctaaacgcacaagtgtgggaataagctcgaatcacaggataaccactctcatttcccaaccaagagaatgaaaacatgccaaacgacacacatatcacaaaatgtttttctaccacatggatgctcctgtcagtcgtcgtttgcaggaatatgatcgacattacagggatcggcacatgttacaagtccgataccgagatcgaagcagaaacgtctgcttcatcaggaaatttcaagcaaaggatttcacttttcacaaaagctccgcactgaaaatcgttagggaggcttgcaacacatcctccacgaagtgagtaactagtaatgatgccgatgagtccttagtatcttgaggcatggagcatgggtggaaccaaacgagggccttacgaaggtacaaaactcatttatttgcaatatccgtttgaaacaagtactcatctagcacccgttctattatgttaattccacaccataataagagaaaacctcctcagaccgatctaagctccgtatttcggtgctttccagagcttaaatgcaacctcgtgcagaaagcgctccgcaagcatagcaaagtttccggcgcgctttataaattcttcaaaagagaactctttggccaaatcagaacgtgtcactccttcctgccactgcgccagaagcattggatgatgattcctgacatcatccaaggtctttcctgctttcatagtgtagctctggcgcggacgaagcaacttcaagtcagaatcagtttcggtcgaggagttcaagatgagacaggactcttccttgttttcagtagcagatccatagctcaagatgacagacacatgaattcgggtggcgatagctgaaccgaccggagcagcttccatgaccgcagccaccaacttgtcaagccggttgagatccgtcttcattcctaatttccccagcttgctggctgtgttctccattccaacatgcacgaacactagatcgaattcggaggaatcctgcacattgccctctgcaaatcccagcagacc

SEQ ID NO: 3217 - DNA, 848 bp, Avena sativa
tcgccggaggctgcgcagattccctgttccaggcagtcagtccctctctctgctgagccgagatctacgcgaagcccatttgcaggtgcttcttggaggtgctgggcataggtcaagcaccaacaatgccacaaatatttcagctgatcctctgctgtcttcatttggcctcagcttcccaacatcagatgccgaggaagcatcaaaattgcctattcccgctgatgtatcgttgctaaaagagaaacctgctcagacgtggcagtcaagcattgactcatccctcacgagggaagaacgggagcaaaagcggaagcaagtcagcatcagagcgatatttgtgcaagacctgctgctctccactctatttagagactattaaatcaagacggagccgatgctagcggtggacgggtgcttcctggtgcagacttacagagaccattgctcccaaatccaggtgctgaatgtaatatccatggcagataggcatgctcctggagccctggcctcggtttgcctgcggtgaggaggtggcagagttgatgtgggcatgaggcgtttaagttattgtagccggtctgtatcttgagttccatctcagttcgaaattccgcgtacaatactgggatgatcgtcgtggtgcttgtactgctaccgcttgtatgtttcgaagcattggtttgttgtaccagttacataataatgatgcaattgcagcatcagaaggctatgccgttaatcttttgtgtgggtagtattgacgctaaagaaactgtcgaactatctgaaactgaagtccgatggggttcagcctgtctgatcatcacttgttttcttctccaagc

SEQ ID NO: 3218 - DNA, 909 bp, Avena sativa
cggggtttggttgggttgttagacgagtagggacggagggcgtgcgtccaatctcctctcttttctcattctctctctgtgcccaacgagggcccaacagcacgcggaaggaacgctgcgatggcgatgggtgcggctgtgcgggcggcggcggcggacggcgtagtgactttcctgtgggtgctctgcgtctccacgctcggcgcctccacggcggccgtcaccacctacctcagcctgcacgaggggatccactacgccctcctcgtcaccgtctccatcctcaccctcctcctcttcgccttcaacctcctctgcgacgccctcggcggcgccagcttcaatcccaccggcgtcgcggccttctacgccgctggcctcaccaacccctcgctcttctccatcgcgctccgcctaccagcgcaggccgccggcgccgtcggcggagctctggccatctcggagctcatgccggagaagtacaaacacatgctcggtggaccctcgctcaaggtggatccccacaccggcgccgtcgccgaaggggtgctcaccttcgtcatcaccttcgccgtcctctgcatcatcgtcaagggaccccgcaaccccatcgtgaagacagcgatgctctccgtctccaccgtcagcctcgtcctcaccggcgccgcatacaccggcccctcaatgaaccctgccaacgcgtttggctgggcgtacattaacaatcgacacaacacatgggagcagctgtacgtctactggatatgcccctttgttggtgccattcttgctgcgtggaccttcaaggccgtgttcctgccactgccagcgccatctaagccgaagaccaagaaagcatgatgaactcaaacaagaagttcaactcagcaattggctagaaatgttgat

SEQ ID NO: 3219 - DNA, 552 bp, Avena sativa
ttcccgggatagcaaggtcaggctcagaccgcacccgcgaccccgatctggtcgaatcgaaaatccgacgagcactcgcaccggcggcggcggatatgggaggtgagcatggcggcggccacgccggaggcgacttccggcagaaggtgtggagcatgactggcgggccctactgccggcccgtgcactggcgccgcaacacagccatcgccatggtcggcatcttcctcgtctgcatccccatcgccatgaaatccgccgagctcgagcaacgcccgcatcacccagtccgtccgatcccatcccagctttggtgcaaaaactttggcaagaaggagtactgaaggatgcaccgagttgcactgagaagtcctgcttttacctccttttgtcataatcgactgtgctcagcagtgaacgctggaagaagtatgctaccattagcatgtatgctagatgtgtcatgtaactcttctgacttttatcatcacatacaaggagtgcctcttcgctattaaaataaaccctgcataagcctctatggaaaaaaaa

SEQ ID NO: 3220 - DNA, 518 bp, Avena sativa
atggtggaggctgccgttccggctgatccattactgcgcttggaaggtgaagccggtgtggtcgatttccatcgctgcagcgttccttgggatagttgtgctggggaggaggatgtacaggatgaggcgtaagaccacgggacttccccagattaagatcgcatttgatgataagagggcctcccagtttgcagaccgcgcagcacgcctcaacgaggccttcttgatcgcgaagcgtgtgcctgctctgagaacatcgtctggtgctgcactcccctggtcaatgatgcaagagagatgatccagcctgctcgaagcacccccagccttgttgcattagccagctacaggaatacatgataagatcaaaaattagtaagagcatcactcccttgatagtgtttctcatgacgacgcatcgaggatgtcgactttgatagccgatctgttacatatactcttagtttagtgcactaccatgagtcctcgtcttttgtttatttctttgcttttgtgtt

SEQ ID NO: 3221 - DNA, 742 bp, Avena sativa
aggatttcttctctgtctcgcctggatggccgtggtggcagggggtgaggcgcagtggtatggagtggtggctttttctccttcctccggccggctgtggcggcgaggggacgaaggagatgaacgcagcttttgattcttcttacttgagatggtgtcggctggggcaagcacatactatagtgcaggtttgcctaggctgtcatggtgacagtataggcagggatgcccacatctccactagcccttgctggagatcggaggagacagggtctccgtcgtctgctgctccaataggttctcaactgcctgattttatctctctactggatgtagctactaagtcttgttggtgcacaaatgatcaattgcgaattgctgttaaggcggtctttgcaatctttatttcgctcgggcatatgcgccggaggtgggtgagatcgcctctgatgtcgctccccagatttggcgatgaagatctctttagattgagctcggtgaagcctcctctatatctatagctcaatgttcaacctcgcgtccctgagccatcacgactactggttgagccgctggatttttggttggcttggcattgtgaggccctagaagaactcatttgcaggagtggcgcgtccatgttctcgatgaacttcctgataggctccatttgcgttcttctgctcagttttactttctcttgtgtgcatctagattgtaggttcgattctgatctttgaag

SEQ ID NO: 3222 - DNA, 552 bp, Avena sativa
catcgacgacatctccggggaggacccctccgccgtcggcgtcacctggcacctcgagtggaaggggcggccgttcccgttcagcaggggctgcagcttctaccggtgccagcccgacccaaatcagcaggaccggattcagatcgtgtatggccgggactgcgtggagccggcgaccaaacccggcgagctggcgctggtggccatcaggggagtgacgtggatcctcgagcggtttccgagccttgccgacaggctctgacagactccattcgatcttcctcacgacaccgtagaaacaacgagctcggatgatctggtcgcaatgggttggagcttcatcgcaaaccaaaccctctctcccaccttgccctccatgcgtctgcggttctgaaaaaaacagtgtacgtgtgtcgagtgtttcgctgtatttatttaatagcccgcagcggtttcagtgttgctcaactctgaaagggagaagctggaaaatggaggatttaccaaaattcgctgggttagtccaagccaaattttgtaaagttcgatcaa

SEQ ID NO: 3223 - DNA, 536 bp, Avena sativa
acgaggacgacacgtaaggtcgatggcgagccgccaggctcctcggcgagacgatggcgtggcggcgagcccccgagcctctcggcgagacggcgaccacggccgcgggcgagcccccgagaaacttggcaaagcagagtcggagacgacgacgcggaggcggcgagcttctgagcaactcgagacggtgtcggtgccgatgaagacgaagtggtcccgtgcggaacggaactccggccgaagctatactttgccccgctttgggcgccaactgtcgttgtattgggaacggcagtacctggggaggttagatagaggtgtggggactagcagggaagctatcgacggtgcccgcaggcgggattggatacaagcgagcgtagcgggacgcaagaagtacccaggttcggggccctcgtggtgaggtaaaacccctactcctgcctgatctgtctatgcgggatatatgagttacaagtgatcctcaagctgtattctttagctactgtcttaaatgcactgagaccaacctatca

SEQ ID NO: 3224 - DNA, 945 bp, Avena sativa
attccacctactgtggcggatacaaagttgaacttcctaaagtcatacaagcgtcctatcccaagcatttacagtacagtcctacaagaacttttggtgcagcaacatctaatgagatacaaaagtacctaccagtacgatcctgtgtttgctcttggctttgtcaccgtctatgaccagcttatggaagggtaccctagcaatgaggatagggatgccatcttcaagtcatatgttacggcattaaatgaagaccctgagcaatacagagctgatgcacaaaggatggaagagtgggcacgctcccagaatggtaacttgctagttgaattttcttccagagacggggaaatagagtctgttctgaaagatatatcagaaagggctcagggtaagggaaacttcagctacagccggttcttcgcagttggcttgttccgtttgcttgagctctcaaatgcaacggagccaacagtactagacaagctttgtgctgctctaaacatcaacaaaaaaagcgtggatagagacctcgacgtgtaccgcaacttgctctcgaaacttgttcaagccaaggaacttctcaaggaatatgttgagagggaaaagaagaagagggaagagagattggagacgccgaaaccgaatgaagctgttgcaaaatttgacggataccctattgcatgatgcattaactcggcctttaccagaggagagctttggacggataacagatattaacagttacatctggacagcgtagagaaactgtcaggggcatctttggctgctctttgtgtggtgtagtactctgccgtacaagaagatccagattatttgtagtattgagtttgctgttttgtaatttcttcattcctctgttcgaatgtaacgttttcttcacctgtttgacaatatacgaagaggcacaagctgagaaattat

SEQ ID NO: 3225 - DNA, 482 bp, Avena sativa
agatccgggcccccttggtgcgccgctgcccctatcttcttggcttgtcatcccgagtccgtggcaggttctctggtgatggtaagtggcttttcctggtgtggtgtcggcgtgctactgccattctggctctctggcttgctctgcttctcttccagatccttgagctccatggtagagattgggattggagggtgcagggcagatgagcagctgggtaggcgttggagttctagagccttttcttcatggagcaattcctccaagtctaatccaggatttatttggccaagatggcctggtcaaagccggtgtgctccggcgttaattcaacctcctctgagaggccctgttcgagctcgggcactgggggcttcgccgggccggagacaagtggtttcgtcccgtctccgtccatggctgcagtgctctgctccctctgctccgcggtaggagagactggactaaattgtaatctaaaa

SEQ ID NO: 3226 - DNA, 702 bp, Avena sativa
tgaaagaccactctttcgtctaaggatgcctaaccgccgcaccgatccttcggggggggcgggacactgcgaggtgggtagtttatctggggcggatgcctcctaaagagtaacggaggtgtgcgaaggtaggctcaagcgttgattctgctcgtgagcgtaatggtataagcctgcctgactgtgagaccgactggtcgaacagagacgaaagtcggccatagtgatccgggagtcccgtgtggaagggctctcgctcaacggatcaaaggtacgccggggataacaggctgatgactcccaagagctcttatcgacggagtcgtttggcacctcgatgtcgactcatcacatcctggggttgaagaaggtcccaagggttcggttgttcgccgatgaaagtggtacgtgagttgggtttagaacgtcgtgagacagttcggttcctatctaccgttggtgttaaagggagaactgcgaggagccaaccctagtacgagaggactgggttgggtcaacctatggtgtaccggttgttatgccaatagcagcgccgggcagctaagttggtatggaagaactgctgcgccgcgggaaatccttctctatacaagttctcgtacgaggtttttgaacagaacttcgataggcgagaggtgtaagcaccgcgaggtgtgaagcgatctcgtactaaacgaaaaa

SEQ ID NO: 3227 - DNA, 612 bp, Avena sativa
ctgacataaagaaaaaggctgaagcggttgacaggttctgcaaaccgattatgaccaagccaaagccagcaccaaagcctcagaccccaccaccagcggagaccccagcacctgaggctcaaacaccggaacaagaatcaagtggagccagtgagcctggcgaggcggccagcgagggagctgatcaggaggaggcttctgcagagcaaatggacaccgacaaagccgatccttctcaagcatgaggactgtccggtcagaggagattttatgtcaatgatcggttgcattctcctgtgcttttggtctgctagggcaacaaactaggaggaacggttgtttttacatacgttgtgaggatatgtaatggaacatggagagttctgcggtgtttctagttgtattggtcagtaagaactgccttttcttttacgactggtgaattggacgatgcatgcaggattaagggcgcccttccaggttttggtgacccgttgtctcggtgtaatttttattgagatggtccacaacgttgtaattttacgtatggtggtccatgacgattcagaaatttttggtcactgttcaaaaagatttcttacttagctagaa

SEQ ID NO: 3228 - DNA, 594 bp, Avena sativa
catgcaccgcgacgaggaggtcgactactacccgtcccgccacgcgccgctccgtcaggcagagccaccgagcttccccgtgccaactagacccgtggtggggaagagggagaagaccaggatcaagaaggagaacgacttcgtgcagcccggagagaggtaccggagctgggcaccggacaggcaggacaggttctgcaagaggttcgcggatgcgctgggacatcccaaggtcagccatgagctcaggatcatctggatcaacttcctcagacagtgtgacgagtcgtgtgggatgaaggtggccaaccgcctcaacgtcaagccaagcatgtgatccatgcaaggatggactggatatcggtgtgtgtaaaagtttgtgctgtagtaaaagctttgtgttatctctcctcgaccaacaataagagaccatgtctagatctactgtatatggatcatgcacggggtcaattagtagctactctgctattaataagttattactatctgctgtcacgtcccagtaatgtacatgtaatctacattaagattaaaaagggttcttgctgcatgcatttatatatggaaaaaaaa

SEQ ID NO: 3229 - DNA, 715 bp, Avena sativa
gtacgaggttgctgatgtgatggaagaatctccattcaaccaaaggaacatgatgatttgggctctgatggttttggtcttctcaaagggctacaaaagggatgttacagatcttaaaatgaatctagctgttggcatagggaatgatgacattgtcaggcagcttgtgatacagaacacaagatctcgtgatgtaatcattgcagaagctcctaaagaggctatggctcttgccagcgcagtgaggaagttcactaagtacaaaagaattacggaagaactcctgaggcggcgagaagcaactgccatgaactgtgaactccgtcaagatcaccgtgatgtgcgccaagatcaccgggatgtgcggcaagatcaccgggatgttaggcaagagcacactatagcacagtataagcgtgagctggattcgtggtatgacaagtacagcgacctaaagtccatgtatgagtcacgctatcctggcaagcagtctgtggagaccaggtccgaggaacagcaacaggaaacacaccatgaggagcttctgaacaaggagggtaaggagtgtgatgagaaatggtccaatgacgatacaaagtgttacgaggaacagcccaaggagaagcagcccaagggctatcctggcaagcagtctgtggagaccaggtctgaggaacagcaacaggaaacacaccatgaggagcttctgaacaag

SEQ ID NO: 3230 - DNA, 651 bp, Avena sativa
  modified_base (582)..(582): a, c, t, g, unknown or other
ggcgtggcgacgtcgacggaggagtacatgcgccgcaactacgccaacaatgtctccgagtacaacaccgtcattgggtccctcgtccagcagcgcaggccgtacctgctccgtgatgcctacgacgacatgctacttgacggggtgcagcctgtgcgggacacgtttcacaatctcatagtgggtaccatgaaaggcagccggctacaagatgctttctacttccgtgatcagatgagggaaatgggcttgcagcctgatgttaacctttacaatttcctgatctctacttgcgggaagtgcaagaactcagatgcagcgatcttgcttttagaagaaatgaaagcacatggcgttaagttgaaaggggaaacctacatttgtcttctgaatgcacttgcagcaactgggcgtactgatcaagtttatgctatagttcgtgatatgactgctgctggacttggattaaacaagtactgttatgctggactaataactgcattcaagaacaagacacctgccagtgaggatactatggcgaaaattcttgagttcgtccagcagtcaaaaggttggcagtangttgaaagaatagcaaacgcagcgctgagaatataatgatgaatgtctcagaggaagagctatacaatc

SEQ ID NO: 3231 - DNA, 835 bp, Avena sativa
cgagcgagctgctaaggcgactgcagaagtccgtaaaaaggctgctgccagaggtgttactttgcgcaacggacctcctggaaacagtgttgcggaacttaatcagattctcaaccttatcaactcagcagcttctgtttctgctgcttctcctgctgccaacactcaaacaactgaatctgaagggccgcagtcgaatggtcctgccctgaatggtgcaaacgaagccaaggatacaaatcccctatccgccaaggttgacagtcaaactccagtaggattaggtgcttcattggagctgaagaagcagaagtccaagcagaaagctcagtaaaaaaaatctacgatggttgttttctcactacaattttggacctctagggtgtttttttacccataggattgtcacgtccacatagtggcagagtcatttttatttattttgggtggggttcttaggatgagtgaaataataataatgaaggatgaagtgaagagaattcttgtgataggactgctggtgggagtaatgatcaagccctctcagtatctagatcatccttttgagccttaatttctgtaaactggccacactgatttttttggaccagcgaaattaacaggttgagggttttattgaggcatagcagggtaaatatcttatattttcggtttgctactgtcaggaggggtttgtatcaggaaatatttcgtatcaccatattctggagttcagtcaccttaattcgttgatgtcgacagacacttcaaatccagatcttttgggttgtgctactgttatagtggtgttgcctgctttagtgaactaaaaaaa

SEQ ID NO: 3232 - DNA, 573 bp, Avena sativa
gaccggtggatcctgggagtcgagttttaccaggcggcgacggtcaaggggtaaaaaggccaagaagaggctgccagaccccatagcagaagaagaggtccagatcagcgcgcccgcaaagcctgacgatgctgcgggcttagaagctgaagacaggagcatgatcgggtggggaagaacgacgaggcggtgccgcagggcgagatgcccgtcgggtattaccgtcgccgctgcatcctgagaaaaacattggccgcgcgattggcgctggggtattattcggcggtaacagtctccgactgggtgcgatttcttgtcgcggtcaggagtgtacatacttggcttgtcaaatttggcctttacggaaaattgttgaccctagttcataatgtatttcctgcggcagcagtaaccttgttcattcatctcgaaagggggtataggtgagactgagaattcttccaagttcagtaggtcgtgctcttcttgctttaatcaagtagtaccagcattaagattttgttcttagataatgtcaaagacgttagtatattaatctcggtcaaccagcgt

SEQ ID NO: 3233 - DNA, 940 bp, Avena sativa
cccgtgtccttgcttatgaatttgccactatgggttctcttcatgatatgcttcatggaaggaagggtgttaaaggtgctcaacctggtccagtcttatcatgggtacaacgggtgaagatagctgttggggcagcgaaaggtctagagtatcttcatgagaaagcacagcctcatatcatacacagggacatcaagtccagcaatgttcttctttttgatgacgacgtagctaaaatagccgacttcgatttgtcaaaccaagctcctgacatggctgcccggcttcactcgactagggttctcggaacatttggataccatgcacctgagtatgcaatgactggacaacttagctccaagagcgatgtgtacagtttcggagttgttcttctggagctattgactggaaggaaacctgtcgaccatacattaccgagggggcaacagagccttgtcacatgggccaccccaagactgagtgaagataaggttaggcaatgtgttgactcaagacttggaggggactttcctcctaaagccgtcgcaaagtttgctgctgtcgctgcgttatgcgtccaatacgaggccgattttaggcctaacatgagcatcgtcgtgaaggcgctccagcccctgctgaacgctcgagcagcccaccccggagaacatgctggtcgttaagctccattccaaccttttgtactccgtatgatatagggaaagaaggagcatgtggcgggcagtgtgtgtgtatgctctgtgattattcttctcgagtcgtgtgaccctcaaaattctagtatacagtaccggaaatactggattctttctatctgttgcaggattggctattggtgacttgactaacttgcgtatgtctccatggaacattttattagtcgctaaaaaaaggaagaaatgaactctgcagtttaagg

SEQ ID NO: 3234 - DNA, 679 bp, Avena sativa
tagccaggaagagtatttccagataattatattttcctcgaagctagaaacataaccgcaacatccttaaaacctaatacatctaatgtgaaaagtttcccatgtgtggaaacatgattacatcgtcttgctcttgtgcccccattgacatgagttcacaactattagcttttcagctggataggtacaggcaataatatactattagaatccgacacagtttttcccaggcttgtcttcgatgtggagatggcaatacgaggggctggcattctcaattaaccccttgatgatcatgatcatagggtcaattcttcatggatatattctagtcttcccggttccgtggtttattcagaagacagctgctgcttttttgttttagaaagcaacgtgataatcggcggcatacccatatcgcaatgcatgatgcgtcgtcttctgatggaagtatatattgcggaggcatctcagagcgttcaaacaccagctgcttataccagtaaaataacctgctggtgactgttgtgtctttggacggaagtaaatattggtgacgtatccgcacaccagctgcttactggctaaaagccccgtgcgcactcgctgggcaccagatggtccaacaatatgcgctcatgttggacaggcaccagcgctaagtataactgatggttgt

SEQ ID NO: 3235 - DNA, 709 bp, Avena sativa
gtatcctgcccattttcaccaacttataagtattctaccaaactaaataccgtaccatgtctaatgtaacatgtcttcatatattgaatactaattatatgaattcctaaatcttgtagaagaaagacaagtacaacaatgaggaccctagtccaattgagttcttcaaagagacccataccaacaaaaagacgggatgcatgagcgcgactgcacttgatgcttataccgcgatggcaaataaaaaggactgaagcacaaccagcagatgagctgctattgcctgatacacagattatggctgaagttctaaaggagcatagctcgtcaagcaccttcctctctagtgtggggtgccaatcaagatctggaaggtctagaacatctgcttctgaagaacgtgtccgagaattagaagaactagtaaagcaacaaaggagagaggcaatagaggcacatgagatgtaccagcaacaatcaattgagagagcaaaagagcaagaggaagcacttgaagagatgcaaaggaagcaacaagaaaaattgaaaactctaaagaagagtcaggatgcatatgaaaagaagcaacaggagcaggacgaacttcttagtttcctcttacgaaaacgtgcaactcaaaactaagcaccatatttgatggtgcatgaagaacatcagtatatcatagtgcttttctagcattaaccta

SEQ ID NO: 3236 - DNA, 959 bp, Avena sativa
tgttcatatgatcaaatcgtgattacttgaacaaaattagtctttcgctcctatctgacgacctttgctagaaattcctgtcgatttactcattttgttctttgccttttaccctctgtgctattgtttgtagttgatgtattaattgttatttaaggacgatgaagattgatatttggtctcgttcgtcgtaactggcatttgtttgccttgccgaccatcctgctatatcaccacccataatctgagtccttgtactctatacattagcttcttagtttaccttttttgaatgattgtcaggccatttgatctgttttggttggttgattatcacaagtgcatagttcataatatgtactctgggtgtcaccagactgttatgaggatgatgatttctaatttgtcgccccagtcttaggtgtctacctcggtggatctgtgctgattgacataattctgaatctgactctgactctgaacgtttaacttcattttttgtctacatgggtttttttcttgatcttgtttcttgtaagttttcaattcagaatatggctgaacgttgacagctaggggttatcacttcgaaaatgtaggagcatgatgatttcaaatatgtcgctccactcttagtgtctgcttcggtggatatctgctgattgacatactcttgtatctgactctagatttatttttaattgcttggaaatttgatgtattgcatcctctaaaatattgttatgggtactaaatttcaggtttgtattctggctccctcttgttgtgcttatctggttgctaccttgaaccccagtgctgtgcatgtatgaaagctgattcaaacttatgtgcatgtcgtgaactagacctgcctgccacccatggtttggaggacacctgtacctgttgtaggtctcaactgtaccaaataagaagcactttgtaaatgtataata

SEQ ID NO: 3237 - DNA, 555 bp, Avena sativa
aattagggctgcctatgcagatcaggccgaaggaagcattttccaggtatttgaggggcaagcttgaaagccttcactattggtggaggactggttctcttccaacagataacaggccagccaagtgttctatactacgcaacctccattcttcagactgctgggtttgcagctgcatctgatgcttgcaaaagtgtcaattttgattgggctgttcaagtttctgatgacaggtttttgcggtttttaaagtcgacgatcttggaagacggccattattgataggaggtgttagtggaattaccatcgcactgctcctactagcagcatactacaagattctgagcggctacccatatgttgcagttggtgctttacttctgtacgttggctcgtaccaggtgtcgtttggtccaataagttggctgatggtgtctgagattttcccgcttccgaacaagggggcgcggaatcagccttgcagtacttacaaatttcggctcaaatgcgttggtgacattttgcctttctcacccttgcaggggtaccttggac

SEQ ID NO: 3238 - DNA, 894 bp, Avena sativa
  modified_base (21)..(21): a, c, t, g, unknown or other
ccgtcgccatgtcctcctccncttcggcagcggcagcgcccccgccccacccgcagggcccctctacgcggcgtggtgttcgacatggacgggaccctgacggtgcccgtcatcgacttcccggccatgtaccgcgaggtcctcggcggggaggccgcctacgccgcggcacgtgcggcggcgggggcgccgtcgacatcctccactgcatcgagtcctggggccccgacgagcagcgccgcgcatacgaggccatcgccaggttcgagcgcgacggcctcgaccgcctccagatcatgcccggggcctcggagctctgcgggtttcttgacgccaggcagatcaggaggggtttaatcacccgcaatgtgaaggaagccgttgatttgtttcaccaaaggtttggtatgacgtttgtgcctgcattaagcagagaattccgcccctataagccagatccagctccactgcttcatatttgctccacttggaaacttccaccaaacgaagtgatcatggttggcgacagcctcaaggatgatatcgtttgtggaaagagagctggtgctttcacttgcctactcgacgaaacggggcgatacggccctcatgattctttgcctgaagacgttaagccagacttcatgatttcttcactccaagaagtattatccttgttggaggaacatttcgagttggctccggtattgtcggccgacagtagaatctgacatgaattatgggttgtaagctgtcttcccagcgaggaaacatgtccgtacaccttgatgtaatacggtacatgttgagaagtatacatgtcgagaagtgtcggtcggtttatctgagtacgaatgcagcatggaagccacaaaagattcttcgtgattgctt

SEQ ID NO: 3239 - DNA, 688 bp, Avena sativa
ggagcagatacttctacattaggtaataagcgtttggcatcagaggagctggttaatgactgggatagtaaaaggctaaatccaggaaatgctaattatccactttcagaccgagctgtacagacagcttattcagggtatgacaatgggaactcaacggcatcaccctctggacaagtttcagcgatgcctggtgtacttggacaaggagcaaaatggcgcgaaggagactggctatgcagcagctgcaacaatcataattatgcatctcgtgcattttgcaacaggtgcaaatctcagaaagaatcttcagttcatcctggtgcgctatagcttgcttgtgctttttgtgactttgtcatccaagtgttggagttccctgcctctgctgcagctgattagtagctgcgccaccaggattgttgtttgtttgggattttgcttgcagtgcttacactgccgttacgtctgtctgtctgagtctaatattgtttattgaagcttgcttttgcttatgtcgcgcgatagaataaaatgttcatgtatgtcaagtgtaccatctgagttgttggaacaatttattagttcattagtaccttgacggctatgatgtaatgtaatgctggatttgtaaattttgagtgttcattctggattttattatattctgaattaactttaaaaaaga

SEQ ID NO: 3240 - DNA, 630 bp, Avena sativa
gctcttcagtgtgccattcttagccccacgttcaaagtcagggagtttcaggttaatgaagggtttcccttttcagttgctttatcatggaagccagatgctcagaacaatgaatcccaacaaacagttgtattcccaaaggggaatgcaatccctagcatcaaggctctgaccttctataggtccaatacatttgcagtggatgttttgaatgttgatactgatgatttgcaaataacacagaaaattagcacgtacacgattggcccttttcaatcgagcaaaggtgagaaggctaaactgaaagtgaaagttcgtctcaacatccatgggattgtctctcttgaatcagcaacgatgctggaagaggaggaagtagaagttccagtttcagctacaaatgaggcacccaaagatgctactaaaatggacacagatgatgcaccacgtgacgatgacaatatgcaagaacctaaggtccctacagatactgccgagggtgctgctgaaaatggggcgggtgaatctgaggaaaaactgttccaatggagactgacacaaaggtcgagccaacaaaaagaaagttaagaagacaaatgttccagtcgctgaaacggtgtatggtgcgat

SEQ ID NO: 3241 - DNA, 743 bp, Avena sativa
ctgatttcttccttccccccaccagcacagcgcaagagcccgagacccttttcccctcttcttctccccctccccactcccgtcaagaacacacagacacgcgaagcagattggagccggaactcgacctgataatcgaagcttttctttctttcactcatctcgaaatggcggaggagaagggcacgctgcaggcgatgagggagtgggtcgtggagcacaagctccgggccgtcgggacgctgtggctcacggggatcgcaggatcgatcgcgtacaactggtccaggcccggcatgaagaccagcgtcaagctcatccacgccaggcttcatgcgcaggcccttaccctggcagccttgggtggttcagcactggtggagtactatgatcaccagtcaggttcaggatcaaaagttcacagctacgcgaagcagttccttccagctgacagcaaccccaaaaaggagtaggatacaccatgtagcaaattacaggcagccacccagctgatatggaatatgttgatgctattacctgaagaaacaatctggcattttgctctgtaggctgcctatttccaatgtataagctactgaaccaccattcagatgtcgccatgtgcagatgcgtggtaaccggaaacatgtaattttcctgaaccgcacatgaatgtgatggatgaaatgttaccctcttatattactcatgaagtaaactggtaccaagttagtttgataaaa

SEQ ID NO: 3242 - DNA, 887 bp, Avena sativa
cccgggattgcttcccttcattgactctttccccttcgacacgagcgagcgaacccgcgggcaggagaggaaagaagaaaaataaaatcgcgcgttgatttagacgaccagaccgaagccagcgaattggagatcaagaggaggagcaggaaggaagggcaagggaaattttcctagacttcgccgactggaaggggagaggggagaagagccttcgtcgaccgcccgccgccgccgccagcaaggagtttgatttctcaaggggtattttggatgggcgaccatgtggttgtgaacgtggacggcttggcaaacgccaaggacgatggcgtttctgagaagccgtctgaggctgtgactggtgcgtcagtggccgcgtccacggttgttgatttgcccgaggaggatgctggtgaggatgagccactcatccaggctgcagagtgccgcatatgccaggaggaggacagcatcaagaatcttgagaagccgtgtacttgcaacggcagcctgaagtatgctcatagagcatgtgtgcaacgctggtgcaatgagaaaggagacattacgtgtgaaatttgccatgagcaatataagcctgggtatacagcgccacctcgtgttcaaccagatgagaccaccatagatataagtggtgattggaccgtcacaggaactcctctggatttgcgtgacccaagaattcttgctgtagcagctgcacagcgccgtcttcttgaagcagagtacgacgagtatggtggtaatgatgccaatagtgctgcattcgtccgttctgctgcacttattctgatggccctgttgcttttgaggcatgcattgtcctctcagataatgagggagatgacgatgcttctaccatgttc

SEQ ID NO: 3243 - DNA, 913 bp, Avena sativa
  modified_base (385)..(385): a, c, t, g, unknown or other
tgatacctgaggtttgttacaagtaaaaattgcaaagaggctggatatgggtatggtgttggcacccaaatgcttgtggtactggaggtttttatgaaaggtttcgttgccactatctgtgaaatcatggaatttgctccagggtcctttccgcatgttgctcagatattcagctgtttaatttggaatcatcaattctgtgtgatccgatggatacaaggtaaaattaatatgattcacacatattttttgacagttaagggcaggagtcgcaggactactgatcctcttgataccatcattggagaagtcttgattgctgaatcaaagtcatatctgcataatctttatttggccctgatgcatatcgttggcactgttttanatgcaaataagcaaggtctactttcaaagtttagctgcacatggttatcttggattgatgagaagcaaggtgttgacactatccctgttgttcgggttgatcctccggcagtggacgacaacgctgtcgttgaggttcctcagattcaacagcggggactcttgagtttgagctcggtgtcggataatcaatatctacagctcagtactcccctccctcagatgccagatagactgttgggagaaccacccgcagggcatcaactggtttgtgtcattgaggcctttgaagactgcagttgcggcactttcggatccgacttgttgacggatgggcgatggccgtttggtttcttcggtagtcttcagtgtcggtaccttgtggtatcattagctatttttgtgttgtgccttttctgctacttgtaccttgctctaatttttggagccacgatgtactcggtccgttaatattactatatctttctgttacaaaaaaaagtcagagaagagcgacgttaccaaaaaa

SEQ ID NO: 3244 - DNA, 646 bp, Avena sativa
gaaattgatagttgcactcctgtggcaattgatgagatttaatatccttcagttgctaaacagactgagatcccactcccaaggatcccaaggaaaacaaattactgacgcggatatactaaactgggcaaacaacaaagtgaaagcttcaggaagaacatctcgtatcgcaagcttcaaggacaagagcttatcaaatggagtgttcttcctcgaacttcttagtgcagtccagccaagggttgtgaactggaaagtagttacaaagggggaagccgatgatgagaagaagctaaatgctacatatatcatcagtgttgcaagaaagctgggatgttctgtcttcctactgccagaggacattatagaggtgaaccagaagatgatcctaactcttactgcaagcattatgtactggagcctacagagaacgccactatcacaatctgatatgtctgaaccatcagagccatctagtatggcttcggatgttgcttctgattattggttcggaggatggcgcctcaacagcagcaccatctgagtgtgaagagaaaacggaaatggcgaagcagggtcctgatgattatatgtccgtggtcgtagctctgtccatcattagttctatacaaggattggttggtgc

SEQ ID NO: 3245 - DNA, 903 bp, Avena sativa
ggcaatagttgacagtttgactgaactcttgaatatcttgcgagaaaattgtgtccctgctatttttattcggaagatatttacgcagattttctcatttatcaatgctcaacttttcaatagtcttcttgtgcgtcatgagtgctgctcctttagcaacggagaatatgtaaaacaagggctggcacaactagagatgtggtgcggggaagtgaagccagagtatgcaggatctgcactggatgaactcaagcacatacggcaagctgttggtttcttggtcatattcaagaagttcaggatttcatatgatgagatagtcaatgatctctgcccagtgctaagtgtccagcagctctacaaataagcactcagtactgggatgacaaatataacactgagagtgtatctgaggaggttcttgacgagatgagaacgttgatgacagaggaatcgaccaataatacttcagagagcacctttttattggatgaggaaataagtatgccgatatcacttgaggagatagcagattccatggatgttaaggaatttcagaacgtggccccaccgtcagaactcgtcacaatacctgccttccagttcttgaagagctgagtcgtccaaaatgcggcctgttccttgtgttagcatattctgctgatctgcgccaggagatctctgtattcttccacatcaatgttgtaaatacaacctaggtttttccttgcagtcgtgttgtgccatgtaaatcatcattctttcctagataggttggtcttctctcccaatttttgttggctgggttggggataatttgttcgcctcccaaatgcacgtcgtgagagaatgaaattattcattctttgtagggtggtataggattgaagcattatgctggga

SEQ ID NO: 3246 - DNA, 891 bp, Avena sativa
ccgaagctgaagccgaatctaagcgtaagcgggaccttgagcgggagaaggctcgtcaggccttgcaggagatggagagaactgtggaaattaatgacaacgtccatcccaaggatctagaaatgcttgggacagctaccgcagaacatattgtgagctctgttgacgagacaagtcctgagcactcccaggatggcatgcccagtttccttcctggttctggcagcatgttggaaaaacttggactatttatgaaagtagatgacgaagaagatgatgaagaagaagagccaagtgttcccagttgcaaagaaggggaggaaggggaaatcaactaatgtccgttggcatgttctagaggtactgaccttctggtcggggagacagaacaatcgcccatttcagcctatgcacatggggcaattgctggtagctatgcacatggcagacatttttctgggaatgggaacaggcgcccttgatgccgctggaggtgctaaattatgtgcttgcaggatgcaggtcacgcccttgacgggagaatggagatcgaggccaccatgtacagctgcaaaacaaaatgctgagttcatctctcaaatgaactgtttctcccagaatcaagacgagcttctgtcgggtgtattattttagataaagctcaagtcgagccttggaaacacaatagggccaaatggttcctgtcacacttctcacctccttgtgcactgtgatctgagtgcttacccccttagcggctagttgtgtcctcagcatagcttttctgtttggttgcttcttcgtgttgtaaattcaaattttgtagtcgaggaagtggatagtttgtttattgggcatctggaagaaacatttgtaaaccctctgatattg

SEQ ID NO: 3247 - DNA, 704 bp, Avena sativa
ctctgctgctcagcaatggaaaaaatcccatgcagcagttaacgatttgtgcacaaaacaagtggctgaagttgaagcacttgtcaggggagcaatcgaaaacaacaagcaacacgaggtggacgtcgcatcatctcgtgccttggctgaagagcaagcatcggacagtagcaaagaaatactgcaggacattgacaatctactagaccaggcacgcaattcatcgtcgagagtggtgtcaacggtggaagaacatttggtagagatagagcacctgcaggagaaccactctgtccaggctgcaggtgtgaactcgcacgcggagaagactttccaaagccgctacagggactatgagccaaccggcgaaactcccatgcgatccgagccagaagttccgagcaaaggcgcgatcgagtcgcttcgagcgatgcctatcgagtccctgatggatgaattccgcgagaaccacccctatgaatcgagcaaggagcccaagccgtcgctcatccctcgctcgccgcttgcgacaatcaactgagatgatggttgtatacgcctctgtgtgcagtgtaatcttatcttatttgttattaccaggacatcagatttctggctttgatgtccttgttgtgctagggtttcctgggctgcgagctgtcttagcttcacccgtttccagtttagtagaatactagaatgta

SEQ ID NO: 3248 - DNA, 758 bp, Avena sativa
cacacacatatatgatcgatcgacagcgatgcccggcgaggtcgacggacggccggtttgattcagacttcagagaccggccgacacctaccgaatcaaatatcacgattgatctgctcgccgaaatcgagcaaaagggagatttggtttgatcgcgagtgtgtgtgtgtatatggatgcacgtctctaatctctgcctttatctgcgcgttctcggttccacattagttttccaaatctttttgactagtagtacgtgttgacctagttaatctgccacctaactatgcatagtaggtgtagctagcttggtaccgggtcttcgtcgttaattattagtaaccagtccagcagctaggcaactcacatatgtgtggttaattacacgtgcaggttgacccgccttggtccgtaccagctcagaggtcccgtcgtcgccggcggcagcaagaccctcggtgtgaagaaggaagcggaagcggcctaggatatcgatgacatgacatatatgttcacttggtgctcttgattattactagtattactccactaatcgttctggttattgccagtgtatattcatactagtatcaatgtttgttgaactactagtacgtactacagcacgatagaaatatgtatagtacggtactaactacaaagcttgatgtatacccatgtgatatggctagctacgcgtattgatgtatatgtaccactgttctagtataatactacacaatttgttcamggggcaa

SEQ ID NO: 3249 - DNA, 738 bp, Avena sativa
gcggcatcctctgctcgtacgaccctaacgtgcgcctcccgctctggccctcggagcaggcggcccgcgatggcatcatgagcatctggaaggaggctgatttcatcaaggtcagcgacgacgaggtggcattcctcacccagggcgacgccaatgacgagaagaacgtgttgtctctctggttcgagggcctcaagctgctcatcgtcaccgacggcgagaaggggtgcaggtacttcaccaaggacttcaagggatccgtgccagggtattccgtcaacaccgtggacaccaccggcgccggtgacgccttcgtcggctcgctcctcctcaacgtttccaaggacgactccatcttccacaacgaggccaagctgagggaggtgctgcagttctccaacgcgtgcggggccatctgcaccacccagaagggtgccatcccggcgctgccctccaccgctgccgccctggagctcatcagcaagggcagcaactaagcgagccggtcgtcgtcatcgcgcccccggggtcggatttagtgggatttagctgcattttatttatttagggatgagtgtggtgcgttgggtttaaatttagctttctatgagacctcgtgggcgcttaataaagagcaagcgtgtgtgtggtgttttccttgtgtaaggaggctatttgcttcgtagcctttggcagaaacttatcaatgagtcttggaatgaatggatgtctgttaaa

SEQ ID NO: 3250 - DNA, 614 bp, Avena sativa
aagcaggccatgtcacctggattcaaggcatatattcagcaggtcaaggccaatgctgttgcaattgcaaaccatctgatgagcaagggctacaagttggttactgatggaacagagaaccaccttgttctctgggatcttcgccgtcttggcttgtctggtaacaaggttgagaaagtatgtgatctgagtagcattacactcaacaagaatgccgtcttcggtgacagcagtgcattgtcacctggtggtgtccgaattggtacaccagcaatgacctcgagaggtttggttgagaaggactttgtgcagattgctgagtacctccaccaggctgtggccatctgcttggacgtccagaagcagcgaggcaagcgctacgtggacttcattgtcgaccttgagaagaacaaggacatcaaggatctcagggcggaggttgagaagtttgctatctcgttcgagatgcctggattccgtgtgcgtgacatgaagtacaaggattaggctgcagtaccatggaaaaccatcttcttgcagcatggcaggaaatatgtgattggttttgccgtgtactatatagttggtgtgccatctagctaggccggtcataa

SEQ ID NO: 3251 - DNA, 667 bp, Avena sativa
agtgaagctgctggtggcaattcaaactgtaatcggactgatgatgattcccatgctatgaatttagttgggtattctccgtcagaaggctctgatgaggacgactctgtccaggtagctgaagctggtgatctagaggggagtaaagaacttgctcttgatgttgtctttgctattgctggagcagcagaaccagagcctatttgtgaaaatgctgttcatgtgcaaaaaggtagtgcagaagccgctcatcctagcacggacgaaggcagcgtccaagtatctatggcagaaccagaagcaaagaaagagggtgatgctcctactcaaaaggaaaatgttgaatcagctgcaataaagccagagactgttggtacagaagctgatctaagtgaagaagcatctgtgccaactcaaaaggaaaccttggttacaggaccagttgccgctgtgccagatcaagtggagcatgccagtactgaactgcttggagaagatctaaatttaaagcctggagaagccaagactgaacaactgttgcaaccttcgtccagtgaggatatgactgtcaccagggagcttcatagcagaacaggagcaaaactccaagcactgagcatgcgatgtattgatggaactttggatcaaaaggaaactgatgcagcag

SEQ ID NO: 3252 - DNA, 816 bp, Avena sativa
accatctaggagtatattttgaggctgctggaagtgttcggattcatatttgtgtctacaggaagaaagttgtgggttccgcatgcatttgacttgttcactcctccatcaccatgtatgtttcagaggactctgtattgtgtccagtctggttgtaggctctacctaatgtatttggtaggcctcatagtctgctttggtgtgaaaacaaagagttttgaagtggtacttcttcccggtgaaatgggaacgacggttaaaggttgtcttcaatatacttctggatctcatttggaaggagaactagcaatagttcacctagagaagggaagacttgttaggtgggtgcttacccggaatggagacatagtggactggaagaaggaggcaaccattgatttggttgctgcactcggggactatatgaatgaaaacattctcgacacattttcatccgagccatcacagtggtgttctttccagctacggtccgtatctccaggtggccggtatgtgcttatatcagctggtgtgatctatggactgtttgtggttgatatggtatatgaaacggcggcagcttatccgagtcctgagaagatgggtcgtgtgttccccttgtcagaatactggtcggcgaaggcatgattcagcggggagaaaatgtaacatcgtaggatgctcaggctagcagcgcgtgttttattagaacaaagactatatcctgtagtattgtacgatcaaggatatttgttgtcaacgtcatgtacgctatgtgtaataaatcgcactgtatgcctgactgggcacgtatta

SEQ ID NO: 3253 - DNA, 601 bp, Avena sativa
agcaagtttgagatttggtcagatggattcaaccaacggaaggaggaagaacaggagttatcttacttggacagacaatatggatcaggctctcctcgatgttcttgtcgagcatcacaataatggcaatcatacagcaaatggatggaggccatctgcatactctgcggcagtgaaaaatgtgcgcgagaagtgcagcgtggagatcacaaaggagcacgtgtgctcgagatgcaagacctttgacaagcattgcagtattattagcaagttacttgcccattctgattttggatgggatcaagacaagaacatgctcatcattcacaatgaggatgcttggaaaatatacatagcgaaaaacaaagcagctgcctgctacaaaaagaaagttattaagaactgggatgcaataagtctaatattctcgagagattatgctacaagtgaagaagagagcgcaggaggacgaaaatgcccaagaaatggcattgaagggcgctgaagatgtccgggagctaactcaaaactcaccttcaacatctggacctagcaagtacaaagatcaggggtggaacgccaacatcaactcgacccagtc

SEQ ID NO: 3254 - DNA, 565 bp, Avena sativa
cccaattgctaaaaaagcagtttttagcaatccggggaaaatattaggaaggctcttggagatgctctaagggtgagcaaggggaatgaattagagaacgaggaatactggtgatcttagtttaatctacagcattgattcatgtaaactattttgagaaactgaaattcatgcaaacaagtaaggtgtatatgcccaagttaatgtgagaatttgagatgcaaatagattgtgattattatttcttgtagatgttcttcctgcttgctatcttttggcatcccttccagcttttaaatgttcacacattcacgtttaagttcaattatgtccagtgcaggatgatgttaaagagaagcttgcaacccgatctgctacagaagcaatgtagaacataaggtctttggtaagaaatgtttagttgatggaccggacctgtatgtgttttgggattgtttcacttgtgtgtcgacctttgatttatgtatgaaattctgtggaattgtatgagaagatgtggattcgtaactctgtttatgatgtaagaggattgattttcaataaa

SEQ ID NO: 3255 - DNA, 892 bp, Avena sativa
aggttaaaatatcagagaagtcaagtcttcttgaggaagctgaaaaaaaggtacgctgaactagcttcaaaggtcgaagagcagcaaaaattgattctgaaacttgaggatgacatactaaagggctgcagttcaactgataggaggagttcacttctgaatgattgggatcttcaagaaataggctcaaatgatgtatcagagggtactgatccaaggcatgcatcaccggaccaagatcaaagttccatgctcaaggtcatttgcaaccagagggaccgtttccgtacgcgactgcgtgaaccgaggaggaactgaggagattaaaggagaagtatgaaatgctagctgtagaattggaaaaacaaagctgataatgttcaattgtacggaagattcgatatgtccaggactacagtcacgagaagattgtttctagaggaccaaagaagtatgcagaagatattgaaagtggttcctcagatgttgaaacaaagtacaagaaaatgtacgaggatgacataaatccttttgccgctttctcgaggaaggaaaaggatcaaagatacaaggaacttggtataagagataaaatcactctcagcagtggccgttttctccttggtaacaaatttgcgcggacatttatattcttctacactattggattgcatctccttgtgtttacgttgctgtacagaatgtcagctttgagctatttgagcataacacctgcacatgatgagatcatcctggacgctggcaatcggacactatcgcatacgctctaaaccagtttataagtataaagatgtaaaagtaccgtcacttgatcagtactgaaaaagaagtcgtctgggtttggtctcaagaattactgcataggatcatg

SEQ ID NO: 3256 - DNA, 830 bp, Avena sativa
cttgtgtatttgatggcagctcttctcaacaaggtcaagaagcttctcgaggttcgatgcccatgagttgagtaccccgttactgtcctgagctgtccggaaggatatgatccccattggtctgtcaatctttgcaatcaaggcctttgagttcaccatgtctgaaagatgtttctctgcttcctgcaagctcaagcaaagaagatccgcaagcctcttcagggtaatccttgaatagtacttcgaaacgaccaagatattatgttcaatgatcctcagcttcaaatcttccgcagctttggtgcctaaagctcctccaagaaaattcttctcattctcatattcatgcttgaagaattcccacaacttcgtccactggatcacctccatggtaacaagttgcttcagaagtaatcggaaatttgggatctcagaaagatttttatcctctagtgtagcattgagaaggctcgactgcattggatcgtgaggagccagcaccaagtaccaacagatcttcctaagaaccggtatccactttgccagatcctcttttattgctggaatttcataactcgacttgtagcaacggcatatttccaggtaatcattgttatgtgagtaatagcgtatcatcagttcatagtagatgcgcttcagttctaagagtgaaggtatctctgcaggagcttcctgaaccatattgtcaccttcttttggtttctttttttcctttgttgtgtctgcatcgaagaccctagggctaattttcctggataaaatttgtgcgcgaacataatcttgacgatccaggcacaaccgaacctgct

SEQ ID NO: 3257 - DNA, 850 bp, Avena sativa
ctctaggtgatatcaccgtgcttccaaagacttgttttaaggacccgctgtgggaatcaattggagaagaactttggcaactagttgccaagtcgcttggggcacaacgtcttgctcgccaaggaaaaatcatgccaaatggcacaagagatagcacattagaacttcttgtcggtgacaatgggtgggtgacccattatgaaaatggcatctcttattcacttgatgcgacaaaaatgcatgttttcttctggtaatcgttctgagaagcttcgcatgggacagcttgattgtagagatgaagtggctgtggacttgttttccggaatcggatactttgtgctcccatttcttgtgaaggctcatgccaagttagtttatgcatgtgaatggaatccacatgccctggaggctcttaaccggaatgtggtggacaaccatgtagcagatcgatgtgtcatacttgaaggagataaccgtctgacggcaccaaaaggggttgctgatcgtgtttgtctcggactaataccctccagtgaatgtagctgggctactgctgttagggctttaagggttgacggaggcatactgcatatacatgggaatgtcaatgactcggatgaggcacgctggttggagaatgttgttgaatccatcagtagtatcgccacaactcatggactatcttggaaagtctctctggagcatgtggaacgcgtgaaatggtatgggccgcacattcggcacatcgtagttgatgtcagatgccggccaaactgacaaagcaaaaacagccggaactggtatttgtgcttggggattctggattgtaatgagaggcagttctgtt

SEQ ID NO: 3258 - DNA, 801 bp, Avena sativa
ttttgcggaagcccgagtgcaaacaacttcctttggagaagattatttccattgccttggacattgcacgtggcttggaatatgttcattcgcaaggagtgattcaccgtgatgtgaaacctgagaacattctctttgatggagagctttgtgcaaaggtcgttgattttggagtagcttttgaagacgtatactgcaatacattggaagatgatcctggtacatacagatggatggcaccagagatgtgtaagcggaagccgtattgtcggaaagttgatgtttatagctttggccttgtcttgtgggaacttgttagtggttcaattccttatgaagagatgactccgctccaagcagcttttgcagttgttaataagaacttgagaccggttgttccttcgagctgcccggcaccattacaacaattaatggagcaatgttggtccgttcaaccagacaagaggcccgagtttagtcaaatagttcaaatccttgaaaaactcaaggcggttcttgatagagatggaacacttgacaagaccccaggcggcaactgccaggaagctcaggaccaaaataagaacaggcttgccaactggatccaaaagctctcatatagcccaccagatttctcagggactccgccgccaaagctactgtaactatgtgtactcgttctcgttctgattttcacattacacaaatcagaacgtaacacaaatcagatcacgactctgtaaatcaattttctatgtatataaacacgaaactacagaagacaccttttatgtttacaga

SEQ ID NO: 3259 - DNA, 950 bp, Avena sativa
aactgaaaagtacaaagatgagcaattaacgccagataatgcttctttgccctcaaactcagtagagtctgatgagttactgctagtgtggggaaaaaagagaggcagcccattaagtgttgaagagtggagagctttcttagatcctgaaggtagaattatggattcgaaggcactgaggaaaaagattttctatgggggagttgatcatgctctgagaaaagaggtctggaaattcttgttggggtatcatgaatatgattcaacacaagctgagagggaataccttgctgcaataaaacgagaagaatatgaagccataaaatcccagtggaagagtatctcagccacgcaagctaaaaggttcaccaaatttagggaaagaaaaggccttattgacaaagacgtggtgagaacagatcgatctgttccctactacgaaggagatgacaatcggaatgttgtagttctacgtgatatcttgttgacatattccttctataattttgacctcggttattgtcaaggaatgagcgattttttggcacctatactttatgtcatggaagatgagtccgaatcattttggtgctttgctacattgatggaacgactaggaggcaattttaatcgtgatcagaatggcatgcatgctcaactacttggattatccaagctagtggagcttctcgatccttcactgcataactattttaggcagaacgactgcctaaactacttcttctgtttccgctgggttcttatacaattcaaaagggagttcagttttgatcagatcatgctcctgtgggaagttttgtggactcattacatgtcagaacacttccacctgtacttgtgcgtcggtatcttaaagaggtaccgtctgcggataattggagaagagatggacttcgacactcttctcaagttcatcaatgagctcagtg

SEQ ID NO: 3260 - DNA, 772 bp, Avena sativa
agtatcaagtcggtttgaaggtttgatttatttgggcagagtgagcacacaaaatcggtggcaagttacatgggctccatcacctccaccaactcaaaaggacaagctttacaaccaccagcttatttctgacctggtatttacacatgcataattgcagaacaaaactccggatcacagcagatttcacaaaagatataacgcagaaggatactacacccatctttcgactaagagaacggaagcagaccgccgaaaacaccaccgcaaggataggtggatgccacatagtcagtagaaaggagagaaaaacccaggagtccatctagttgtgttgggttcatacagcaaaactggagagacccgaatcgctccccccaaagcaatagaagacgcaaactccatgcgctgtacatagaaggaacattcaccgggaacttgcggagcatccaaatctttttgtctcactggttgttttctgttcttctcttttcagcacttggtattccatgattgcttgagtttgtgattttatcccagccgcaataggcactggtttaagtttgctaacctaacactgcataacggtcttatgcattcagtagctccttgtgtccagtggatcatagtcatatgcttcaccggccttaacaaaccgacccttgactctttttctcacatccgccctagccttgcgagattcatacctgatcttgtggtcaaattttcttctcttcttcttctccttgtaccgtgtgatcgcactgtctct

SEQ ID NO: 3261 - DNA, 507 bp, Avena sativa
gcgagttagagcagattagagctgctgaatgggatgttactgcacgtgctgaacatcgtttccgttcccggtgcgacagcaggcctcggactcagccaggcgatttaccatctgggatcaagctgtgcatgaaggttattttagatgaaattatcagttcccttggcatggacgaacctgctttcaagtttactccaactgaggcaggctcgtatgtctgtgaggttcttctgctgttgaaacataatcgttcaggtggctccaaaaaaactcctgcaatcgctactgggaggccttgtctcaacatgaagctttggagagtgcctgccaacgtgccatcttcttgatagaggacaagatgtctgctcatttattagacatgaacttttttttgagaagtttattagacatgaactacaacagcagggtgcaggcagagccgtatgttctagaggcaaaggagttagcaaacctagctgtttcaattgggcaaaattcatcgctgag

SEQ ID NO: 3262 - DNA, 823 bp, Avena sativa
gttcgtggtgagcagaggaatctattagagcttatccaagtgattgcagcatcagagggttgaaaggcttttggaaagggaattttgtcaacatcctgcgtaccgctccattcaaggcagtcaacttctatgcatatgacacttacagaaagcaactgctcaaatggtctggtaatgaagaaactaccaactttgagagatttattgctggtgcttctgctggtgtcaccgcaacaataatgtgcatacccatggatacaattaggacaaagatggtagcgcctggcggtgaagccttaggtggtgttattggtgttgcccgccacatgatccagactgaaggattgttctccctgtacaagggtttagtgccttctcttatcagcatggcaccctcgggcgctgttttctatggagtgtatgacatactgaaggcggcctatctgcattcccccgaaggaaagaggaggatatcaatgatgaaagaacaaggtcaagaggcaaatgcgttagatcagctcgagttgggcactgttcggaccttactctatggagctatcgctggatgctgcgctgaggcagccacatacccttttgaagtagttaggagacagctacagttgcaagttaaagcaacaaggatgaatgcactggcgacatgcctaaaaattgttgataaaggtggagtaccagcactctacgttggcttgatacccagcttgttacaggttctgccatcggcatctatcagctactttgtatacgagttaatgaagatagtcctgaaagtggaatgagtgcaaacggattctgtgcccacgta

SEQ ID NO: 3263 - DNA, 889 bp, Avena sativa
gttcggtttcacttgcattgaacgggattggcatggtttggtggggattaaatcccatataagtcaaaatccactctaatcccttccattccactccaatacacttgagaaggggattaaccgaacaaggcctaagtgattcggatcccttcctctccccgatccacaatccgatggtgttggtccttgcgctgggggatctgcacatcccgcaccgtgcgcccgacctgcccgccaagttcaagtccatgctcgtcccgggcaagatccagcacatcatctgcaccgggagcctctgcatcaaggaattcacgactacctgaaagcctttgccctgatctccacattaccagaggtgaatatgatgaggatgctcgttacccagagactaaaacagttacaattggtcagttcaagctagggctatgccatggtcatcaggttgttccatggggtgacctggactccctagcgatgctccagcggcagctggatgtggacatcctcgtcactgggcacacccaccagttcaaggcctacaagcacgagggtggcgttgtcatcaaccctggctctgctacgggtgcatacagcagcatcacctatgatgtgaacccgagcttcgtgctcatggacatcgatggcctccgcgttgttgtctacgtgtacgagctcatcgacggcgaggtgaaggtcgacaagatcgacttcaagaaaaccgcgacgatgcacgggtgatgacctgcttccggcagcagattcagagcctgtctgttcttatttccctcctttcttgattcagatctcccattctgtagccttttgtactggttgtgcttacagattagtgaatggtattatccgaggagtgtgtgatgtcaagttgtta

SEQ ID NO: 3264 - DNA, 851 bp, Avena sativa
acactgctcattacaactcagtggccattattgatgctgatggcactgatcttggtctataccgtaaatcgcatattccagatggaccaggttatcaagagaaattttatttcaatccaggtgacaccggtttcaaggctttcaaaaccaagtatgcaacaattggcgtcggaatttgctgggatcagtggttcccagagactgcaagggctatggtgcttcagggggcggaagtattgttctatcccactgctattggatctgaaccccaggatattaaccttgattcccgtgaacattggaagcgtgtcatgcaaggccatgccggtgctaacttggttcctcttgtcgcttctaaccggataggaacggaaactgttgagactgagcatggcaacagcactataaaattttatgggaattcattcatcgcagggccaactggagaaatcgtgaagcttgcaaatgacaaagatgaggaggtgctcgtggcggagtttgacttggatgagatcaaatctatgaggcacggctgggggatattcagggacaggcgtcctgacctatacaaagtgctactgacgttggacggagagaaatcgtaggcttccactttgaggttatccgcccatgaaagggacaacaaccagttccacagtactgggaaaacacagggtccatgaatacggggtccattcgtaaaatcaaaatggtacatcttcttctgttctatcttttccctgctaaaaacaatgctttgcctctggagaaggcacctctgtgttcacatcttggtggttttgcaccaatataggattacataataaatagttgtcatgtgatgctctgat

SEQ ID NO: 3265 - DNA, 875 bp, Avena sativa
ccttctagatgaaagatcccttctagcttgcattgttcgtgcagttcctgctggatctgataaccgaatcaggataagttcaactctgccaaataggcttgggaaagtattggctcctcttcattggcatgactataagaagcaatatgggaagctagatgattttgtggctagtcataacgagctttttgtgattgagggggacttcattcaccttcgtgaaggagcacaacagataatttcagctacaacagctgctgctaaaattgcagctgctgcagctgcatcttctgcttcttactcgtcgttgttgccttcggttgctgttactcctgtggcacaaatcactcggcaaaagagagggcctgctggtgattccagatcttcaaattcaataccatcaggaaatggctctactacagcacatcaacaccaagcaaatggcttttctgaggaagttcgagctgggcagtcatcgaggcacacggctgctgccaatggggcaaggcatgacaaaggcccaagacatggttatggaggaaagcaacagggcagatctacagggattgaacccaattcaagaagataagtaggtggcttctattcaggtccggttggttcattgagcggagggtgaagtggttaaaaatcatgtcaagtggttgttttggtgacaaatggttggacgcgaaatatgacctgaactcatattccaaaatttagttctgcaccattgctttttccgcagtgcctgtattgggccttattttggcaagttgagttgtcctgaaaccctagtccagaatcattaaagtaccgaggaagtcttctgtgcttgcatgatgtggtgcgcacttgaattgatatmacaaaaa

SEQ ID NO: 3266 - DNA, 793 bp, Avena sativa
  modified_base (747)..(747): a, c, t, g, unknown or other
tctgtggttctgtggggagagcgggcgactgcttttgatggagagggtgttctatagactgctcaaggtggaccagtcgttgtgatttttgttggcaccttggtcaaaccgtttgaaggacgtagggggttgagtaggagtgctccctgccattggtacatcaacgaagacttgcccaagatcaatgaactgcttgctcagttaaagaataaagttcctgctgttcgaggaaaatgacagcttcactgaagtctcatgcaaatcaggctgatggacaacccaagaagaacaagacgctgaatcgggaataggagtgttttcttctggtgccataaatcatcagtagctgtttaaaccatgttatctatatccagtatggaccaaagatcgcctttcccccttttgttctagggcatgcaaatataaaataaacctagcacaacatttccttgcgcgtctcacctggatgatggttctatccttcatcgatgcttggcttatgcagttgcttttggatcgttatgctacagctgcctacatttgcagcttgttctatcctgtaattccttactcagtagaaaggcttttgtaaatccctactttagtatcctcctggctcctgcactttttactgtgcacttctcaatagcctagcatgggtttagtagtaatatgactgtcgtgaactccaggtttggagcctctggtttactattacggagtaccatgtttctgtcgtgctcctanatgatgactttctagcaacaataccatttgctatgcatgtgtgatg

SEQ ID NO: 3267 - DNA, 583 bp, Avena sativa
aactgaattaggacaagaacaagagacgtagaggaaggatccaaggagagggtgcggaggataacatggaggcggcgatggatctgatgcggcggatgccgccggggagcaccgagacggcgctcaacgcgctgctctccctcctccccgaccactccctcgacctcctctcccaggtcgacctcccgctccaggtctgcatggataagaaaaacaacaaggagtacatcctttgcgagtacaaccgtgacgccgattcctatcgatcaccttggtcaaacatatacgagcctcctttagaagatgggacagttccctcagaagagatgcggaatcttgaggtcgaggcaaatgaggttttctctgtctatcgtgatcagtactatgaaggtggaatatcctccgtgtacatttgggaggatgatgaagagagtttcattgcttgcttcttgataaagaaagatggacaagggaaaagaggttatatgcagataggttcatgggacgctattcatgttatccaggtggttggtgctcaagaggaaggatcagcacattactgcttgaacagcactgtcatgct

SEQ ID NO: 3268 - DNA, 650 bp, Avena sativa
ggttctcccgcccctccctcttctacgagaagcggcggctcatcgggtgcagcttctgcagccggcagtacggcgtgccggacctgacgctatactactcgcagcgcaaggcatggcgggtgtcgctgcaggcgatcaacgccctagaaaaggtgaaggggcgggtgatcgtgcggatgctgtcgcccatgtcgcacttcgagaacgggacgtgggaccagggcggcaactgcaagcgcacggagccgctccggagcaaccagacgtccatggacgggcgggacctgcagttctacacggcgcagatggaggagtaccgggcggcggagaaggccgcaagggccaagggggtgaggctcatgctcatggacgccacggccgccatgctcatgcggccggacgggcacccgagcaggtacggccactggcccaacgagaaggtgcagctctacaacgactgcatccactggtgcctgccagggcccatcgacatctggaacgacctgctctttcagatgatcctcgtctagctagcgcaactcgcctcatcacgtcggtaaccgtgctgcacacacagaccgaaatgcccattgatcttcttgtttaaaggcaattttgagtaaaggaattgtttcatgtccaaaaaaaaa

SEQ ID NO: 3269 - DNA, 794 bp, Avena sativa
cgccgccggccgcgggaagtgcgccacgggggactgcgggggcgcgctctactgcaacggggccggggcaccccgcccgccacgctggcggagatcaccctgggcgccaccccggccgcgctcgacttctacgacgtgagcctcgtggacggctacaacgtggccatcgccatggcgccctaccacggctccggcgccaactgcctcgccgcgggctgcgtcagcgacctcaacagcgtctgccccgcgggcctggcggtccgcggcggcgcagggaacagcaaggtggtggggtgccgcagcgcgtgcgcggcgtacggcagcgccgagtactgctgcacggggcggttcggcgggccgcagcagtgcaagccgaccaactactccaggctcttcaagcgggcctgccccaaggcctactcgtacgcctacgacgaccccacctccatcctcacctgcaacgccggcacctcctacgtcgtcaccttctgccctcaccgccgctagaccgacccattccattccaaacctagggaagggcactcgctccgtttcacagtgtttggcgcctcgtggcattgttgccgtttgttcttgttcgtgatctgtctagtggtacttagttcgatcgggataataataacactagtggtagtagcagtagcggtgaactggtgatgatggtttgtggcactcctggattggtatatggtataatggtagtattatatacgtactataaccgtgttcttcacattcagttgcagacgttcatccgactgcgagtactttcg

SEQ ID NO: 3270 - DNA, 333 bp, Avena sativa
tttttttttcttttttttttttttttgtaaagcaacggcacaagttccacaggttaaaagaaaaggtctcaatactacaacattttaattttttactttttctgcagtacacaacgtccgcctaccctacatgtttgcatttcgaacataataaaatgaggaattggaggaacttgttcgatcctccgtatcttcacatcttagcctttcctggtattggacacgggagattcattcagctgaccccggggagcttcattcagcttgtttttgttgcggcaaaagttgacaatcggagcctgaggggcttttcctttggacagttgacgttgc

SEQ ID NO: 3271 - DNA, 595 bp, Avena sativa
  modified_base (47)..(47): a, c, t, g, unknown or other
tgagttacacaagaaattccttgaactttctggtgggattaccgaanctttgagctcgaggaggttctacatgtagctcaaagggatactctggttccttccagtgccattagtgaagcctcagaagaaattatttcattccatgaagtggatattgtaacaccatcgcagaagctattggctagcaaactgtcatgcaatgtagtacaagggaaaagccttcttctgactggccccaatggtactgggaagagctctgtttttagggtgctcagagacttatggcccgccttttctgggagagttaccaagccctctgaagggatgtttcatgttcctcagagtccatataccagcttgggtaccctgagggatcaggtcatataccctctatcaagggaggaagcagagatgaagattctttcattatataaagctggcaacagggctagtgctcctgagttgctagatgatcacctgaagacggttcttgtgaatgtccgcttggtctatcttctagaagagaaggytgggactctactccaaactgggagacgtcttgtcgctgggagaacagcagagactcgggatggct

SEQ ID NO: 3272 - DNA, 905 bp, Avena sativa
gtgatcctctgtactctaattcagtagcaaggcgtagtctcgcgacaacagcggaaagctcatctgggaggaaatcgcttcctgattccctgctacataactcaaatatgggaagctcatcactccgccggcagttccggcaggaggaggaatgcagcctggcccagaaactgcagaagccaatagatgatgacaaatacaaggatgttgacaattgttctgagctaccatcgtttggaaaccaaaaagcagcggagcgacacataccattctccagaggctgatgctaaagcgaagaggttgggtagaagttcgtcagacataaaccatcagcatgatacaaaaatcgcaaacctggtcaggagaaacatggcgttggaagagaaactttcagctgcaatggcgagcaaagacgaagcagagaagaacttatctcttgttattgacagcaaggaagagctagagaagaggctagctgagagggacagggaggtcgagatgctgaaggagaaggtgatagggttagaattggcacaagaggattcaaacagtgcctcaaacactgtccatgctgacaatgtgcggctggagcgtgaagtggcctttttgaaggccgtcatggatgagaaccagaaggagctgcactcaacccgtggagttctagcaggagagcgtgcgagggcgttccagctccaggttgaagtgttccatctgaagcaaaggctgcaaacaatggacggaaggtcacctacaccgagaaaacctcaaaacctcctctaggttccatggtgatgactttgtctagcatcctgatgtaaattaattattagcatacctatttgtccatcgaaacattaagggcgtgtttggttggctaccgtacttcgccacacttagtcaaattc

SEQ ID NO: 3273 - DNA, 700 bp, Avena sativa
gcttggcctatggaaggttctacagtcccaccgccggaggcaaccgccttggcaagaacatgctgaagactgacattatccattaccttgacaaaagtgaattgtcaccagatgacatcaagattgattacaacaggggatattatcccatggctgcgttgttgaagtttccttcgaaggcagcatttgccacagcacttaggcaatcagctcagctgggtcgcatgtacaggcttgagatggtgagtcgtgagcagtgggatcacaaacaatctcttgatggaaaagctgtactgttgcaaggcgttcctcgaaatgctcaagttgatgacatagaacgatttttgagtggcactaactatgaacctcctccatttgaaagctttatcagacctggcatcccagagcccataagagtggtgctggttaagttccgcacgaagactgacgcaatcaatgccttcattgctaaaaacaggagtttctgcttgaacaatcctgttagtgtgcgggttattcaatagaccgtcacatcttatcattttctggatcaactcctgtcaatcaaccttgttagcatctgaagtccgtgcaactggtagaaatgtacggtttctgtacggtcctgcaacctacagcttgattcgttgtttccttccatgcttgtgctcagttttaattgcacttattttctttacta

SEQ ID NO: 3274 - DNA, 523 bp, Avena sativa
atgagcatgttcttggagaagagaagtacacttttgtggagaatgtgaaaaatccccattcttgtactatattgattaaaggaccaaatgaccataccattgcacaaattaaggatgccgttcgagatggtctaaggtctgtcaagaatacagtagaggatgaagctgttgtgctgggtgctggagcgtttgagatggctgcgaggaagcatcttattgacaatgtgaagaaaactgttaaaggacgagcccaacttggagtgacggcatttgcggatgctctacttgttgtacccaagacgctagcagagaattcaggtttggatacccaagacgttattgtcgcccttgagaacgagcatgaccgtgggttggtcgtgggactgaaccacaactctggggagccagttgatcctgagatggaaggcatctacgacaattactcggtgaaacgccaaatcatcaattcaggacccatcatcgcctcgcagctgttgcttgtagacgaggtgataagggcagg

SEQ ID NO: 3275 - DNA, 859 bp, Avena sativa
gacgttgaactgaagcacggagccaatgccggtttggtaaatgctctaaagctcgtgcaacctatcaaggacaaatatcctagtatcacttatgcagatttattccagttggcaagtgctacagcaattgaggaagctggtggcccaaagcttccaatgaagtatggacgtgttgatgtcacgggacctgagcagtgtccacccgaggggaagcttcctgatgctggccccaaggcacctgctgaccacttgagggcggtattctacagaatgggtcttgatgacaaggaaattgttgctttatctggggcacatacacttggaaggtctaggcctgaacggagtggctgggggaaatctgaaacaaaatatactaaaaatggtcctggtgcacctggtgggcaatcgtggacagccgaatggctgaagtttgataacagttacttcaaggagataaaagagaaaagagatcaggatcttctggtcttgcctacagatgctgcattatttgaggacccaacattcaaggactacgcagagaaatatgcagcagaccaagaagcattctttgaagactatgcggaggctcatgctaaacttagcagcctgggcgcaaagtttgatcctgctgagggattctccttggacgattagttagttggcgcgcgtgagccagatccagccgaacgctcttccaaaagcctgcgggatcaggagacggcacagcttaatccattgctcctctccggattttgtgtcaccattcaggaaagaggcatttttgcccaacttatcaccgagcttgcgagtgcaaaaacaacatgtattgacaaataaatctgagcatgtatcacacata

SEQ ID NO: 3276 - DNA, 767 bp, Avena sativa
  modified_base (764)..(764): a, c, t, g, unknown or other
gcaacaacaaggtccttctcgatcagaacttaattgaggcaatgccaacgtcaccgatttttgttgggaacaaggcaaagcggcgttctggaaagagctgtttggaatgacacttcttttctagcaggaattgatgtaatggattattccttacttgtgggtgttgatgaggagagacacgaactggtcctgggaataattgattttatgagacagtatacatgggacaagcacctcgagacatgggtcaaatcttctggcattcttggcgggccgaagaatgccgctccaacggtagtctcgccaatgcagtacaagaagcggtttaggaaagccatgtctgcttattttattgtggttcctgagcaatggatgcctgcaataatcaacctggaccaatcatcgtcaaatatttgggaagatgattctcaagacgctttacaagaatgatatggtggtatgtgcattattggcggatcggagggtgccagatttggtccttttagctactcaggtgtcattgaaatgatctccaggttggaccgtgtattctcctgtgctcatttgcacagatccggttgcactcaccggttcccataatcccatctcgagaatcatgacatgtgtatattcttgtaactgtaattatggttagtttattttcactcttttgtctatatatggtacatatatatatcaggtttaagtgttgcctcgtcgcttgtaggtattacttatcaccttggcggtcgtttaaaaaaaanaaa

SEQ ID NO: 3277 - DNA, 639 bp, Avena sativa
aggaggtggtcaccgccgcccagggacgcatcccggtgtaccttgatggaggcgttcgccgcgggaccgacgtcttcaaggcgctcgcccttggcgccgccggggttttcatcgggcggccggtggtgtttgcgctggcggcggaaggcgaggccggggtgaggaacattctgcggatgatccgcgaggagttcgagatcaccatggctctcggcggatgcaccaagctcagcgacatcacccgccgccacatcttcaccgagggcgaccgcctcggacgcccagtgcccaggctgtaagccaagccaggcacctctcctcgggctatcaacggcgccggctcgacgtacggccggccaagctagcaagctcgccacatccatttcacgcaataattaatccgaaactttatagctcgtcgtcgtcggtgacccgggacgacggtgggtcgtacagtagtagataaaattttgcgtcttgtcgaccggcacgtctcgtaatttcaccatattttacatcggctacacgattattgtactcgatcctgttgggtccgcacgtatattcatcgatcatgtatttatcctaccgtacattgtcatggaatatgggtggacttcacgctgtcatctaaccaaa

SEQ ID NO: 3278 - DNA, 1120 bp, Avena sativa
gcggcgtgcgccagggagtgcttcacggagcacgacgtcaccttcgccaaccggcccaggttcccctcgcagctcctcgcgtccttcgacggcgccgcgctcgccacgtccagctgaagcggaggctgttcgagctctccctcagcgtgctcatggagaccatcgcccagaccaaggggacccgtttggaggccgacgccgacacggacatgtccgtggaggcgcaggagttcaagaaggtggtcgacaggatcatcccgcacctcggcgccgccaacatgtgggactacctgcccgtgctgcggtggctcgacgtgttcggcgtcaggaacaagatcctgaccgctgtgggctggagggacgcgttcctgcggcggctcatcgaaaacgagcgccggaggctggctgacggcggcagcgatggcgacaagaagagcatgatcgctgtgctgctcactctgcagaagacggagcctgagctctacaccgataccatgatcacggctctctgtgcgaatttatttggggccgggaccgagaccacgtcaaccacgacggagtgggccatgtcgctcctgctgaaccacccggcggcgctgaagaaggcccaggccgagatggacgcgtccgtagggacctcccgcctggtgtccgccgacgacgtgccccacctcgcctatctgcagtgcatcgtcagcgagactcttcgcctgtacccggcggcgccgctgctgctgccgcacgagtcctccgcggactgcaaggtcggcggctacaacgtgccgagcgacacgatgctgatcgtgaacgcgtacgccatccacagggacccggcgacgtgggaggacccgctggagttcaggccggagaggttcgaggacgggaaggccgacgggcttttcatgataccgttcgggatggggcggcggaggtgccccggggagacgctggcgctccggacgatcgggatggtcctggccacgctggtgcagtgcttcgactgggaacgggtggacggcgtggaggtggacatgacggaggggggagggctcaccatcccaaaggtcgtgccattggaggccgtgtgcaggccgcgcgcggtcatgcgcgacgtgcttcg

SEQ ID NO: 3279 - DNA, 731 bp, Avena sativa
ccggaggtattgcgcaatgaaccttcagatgagaagtccgatgtgtatagctatggggtgattttatgggaacttgttactcagaagataccctgggaaaatctcaattcgatgcaggtcattggtgcagtaggtttcatgaatcaaaggttggagattcctagtgaaacggatcctttctggacatcactcatcctgagttgttgggaaactgatccacaaagccgaccgtcgttccaagaacttctggagaagctccgagaactgcaaagaaagtacaacgtccagactcagatgcagcgaaacgcaactgctgctgcgaagaacagcactatcatcgaggaatgaaggttcctgctcttgctaaagcgagtgagcatgtgagtgagggaacgtcagcagtggtgcagcaacctgttaacctaagatggatcagtacctgccacaagcctgatcctggaatagctaatgctgaagattgtgcgggaggaggtccctctgaattcctgcacaagcctgaacttcctccaactgcagcttttggtaaagattagagtagtgagttgaggctggcacttttgggttcatgatggtgcgtgactaacatctgaccggattaatctggcttgaatttgtaactcgaagatggtgatgttgctgtgtagattgttccgaagatgatcaagttggatcaccaaccttgtaaggttcattactgtttttctcttgtc

SEQ ID NO: 3280 - DNA, 854 bp, Avena sativa
gttgttaaggaaaaggagatgcagttgcgcaacttaaagcagcaaaagctagcaagcaagagataacggccgctgtttcagagcttacgaaggcgaaagagaatgttttaaggctggaagagaggtctaagttgaaacctggaattccgcgcaaggatgatggaacaattgcatttgagaatgacttcttcaggcgtcaagccttcctgactgtttcaggccaacttcaggttgagacttatgcttgtgctctcagcggtgtctatacctttggaccgactttccgggcagagaactcacatacatcaagacacttggcagagttttggatggttgaaccagaaattgcatttgcaaacttgcatgatgatatgaactgtgcagagagctacgtacaatacctctgcaaatggttactcaagcattgccgtgaagatatggaattcatggtgaaacatgtggataagactgcaattgagcgtctggagcttgtttcctctacaccctttgaacgcatttcatatacaaaggctgtggagatcttagaaggtacaggtaagaagtttgagaacaaggttgaatggggaattgatttagcgtctgagcatgagaggtatttgactgaggtgatatttaagaagccagttattgtttataactaccctaagggaataaaggcattttacatgaggctcaatgaagaccagaagacagtggctgcaatggatgtacttgttcccaaggttggtgaattaattggtggaagccagagggaggagcgtcttgatgttcttaagcaaagaatactcgacgcagatctgcccttggagccgtatgagtggtacttggacctc

SEQ ID NO: 3281 - DNA, 833 bp, Avena sativa
cggatccaaatgatggaaaagatgctattgtgaatttctggcgtcggatgaggtgcccaagatgtccagatgacactgttgaatgcagagtttctcctgctttgcttgccaaccagataaaaagacaggctgataatttcatcaatcagtattataaaggtttactgatgtgcgatgatgagggttgcaaatattcaactcacatcgtgaaccttagagtgatgggggattctgagagaggaaccatctgccctaactatccacaatgcaacggccgtttagtaagacagtacacagaggcagatctatacaggcaattgtcctacttctgctatgtacttgatgcaacccggtgtcttgagaagttggaccagaagatgcggcttcctttcgagaaagagtttgcagtactaaaccaaaccataaagttggcatttatggagatccagaaaatccgagacagatgtgcattcggatgggttcagttgacagatctagcagtatcaatctgatgagttactgttctctaatctcaagcatttcttgaaccgagcaagaagctcctcatggaccatgggatatgctgctgttgaaactagatctctcgtcgagttcgagaagcgcaaccgggaataccaaacaaacgatgacccgtgctactaagcccctgagaggtttcccagcctataaaggatgattttcccacatacaaatgttctaaccttttgtttctagagaagcctccttagtaccttacctagactcttgaagtgtatattgtaccctgattgtaaatattgtgcgtccataaatcccatgaattcgtgtggcaa

SEQ ID NO: 3282 - DNA, 646 bp, Avena sativa
acttaagagtaggaactgcaagaatccagttcagctggcttcattttataggcacatgcttaggacaaaactttattgtttaatctaatattgctcacatgttattcaatagacgtaacaagatcatcagacgacagacagagctagtagttgagcaagttcatcacaaaaataagcaacaaaaactcatcagggattcgggaggctaaagagggcagagatacataactacgaagctatccttttattgttgatttgtcttccttcagatcagtctctactgcttgggcttgagcaagtcctggctgcacgaggccaaagcgtctgaagcatccagaagcggtggaagtgtgaacgggggcagaacgccaccctcctcatgcttgatggccgaggaaggatttttgccaagtgtggctgccatggcagcctgttgcttattgagaccatccattatgcaggagaacgccgcgaaggtgacacagctgtggaacattgcttggggtgcacctggaaaactcaaagcaagtcccgtgcaacaaccagccacaccagcattgatcatgtcatctttccctcgcagtcttctcaacaagcacaagatgaagctttggacaccagacaatgctgcaaaagtcttggcaga

SEQ ID NO: 3283 - DNA, 653 bp, Avena sativa
gtggaatctctaattggtcagtgacacatgttgactggtctgagggtaaatggcatccgaggtcctatagagctgcggatattacctatcaactcctaaagaacattacgtctttcaatgagaatgtgcacattgcaagcgatgatgctaaaactgtgacatcgaccccatgtatattggatggaacaaagagaccatgctttctttttgcaagaaaattttacccaaatactctcaacaatctactggagctattttccagtcacacgtctacttgaattctacacaattctttgccattggcctaggattccccctaggaattttcttttatgtaaattgcaaaattgatacttagcttcttaacacagatccagggccagagacatgtcaacgctctgtcattcttggaccctagataggggtgaggtgctttctattattattgacactgccctcattgtaatccagtgtgtcatttttatgtttctgttagctctcagtttcaccttttctctcattcttgtgtctcttccttttccttttatagtttcctagctcccatctcttgaggaacaggggttttgtcaagttgaggtgttattataccattcctttttgtacagattctgaaatgagagccaccttgtagt

SEQ ID NO: 3284 - DNA, 844 bp, Avena sativa
gctcgtcctgtaaatgttgtgcatgttgttgatactacaagaatggaagatggaaatacagaaccattatcctatatttccctgttttccaacacacctggaaagttgacaaatgaattgacagaccttagcggggaagaattttcttgtggaagaaatatgacaattgacttcgtcacatttaccatgaagtatggctgtaggagttacaaagggagcaatgttggatggagcaaatcggaagttcctgtgctccatgttgaaagtgattccgctacagacaatgcccgtacgacagtagtttctgttgataccaagtcatctacacgttggactctcgcaatcaataagcaggaaatcgatgatttcacgattcaagtggattcagaggagttggttcagctgggtggtaagagcgaggtggacagatggcataccatccagtttgcaggtggcaagagctcaccgacgaaattccagttaacccttttctggtcaggcaacgtaacgcatacatctgcagaagaagctaaatctcaagactctcctctcttgctgaagctaagaacagatgtggatagagttacgccgatggtcgctacggttcttgagaagctcccgagttggtgcacgcctttcggcaagtccacgtctccctacacgttggctttcttgaccgctcttcctgtcaatatttaggcagcgcgcattgttacgtaccccacgtctagtgtatcagacagtttgacatagtgttcacgttagatcaattccattagccattgcattcatagcttcagaacgtacacgagggaccctgaagcgttagatacgtagacgaggc

SEQ ID NO: 3285 - DNA, 600 bp, Avena sativa
cgtgaactgggctctcataagatgcgcgagcccaccagacattccgaagcccgtcgagctggactgccgcccgaagcaagcccccatcagccagcgggaaggtcgcaccggcttccaaccagaagggctcagataactacctagagtttgagttcttctagctattttcgtggcacatggaaccggaagcagcgcatttgagctgacgctccacagaaagagaagaagatgatgtagagctcctcttggctgggaaggtacactcagtttgttgtagattgtatgagctcgttcctggagcccctgccctgccctgcccggccccaagttttttctttcctttcccccattgaacttgttagctctagtcgatactctctctcttatgcatgttaattgcgatttttcagaaaccgcgtatggtactcttatgaacggatttgatgagtactttgttcaagctgtcaatgtaaccgctacttgtaccttgtaactgatgtttgttcatcgatcccatcgattattctgctcttagaatgttgctgatactcttcataactggcaatcagacaatgcagttgttacttgttaactaaaaaa

SEQ ID NO: 3286 - DNA, 439 bp, Avena sativa
cagtaggtagaatttgcataagactaatttcttgtccttctgtgtttgagaattttttctgtttattacaaatctgtctgcttactgaacattctgtgcatcacactgcacaactgatcactactctaaattaatcctgatgattgtgctggtactctagtttgaccaatggctcttctttgttgatacagtagattctaatgtttgatgtttctttgccctgctgctagacctactgcacctgaccccgagctcaccagactacgctatgtttgcaaacgcctccagtggtaaagttatctgaatctttcaccttttctgtcaaaaataactacatgttcaagaatctgtttcacagaacttcagattctcgacaatctcagagaagagaacctacctgtaggctatgtagctcggccatacagaatcggctatgaca

SEQ ID NO: 3287 - DNA, 738 bp, Avena sativa
gcttgtgcccatccattcttcgatgagcttcgggatcccaagacctgcttgccaagtggacggtctttaccgccactgttcaacttctccggagctgagctagaaggcctccctgttgagctactccaccggatcattcctgaacatatgaggaagtgaagaggtgggtggatggacgaacacagacagtttctcgccgttagtacggccgtgaccgacatacggggcaacgcgagcatcactgtggattgatctggagtggactctcccaccggcggtcggtctgtccccgcgctagagaagggcaacagggtcatgtgcccagggcccacaacagtgtgggcccctgttttttaagtgtatgtgtttatgtcgtttgatgaatgactagtactgtatgtccttttctagccttccatttcccagtgaagcatgaaatgatgatagcaggcttccatggacttcattcattcgcagcaggctggtgagaagtactgcctccatttcaaaacataagatgttctacctttgtgaagtgaatgtatctagactcttttagtgtttaggttcactccgaacttataaagttgtctagatacatttgtttcgtaaagctaaaacatcttatattttgaaacagaggaagtatatgcatgtatgcacactttttggagacgcttatgcataggggttcaagtttgaatcccgcccatatccgaggcatcattcataggttaa

SEQ ID NO: 3288 - DNA, 859 bp, Avena sativa
aatcgttggaggaacaacaggaggtcaccttatgagctgggatgaacacatcatgctcatcgggcatactgttaactgcttcggaagtaacattaaagtgataggcaacacagggagtaactcaaccagagaagctgttcacgcgacagagcagggatttgctgttggcatgcatgcagctctccatgtcaatccttactacgggaagacctcaaccgcaggattgatcgctcatttcggtgaggtcctcccgatgggtccaaccatcatttacaatgtgccaggcaggaccggtcaggatattcctccttcagtcatcgaggcgctttcaggtgattcaaacatggcaggagtgaaagagtgtgttggacatgagcgtgtcaagtgctacactgacaaaggtataacaatatggagcggcaatgatgacgaatgccatgattctcggtggaagcatggtgctactggagttatttctgtggctagcaacctcgttccaggtctcatgcataatctcatgtttgaaggggagaatgcggcgctaaatgagaagctactgcctctgatgaaatggctattctgcgagcctaatccgattggtctcaacactgccctggctcagcttggtgttgtgaggcctgttttcaggttaccatatgctcctcttcctgttgaaaggagaatcgagtttgtccggattgtggaaggtattggacgggagaactttgtgggacagaaagaggtgcgggttctggatgatgatgattttgtgttgatcagtaggtattgaataagtgagttcaccgtgtccaatgtttgtgttgcaaacaactgtagtgttgcagtgtccttcttagat

SEQ ID NO: 3289 - DNA, 535 bp, Avena sativa
ttttttttttttttgtaaagaaactacaaaaacttaaaaattcctcttgaacagaggtgcttcacctctgggggtattctttgaatctattaacacaaggatcagcttcaagcagcagaacagaaaatcaagtgttgtgatatatacaaaaagagccactgtgtcctaactcctaactaaaaaaagaggagaaaaaccaccctgctctaccacccttcttcccttgtagcagaaagaacacaagagacggcaataactacagcaatggacgtggcaacgctagccattttcgcagatgcaagttcttccctggcatccatggcttgcaccatctggtcagtgctcggaatttctgcctggaacggcaaccattataaccattctctagctcattctctcacgctcaccaatggcaagcacggcgagcttgcctggccattactctagtacatccttgtagctgcagtaaccttgctgtaaccaccttcgaccgctgtgatgccattgaacggtggaatgtagtaaggcgaaggtc

SEQ ID NO: 3290 - DNA, 613 bp, Avena sativa
tcccgggataaaagagaaagaggcatataatgcttttttcaattcacttgatcaagtgaaaacccaaaacaatttaacgggatgagcttagaagggagacactgcagcttgcgagagaaaatttggaaagggagcaacggatttcggaactcaggaatcagtgcactataataagaactacagaactggccgctgccgaggacaggttggccgacttggaaaggcagaaggacgagatcatgaggtcctattctcctgctgcactgctcgcaagctgcaaagttcaatggcgaagctggacgaggagtcggaggagctgcatcagaagttcctggagaaagaggtcgacctgcccaccttcgtgcagaaatacaagaagctccgcgctgcccaccacaagtgcgcgttgctccacctctccggcgtgtcctcccttcgctgatatatctaccccactgtcctgtgtgccgtggcatctctgttctgttgtatcccctgtttctggctccgcttgctagtgttttttgtgactgcagacatcaggctgaggccgcatgtactgatgtacagttaccgcattttttaagtatgattggattggtaggttaaaaaa

SEQ ID NO: 3291 - DNA, 790 bp, Avena sativa
ggaacaatgaaattcagtttgccggacagctccagccaaagggatgttgctacactctgaaaataccgatggggcagagcgaggtactgaaccgtcaggttgtgaaatctgattcagcaactattaagattccagagttggactttgagatccctccagaagctcaacgtggaacactttcaacagtggaagggagcattatgcgagctgtcagtgagttgcaggcacttcaggatgaaagaaagaaagtggatcctcaaaaggctgaagctattgatcagtttttactaaaactgaaatgtcttggatcaggagaagctgcttttacctttattcttgacgatccttctggaaacagcttcattgagaacccgcatgcaccttcatcagatcctttgttgtccttgagattctatgataggacatctgaacagcaatcagcacttggttttcttgctgaaccaaccgaagaacctggagagtcttctcaggatgcttcaacagcggaagcaaactcgggtgggcaacggatgccacatggttcagttggagcttttgcaggtcgtcgtgctatagcccagggtaattctgatgaaataagcgcagcgttctatagatattcagcaccagaagaggttgatactttgccatcaacatgtagtgcctgtgctgctgagtgtgtcactcgattcttttctacaagtatcctttaaccgtacattcattatcaccatataaatttatagcgatcaatctcagaacagattatgcctagtctttctgttctggt

SEQ ID NO: 3292 - DNA, 846 bp, Avena sativa
cacaattttctttgactcggctgttgaaactgctctttcttcgcgggatgtaagacaggtaatcaagggggtacggcaggaagtactgcaaggctgcaaattagtcttcagtcgggtcttcccatccaagtctatcccacaggatcagtttatctggaagatggctgagcagctgggagccatttgctgcacagatttggattccacgatcacccatgtcgtcactgtggatcttggaacagataagtcccgctgggcagttgccaatgacaagttcttggtccatccccgctggattgaagcctcaaatttccggtggcaccggcagcctgaggaagatttccccgtaaaggttaagaagaaggaaaaggataaagaaaatgatgttgctgctgccaccaccagtaaagaaaatgatgttgctgctgccaacaccggtaaagaaattgacgttgctgctgccaccaccggtaaagaaaatgatgttgctgctagtgctgccactgcaggtccaacggactcataacatatacgcagtggatcaagaaattgtttctaaggggacacgtttgtgagctgtatttctgacatgtaccgttggtacgcgaccatcttaggttcttagtctcgtcaacagaaagttcagaattttttgatctggccttgcggttccatggttttgtatctgatacatgtgaagttctgcagatggcccggagcttaatgagcccccgaccacaaacttaagtgactatttaatgactgactagctccgttttacaccgcaatgtcgtttcttaagatcgacacatgatactcttgcctggggcagcatgtacaatttta

SEQ ID NO: 3293 - DNA, 545 bp, Avena sativa
cttgataagcatctgacatgaatcgacgattgtgtagttccagattcccgggtctcgcaagacaacccggttaattacatccatgggatcaagcccgcggaatacctccgattaagctgcgctgatgatcatcgttgtttaaataatcttgaacagaagaaaaagaagaatagctttatttcgctgaaacacaatcatatatgctatctcgacgtgcataataatgagagatttatttgacaaggagggtggctttttgcctcgtcggtgcccaaccatatggccctcacttcatcaaaataatgttgtttttgcctcgtcggtccccagcaacgatgtgactatctcatcaaaattatgacgtgttgatggcatagtaatcgaacttcgtcgtcacttggccatagtgtagtctagcctcgtcggcactagacataagatatgatgtatgggaatcgaccttcatctcatagagattagatcgtggatccgagataagcaattgatgaagcgttgtcttactcgttttatcaaccgaactcctt

SEQ ID NO: 3294 - DNA, 660 bp, Avena sativa
acttgccatcggtggagaagctgggtttgacacttcttcaggaaagttcaccaagtacactgccgggataggtgtaaccaagccagaatttcatgcttcatttatcctggccgacaaaggtgacaccattaaagtgtcaggtgtgtatcaccttgatgagaagcagaaggcttcagctgtggctgaatttacccggaagctctcaacaaacgagaatgcactcactgttggtggcctgtacacagttgacccccagacaaccgtgaaggcaaggctcaacaacactggtacacttgctgctcttctccagcatgagcttaaaccgaagtcaatcttgacaatctctggtgaattcgacaccaaggccttggacagaccccccaagtttggcctggcactcgccctcaagccctgatcagatcattagtgattgacggcggttgaatttcagattatttgattgcttttgggaagatgtggccaataatttgttccgcagaccagctgctaaatctgtcaaagttttggttctctgtgggcaggatccaatggacctttacctggattttatccatgcgtttttgatttgttgatgaaatacatatcttttgtagatgtatgcacctttgtttctttctgcwgggtccagatagctttcgc

SEQ ID NO: 3295 - DNA, 915 bp, Avena sativa
  modified_base (28)..(28): a, c, t, g, unknown or other
ctacgcgctgcagcttgagcagccaaanaggaaaaacatctgacaaagcctgaatggggcactttagatcacaaggagtcccactgaagagaaaattaaaggaatttcctgttaccgaggatgctcttcttcctgttgggacaaccatctcggtccgccattttgtgcctggacagtttgtggatgtcattggaatcacaaaggggaaaggttttgcaggtggcatgaaaagacatggttttagtgggatgcctgcatcgcatggtgcttctttatcacatcggagcatcggttccactggtcaaagggattctcctggaagggtcttcaaaaataggaaaatgcctgggcgtatgggtggtgtgcaacgcacagtgaaaaatgtttgggtttatcaaattgaccctgccaggaacttactgtatctgaaaggccaggttcccggtcctcaaggcagctttcttttcgttaaggattcaatatacaagaaacccgacagagctttgctgccattccctacatacttctcgcaagaaggcgagtcggaagacttggagcccctcattgccaatcttggtgatatcgacccattcatggtagcagattaagacgagggcaaaatttagaagaatgcttttgctttcagtgcacttctcggcaatccccgcgtgattgtttgttaaattttgcattgatatatgagtagttcctggattataagagtttcttcccattactgacctgccagatcaatgttgttccatgtacattacctggcagatatgccagggccctagcactgttagggttatgagctgattgtttgatcgactgagtggaattcgttttgtttaataagttgtgtaagcttaatattcagatagatatataagattgaaaatatctgctgctgag

SEQ ID NO: 3296 - DNA, 624 bp, Avena sativa
tgaccgccgcgcaagattcctagttggacataagattcttacagttttgagaaagtatgtgttccttggaatagaggaataaaagaatcatgagttcactctcagggtgtgaacttgtgaagattacagagcctgcacttttttgcacgagagcagtttgacagcaaagagcctttttttaagacagaaatgagttcactctcattctgaaatctcaacgccagagggaaataagcctactggacccttcagctttcacactttgcgtagcatcgttctgaacattggagctccgagagccagaacatggccctcccagtccgacatgacgccaaacggattctccatccggttattgtcatcgtcatcgccatccaccacgagccggcccttgccatgggagatgaactgctctttcattccgatcaggacagactccacatcagactgtaagtaaatcttcccattgatctgaagaagatcggcaacagcttcgacaagcattcttcgtaccattctccacctattttgctctttgttgaagtcaggatttggacactgtattgtgacgagagtcaactgtccaggataacttgaaataatggagcggaatgtggaagttgc

SEQ ID NO: 3297 - DNA, 552 bp, Avena sativa
atgctatgcatatttggaccgacctccaacagtatcgcttcactcttgagccacatcgcttccctcctccagtgcttctttctccttttgctgctgcaatgcgatctcagccagagctttctgtgtgcgcttctccagcttgtcggtcctcttctgcacgtcccgtttcaggtccgagtttgggttctttggagcgatattcccaaaagggttctcgagctgctttggctcggcagcatcagcagcgatgggatcctcaaacctgggaagcgacagcggagccaccttgccacctcgaagctgctcatcgtgaggaaggtagtttctgaacttcaacggcatctcgccattgtcttcaacctcgtcagactccttagtggggctaacattctccttcaaaccatcctggggtgcatccacaggacctggtaatgctggttggtctacctgttcttctgtggtgccacgtttaccattttgctgctcggcggaggggcgatggcggggtcggaggaggcgccgtcggggtggaggaggagctctttggccgcg

SEQ ID NO: 3298 - DNA, 542 bp, Avena sativa
caacaacagttcagccatctgttgaaggtactgtcaccaacggtgtcgtggacacggctactgaacaccaagctgccgctgatactcgtcagccatgcaatagtggccctgaatgggtcgatcttttcgtgagtgagatgtcaaacgcgtctgacattaacgatgcgcgggctcgcgcgtcgagggctctggaagccctgacgaagtccattgtggagggcgccggagctgaagcagcgcagagcttgcatcaggagaacatggtgctgaaggagcagatgacggcgatcctctcgcagaatgctgtgctgaagcgtgcggtggcgatccagcatgagcggcagaaggagtacgaggagcggagccaggaggtgcagggcctgaagcagctggtcctgcagtaccaagagcagctgaggacgctggagatcaacaactacgcgctgcagatgcacctgaagcaggcccagcagaacaacaccatgcctgggcggtacaacccgacgtctctagacctttgtgttcaggctgaagatgatcag

SEQ ID NO: 3299 - DNA, 739 bp, Avena sativa
ctggagaacatgtcatagacgacaaaggtgacgctacaggctaataatctttcaaagtatcaccaactctctcaaatgaaacagaaacaaaacaaactaagaatccaaggtcatcaaggggcaagaacaattagatcacctttaggcaattccaatattaatacaacggctctgcataaatccagggctacaagaaggttcactatgtcgagaaaactatgtcgtaaattgaacaaactacgtgaaacactcgaaaagagataatttactcatcataatcctcatcagcaaacttgttctcggggtagaaggacgcaacaactgggttgccaccgaactttcttccgtgcatggcagtctttgctttggtggaaccgtcgatgtctgcgtactccaagaacacctttccaactccagcaattggctctccattgggatgaggccgcgggatgacaacttttaccaagttgccatatttcccagcttccatcctcatgtcctccataatgtcctcatattcttcatcatcttttaattcatcagcagtgactacctgggtgaggcatacaacctttgtaggaagcgctccaacttgatacacaagtttctgtaattgcacctgctgctgtgcctgcaacaggatattctcctgctctggtctaggctgagctgatccctggtttgctcttctgaccgtaagggttttgtcacccatcttgataccatttagagcagcgca

SEQ ID NO: 3300 - DNA, 844 bp, Avena sativa
taattggtgacaagtttagcagcagacatgggcagaagggagtttgttcacagttgtggcctgacattgatatgccattctctgaacatactggcatgaggccagatctcatcattaatcctcatgcttttccttcaagaatgacaatagcaatgctcatagagtctatagcagcgaaggccggaagtcttcatgggaagttcattgatgcaacaccttttgcaagctcagtcaaagaggacggggaaaatcctcgtaaatatgattccattgtggacgaactgggtcccatgctagcatcttatggttttaattatcatggagtagaggtcttgtacagtggactttttggcactgatatgaaatgtgagattttcattggacctgtttattaccaacgtcttcgtcatatggtctctgacaaatttcaggttcgcaccacaggtcgcatagatcaagtgacaagacagcctataggaggaaggaagcacggaggagggattcggtttggtgagatggagcgtgatgcgctccttgctcatggggcttcctatctcctgcacgacaggctccacacctcctcggactaccacatagcggacgtgtgctccctctgcgggagcctcctgacggcaacggtgatgaaatcagagacgcagaagaaatccaagcgcaacatgcttggcgtcaacaccttgaaacctcccaagaacttcgcgtgccaggcgtgccaaacaaacaaagggatggagactgtcgcgatgccatacgtcttcaggtatttggctgcggagctggcggccatgaacataaaactggatctccggctcagcaacaggagaga

SEQ ID NO: 3301 - DNA, 654 bp, Avena sativa
attcgcagatggcgatctgagaatgtgcacaagaggcgatcgttccgtggctctcccaggttcaaacatgcagcgcctcgccagaaagattctcattgcatggatatcgttgatgtttcaagcaactccctgaagccgacactgtcgatcggccagatactgagtatgaagctaatggggcctgatgggtatgacaaaagcgtttcggatgatacgagcgaaacctcgaatgtctcatcccttggtcagatcctgaacaggaggcaggcaatactgcatagcagcgatacaggtgctagcaagaaattctctggaaagaggaagaagtttgccttcactggactgtccgttttcttggcaaaacaagctaagagcaagaagaagagaggatcagattagccctcgtgttaactctgtcagaaccagtagctagttacttagtgctgtggcccctatttttctatttctgtgttgctgtataatgttcctaggaggtatgtctgtaggtcctatgagactctgatgtctctgtagctccaggcaccaggctagcgtctggtgaccgatgctgctcagttgggtagttagattagtatcatgtgctctatgaacatggaagattagtataatgttcagttaactctgtggcatgca

SEQ ID NO: 3302 - DNA, 802 bp, Avena sativa
tttttttaccttagtcattgtaatactgaattatatgattttcttaagtttgtccatttaatttggcattagtgcagcagctaggtagctagcttcgcgacaaaagagagcaccaatgcgcaaaggtgtaaacctattgctagtgataagcagcagcgtatctttctcaactgcagtagcgtgatggcgttgggccaaaatcaatctagaagagcatagaacctgcaatgtcaaaagactcatatcctcattcttcttatgatagaaaatctcctctgcctgtgtcgaaataaggcggcccggtttcatgccggccagtaggctgtccctgaatctatagtatgggctatggagtatagacagttgacaatgtttcagatctgtaaatttgtgctgggaaccttctcgctgctgaagctgatgttcctggagagccctaagcttgtaggctcctggctgttgttgatcgacagagcaatatctgtgccggatgacttgcttggcgtgctgtcgctgctatccaatgggctctttaacgatgggtatggcatgacagtagaaactctttcctttcgcttctccaagaatcgggcaagagatgctttacgagcttgagggacagctcttggtgcaacagctgctgcagctgaaattgcttgttggactggttcagctgaggatgcccgacttactggaggaacaactgacggtacgcctaaagatgacggaccagcactctcattgttagagcttgatgtgcttttggagagagccacatcttgtaacacggcagggattggag

SEQ ID NO: 3303 - DNA, 793 bp, Avena sativa
atataggcaaatgacaagaaaaaacagaagcaagacacatatcacaatctgcttagtattacttcaagccgttacaaccacattacatcttctagtgcttccttttcttgttctttttattggacgcaagcttggaaaggagatccttcagaacagatggatatgttctagtcatatgctcccagccatcggtcgtcattaatttatccagacactcgggagattgtacttggataaatttgaagcatgcctccttcaatctgtggcagtggtgctgctcagctagagcaagagtggatgaaaccgagctcacacctatgtgctcggacaactcgttttcacataagaacttgagccgttgaacattgtatctatccgccaccacaaacaagtcttgcagccacattacatcttcttcttgtatctcgaggaatgaatctgtgtagatgaacctaagcaaagcggcaaacacttttgcatccacgcctttgatctgtatgccatttgatgtagtgccttccttcatggggccaaagagttgtgccatgaagacttttgatcgggctgcaagcacagaccggtgtgcagcgaacgtctcgccgctgacctcaaatgtcacatcagcacccaccttattttgaaagagatagtcaaaatgctcatttatctcagactgggtgccatcagcattatgggtgttgaaatccttgcaaaccataatgtcacaccgaatggtgaaacaatcaccctttagatgaggcgatcgttcaaaggcatctcttttcatcccggg

SEQ ID NO: 3304 - DNA, 572 bp, Avena sativa
gagagatccgaatcatgctctggtgccgacaactcccctccattgacaaagcacgtcgatgcatcagatgatgatgtggacaaagcatgtgtaagtgattcaagatcagtcctggtttccagcgatagcactgaagtccaacttgccgtggatggggtggacatccgtccgattggcgatgcagaatggggtgacttccagcagccagaagcattgattgccgatgtgcgggaggtctccccggaagcagaaggcagcagcctggatatccctgtagtcaaccccccaccggtccatgatcatatgcagggaggggcaacacatccctgaagggcctgaaggtcttggagctgccacatactttcttgggtggttgtgattattgaggaaactgccaaggatttgaatcctctcgagaattactgttgcaggtttttgcactgctttctggttgtatgcccattgtatttaagtataagtatgcaactcaataaaagatcgtagtggtttgttgtgtggtttgtttacttcatgattaaactgtgatgccagcaaatccatttggaactcag

SEQ ID NO: 3305 - DNA, 553 bp, Avena sativa
ttgaagcataaggaaaacttgcaacattaatccatgcatttcatcatcatcctgggattagattacagatacactccatcatcaatacaagaaactgtccaacagttcagcaaagctgatactaataacttcagcttgaactgggaagggaacaaaacaggctagtgcccctcagtttttatcttacaacaacagcaagccatcgtcgtaacacaagacacgcaggataaacaaagtagtcgcggcggcggctttaactcactctttagacagctaacagctttctctctctctctctagtgctaaatttgtacagtgagcagagtaacatgttgtttcttactcctctcctcttcttcccctttacagttcagattagtcttttgcttcctcagctacagaatgtacactctctccagtgcaaccaagattgtatcttattccgcggtaccacataactagttttataggggttctcagtcgggggaaaaaacgtgagcgcaaacctagccactgttagctgtacaactgcagagcccgcccttcaggcggc

SEQ ID NO: 3306 - DNA, 857 bp, Avena sativa
ctgctcgcgactcagctaatcgacatttttaatgatgttatgatgaatgacgtagatatacgccgttccattcgtctcgatgcacaggccttcaaaggcagagatccttcatgtgcacaatatagctgggccctattatacctaaagggttaccattcgttgcagtcgtataggatagctcatgtattatggaatcaagggcgtaaggttcttgcgttggcactgcaaagtcgtattagtgaggttttcgcagtggatatacacccagctgccaaaattggggagggaatattgttggatcatggaactggtctagtcattggtgaaactgccgttgttggcaattgggtttcattaatgcagggtgttacgcttggaggtactggcaaggaacatggagataggcacccaaagatcggtcagggagcttttcttggagctggtgctactatcctcggcaacataaacgtaggcgaaggtgccatgatcgccgctggttcccttgttctaaagcatgtacctccccacagcatggcggtgggaaatcctgcgaaggtagtcggctatacagagaaggaggatccttctttaagtatgaagcatgacgcaaggcgagattatttcgagcaagtcgccggtagtttctcagaagacagatccaacggaaagtgtcttctgtgcaagaagtgttgtgaactgcaactccgatgaagtcgcgacacaaggaatgcatgcatctgtgttgacgttcctacttcctggagcaggagcacctgggtgttgggtgacgcacgagtgcttctcctctttgctgaggaaccgtcttgggaggaggtcgcgcacgctcgcaggcgagt

SEQ ID NO: 3307 - DNA, 925 bp, Avena sativa
cacaggaaaaacaacagaggcagctgctgagaaagctcctcagaaaagtgcagaaaaggattctgagtgcaatgttagtatcctgaatatacaggttggtcttattcgtaaagcatggaagcacccatcagctgacagccttctggtggaggagatagatttgggagatggcaatgtgcgtcaagttgttagtggtcttgctaagttcttcagcccagatgaaattgctaatcgtcgtgttgtcttgatcactaatgtgaagcctgggaagctgcgggatgtaatgtctgctggactggttttgtgtgcttcaaataaagatcatacagttgtggagcctttgattcctccggaaggagccaagcttggagaacgcatttcttttgctgggtttgacgggaagccagaagatgttctaaatccaaagaagaaacagttggacaagataacaccgcatctccgcacggacgaaaatggaatcgcaacattccgaggggtacccttcactacgtcagctggtccgtgtagatcttcagtcccgaacgctgatgttaagtgagcaactcgttaaacatgctgatgtcaaacattgatgtgctaagaccaacgcatgaggctgtgccattttgtcttgatgcccatatcaaatgttgttaccaaatgacaacagagctgtcggttcactgaattttaatatctgaaaacaaaagtttatcttgcctgtgcgcaaacaaggaattgcatgtactagctcttttgaggctacttagtcaccgtactgctggagcagtagaataagcttataccttgcttcgttagagttcgcgtgaggctatgggaatcgagttcttccttgtgggctcctttgcctgccttgcatcttgcctcctgtgtggcaaagtattgttggaatctgtggccacac

SEQ ID NO: 3308 - DNA, 666 bp, Avena sativa
cagaaggagaagcgcatctacgagctgggctccctgccgccgttcctgctcgtcttcgccggcgaggtggaggccgtcgacctgcgctggaaccagcacggcctcggcggcgacaacgtgcacggcagctgccgaccgctccacgacgggcccgtcagcctcatgcattggtcgggcaagggcaagccgtgggacaggctggacgccggcaggccctgcccgctcgaccacacctggaagtcatacgacctctacattgccggagacggcagcggcgccgcctcgccggcctccgggccggcattgtctgcttcttggttgtagaaacagagcgcgtagatgtagcggatggatagatacaataattcttttgttggttggggcggttcttggcaatggcagccgtggcatcgcattggtgctgccgctgccgctcccaccgccgccccaccccatcggctgtacagggtcggtcgcggtgattgcatcgcgacgaggctgggtagagaaaagaagagcttgttcttttcggtagaaattcagattcatttatttatttgggtgggcgttcttggggattcccaattcgcctgattggtaccagtgtacaattccttgatagtagcagagacatgagattttgttctattattattgatgattctt

SEQ ID NO: 3309 - DNA, 827 bp, Avena sativa
atagctacaaccttttcactgtccgcaagaacagcgatgcggccacggatgaagagaggggcaggctcgaggttgtcggggagtaccatcttggagagtttgtgaacaggttccgtcacggttcgcttgtgatgcgccttccagactcggagatgggccagatccccacggtcatctttggcacgataaatggggtcatcggcatcattgcctccctgccccacgaccactacgtgttcctggagaagctccaggcaaccctggtgaagttcataaagggcgtcggcagcctgagccacgagcagtggcggtcgttccacaacgacaagaagacgtcggaggcccgtaacttcctggatggcgacctgattgagtcgttcctggacctcaacaggggcaagatggaggaggtggctaagattatggcggtcccagtggaggagctgtccaagagggtggaggagctgacgagactgcactagatagcgccgtgccatgtacatctttccattttttctttactgttgtccttgtcggtggctcaacaatgttcctgtggaattgtttgtagtaacagttgttctctgctttgaacgttttgataaggtttattattcctctctaggctggtgttgaatttggcggtggattgctgtggtttacgagcatgacgtatccgccaaaacatacaccttgtattgttactttgaacatgtactgtcctttttccctgtagtgcagcatgttagagctcggggctgcatgtagccatttatttgaaaaattcgaaaacttgatttgaaaattcaaacagaaaaaaagaaaaa

SEQ ID NO: 3310 - DNA, 755 bp, Avena sativa
ggaagaagtgtatccccccaattagaaggctaagttatgaattcgatgattctgaggaggaagaagtgtatctgcaaggtatctgcaagatgtttcttgatctaatattctcaagtcaagctctggatgcaacccaggacagggaggatctgatagatgctatcccacctgaaagctacagaacccctgaatctcagcctctgcttactggcatcgcagacacctgcccagatgctcctctgcgcccatctctgaagatgctgaagctcagcccgggcatttgcaggaagctcgacttcggttcagtcagtcccaagtctctgtttgctgaagataataattaagtgccgagcttgttccttcaggaacttgattctggtgctgtttcctggcgaccaatctcatgatagcacagtctgtcatccttgccagcgtggtgtggtaactttgctaactctgaacttgtaggagctagcagcgatggtggttaagtaggaagctgtttaaagttatatacatgtaagctatgttagttttccctttagctagcctagtcttactgcccagattcatgtgctttgtgggcttgtggcctagccttttgtatatcctaaaaaatagttgttctccctgcctgaactgaactttgcaggtttattcctgtttagtactgtattgcatagctgctgcttgaactgaatcaatgtgttctttgcacttggatgcaaagctgtatgcaactgttgaaactgaaa

SEQ ID NO: 3311 - DNA, 779 bp, Avena sativa
ggcgactgttaccaccgccagtacaaaacccatgatacttctaccactaaatcaactattggatatcgtgaaccgcatctgatgctacagtttttctcactacgtttatcaagctctgcatcctatcctgtatgtgtgtatggaataatcgccgttcgggataacttggagcctctacggaatcacctctttaaccgtccctgcagagatgatgctgtcaccattgatgaggattcccttatcttacctctttgtagccctcgtcgaggaatgtacttgctggatgatgcattagtagaagttgatctgtgggtaaagggggaaggggatggatcagctgacaaacaaatactttctgtgtatgctgagattgagggccgcccatgttttgataaaattcgacatggacaggttcgtagtggcctgtttagcttggacataagctacatattatctacaagaagtgttgaggctgtaatagaagtctttgcagaggttgacagttctcatcatttgagatccactgctttcagcagtggctttgatcatgagattgtgttgtttgatgacaaggtgtctgggactaagatacagtttcaacatgtagttgttgtgaaagcacaggaaaaattaagatgtttgcttaaacttggggaagtcactcttccggtggactttcctaggatggatatgttggagctgttagggttcctgaggactctttgtcaaagtatggccaattcgatgtgagggtgttctttgctccaaagaactggcaa

SEQ ID NO: 3312 - DNA, 513 bp, Avena sativa
atcaagaacgaattcatgagtcactgggatggtatcttgtcgaagtcaggtgaaagaatccttgttcttgctgcaacaaatagaccgtttgaccttgatgaagccatcattaggagattcgagcgcagaatcatggttggccttccaactcaagagagcagagagctgatcttaaggacggttttgtcgaaggagaaagtcgatgacaacattgaatacaaagagcttgcggcgatgactgaagggtacagcggcagtgatctgaagaatctttgtatgacagctgcttaccgcccggtcagggagctcctgaagaaagaacggttaaaagaggtggaaagaaggaaaaaggaggcagaacagaaggccactgtgacagaggattcagacaagacagagagtaagaaggtgagctcagataagaaagaggacagttcagagaaggcgaattctgatagcaaagaggaaagttcagaaagcaagggggataccacggaagggaaggctgaaggt

SEQ ID NO: 3313 - DNA, 898 bp, Avena sativa
cagtcaaaagcccagtgacaattgtggtgacattcacgggcaattccatgatctgtgagctttccggatggcggcaagtgtccagatactaattattgttatgggggactatgtagatcgtggctactactctgttgagaccgtttctctcttggtagcattgaaggtgcgccacccacatcggattacaatccttcgtggaaaccatgagagtcgacagatcacacaggtgtatggattctatgatgaatgcttacgaaagtatggcaatgcaagtgtatggaagatattcacagatctttttgattattttccgttgacggcgctggtggaatctgaatttttctgcctccatggtggtttgtctccatcaattgagaatcttgatagtgtccgcagcttagatcgtgtgcaagaggttccacatgaggggcctatgtgtgatcttctatggtctgatccagatgaccgatgtggctggggcatatctcctcgtggtgctggctacacttttggacaggacatatctgaacaattcaatcacaccaacaatctcaaacttgtagctcgggctcatcagttagttatggaaggatataactgggctcatgaacaaaaggttgttaccatattcagtgctccgaactattgttaccgatgtggcaacatggcatccattctggaagttgatgactgcaacagccactcgtttatccagtttgagccagcccctaggagaggcgagccagacgtaacacggagaacgcctgattacttcctctgagttagcgggtgacaccattttctcagcttgtattgcgataatccgcaccgatcagtgagatagattctgctggatccaaatctgcacatgagccaagaaacaataacaaaggcc

SEQ ID NO: 3314 - DNA, 814 bp, Avena sativa
caggtatcaagatgggtggaattcaaataataacggaaataatcctggggaaaacacgccagtctcgagtaaacggaagctgctttctgaagaggcaagtttccagaagaagcatcatactgtggctgaccagcctgatgcattcagtaagagctctgatggaggtgtgagaaatgcacccatttcaattagcacggatgatggttcaaccggtgaaaatgaggatgttgcagactcggaagcggaaggctcaaactcttggttagttgcacagcgcgaagacagtgctaagggctccgttgtaaatagaggatctgatataagaagatccagtgatgaagctgcgggtggtttacaaggaaagagacaaccaagtttttcaggaagtgaatccagctccggaaagttgccacatggaaatcctttacaagcatcaaatgtagtggctgtaccatatcaaggccaaactcaggcgtcagcaccccccggctttattaatgcatcaaattttcctccaattacagcgcagttcaggccacccattaacaatggaccagctgtccagacgatgggtggtgcctcccaggttgcttttggttatccaacaggtcagctgccaacacttgaaacgggctcttcatgggcatttggtgctccacctcaggctatttcttcttttgctgcaaagcaagctgaacgagcaggagccaaggaacctgatgatggcaagaaacctcaagagkttggcgcatcctcctctgttcatgtggtgggtgataagaggacagatagggtattacctcttatgggttct

SEQ ID NO: 3315 - DNA, 982 bp, Avena sativa
cttaccgaggcagcagagaagctaagatggaattgtcaacactgacgcaggcgaacattagcttgccattcataactgctactgctgatgggccaaaacacatcgaggcaactctctctagagccaaatttgaggaattgtgttcagatctcattgataggctcaaaactcctgttattaacgccttgaaagatgccaagctatctgttagtaatctagatgaagtgattcttgtgggtggatccacccgaatcccttcagtgcaagaacttgtaaggaagataaccggcaaggatcccaatgttacagtcaaccctgatgaggttgtttctcttggggctgccgtacagggtggcgttttggctggagatgtgaaggatgttgtacttcttgatgttactccattgtcgattggtttggagacattgggtggagtgatgacaaagattatccccaggaataccactctgcccacctcaaaatcagaggtattctctacggcggctgatggacagacaagtgttgagattaatgttctccagggagaaagagagtttgtccgggacaacaagtctcttggaagcttccggttggacgggatccctcctgcaccacgtggtgtgccacaaatcgaagtgaagtttgatattgatgccaatggcattctctctgttgcagctgttgataagggtactggaaagaagcaggatataaccatcaccggtgctagtacactaccaaaggatgaggtcgagagaatggtagaagaagctgacaagtttgcccaggaggacaaagagaaaagagatgctatcgacaccaaaaatcaggccgactctgtggtctaccagacagagaagcaactgaaggagcttggcgacaaggtccctgctcctgtgaaagagaaggtagatgtgaagctccaggaactgaaagatgccattgctggtggttcgacacagagcatgaaaactgccatgga

SEQ ID NO: 3316 - DNA, 890 bp, Avena sativa
gatccttactgcatccctttttcctattcttgtgcttttcaattggattagtgttgaacaccattgctatcttctaccattcattagcggctataccatttggcacaatggttgtcatatttgtcctctgggcttttatctctttcccgttggtgctgttgggaactgtagttggtagaaactggagtggtgctccaaataacccatgccgtgtgaagacaatcccacgtcccattccagagaagaagtggtacctaacaccttcagttatctcattgatgggtgggcttctcccttttggcagcatcttcattgagatgtacttcgtgttcacttcattttggaactacaaggtgtactacgtttatggcttcatgttgctagtctttgtcatcctcctaattgtcacggtatgtgtcactattgtgggcacttacttcttgttgaatgctgagaactatcattggcaatggacatcgttcttctcggctgcatctactgccttgtatgtatatctatatgcaatatactattatcacgtgaagacaaagatgtcaggctttttccagactagcttctacttcggctacaccttgatgttctgtctggggctagggatactttgtggtgctattggctacctggggtcaaccctgtttgtcaggagaatctacagaaacattaaatgcgactaaattgcttctccgattctgtaggctattagtgcttagcagatggtgtggtttgtcgcaggtccagtgtggagtaacgcttctaagattctaattaacttttggaaactatacaggaggttgttctcccttcgattaccttttctttcttttggtctttctacctccgtgatggaactggccacataaaatgtatac

SEQ ID NO: 3317 - DNA, 734 bp, Avena sativa
cggatacttagcctattccgttattacatcgacttcgttgtggacattgaggatgaagggttgctggaagtggccattggtggctcgaacatgagccgagctggagaagtgagcggtttcctgaatgcagtagagataatgaggatgaaccaaacgggtggtggcatggatggggatttcccagctatcctggacatggactacctattcagtaaggggattggggaatttgctcgctcgctgctgtgtggtttactcttcgctgggctgtttttggtttgatcacgctggtggtgaggttgaggaccgagctgaaaaacaatggtacgctttggtctcgccagtcaatggattctggtgacgggaagttggctagagcatatcagctggtgcccaccaagacggactattgagcagcatgagatttgaggagcttcaaactgcaacaattatgcgtatctaatgacctaatgttgtgcttcggttgtaagtatggtagtttactagctctacacttctactcttttcatggttgaggtttcaattgtttgagcttggccaatgcagaacatggtaaatgtgtgtatgttagatgtgcctgtattgctactactactttgcttttctctatccaatggcaataattgtcaaatgctcctgtaacttttcsatggtagtatggtactatcataggaaaacttcttatgagatcatgagttagcttagaaaagaaa

SEQ ID NO: 3318 - DNA, 861 bp, Avena sativa
aatgccaatgctgaactttactgcaaacttggcttgccatttgtaatgggcacaacgggtggcgataggcaactgttgaacaaaactgtgctggatgcaaaatgtttttgctgtgatatccccacagatggggaagcaggttgttgcttttcttgctgcgatggaaatcatggcagagaaattccctggtgcatttgcaggttacaaactagaggtcatggagtctcatcaagcgacaaaattggatgtttctggcactgccaaagctgtgatctcttgctttaacaagttgggtgttccgttcgacttgaacgaggtaaacttggttcgtgattccgaagaacaggttgccattgttggcgtcccagaagaacatctctcagggcatgcatttcacaattaccatctcacttcacctgatgagacagtttcgtttgagttccagcacaatgtatgcggccgttcgatatatgcagaggggactgttgatgctgtcttgttcctccataaaaagatacaggatggggcgaacaagaaattatacgatatgatcgatgtgctgagagagggcaacatgagatgaacaggggtattgtagggttagatggctactcatgtagccaagtgatcaccttctgagttttgcgttataactgaatcttaggttcgttgaagaactagttaacttctttatttgtgggcaaaatcgaaagagtcatttggacatggttaacccctaggcttttgtttgaggccagagttaactgttatgatattgtggcaccaatgttgagtaaggaactgtttttgaaataaatacatccccrgaggttgggatagcttaatttttggttgaaaaaa

SEQ ID NO: 3319 - DNA, 1009 bp, Avena sativa
gtgaagagccattcgagtttaagactgacgaggatcaagtaattgaagggtcttgacaaagcagtgcttagcatgaagaaaggggaagtttgcctttctgactattgcccccgagcatgcatatggatctgatgaaacacagcaagatctggctgtagttcctcccaacacaactgtttattatgatgttgaacttgtatcctttgagaaggagaaggaatcatgggagctaaaggataacactgagaagattgaagcggctggtaagaagaaagatgaagggaatgtatggtttaagatgggcaaatatgccagggcttctaagagatatggaaaggctttgagtttcatagagtatgacaactccttcagtgaagaagaaaagcagttgtccaaagcactcaaggtgagctgcaagctcaacgatgctgcatgcaaacttaaacttaaagattacaagggagcgaaagaactgtgtactgaggtcctggaaattgacagcacaaatgtgaaggccttgtacagacgggcacaggcgtacactcatcttgttgaacttgatttggcagagctggatataaaaaacgcactggaaatagatcccgagaacagggatgtgaagatgggttataggaggctgaaggagactgtgaaggagtacaacagaagggatgctaaattctacggaaacataatagagaagctgagcaagctggaagacaaggaagccgacggaagcaagagcctggggcaaagcaagaagcgcggcctgtggccgttagctaggagtctcttcacgaccgacggcagcaacgggtccacgctgcggctcttgctaaggctactgatcccagttatggttttggtcgcactttgtgttgcttactacgtgcagagcggagttcctgaaatcgactgcatcaactgttgacgtgttgattcgtgtgtctagggttgtgtagtgtctatcatgcatgcttctgtgttatgtcctagtggatcaaatcaa

SEQ ID NO: 3320 - DNA, 806 bp, Avena sativa
aaccaacctggcagtcctgctacaaatgctccaagtactggcccagagtccacaacaggaacccctgttccaaatactaatccacttccaaatccttggaacaccaatgctggtgctgcgcacgcagcaacacggtcaggtcctgctggcaataccaggaatgctgcaacaggtggcctaggtgggttgggttcagtagatttgagcagtctgcttggtggtcttggcgggaatgcaggaaccggtgctccaggtggtctaggagggccgggttcagcagatttgagcagtctgcttggtggtccacctgatgcttctcatttgagtcaaatgctgcaaaaccctgctattatgcagatgatgcagaacattatgtctgacccacagtcaatgaaccagatacttaacatgaacccaaatgcacgcaacttgatggaatcaaacactcagttaagggatatgttccaaaatccagaatttcttcgccagatgacatcaccagaggctttgcagcaatcactctcattccagcagacactatcatcacagcttggtcaacatcaacctagccaggatggtaacctaggaggcaatggcacaggcacgcggggaaatgttggcctggacaccttgatgggcatgcttagtgggcttggtgctggaggtggcttaggtgtacctgcctccaatgtgccaccggaggaactctacgcaacacaacttggtcagctccaagaaatgggtttcttcgacactgcagagaacatccgagcgctgatggccacttctgggaatgkcagtctcag

SEQ ID NO: 3321 - DNA, 753 bp, Avena sativa
atcgagagtgccaagtcctttttaaaggctagaggtctcaaaggtgttgatgttttatatgatcctgttgggggcaaacttactcaagatagtttgaaacttctcaattggggtgcacatattctgctcattggatttgctagtggagatgttccagttattcgagctaacattgcacttattaagaactggacaattcatggtctgtactggggaagctacttaattcatcggccagcagtactcattgactcacttaacgaacttctgtcatggctttcaaagggtttgataacagttcagatctcacacacctacaggctccctgaggctcatctcgcttttgctgccttgagagataggaaggccgttggtaaagtcatgcttgttatgggctcttcagcaaaatcaagactttgattcccctcgaatgggtttcccaggaaagcttcgacatctattgtggaatacttgtgctttatcgttgtctgatctaaaatcatcttttttttgagaatcatctaagacagcggtagtgtgcatgccaataatttggtgtacaggcgtacagccattctcgcataaaagccacaagacagcgaaatggttcatatgtatacatcatgtattcgtgtggacaactcactggtgcgtgtgcaggcagtggtccgactaaatgtagtaaaacgaacgaaataaatatcatcacaagttgttgaaacgggttgccggtactcgttggtcgcaaccaaa

SEQ ID NO: 3322 - DNA, 690 bp, Avena sativa
cttgttggctacatagtgtatgagattgatcagcacccatatcagaatgtcttctacaatggcaccattgaggttgttgaggttggaggtttactcagtgttgaatctgtgttccttattacccttggaattgcacttcttggtctctttggattgtgggcttatggccaagtgcaacagctctcaaagaaaacaaagaagagcccgaaggtggaactgggaactggaacaaatgatgccaacatggatgagtggctggagggcactgcgtttgcaaaggagaaagccaagaaaaataaatagattcaaggttgttgagcctagttaatcatgtgaaagcatctagaatgagacaattgagggtagcccttgaacaagtaacttggatagatgagaaagcggaggtgtttgaattagtctcgtggctgcacatgttgttgacgccattttcgaccttgttgtgtactttacagaaagttttcttgaagcacaattttgttgaaggtatatgttatgaatgggatttctgatcttagttgatcatagagctgcatgatttcccacatatttgtttgtattgcactagacagtttctcctttaaccatctgcccgttctttgtcaaatctatacattgatagtactaagtctgttcctgcacaaagagaattgttctcttattggaacaaaa

SEQ ID NO: 3323 - DNA, 499 bp, Avena sativa
gatggcactagtttccagtatgggatttatcagcaagctgttacgctggctacaaaacgcagtgctgttacgcgttatatatattctttattttgggggtttcagcaaataagcactttagctggaaatcttgtcccaagttactttgaaggagaagtcctcttcactatggctattgttggtttgggactgctgctttttgcattacttattggcaacatgcaaaattttctccaagctcttggaagccggaaactagaaatgcaacttcgacggcgtgatgttgagcagtggatgagccatagacgtctgcctagaagatttgagaaggagggttagacatgcagaacggttcacctgggcagctactcaaggagtaaacgaagaagagctcttaagtaatttaccagaagatatccaaagggacatacggcggcacttttttagattccttaataaggttcgactgttcaccttgatggattggccaatctacgat

SEQ ID NO: 3324 - DNA, 658 bp, Avena sativa
tgctgaagcccatgctaaactgagcaaccttggtgcaaagtttgatcctcctgagggattctcgttggacgatgccacaccggctgacgagaagaaagttgctgatccagcaccagcagatgataccaatggagcagcaacagcagatgataccagtgaagcagcaccgcagcccgagccatttgttgccgccaaatactcttccaaaaagagagagctgtcggacacaatgaagcagaagatcagggcagagtacgagggccttggaggcagcccggagaaggctctgcagtccaactacttcctcaacattatgatcgtgattgcggggttggcattcttgacgtctctggttgggaactgagagccttggtctgatcagtctgccttccctttttgttgtgttgttgaaattgaccaatcgtgcagagatccatcgaggtacagaatagtatgtgaccaaactggaatgttttctgatctttttgattgtgagatagaagaaagataaaagtctattttaaactctgaactatatataaatgttctctccgattttgaacccctccgtctggaaaaagatgtgtatttgtcaaattcttatgttactacctcccccgtttagaaatataatacattttatagaaaaaaaaaaaaa

SEQ ID NO: 3325 - DNA, 875 bp, Avena sativa
gaagaaggccaaagagttgggccgtggcggcgtccgggctgccgaggtcgacaagtacctcgagaagtaccgtaaggatgccgagagctgtgtcaatgctgttgaggagtccgtgcgtgcctctcttgggaagaggaaggctgtccccaagccacgtgacgccaagaagcttaaaatttggatgggcaagaagaaggtagcagatgatgagagcgatagcgaaagtgacagtgatgtggatgatgatgaggatgcagatgcaaagcctgcagctcttgatgacgggaattgctcaaatgggtccaacaaaagtgaggatgaaaaggttgatctggcttcagtgtctgggtcacattcagaaggagagtcctcaggtgaaaagtcccagagcagtgattcggagaaaaatggaaatgctcttcaggaatccatggaattagcgattagatcaggatgtgattttgagttggcgagtactttggagtgtgaggggggaacgtcggatcagcctgctcctgagaacacttttgaaaatggaacgtctgagaacggtattagtgctctttcagaagaagttctcaaatcagatgagaaagcagatgtggataatacagtatccaccggttcggctacatcactccgtaatgaccctgaggtgcccccagtagaagaatctgctgatgcaaataacaagtctcttctttcagaggagcctgtggatctgacaacattcagctcagccgcagaattagaggcgcttggcatggagaagcttaagctggagctccagactcgtgggctaaaatgcggtggaaccttacaagagcgtgcagccagacttttcctctgaaacaacccactggataagctaccga

SEQ ID NO: 3326 - DNA, 904 bp, Avena sativa
gaggaccatgctcatgaacatcatcaagagccgtctcgccgcgaaagacaccatgggctacggacacgacctgctggggcttatgctggaggcgtgcgcgccggagcacggggagactccgctcctgagcatggacgagatcatcgacgagtgcaagaccttcttcttcgccggccacgacaccagctcgcacctgctcacgtggaccatgttcttgctcagcacgcacccggagtggcaggagaagctcagggaggaggtaatgggagagtgtggcagcgaggttcccaccggcgacatgctcaacaggctgaagctggtcaacatgttcctgctggaaactctcaggttatacgcccctgtatccgccatccagaggaaggcgggttcagacctcgaggttggtggcatcaaggtgccagaaggcacgatcctgaccatccccatcgcgacgatccatcgtgacaaggaggtctggggtgaggatgctgatgaattcaagcctatgaggttcgagaaaggtgtgaccatggccgcgaagcaccccaatgcgttgctgtctttctcgagcgggccgaggtcgtgcatagggcagaacttcgccatgatcgaagccaaggccgtcatcgccgtcattcttcagaggttctccttcaccctatcacctaagtacgtccatgccccgatggacgtcatcacgctgcggcccaagtttgggcttcccatgctcctaaggagcctcgagatgtagagaacgtgtattcgtgttaactaacacgatgttttgtatttattactccaatggggtttgtattagattgtatactacatatgtgatcaatttagtgtttgccaaccgtctgatgtattcatttgcatgggaaaataataaaacaagaagtat

SEQ ID NO: 3327 - DNA, 925 bp, Avena sativa
ctcggcggatggtgggaggacgtcaacgcgtcgccggcgtggcaggatggcgccttcttctccctctctgccgcctacgccctcgtctccgccgtcgcgctgattcagctcgtcaggatccagcgcagagtgccagagttcggttggaccacgcagaaggtcttccacctcatgaacttcgtcgttaatggggttcgtgccgtcgtattcgggttccatatctgggtcttccttctcccaacaagagtatataagttggtgttactagacctccccggcttgttgttcttctcggcctacaccttgcttgttcttttctgggcagaaatataccaccaggctaggagtctccccacggataagttaaggattatatatgttgccgttaatgccatcgtatatataattcaggtttgcatttgggtataccttggaattaacgataaccagttggttgagctggtcagcaaaatcttcatcgtagctgtctctgctgtggctcttcttggttttgcagtatatggtggaaggctgtttgtcttgctgagacgtttccccattgaatcaaaggggaggaaaaagaagctttatgaggtcgggactgtgacgacaatctgctgcacctgtttcctaataagatgcattgtggtggcagtatctgcattcgatgctgatgtttctttggaggttttggatcatccaatcctagacttcttctattatttgctgacagagatactgccttctgccctggtccttttcatcctccggaagctcccacctaagcgggtgtcgccgcagtaccatccaattaactagaggtcgtgtgcttctgtatgctactatgctaagaataatggataaacttgaaatgtacaaagaaactctacacgtctggtgctagtagaatgttgatgcttgagct

SEQ ID NO: 3328 - DNA, 530 bp, Avena sativa
atctagaactagcaagggcagaaaatggcgcaaaaatgtgaaggctgtcgagaaggaattattacttttggaaaatgacatgaatgctctagaagagatgtaccctcaaggagaaaaggctgaagctacttgggcttttacagttcttgcttacatcggaaaacttgtattcggcgttgttgggttaattatatctattgcttggattgcacatattgtcatatacttgttgattgatcctcccctatcttctttcctgaatgagatcttcataaagctggacgatgtttggggtctgcttgggactgctgcctttgcattcttctgcttctatctcctcattgcagtgattgccggggaaatgatgcttggcctgaaattagtttttatcaccattcacccaatgaaatggggaggaacattgatgaattcgttcctgtttaatgttggactgatcctactttgttccatcagtgtgatccagttctgcgcaacagcctttgcatactactcacaagccactgcagctc

SEQ ID NO: 3329 - DNA, 598 bp, Avena sativa
gacacagatgagttcctcacagatatttcagaggctactttggttatgtcaagtgtggttaagaatggtgggcttgcgcctggtggcttcaacttcgacgcgaaattgcggagggagagcactgatgttgaagacatgtttattgctcatatctcagggatggacaccatggctcgtggcctccacaatgttgccaagctaattgaggatggttcccttgatgagcttgtccgcaagcgctaccagagctttgatagtgagatcggtgccatgattgaggctgggaaaggagactttgagacactagaaaagaaggtcttggagtggggtgaaccaattgttccatctggcaaacaggaactggctgagatgctgttccaatctgctctgtagacgacggtccacaattctaggaataagcaaagagggcatccttggaacgccaagttggccttgtcactatgggcaatgttgtagttagtcatacatgcagcgaaccatgtaaacaactgtgtggaactgaaaatgatgtaaccttgtatcagaatcatactcattgctcaacacggaattgaactgaactcaaaaaaaaaaaaaa

SEQ ID NO: 3330 - DNA, 854 bp, Avena sativa
gaacagctatggtggtggtggtgggggtggaggacgccgtggtggtgtctctaggcacacggaatatcgtgttctggttactggactaccttcttctgcatcatggcaagatctaaaggatcacatgagaaaggctggtgatgtttgcttctctgaggtgtatcgtgagggcggtggtacgattggaattgttgattatacaaactatgatgatatgaagtatgctataaggaagcttgatgatactgaatttaagaatgccttctctcgagctcctataagggtgaaggagtatgctggcaaaaaaagccgctcctattcacgaagccgcagcagaagccgaagtcgcagctacagcagaagcaggagtcctagcaagtctccaaagaaaaagccatcacgccgttcagcgtcaagatctcggtcgagatcagtttcttctcattcatcaaagggacgttctccatcaagatcaccagcaaaatccctatcccctattgcatctcccgccaatggtgtagcagcaagcccaaagaaacgtagcccaagcaggagcccatcacgttcccgatctcctgatgccaaatcagaataaaactgggggaatagaggcatggtcttcaaatacttcatatttgtcgtcctcgtcaacttcggaatctgatgttgaagtcctatccatatattatgtctgttactattctaggtacctggatatgacagttctgtaaaacttatttggatggatatttcttgatacttatgcattttctccattgtgagccttttcctggattatttattgtcacttgaagatatttgaaatcagtaatgtaaaatgcaagctgggattg

SEQ ID NO: 3331 - DNA, 821 bp, Avena sativa
cgtgtacctggtgctgacctccccggaggtcctggtggagaacttctgcgggcaggtgtgcggcttccactacttcaccttcccgtccgtggtggggtacacgctgccctacgcgtgggtgggcaactcggcgcggcggtgccctgaggtgtgcgcgtacccgttcgccatcccggcgtacgttcccgggcggacccccgaggcggcgccgaacggggacgtgggcgtggacggcatggtgagcgtcatcgcgcacgagctggcggagatggcgtccaacccgctggccaacgcgtggtacgccggcggggacccgtcgtttccgaccgagatcgcggacctctgcgaggggatctacgggaccggcggcggcggcgcgtacaccgggcagctgctgaccgacgggcggtccggcgcgtcgtacaacgtgaacggcgtcgggggccggaggttcttggtgcagtgggtgtgggacccctaccgcagctactgctccggccccaacgcgctcgaccagcactaggagcattgcgccggccgccgcacctagcggtagtattccgccatggatggattcctccctctgaatcctccatgtactagctgggagcgtttatttttgtatagagtcagtgagctgcgagcatggtgttgagccatgtctgcgtgcggaccatgttgttttgaatcttcaaacttgatgatgttattctctttcattcccatgctcagttcgctcgaattttgagcagtaatttggtagtagtagatgccaattcaatccccgtagaaaaacccattgcacaaatgtaggacaagta

SEQ ID NO: 3332 - DNA, 828 bp, Avena sativa
tatcggctgcctgccttacgctatcgttcaccgccccgacatcggcgcacagaaggacagcgtcggctgctctgtcacctacaacaaggtcgcgcagctcttcaaccaaaggctgaaggagaccgtggctcgtctccggaaaacgtaccctgacgccgcgttcacctacgtcgacgtgtacactgccaagtacaagctgatcagccaagccaagaagctaggctttgacgaccctctgctgacctgctgcgggcacgacgccggcccgtacaactacgacccgaaggtcggttgcggcgggaaggtactggtgaacgggaagtgggtggtgttggggaaatcctgcgacgatccgtccaggagggtgagctgggatggcgtccacttcaccgaggctgccaacaagtttgtcttcgaccagatcgtcggcggcgcgctctcggacccggctgtgccactaagacaggcttgccggagcaaggggcagtgaactacaagcggaccatttgtcaggttggccgctctgctgctactgctgctagctttgtaagcgtagcattcttgagttatgcaatatgctccaacctgcttccttgtgatagtggggagaagggaatgtgaatcacatggaagagcaacggaatccatatgtcttgattacacattctgtagaagttcttggttttagacactcctggttagtaagcgcgcatgaaacatgttgccacttggcagtctatgtattggttcagtttcatcctggcctgggatgagtaccagtaccgataaacaattcttactctccatcgatccagcgagatatacaaa

SEQ ID NO: 3333 - DNA, 919 bp, Avena sativa
ttcagctttcatcattccaacttcaacttgcttggttgagctaattgagactccgttcctggtggtgactctgggtgagatagagattgttaatctagagagggtaggctttggaacaaagaactttgacatggctatcgtgtttaaggacttcaagaaggatgtgcttcgcatcgattccattccgtcaagttcgcttgacgcaataaaggagtggcttgacacaactgatctcaagtattatgagagcaagctgaacctgagttggcgtcctattctgaaaactatcattgatgatcctcggaagtttgttgaagatggtggctgggagttcctgaatatggagggaagcgattctgaggcagaggaatctgaggaatcggatcaggggtatgagccttctgatgctgagcccgagtctgagtcagaagaggatgattccgacagtgcgtccttggtggaatcagatgaggatgaggaggaggattctgatgaagactccgaggaagagaagggcaaaacctgggatgagcttgaacgggaggcaacccacgcagaccgggagcatggtgcagaatcagacagcgaggatgagaggaggcgccgcaaggtcaagaactttagcaagtctggtccaccgccacaacgtggtagtggtggtggcagcagcagcagcagcaagcatcgtccaccgccagagcgtggaagcggtagcaagcctcgtccatcgccacctggtagctccaagggagggccctcaaagaagcccaggttcaggtgattggtacccatggttgccaagccttggttacgtcctctgaaagtctgaatctgcccttctttcggaggcatggcatggttggttgtagccgaatcctcgtttgctctttagaatatcgtggtacttgttctgcagtag

SEQ ID NO: 3334 - DNA, 660 bp, Avena sativa
tgctagagatgctttccttgaaataaggcttcatatgcgagaaatgggtgtggcagctggtattccaattgagccggagtcacagacacaacttctggatgccactatgaatatggaaggtgttctactagctggtgttcctggagccggtggctttgatgcagttttctcagtgaccttaggtgaagcaagtggcgctgtagtgaatgcttggagctctgctggcgtgctcccgcttcttgttcgagaagactctcggggtgtttcactggaagctggtgatccaagaacaagggaggtgtcaaccgctgtgtcatccatacagattaactgatatattgttgttgatatattcagtaatctttccctacgatgtatctctggtatctcattcatttaggagtagcacaaccggacaacaattctcttggttagaataagtgctcagcacggaggattgtagtacgatttactttgataggacagtgcaagagtataaaatgggaaggtcttggtaccctgcccgtggcattgttgtattgcctgtagacatggaatgtgcgtgatgcagtgtgtagctttttgcaatgaactctgtgttagaattctgaaacttctctgaaactcgtgacagttttggtggcttatgataaaaaaaaa

SEQ ID NO: 3335 - DNA, 798 bp, Avena sativa
ttggctcgcagtttttcctgaaggaactgattattctgagaagaaatgtatcaaaagtcaagagtacgcggcagaacacggtttgcctattctgaaaaatgtcctccttcccaagataaagggtttcaattgctgcctgcaagagctgaggagtaacttagatgctgtctacgacattacgatcgcgtacaagcaccggctgccaacttttatggacaacgtatatggcgtcgacccttccgaagtccacatccacaccgagatcatccaggtctccgacatacctgtaccagaggacgaagtctccgactggctcatggagaggttcaggctcaaggacgatctcctgtccgagttcctgaaactgggccacttccccaacgaaggaaccgaggaagagatgtccacgctcaagtgcgtcgcaaatttcgtggcggtgatcggcatgacgtgcgtcctcagctacctgaccctgttcacgtccgtgtggttcaggatcttcgtggtgtgcagcgcttcgttcctcacgtttgccacattgtacggcgtgcatgttccgcaacttgtggttgtcccggaggctggcgcccatgccaagaaatcttcctgaacgtcgctgtgtgtaacttttgactggaagctgtgtctcagtatgcattagaactatgtttactgaatatacgcagcctgtgtgccatcctcttttgtgtttgagtatgatcaggcttagttgggtactgaggcagctggctgagtgtgcgtgctgtcgcaatgggaagagtaattgcagaagctacg

SEQ ID NO: 3336 - DNA, 854 bp, Avena sativa
gaaagagctcatgtggatttggaaacccactacacaaaggaatacctcgatgagaaacttgagtcctgcacaaggagagcgatcctctacaaagaatatgtgaggaacatatcatcttcagggatgcaatctagttgtggctttgaaggtcaaattaatgcatgttggacccacaaaatgacaactaaagaactggatacgatacgtggtgctggttttctagtttcagttattcacggaaggtctgatattattgcgcaaatatgccatgcgaaacggctcgcggaaaggcttcttcctgctgcgagaatggtagaccttcagggtgcacatctagtaagccatgaaagaccagatgaggtcaacaacgcaatgatggacctgataaaggccactaaatacgcgatgaaacctcacgagtggtcgtcccagccagagatcacatcagaaactggcgcacttatttctacgagatctgtaaccctcactttacgaaaagaggaagctggcaacactgctgtagcagtgtataactttcttgcaaagttccaactgagctttctttatctaataggactgatagtgatggggtttgagcatatgaggaacattgtgagagtaatgaagcctgtgagggttgcagcaatcgagtcataaagaaacagagacatgtaaattattcccggacccgtcgaggagatcatatttcatgtctcctccatataccgtggagatgattttagagtagcatctccaaaaaggctgaacttattttccctcgagaaagcctctgctctcagcagaagaccagtaccgagacgaggagctacggtacagtgtgcatgcacctggac

SEQ ID NO: 3337 - DNA, 485 bp, Avena sativa
ctgaaatggtcccggagcttgagaaagccgggctttcatttgttggcaaggatgaaagtggaagaaggatggagattatcgagatacccaatcatgagttcttcattggtgcacaattccaccctgaattcaagtcaagaccagggaagccatctccacttttcttagggttaatagcagcggcgtccggacagctagacctgctgctccagcaaaactgcggcattgtcagcctgaactcggcacccaggtgtaccaccaacggcactgcagtgaccccggtaaagaaaccgtacgcgcccatgaagaagaagccactgaacagcctggttaacgggttctacgcgaatggcaacggcatccaaatctaactgagcagccgccagccgcagcatcgtacaatattcgtatctgctgctttgcttgtaccctcttttttccctgggttatctttggttttggatttgacactgctgtaaatgagg

SEQ ID NO: 3338 - DNA, 951 bp, Avena sativa
atgtgatagcattgtccaagagccctctcatctctgaacgggttggtgatagtgtaatcattagcaagaacaacgaatggcaaatcaaagtaaacagtcaatcgggaacaattgacagctggaagatcaacaacgttgagcttctgagcaagggaatacttccttgcttctggcgtgcgccaactgacaatgacaatggaggcttctacaccaagtgctatgctaaaaggtggagagaagccttccttgacaatatctccttctgcagcagccaattctcagtaaaagagctgccagaccacaccgtggaggtttccaccatatattatggtcttcctgggcacctggcaaaacccgctgatgacgttgctctttcagaagcttccgagtccgcgctcttccgggtccatatgcgctgctggatctacgactcaggcgacctggttcttgggtacgaggtaaaccccaagagcgaccttcccccgcttccacgggtgggtgtcgtgttcaatgccgataagtccctggaccgtgtcacgtggtacgggagaggcctgttcgagtgctaccctgaccgtaaggccgctgcgcacgtcggcgtgtacgagagtagcgtggaggaccttcacgtgccctacatcgtcccaggtgagtgtggtggtcgtgctgacgtcaggtgggtggcgcttcggaacgctgacgggtatggtctctttgcctcggtccacggcgagtccccgccgatgcaggtgagtgccagctactacggcactgtggagctcgaccgggcgacccataaccacaagctggtcaagagagacgacatagaggtgcatcttgatcacaggcacatgggggtgggaggcgacgacagctggacgccgtgcgtgcacgagcagtacctgctaccgccggtgagctacaagttctcggtgaggctgtgccctgtgc

SEQ ID NO: 3339 - DNA, 944 bp, Avena sativa
tgtgtcgtgcatttgaccgtgttttcaaagagcacttagatggcggtcgaccaggtggagatcgcatttatggtgtctttgaccatcagttacctgcagcactgaaaaagcttccattcgataaacatctatctttgcaaaatgttcgaaaagtcatttctgaagctgatggttaccagccccatttgattgcccctgagcaaggttacagaagactcatcgatagttcactcagctactttaggggtccagctgaagcttcagttgatgcggtccatttggtattgaaggagctggtccgtagatcgattgcagcaacagaggaattgaagcgtttcccaacacttcaatcagatatagctgctgcagccaatgaaagcctggaaagattccgtgaggatggccgaaagacggttattcgtctagttgacatggaggccagttacctaacagttgaattcttccggaaacttcccactgaaccagataaaggggctaacaataacactccagccaatgacagatatcaggacaaccatctcagaagaattgggtcaaatgtatcatcttacattaacatggtttgtgatacattgaggaacacgattccgaaagccgttgtacattgtcaagtgaaggaggcaaaaagaaacttgctgaaccgtttctatgctcatgtgggaagcaaagagaagaaacagctgagcgcgatgttggacgaggaccctggtttgatggagaagagggattctctcgtgaagaagcttgagctgtacaagtctgcaaggaatgagatcgactcggttgcatggaaatgatcggctggaaagtcaaggcgggaaacatgtttggacgtgtttgcagtagaaatgctccattcgtttgcgtatgtgcctaacattggatgatttgtacacgggtcttttcttgctgagtgttctcta

SEQ ID NO: 3340 - DNA, 882 bp, Avena sativa
aagaccactcacacagatttaacgcaaagtcccctggatcagatatcgctgccgaggcagcagcagccatggcagcagcatcaatggttttcaaatccactgatactacatattctgatacacttctccaacatgcacagaagttgtttacctttgctgatacttatagaggaatctctagtgacacttatccaaagctccagaactactataactcaactggttatgctgatgagctcctgtggggagcaagttggctctatcatgccacaggagatcagacgtatctcagttacgcgactgtagagaatgggaaagcttatgctgattggggacggccaacatggttcagctgggatgacaagctccccgggacacaggttcttttgtcaagagtaaatttctttggatccaataaggcatccaatgctgaaaactcgggactcaaatcgtacagagacactgctgaagctgtcatttgtgggcttctaccagattctccatcagccactggtagcaggactagcggagggttggtgtggataagtgggtggaattctctccagcatgccacaaatgcagcattccttgctgttgtttatagcgactacatgctgacgtcacagacagcagctgtggagtgcagtgggaagtattttagtccaacagatatacgcaatttcgctatatcacaggcgaactacatattgggtgacaacccaatgaagcttagctacctcgtgggatacgggagcaactatccacagcaggtgcaccacaggggggcatcgattccctcagatgtgaaaacaggctgcaaaggattcgactacctccactcgaccagtccgaacccaaatatcgccatgggagcccttgtag

SEQ ID NO: 3341 - DNA, 900 bp, Avena sativa
tggactttgtaaatggtggccatctcttcttccagcttttaccaacaggggtttgtttagggaggagcttgcgcgcatatatactgctgaaattgtatctgctgtagcccaccttcatgccaatgggattatgcatagagatctgaagcctgagaacatcttactggatgctcgtggccatgctatgctgaccgattttggcctggcaaaggagttcgatgagaacactagatcaaattcaatgtgcggcaccgtggagtatatggccccagaaattgttcagggccgtggtcatgataaggctgcagactggtggagtgtggggatccttcttttcgaaatgcttacgggcaagcctccattttttggtggtaacagggacaaaattcagcagaagatagtgaaggagaagatgaagcttccgtcgtatttgtctagtgaagttcattctttgcttaaagggctactgcacaaagaagctggcaagcgactgggaagcggtctgggcggcagcgatgaaataaagaaccacaagtggttcaaagcagtaaactggaagagactcgaggctcgacagatccagccaagcttctgcccgaatgttgccgggcagacctgcattgcaaactttgacgagtgctggacgagtatgccggtgctggactctccagtagccagtcccgtcgctgcagatagcaactttgtgggattcagttacgtgcgtccggcgccgttctttcagaagccgagtcctctaggctgaagcctgcttttaatatgtagttctgatgattatctgtgaaaaccggtgtcttttctttgctcaagacagtaagatattatgctgtgcgtgtttgagaggcttatatttgtcaattggcccagagggcagttaggact

SEQ ID NO: 3342 - DNA, 698 bp, Avena sativa
ggctggcgtccacgccgcagctcaagcgccgccgccgcaaggcgcacgagcggaagaaagggattccgtggaccgaggaggagcaccgtaagttcctggacggtctgaagcagctgggcaaaggggactggcgaggcatctccaagaacttcgtgaccagcaggacggccacgcaggtggccagccacgcccagaagtacttcctccggcagaccaaccccggcaagaagaagcgccgcgccagcctcttcgacgtcggcatcgccgtcgcgggccaccacagccacgatgaccaccagctgccaagtcctcacagtcacagtgttggaaccatgcttgctcctgctgaagagatactccacaccgaccgtggggacgtgcatgtacgtagctatgccggattcaccatgggcaacaacaacaacatcatgcaggttgatggactaactgaccatgcggtgaagagaccaaagttttcctccgggatgtcgctcgccgccatggccgcctcggggctggagctggcgatggcctcttcatccgccagcagcatccttgagctcagcatcgcgcctcctcatcatcatcgcggcaccatcggcggcatcaaggcgctgtgatctgctgccggacatgaccaacgacaggaacccgtgccacccagctccctgtatgtgctccatggtgggcggccgcaa

SEQ ID NO: 3343 - DNA, 985 bp, Avena sativa
ggatccgcatctggagctccgaataaaccccgaaccctagccgctgccgccgtcgccgccgccgccgccggccgccgggccgccgcagccatgaacgccttccggttcctcggggacatgacccacctcttctcggtcatcgtcctcctcctcaagatctacgccaacaagtcctgctcaggggtgtcgaggaagacgcaggagctgtacctggcggtcttcgtggcgcggtacctggacctcttcaccgactacatctcgctctacaacaccgtcatgaaggtcgtcttcatcagcacctcggccgcgatcgtctggtacatgcggcgccacccgcaggtgcgccggacctacgacaaggaccaggacaccttccgccacgtcttcctcgccgccgccgcgttcgtgctcgcgctcatcttcaacgaccgcttcactttccgggagatatgctgggcgttttccatttacttggaggcagtggctattctccctcagttagttttactccagagaagcagaaatgtggataacttgactggacaatatgttctctttctcggggcctaccgtgcattctacatcctgaactggatctaccgttacttcacggagggtcaccaaagccgatggatcccttggattgctggtttggtccaaacaggtctatatgcagatttcttctactactatttcttgagttggaagaacaacgtgaagctggagctgcccgcctgagcatgccaggccatgtcagagaaggaggcgcacattgtgtgacttggaagtgccatcgagagtaccagttggtaatatcggcatgaagatgcatgtcaatgtggtgaccagttgcagtttgtagggttgaatcttctttaaccgtgagaaaatacatgatgatctgtattggtttccttggcaaaaatctgttaacgtttcagaagctaacagtttgtggccgcacaacagtagtagactagttcca

SEQ ID NO: 3344 - DNA, 932 bp, Avena sativa
atgatggagatgcaagggatatttttgctgcacttaaaagaagcccaacagagcctaacccagcagcttcaaaaggttttaccttcagtgaggttaattgttggcgaaccagcaacagcaaggtagtctgctgcaatttttcttacgacggcaagatcttggctagtgctggacatgaaaagaaggccgtactttggaacatggacactttccagacacactatttaccagaagagcacactggcattatcactgatgtccgtttcagacctatctctacacagatggcaacatcatcttttgacggaacaattaaactatggaatgctgcagatcctggatactctcagcatacatttactgggcataatggccaggtcacatcactagattttcatccaaagaggacagaacttttgtgctcttgtgatggcaatggtgaaatccgatactggaatgtgactcaaccttcctgtgtgcgtgttatgaagggtggtactgctcaagttcgttttcaacctaacaccggacaatttatcgcagctgcttctgaaaatgttgtttctatatttgatgttgacacacataccaagaagtatatcttgcagggccataacactgacgtgcagtcagtctgctgggacaatactggagagtaccttgcgtctgtcagccaggatctagttaaggtttggtcaatatcatcaggagagtgtattcatgaggtcagctcaaatggaaataagttccattcttgtgtgttccacccaagttataccaatctgttggtgattggaggctaccagtctttggagctatggaacatggtaaagaaccaaagcatgacggtacaggcccacgaaggtctgattgcggctttggcgcaatcagcagtaactgggatggtggcttctgcgagccacgacaattct

SEQ ID NO: 3345 - DNA, 801 bp, Avena sativa
tcagcaggattttcatgcaaatttaccgaggcctcggaaaattctgttcagagggagtatgcttttacagtcgggtggtcagcttgtttttctactacttgttctctcaaatgtgagcacatgccacaagaatgcttcacctggtagtagttccttcatatactatatattttccattcatccattcaaaaaggttaacatgtgtgtacatggaaaatttacaagaggacctcttcatcaggacgccaccgtcacgggggaaaccggtccttccactcagctcatccgctggaacagactttctcctgtgtcgaactgaggcaacacaaacggtcgtcgtcaacatacgtggcattaagccccatcatccatgagccaactgatatgtcatcatgggcatagctctgcagcgatgcactgtttatgttgatgtagcgagccaaattgtttgagaggataaataaagaaccagaagcatggcgaaaatacgtctttgcatctccaaatttccaccattcaggttcataccattgtagctcctcttcactaacgaccagtccagatttcatgcagcccatgtacaatccttggctacctcgacgttcttcaagcatctcaattaacccagccaagtcaagattaatgttatcatcaactttgacgtagaactctgcatcccaagcttctattgctgcactgaagaaaaatttaactttcctaggtaactcctctgcagcttcctcatggctttccagaatcaagaaatcatttgtccttctactttcatcattgatatcccgg

SEQ ID NO: 3346 - DNA, 644 bp, Avena sativa
gctgtgccttcgaacagaaactagtggatatgccagcggatgaagctgctaagtattgcgctgaaaaccagacaataagtttgatccccaaaatcatcaagactggtttttcagcaattcatcttatttacttcttcactgctggtcctgatgaggtaaagtgttggcagatcagaaagcaaagtaaagcccctcaagctgctggtgcaattcacactgattttgaaagaggcttcatatgtgctgaggtaatgaagtttgaggatctaaaagagctgggcactgaatctgctgttaaggctgctggaaagtacaggcaggaaggaaagacgtacgtggtgcaggatggagacatcatcttcttcaagttcaatgtttctggaggcggaaagaagtgataggtgccgaaagatcgtagtgatttgacagggttctgcattttatcgaaacttctgtatttttgagttcgcttgcaagtagccaggtaccgttactagttggattgtacgaggaggctatataggcaccaaatgattgtgtaacgagcctaaacaatactggaagaatttatatggtgttgctttcaggcattcagctatgagtgactgggtatgctcactttttctttgagagaaaaaaaaaaa

SEQ ID NO: 3347 - DNA, 623 bp, Avena sativa
ggcctgccatcagctgttccgccctcgtctgagggtacaaatggcatgctcccggccaagagtgcaaacagcaccgccatagtaaccccttcatcttcagcattggcagtgagagcggcagcacttggttctagaggagagcagcaacctgtttctggaagactcgcagcaagagccaggagcacgggagacgtggagaggatgatgcaggagatgccatgcgtgtgcaccaaggggctccccaacggtaggaatattgaaggcttcctgtacaagtacaggagggctgaagaggtgaggatcgtgtgcgtgtgccatggtagcttcctaactcctgcggagtttgtgaagcatgctggaggcggcgaagtcgccaacccgctgaggcacattgtcgtcaaccctgttgcccattcgttatcttagaccaccgcatgcggaccgcgcaagtgttctgtgtgtagcttcagccataagcttagcttcaaactagaatctcatcgtttatgttacagagttacattacagtgcttgttatcataaagacataagacatggtgggagatagctcctatgaacaactaaatagtaacataacagattgatcattgtcagaaaaaaaa

SEQ ID NO: 3348 - DNA, 932 bp, Avena sativa
agcagcttaaatactctgagaaaaaagtaagagaatctggcttagaggagcacataacttttctgctgtgtgactaccgtcagataccacctggaaagtatgacagaatcataatcgtctgtatgatcgaacatgttggcgatgaatacatggacggattttttgcccgttgcgagtctcacttggctgaagatggcatattcgtcctccagttcatctcagctccagaggaacggtacgaccaatacaggaaaaggccagacttcttaaaagaatacatattccctggcggttgccttccttccttggcccgtgtaacgtctgccatgaccatgtcatcaaggttctgcatagagcatgttgagaatattgggccccattactacccaactttgatgtgctggttcgacaactttattaccaacaaagatcaagttttggcctgggctttgatgaaaagttcatccgtatatgggagtactacctcatatactctgcggcttcttgcaagtcaggggcagttagagattaccaggttgttttctctcgtccaggcaacagtcggctcctgcgccttgatggctaaaaacatatccgtctgcgctcagctgtcgaactgttcttcgctttgtagtagtgtcttgttagactttcagtttgtgcttatggtctgtaatattttgtaccctggagactcctcgagttgatatggtggtagtaggtttttacccgtaggggtgttcgagattgaacactcacagcgggtttcctactagtgcccccttttaataagtcaatcctggaattgttggttcataactgcagccttatcaggtggtttggtcagctatcctcttgttttaatcatgcaatatttagtctccgtgacagtgtattgttatttatcaataaacttgttgatgaacaaaaaa

SEQ ID NO: 3349 - DNA, 740 bp, Avena sativa
ctagatgctaggctatttcgctatctcggccaagatccggagttcagtaacaagggccgaacattggttgtccagtactctataaagtttgagcaggacattgagtgtggtggcggctatattaagctaatgtctggctatgtcaaccagaagaaatatagtggagacactccatacagcttgatgtttgggccagatatctgtgggactcaaacaaaaaagctgcatcttatactttcttaccaggggcagaactaccctgtcaagaaagatctacagtgtgaaactgacaggttgacgcatgtttacacgttcattcttaggcccgacgcatcttatagtatacttgttgataatcgcgaaagagaatctgggagcatgtatactgattgggacatcttacctcctcgtaaaattaaggaagttaatgccaaaaagcctaaggattgggatgacagagagtacattgaggatcctgatcaagtaaaaccagagggctatgattctattccgagagagattcctgacccaaaggacaaaaagcctgacacttgggacgatgatgatgatggcatttggaagcctagaaggataccgaatccagcatacaaaggaacatggaagcgcaagaaaattaagaaccctaactacaagggtaaatggaagatcccatggattgataatccagagtttgaggatgatccagatttgtacgtactgaaacctttgaagtatattgg

SEQ ID NO: 3350 - DNA, 788 bp, Avena sativa
  modified_base (784)..(784): a, c, t, g, unknown or other
ctatacttcctgttccccttgatttcgctcccgttgctccacccaatccagatcatcatccgtgctgatgcggttcgcatgcagctccttgggttcatcatcgctttgttcgtgtctggtgctgggttctacttcaagaaccacaggtggagggctgcacacatcatcgtcattgctcttgtacagagcacagccaatggcatcctgcactcattcggacgtgtcctgctgctcgacgcctcaccaccgggcaaggagggtgcatttgccatctggtatgcgtatgtgcgctgcatcggcgcgatgatcggctttgccgtcgcatcggctggacctggccgcgcaggaggatcgtttgctgctgcattcctgggctgcttcctgggcatcattgtgctcatcttcggaaacgtcagcaacatcggggcgctgaaggccgccgggcatctcaagggatcagaggacgagaagaggatgggtgagaaaggcgagggcatgagcgcggttgctgattcaggtgaagggagagggagggtatgaacatgattgattcacagtgggtgggaaagattgcattgttgtgtgtgtgagagggatttgttcttctttcttgtttcttgctcatgtttcagtgacattgttgttaatccggtgctttgcccctttgctgcatgattatgttgacatagtggtagaagggaagtgtgctagtggctgttaatgtgttattcttttgcttggaagacaattgtaactgatgatatgtttctttgatgcatgattntgtt

SEQ ID NO: 3351 - DNA, 976 bp, Avena sativa
ataccagaggatatggctcacaccttcagtaaatttgcacacagtgagaacgcaacaacgaaatgtcacaacggcagcgggttgggcctggccctctctagaagattcgtcggcctaatgcagggtgacatctggctcgaaagcgaaggcaaaggcaagggctgtgccgccacgttcttcgtgagactcggcacgcccaggaaaccgaacgcgaatcaccgaagaatgatgcaaccaagccaaggaggcagaggcccgccaggtggcgcggatgctcacagcatatcgataatggacggcgacgcaggggtccctagggcccggtaccagtcgatcgcgtgagtgagaagcagaagcgttgcaggcaggcaacctcggctgacgggatgtgggtggcaggcctggttttgtgaccggaattgatagctcctgatgggttgagctgtagggggtggttgggtgagtccggagtagtggcttgcccttattggcggcataagagcagtgttgtgctgtacatgagggtcttgttagggaggcaaaagctgatattacatttaggcaaacaccagtagcgaaatcctgtgaaatgccagtgagccgcgagtgtataattcttaaacatgaacctggaagcattgatcttactaatggctcgtccatagccaacctcagcccatccatagccaacctcagcccatccttttcagaccaaaggcgccattggagctcatcccaatgacctaactagtgtgagagcacatcgaggggagaagatagggcccctaacgttaggcatggcaaggggacagggggtgcccattattgaataggctgttatagacaatggtgaaccttgtctatagacaaaaataaaatatatcattccaatggtgcatgttaggccataggttggtatagacaaaaagaaaagaaaatttaacaaacttcagattggggtatttaacatgcttag

SEQ ID NO: 3352 - DNA, 550 bp, Avena sativa
aagatatccttgaaatggaaatgaagctcctggaagcactcgactattatttggttgtttaccatccataccgtcctcttttacagttattgcaggatgctggcataacagatctgactcaattcgcctggggccttgtcaatgatacttacaagatggatcttattctcatatatcctccctatatgattgcattggcctgcatatacatcgcaagtgttcttaaagataaggacacaacttcctggttcgaagaactccgtgctgacatgaacattgtcaagaatatttctatggaaatcttggacttctacgatacctacaagattgatcctatcaggggcctccaggaggacaagatcattcctgtgatgaacaagttgccgtcaaaggcctgaagccagatatagcaccgctctcagtctaaccgcttaacccaccttacactgagtgtgcgtatgctgcacatcttggacaaattcaaatttgwgatttgtggaatgccctggtggacttgaggagggcattagctgatagtaggagttatccc

SEQ ID NO: 3353 - DNA, 881 bp, Avena sativa
gcgcttgaaggaatagtaactagggatgtgtcttgtggtggggttcactcttgtgctgtaaccggaggtggagccctctatgcttggggcggaggacatgtgggtcagctggggctcggacctcaaagcagtttcttttcttgcgctcttaatggatccgacatgcaacttcgtaacattccagtcctggtcataccgtcaggtgtacagcttgttacgtgtggacattcccacacacttatatctatgaaagatggccgcatatatggatggggctataacagttatggtcaggcggctaatgagaaatctacttatgcttggtatccctctccagttgattggtgtgttggagaggtgaggagacttgctgcaggtggtggccattcagctgtgctaactgatgcatcctccttaaaagtactatgtgaattcaagttagcagagactgtaaatatgtcgaatgctcggctaatagaagatattgcatcacgaactggggctgatgctttggcacgcctgtgtgagaaattaagggaacatttggttgagcaaggagactctgaacttttggaaatgcatggggttgaaaagattgaggctaaagccggttagactagtaagaacctatgatcccttcttgccatacacattcattcaaccattattgtgttgtattccatgggaagtagaaatcgatttctacttgactgtgaaacctcatcgatggtctcccaagcggaacaaaggggtggagactgtatatgtatcatgaacttccaagtggtttgtatcacgaagtgaaaacatggacgtgggaacttcacgagattatacttgcaaactcatatatgtcagtaaatgtgataagttgcacaaac

SEQ ID NO: 3354 - DNA, 845 bp, Avena sativa
ttggtccttaagggccgtgcagtgcatgaactttctgctgtcttgggtgatctcgattatcatcaggcccaaactatatatgtccgactgcgctgatatttcacctcggtacaggtactccggagccatgtatccgtacgatccgacgactgtttgcgtgcacagtctggtttgctcctggccaaagactctggatagcgcgaaatcggcaatctttgggaccatgtttgcgtcgagcagtatattttcaggctttaggtccatgtggatgatggggatgtccagcttgtgcaggtaatgcaggcccttgcagatgcccttgattattttgaagcgcgtgtcccagtcgatgccgggctcggccgaagagttgttctgttcggccgctttgtccccaaagaggttatcctgaaggcttccgacaggcaaatactcgtagcagagtaagctctctgttatgtccgcctggatgtatctcccgtcgagctgcaccagtttcttgttggtctcgctgcagaagccgaccagctgcacgatgttgtcgtgcttgagcaccatcacgttctgcacctccttcttgaaggtcttgtcggccggcatcggcgcgttctcctgcagcttcttcacggcgatcaccctgtccccgtccggcacaacccccatgtagagcgttccgaacgggctcccgctgattttccggtcctcggcgaagtcgttggtgatcttcttcaggaagtcgtacggtagctctgccggcagctccgggctctgggttttgcttccggcggcggcggcggccattatttcgttggagaggatcgatggaggccttgagggatcctggg

SEQ ID NO: 3355 - DNA, 629 bp, Avena sativa
gacacatcacacaggataattagccttgtggaaaagtggaaccacgtggaaggaaccccacaggttgcgtacacctttgatgctgggcctaatgccgtcctaatagcccgaaaccgcaaaactgcggctcttctccttcagaggctgctgtactgcttccctccacaagacaatgatttggagagctatatgctcggcgacaaattgatcctaagcgacgccggagtgcaatccgtagcagacgtcgaggcccttccagcgcctccggagatgaagactccaaaccaaaagttcaaaggtgatgttagctacttcatctgcagcaggcctggggctggccccaaagttctcacggacgagagccacgccttgattgattcagccacggggctcgcgaaaggagtgtagtttaggtttacgtgatatttggcttccattgtttggacatttatgcgtagacatttcacgtgtgttgtacactcttgtagcagcagtgtagctttgaacgtgtatgtttccacaattttgtaagactgttgtagtattgactgttgttgctgcccaaagagcacaattcttaattttccaataaagttgagttgaataaagttttatacaataaaaaaaaa

SEQ ID NO: 3356 - DNA, 667 bp, Avena sativa
gagtacctggcatcactccaagctgatcaagaaaaggagatgaagactctacaagaagctgagctgcgtcagttggaagaaactgctgcaagagaagctgctcttgaaaaacaaaagcaagaggaggaggaaaggcgtaaaaagcaacttgagaaagaggagcttgagtcaagtcttgccgccaaacaagcatcgttgccatcggagccaccgtcagacaaggaaggtgttatcacacttgtagttcgcatgcctgatggtagtcgacaggggcgtcgcttcttaaagtctgataaattccagtcccttttcgatttcttagatgttggcaggatttgcaggccgggaacctacagactggtacggacgtatcccaggcgcgcatttacccctgccgatggcgacctatcctttagtgaacttgggctaacgagcaagcaggaggctttatttatagagcagatcactgaatagaggcaaagatttagacgcgactagagatagcatttgagagttggggttttacttgtttatatatatgcatatggcttgtgttacagaattttaaattgctgttaggatttgtgtccggtgaaatcgtgttttcttttgcggatggtggctatactttgcgccttcggtttatgtaatatcaggtaatcgaaac

SEQ ID NO: 3357 - DNA, 853 bp, Avena sativa
agaccctgtacacacactacggttgggagactgtggatgtgacggtcccagagatcgaggagatgcggctagcgcactacgtgacaatcggttcggaatgcactgcttccctatccaagtatctggacaaactgaagaggtccgagatcgggtgggacgtgagagtcgcgctgggcgtctacggttcattcagcagcagagcctacctgaactcgcaacgactccggaaccgtcagatgttcttccacaaagagatcttcaagacagcagatgtcatcgtctcaccaatgaccggtgtgactgcccctgcactgcaagatgacgcgagaaacaccggtgaacttgactacataaatggcgctgcgttgatacggtactcgatagcagggaacttcctcggtttgccggcaataactgtcatggttgggcaggataaggccgggctacccatcggtcttcagttcatcggcaggccgtggtctgaggccactctgctccacatcgcattcgcaatgcaggaagcctgcagcaagaaccacagaaagcctgcggtgttctatgatctcctcaagaaagagtgagagagtgaccgggagaaaggaatgtgcagatgacgaagagaattactataccgttgatgtgaaggagatgcagcagattcttgcagcaactgaagtctgaataggagtaattctcttccgcgagtgttaattctcttccgtacatggtctgattgaaatgaaatgaagcaaaatagctcgagttcagtagcagttaggctcaggaaattcagttcgatgtgagaagtcattgcgaaatgatgtgtgcaactttgtgacaaaaaaagtactat

SEQ ID NO: 3358 - DNA, 652 bp, Avena sativa
attgaagacaactcaaagaagataggggcattatttgcaaaactcaacactggggatatctctccaaatgtttcatcaaaactcattcagatgtgcagtgcacttgatagtagtgatttggccactgcgatgcaaattcagattcagctgacaaccagtgattgggatgagtgcaacttctggctctcggcattgaagcgtgtgatcaagacaaagcaaaatttcagaatgtaaatctgtgtgggccttgtgctgcagctagttctgtatacacctttttctgattgtcaaattggtagtgtttagcaattctggggttttgcctgcacagagatgttatcctgcttcatgttttctcatccatcaattctgctgaagcttgttgccgaaggtgtctcatccgggtgacgtcacgttttgacaaatagttttccatgcttgttttgtaagaaggatcagtccttggggtgtcgttggttttgaaaagaacaagttgtaagaggttacttagtctgtcataccttgtccattttccttacccttgaattgagcagtttggacctttggatgattaatggtaaggacactgggatgtcttttgcattggcatcaatagatacaataataaagttttcgcttctagtcttcaaaa

SEQ ID NO: 3359 - DNA, 986 bp, Avena sativa
tgcttcaagttcagccaagaaagacagctcccgcgacaccttcaccccagccagctcatgattcccaagctcaatctgtaaccacttcacaaaagagtgatacatttgaagatatgaccaatactcagatacgcaaggtgattgcgaaaaggttgcttgaatccaaacagactactccacatttgtacctatccaaagatgttgtactggatcccttgctcgctttcaggaatgaactgaaagagcaacatggcgtgaaagtttcagtaaatgatatcgtcataaaagctgtggcacttgccttaaggaatgtccccgaagcaaatgcttactgggacaatgcgaaggaagaagcccagaagtgtgattcagttgatatatctattgctgttgctacagagaagggcctgatgactcctataataagaaacgcggatgaaaagaccatatcagcaatatcctcagaggtcaagcagctagccgaaaaggcacgatctgggaagcttgctcctaatgagttccaaggggggtctttcagtatctcaaatcttggaatgtatccggtggaccatttctgtgcaatcattaatcccccgcaggctggcattcttgctgtcggacggggtaacaaggttgtggagcctgtgatggacagtgatggaaccgagaaggctgctgtagtaacaaaaatgagcctgacgctgtctgctgatcatcgtatatttgatgggcaagtaggaggcaagtttttcacagagttggcattgaacttcagtgacatcaggagactgcttttgtaaatgaaagacgctattttatcgtgttcccaagaattctttggagaaggttgcacaagaaaagatactaggtgcacattagtttcagttgcttgatcaccgacccgtgaaaagcaaccaattttgtaaaatttaataaaaaagcattggcaactccacggcgtttgacttctttaacttcggagttgt

SEQ ID NO: 3360 - DNA, 784 bp, Avena sativa
ggttttgtacgttttggagatgcaaatgagcaggcacgtgctatgactgaaatgaatggagcgccgttgtctacgagacagatgaggatagggcctgcagctaacaagaagaatatgggtactcagcagacatactcgtctaatgcagggtaccagagctcccaaggaaacgaggcggcgaatgatcccaacaatactacaatctttgtgggcgggttagattccaatatagatgagaactatctaaggcaagtttttactccatatggcgaagttggttatgtgaagattcctgtaggcaagcgttgtggatttgtccaatttaccagcagatcatgcgctgagggagccatcaatgcgctgaatgggactcagattggtagttcaaatgtccgtctttcatggggccgcagtaccaaacagcctccccagcaggatgcaagccaggggaatggcaacagctactatggatatcaacagggtcctgatgcttactatgctgcacccaatgcccaagatcctagcatgcaaaactatggttatgctgcttatggcagctatgagcagccatctcagcagcagcagcagccatctcagccacagcagcagcctccacagtagcagcaggccttcccccacagcagtgaccattgaggcgatggagcgcaagcagagctgcttgaacaggacggcactgtgtcatgagttatggtatagggtccttgtttgtaatgggtcgtatgtagtgctttgactgtagcctagtttattcagcgtctcatgc

SEQ ID NO: 3361 - DNA, 888 bp, Avena sativa
cactgttggcgaagagctcttggccatggttgactctgcacctatcattgcagtgaagagcctgaaagtatctgacttccaaggtgtatctgtctctactgtgggcaaaagtacgcttgtaattaacactgagttgcctgaggcagaaaagctcagagcctggtatgagtctgaaggcaagggcacttcaatggcatcagttggtgcaggtatgaatgcatccagtcctggtggtgctagatcaatgtactctgacagagttttcctgtctcacatcacaagtgactctgatttgggtcaggacaagcctgttttcttcagcctgcatgcccacatcagccacatcaagcctgaccagaccatgtggtaccgtgcttgcaacacctgcaacaagaaggtgactgaaggagttgggtcaggatactggtgcgaagggtgccagaagaactatgaggagtgctcgttgaggtacatcatggtcatcaaggtttctgaccccactggtgaggcctggctttctctcttcaatgaccaagcagagaggatcgttggctgcagtgcagatgatcttgatcggatcaggaaagaggagggagatgacaggttccagctcaagctgaaagaagctacctgggttccccacctgttccgtgtgagtgtggcgcagaacgagtacatgggtgagaagaggcagaggatcaccgtgaggagcgagtcacctgttgactttgctgctgaagcaaggtaccagcttgaggagatcgccaagctctctgcctgctagaagatgcaagagtatacacctgatctcctgaacgtgattgccgagtccaccctctggtagatgacgccatgtttggcccaagttcctcgagctgtactgcttca

SEQ ID NO: 3362 - DNA, 850 bp, Avena sativa
agtctggtccctgtggtacattttacaacttataagcatctcaagcgtgatccgccagttcttcaatgtcatgtccaggatttctaattgcacaagtggcttttctacaagtacttatgcagtgtcatcccaggaaatggcttcagtttcaaatgttacataaataatggcctagtcaaaagtgaaatgaaccctagcactacaaagagggagatagtgatgcagactagggctcaaaatctcgtctgcatgggagtgtagaggcctcacttacctccacttgtctctcaattcctttttctcagaccaaatccaagtaacaaacagagcagcaaccaatgcaactattgtaattaggagaagtgcatagctgaattcgtcggtgagtgaatcataggttcttgatggcgcaagccgtgtgtagaagaggtccactccatatgtgaaaacaagagtagtggactccaacttcgcaggaatagaaacaattcctcgcagggcttccacttgaagagagtgtgtcacataggactgtggaataataggcaaagaatctgttaatggtataatgccttcttctttctcttgctgtgtaggattcactgaacggcgtgggtcaagaaagcgcttgtctagtgccaaaacctggtcaccaatagtgccaatgagaagctgcttggaagttatacccttcgctgtttgtgtaactgccattgctttcactgaatgagtaaaaagtatgactgggatttcaccataatctctggtcgggaataagatgtcattggcgcagacaaattatgcttcccaagtatgagcttcataacatctttgttgtccgcctagattg

SEQ ID NO: 3363 - DNA, 730 bp, Avena sativa
  modified_base (712)..(712): a, c, t, g, unknown or other
atttactccatcaactgttgctattgatcttaattctggggagtctagagaggttgagttccatgcaacccgtgttgcctacagtgccatgggttctgtaacactgttaactggccaaccaaaggaaggtgtttttattgaagctagatctgaatcaagaggttattatgaggaagctaccacagataattttggaagattccgtctaagaggacttgtgcctggttcaacttactcagtaagagtggctgcaaaaggtaatatcaggctggcagcagttgagcgtgcttcaccagaatttgtatcggttgatgttggtcaggcggacatctctggtattagttttgtggtttttgaacagccagaagcaacaattttgagtggtcatgtggaaggagatggcattgaccttttgcagccacaactatctgttgaaattagatcagctgttgacccttctagaatagaagctgtagttcctgtgcctctttcctactactttgaagtacgaaatttacccaaaggcaagcatcttgttcagcttcggtctggccttccatcacatacgcacatatttgaatcggagttggttgaagttgacctggaaaagcaacctcaggttcacgttggtcctgttaaatataaaactgaagaacgccatcacaagcaggaactgacccagcccagtgtttcctcttattgttgagtttcngttgttgcactcatgatc

SEQ ID NO: 3364 - DNA, 848 bp, Avena sativa
gcgtgtattgctctactaggcccatgaggattggccctgcaactccccgcaaatcttcaggtacttctggctctactggttcatctgctcgatcagatggagatttgacaaacacaacagtatttgttggtgggcttgacccaaatgttagtgaagatgatcttaggcaaaccttctcccagtatggtgagatttcttctgtgaagattcctgttgggaaacagtgcggcttcgtgcagtttcttcagagaaaaaatgcagaagatgcattgcaagggctaaatgggagcactatcggaaaacagaccgtgcgcctgtcatggggtcgcaatccagctaacaagcagttgaggagtgataatggaaaccagtggaacaatgggatgtactatgcggcatcgcctttctacaacgggtacggctaccctgcggcgccgttccctgacccaggcatgtacgccgccgctgcctatggcgcgtaccccttctacgggaaccagcaacaggtcagctgaagaagagagtttcacacacgccgatcactcaaaaactggaggcccgcacgagcgcagtagctgtagctctcgctagagaaagaaggtagacgaccgacggtttcttaggtgagctaggtgtagtgactggttatgtaaagtacattactattacagaaactagcaccactaagacgcctattgactcgatctccatggtcctctagctgaactgttctaggaaaaaagaagttttggcctggagctgcagtattaaggtagaatgaacaataagttatttgatgccttatgtgggttttgcgagaaaataacgcaaaactactacatttgagg

SEQ ID NO: 3365 - DNA, 484 bp, Avena sativa
tcccgggataacatggggaggagatacgtggaggtgttcagatgcaagaagcaggagtactacagcgcaatagcctctgaggtgaaccagggtggaggcttctttgactcggagtacagacactccccacctcctcccgcacggtccaggaagccggctgaagacaagagcagcatggagtacactgaggtgctgaagctgcgtgggctcccctactctgctaccaccgaggacatcatcaagttctttgtggagtacgagctgacagaggagaacgtgcacattgggtaccgctccgacggcaaggctacaggcgaggcctttgtggagtttccccggacagccgaggttgccaagacggccatgtgcaaggataagatgacgatcgggacgcggtacgtggagctgttcccgtcaaccccggaggaggtgagcaggtcgaaggttcgaggcaggcagtgaaatgcttgctgctaccagatgc

SEQ ID NO: 3366 - DNA, 890 bp, Avena sativa
aacagcgtgaagaaggcagctgcgatggactcggacgtgctaggcagctacgtcacgaaactcgcgggaggaatagagaagatcaccgaggtgctgcggttgaacgaagagctgaacacgagggacgacgcgtggaggttccacgacacgatgcagaagttcttgaagaaggccgacgacgagatcctcagggttcaggctcaggagagcgtcgctctgtcgctcgtgaaggaaatcaccgagtacttccacggcgactctgcgaaggaggaggctcaccctttcagaatcttcatggtggtcagggacttcctcaccgttctcaaccaggtgtgcaaggaggtcggcaggatcaacgaccgcacgatcgccagctccgtgcgccatttcccggtgcccgtcaacccgatgatggtcaacccgatgatgccgcagctgttcccgaggatccatgcattgagagctggaatctcagatgacgagagctcgatcgcgtcgtcgccctgaccacaggtagcatgccaatagatttttcatggactatcaatggggaaatcgccacatggaaggaactagagggatggactaatcagcttggcagctggggacagagcacccctggcactggaactagagccagctagcagtggcatatccatccagcgagcggtccagccatggcatcaagctcaggtgagtttggaggttgctgagcatatcccctaacacggtgcccgacgctcgttctcccgcacgaacaccgatgtcggcgggctgttcatccttttctcctaactttttgtacctgtagattatagaatgtacaagattttgcaaatatttatttcgatatataaggaaaggggggcaaaaggctttagaaccaaaaa

SEQ ID NO: 3367 - DNA, 683 bp, Avena sativa
gttcggttcctacagggcctccttgcacttggcatcattgcagcaattgcttgcctgattggatttacagacttcacaattgctgatctatttgcaagtgcacttgcttttctagcaactggatggtgtattctatgcctgtccatctacatggaagcgtcttgtgaagacccttgggctctgggactctgtccgagagattgctaggatgtatgacgccgggatggggagccattatcttctcacccatcgttttcttctcgtggttccccttcgtgtcgaccttccagtcgcggattctcttcaaccaggctttcagccgtggtttggagatctctctgatcctggcggggaacaaggcgaaccaggagtcgtagaaaagtcctgtgtgctctgcgcctgtgtgtttggtgttgtatattgctgtagtcgactaggaaacagtaggttcggacgacatatgtacataatgtctttagtatggggatgctaatcaattgtggagaatggtctgatgccagattagacgtgtgcatatttgcctcttgtagtttggactacctgggtgtaatttggatcatctggtgatttgtgtagcatggtggtagcagtagtaatcacagttttgacttgagtaactggtggctaacaatgaaaatatttttctccgagcttactaaaaa

SEQ ID NO: 3368 - DNA, 655 bp, Avena sativa
tcgatccctacaccgagaagccagcgctgtaccagaccgacccctccggaaccttctccgcctggaaggccaacgccaccggccgcaactccaactccatgcgcgagttccttgagaagaattacaaggagacgtctgggaaggagaccatcaagcttaccatccgagccctgcttgaggttgtcgagagtggtggcaagaacatagagattgcagtgatgacacacaaggatggcctccgcaacctggaagaggctgagatcgacgagtacgtcgctgagatcgaagcggagaaggctgccgctgaggctgcgaagaagggtggcccgaaagacacctaaatgtactcatgattcagcacagtcgcagcacattgctcctctagcccggttttatgttccatagccagcttgttgttttacatgtttgagaggaatttagaattgtttgttcaaagtggctggttgtttgttccagacggccaatggggtttcttggactaaacctcagttcccttgttgtaggctaaggtgttactgggctgtggacgtatgttaagaagtgggccgatttatcacgcatgggcaatatgggctggtgtatgttttgaccattgtcattcgtatatgggcaaatttgttttcttacaacttaa

SEQ ID NO: 3369 - DNA, 972 bp, Avena sativa
tatgttcaagattacaatgaggctgacccaagaacacatcaaggattggatctgacgaggatgacaactaaagaattgatcgcgaaacacggattgagtgatgatactatagatttcattggccatgcacttgctcttcacagggatgatcgctacctaagcgaaccagcacttgatactgttaaaagaatgaaactctattcggagtctcttgcacggttccaaggaggttcaccgtatatttacccattatatgggttgggtgagctgccacaggcttttgcacgtctaagtgctgtttatggtggtacttatatgttacataagccagagtgcaaggttgaatttgatatggaggggaaagtgtgtggtgttacatcagaaggtgaaactgcaaagtgcaagaaggttgtctgtgatccttcttacttgcccaacaaggtaaggaagattggaaaagttgcacgagcaattgctattatgagccacccaattccaagcgcaaatgattcccactcggttcagattattttaccacaaaagcaactcgggcgcaagtcagacatgtatgtcttctgttgctcgtacacccacaacgttgcgccaaaagggaagttcattgcatttgtgtctgccgaagcagagactgataatccacagtctgaactaaaggctggaattgatctacttggtccagtagatgaactattttttgatatgtatgacagatatgaaccagtcaatgaaccatctcttgataattgctttgtctcttcgagttatgatgctactactcactttgagacgactgtgacagatgttcttaatatgtacacgttgattactggaaagactgttgatctcagcgttgatcttagtgctgccagtgctgctgaagaatactaaatgtatcaaacaagcatttcttcaagacgatacttcctggaggaacacacggagctcctaccgcac

SEQ ID NO: 3370 - DNA, 941 bp, Avena sativa
gtgacggcgtcgtgcgcgagcgcacagctgcaggagaagttctacagcgcgacgtgcccgagcgtggaggacgtggtccggaaggagatggtcagggcgctctccctcgcgcccagcctcgccgcgccgctcctcaggatgcactttcacgactgcttcgtcagggggtgcgacggctcggttctcctggactcggcgaacaagacggcggagaaggacgccaagcccaacgtgacgctgcgtggcttcgacttcgtggagagggtgaaggccgccgtggagaaaggcctgccccgacaccgtctcctgcgccgacgtgctcgcgctcattgccagggacgccgtctggctgagcaaggggccattctgggaagttcctctaggccggcgagacggcagcgtgtccatgtccaacgacaccaaagcgctaccccctcccaccgccaacatcacccagctcacccagctcttcgccgcagtgaacctcgacatcaaggacctcgtcgtcctctccgccgcgcacacgatcggaacgtcgcactgcttctccttctccgaccggctctacaacttcaccggcatggacaacgccagcgacatcgaccccacgctggagccattctacatggcgaagctcaagagcaagtgcgccagcctcgacgacaacaccacgctcgtggagatggaccccgggagcttcaagaccttcgacctcgactacttcaagctcgtcagcaagcggaggggcctcttccactccgacggcgccctcctcaccaacgcattcacccgcgcgtacatcctgcgccacgccacgggcgccttcaaggacgagttcttcgccgacttcggcgtctccatggtcaagatgggcaacgccaacgtgctcatcggaacccagggcgagatcaggaagaagtgctccgtcgtgaaccactagc

SEQ ID NO: 3371 - DNA, 613 bp, Avena sativa
caagaatgttcctacgtggcacagagacttgtgcagggtgtgtgagaacatccccattgttctctgcggtaacaaggttgatgtgaagaacaggcaggttaaggccaagcaagttacattccacaggaagaagaacctgcagtactatgaaatctctgctaagagcaactacaactttgagaagcccttcctttaccttgcaaggaagttggctggcgatgccaacattcactttgttgaggccgtggctctcaagcctccggaagtgacctttgacttggctatgcagcaacagcacgaggctgagcttgccgccgcagctgcacaaccactgccagatgacgatgacgatctgatcgagtagagagaggatcttgagtcttgtcgaactttgagagacagagattgtgcttcctacatgagtctgtcgcttttaggttgatgaaaaggcttgatagtcaagccggaatgtttttcctgggttgtgaaactctgtgtgtgacattgatctacatgtttgccatggatttgttgtcggacacattgctgtgttacttaaatggtttatcagtataattattatgcatgttggcttactgtggatcaaaaaaga

SEQ ID NO: 3372 - DNA, 581 bp, Avena sativa
taacgatgagttctacatggatgagtctggaaatgttagaacacgaaccaatcgctcgggcggtgtacagggagggatatcaaatggcgaaactatatacttcaaagtagctttcaagccaacagcaactattgggaagaagcaaaatactgtaacaagggatcatcaggatatcgaacttcggacaaggggtcgccatgacccatgtgttgtccctcgggctgttccaatggtagaaacgatggcggcattggtcctcatggaccagctgatggcgcacagtgctcagtgtgagatgttccctctgaaccttgccctacaagaaccagttggctccgcgaacagtacacctgtgttggcgccagatgtagcataatacctgcctttgaacaagaaattcctcttataaccccctccctctcttccggttcgttttgtctgccatatttcagggttttgctaagcagtttgcagttttgcaccaaacttgtatcctagcgtatacatttgatccgtgtacatcaagaaattcattgaacaacgaaataaaaggcaaattcatgttttctagacgaaaaaaa

SEQ ID NO: 3373 - DNA, 711 bp, Avena sativa
gtcatgctgattaagaaaactgctagaaaatattgatgaggcggcaaaagaacttccagatgctaatttgagaccagaggatttgtgggctaaccactcaaaagtagttttgccaaagccacatatgaaggattctgcatcatggagagccatccaaaaagttcttgagggtggagaaaacattgatttgaagcatttcaggcctgtaaagcctttgggatctggtgacactggaagcgtgcacttggtggagttattaaacacaggtgaatactttgccatgaaagctatggataaaaacgtcatgcttaaccgcaataaggttcatagagctaacgctgaacgagaaatccttgatatgttggatcacccattccttccgacattatatgcgtcatttcagacaaagacacatatatgtctcattacagactactaccctggcggggagctctttctgctcctagatagacaacctctaaaggttctgcgggaagatgccgtcaggttctatgctgctgaagttgtcattgcacttgaatacttgcattgccaaggaataatctaccgagacttgaagccagagaatatcttacttcacagggacgggcacatctccttgacagactttgatttgtcttgtctgacatcttgcagaccgcaggtctttcttccagagagctaatagaaagtaggaggaaagcaggagtt

SEQ ID NO: 3374 - DNA, 1023 bp, Avena sativa
tggagaagaaggtggctgggacctggaagatctggaattgccacctgaggcagatacaccaaaagctactggtcctgctcgatctgcgttgtttgtggctcccacaccaggcatgcctgtcagccaaatttggactcagaagtcatctcttgctggggagcatgctgcagcagggaatttcgacaccgcaatgcggctgcttagccgccagttgggcatcaggaactttgctcctctgaagaccttgtttctcgatgcacatatgggcagtcatacctttctgcgtgcatttgcaagcgctccagtgatacctgttgctgttgagaaaggctggactgaaactgctagtcccaatgtgaggggcccacctgcacttgtgttcagcttctcacagatggacgacaagcttaaggctgcatacaaggccacgaccgagggtaagttcccagaagcgctgaggcagttcctcaacatcctatacaccatccctctccttgttgtggactcgcggcgagaggttgatgaagtgaaggagctcattgagatagtgagggagtacgtcctcggcctcaggatggaagtcaagaggaaggagctgaaaaacgacgccacccggcaacaggagctggctgcatacttcaccaactgcaagctacagaaggtccacatgcgtctggtcctcaccagcgccatgggtctctgcttcaagggcgggaactatgccaccgcggcaaactttgcccgcatgctcctggagaacagccccaacgaggcccaggcgaagaaggcccgccaggtcctgcaggcctgtggcgacaggaaagatgcccatcaactgaactatgacttcaggaacccgttcgttgtgtgcggagcaacctttgttccgatctaccgcgggcagaaggatgtctcctgcccctactgcacgtcccggttcatgccctccgtcgagggccagctctgcaccatctgtgagctctcggtggtcggagcggacgcctcgggcctcctctgctctcc

SEQ ID NO: 3375 - DNA, 923 bp, Avena sativa
aatttattttgaccaacttttagcttgaatatttattgtgcttttacaaatataccagtatgtctaaattgtacatttcagctaaaagcatagttagattttatttgctcttcgcatcttaagatgtgtatatgttggaaagaacattttgattactaatcttattgcatggatattattgatgttattatttttgcttacagatcacttcagccgactaccttgcatatattagtaactattttgtcggccttggtcaatggaaagatactattattccagttgcagataactatttgatggcaccatctgatcttgttgcaaaaggacacgctcataatctctaggtacaccctcacacatataaaaatgagaatcagttcctgcgctttaactttcatcaggatcggtattcagagtacaatttctggataaacactatggggttgatggattattcacatattgaactagaagcgttcatcagtaccaagagctgatatcttcacatcctaagggtgccactgcgaacaacctcctaacaaaaattgtttagacgattctagtatatgaaggcttctgaataagtttgtattggtgataatcacttgcattttctagtgattgctgtacaagaccgaaatgagtcaacatttcatgttctgtggggaccttggaaggtcccaaatagacttttttctagtggtataggcattaacacaggttttattatcgtataattatttttctggaaggcgtattaaaagaagatatattacaacttgtaacacactgcttatccagtgggatatgtagccgtcggacaatctgccaacttggcgtgtttatatgtacaattgaaatcggtgttggaatgcatttatttaaaaacactgggcagctaacctgccatttgactgaaa

SEQ ID NO: 3376 - DNA, 855 bp, Avena sativa
gacgaccaggccatcagggaaagaagaggctgtcatcctatcatgcacctccatgagcgtactcttagcgtacttgcatgtcgctatgttgatgaagttataataggcgcaccacgggaggtttcaagggatatgatcactactttcaacatttcattggttgtgcatgggacagtagccgagggcgatcctgcagttgaagttgatccttacgccctcccaaagagcatgggtatattccaaacagtcacaagccccaaaactataacatcagtttcagtggctacgagaattattgataaccatgaagcctacaagaaaagaaacttgaaaaagaaggcgagtgaagacaagtactacgcgcaaaaggaatttgtctctggagactagttctgcaaaaagagcctaattctttgcagcaagcctagggagaaaggcatggcgtcgccgtgtactatgagttacttcacaacaggaattgcaacagatactcagctatagagagtagtcagcgataatttgatgcccattcggtggaaggaatcagcttaaaagactgccatattcttatattgatgccccttttcagctggaacgtccacttaatagcaagaattaacatgcatggttctatttatttttactttgtttccctggaggggaaatattcatggctgaacaccttcagcagaccattgttgtatacttgtatgttattactcaagagtttgtgaagtgattagagttgggtacttcctaattgtagcaagttaaaacttgtgtaagtatatagttctgaggcaaagaacctagcgacagtcatccactattggtttgatttttctgatatgagaa

SEQ ID NO: 3377 - DNA, 714 bp, Avena sativa
ctatataccatagatataggacagaatgatgttaacgcacttctgtccagattgccgtacgaccaagtagttgcaaaattccctccaatacttgccgagattaaggacgctgttcagatcctgtatgccaacgggagccggaacttctggatacacggaacaggggctctcggttgcctgcctcaaaagctttctatcccgcgtacaaacgacagcgatctcgatcagaatggctgcctcaacacatacaacagagctgcagtcgcgttcaacgcagcgctgggcagcctctgtgacgagctgaatgcgcagatgaaagacgccaccgtcgtgttcaccgatctttttgccatcaagtatgaccttgtggccaacagcaccaaatacggtttcgatagaccgttgatgacatgctgtgggtacggaggaccgccttacaactacgatattacgagaacctgccagtccccgaatgcgacggtctgcactgacggctcaaagtttgtcagctgggacggcgtgcaccttacagaggcagccaatgccgccgcggctgcagccatactgacctctgcatactccatacccaagctcaagttcgatcagttctgcaaagcctgatttgttcatactacatgtactatatactatactcgtctaaactactagttactttggtaagtttatatccaattctttttgaccccaaaaaaa

SEQ ID NO: 3378 - DNA, 774 bp, Avena sativa
gtccagggaagtcaggctcgcatttccacccaagcagtgattgtttcagcaaacgaaaagaaggatattttgacgtcgacagcatgctggctcgccatggctggcctcctcgctgggctcaccatcgtgatgggacctcttcagattctcaagctctacggtgtcccgtactggatttttgttatgtggctggactttgtcacctacctgcaccaccatggccacaacgacaagcttccctggtatcgtggaaaggcatggagctatctgcgtggaggcctgacaacgcttgacagggactacgggtggctcaacaacatccaccacgacattgggactcacgtgatccaccatcttttccctcaaatcccacattaccatctcgtggaggcgaccgaggcggcaaagccagtgctggggaagtactaccgggagccagacaagtctggtccgttcccattccacctgtttggcgcactagcacagagcttgaagcgtgaccactacgttagcgacaccggagacatactctactaccaaactgacccaaaaatcgccggtggtgcacaaacatctgattccgcaactgaaatccgtgcagctgcatgggaggaggcagagaaggccaaatacttagcaaggtttaagcgcgaagagatcaagatccatgcgtgggaagatcaccagaaagccaaaattgaagctgaaatgagaaaaatcgaggttgacgtggagaggatgcgagcccgtgcgcaggacaggctgatgagcaag

SEQ ID NO: 3379 - DNA, 564 bp, Avena sativa
gatttcggtcttagcaagattatcaaatctcagcatgccaacgatgtatacaagatgaccggagagactggaagctaccggtacatggctcctgaagttttcaagcatcgtaaatacgacaagaaagttgatatcttttcctttgccatgatactatatgagatgctggaaggggatccacctttttccaactacgaaccttatgaggctgctaagtatgtgtcagatgggcatcgcccaacattccgttcaaaaggacatactgctgagttgaaagaactgactgagctatgctgggctagtgatatcaatctgagaccatctttcctggagatactcaagaggcttgagaagatcaaggaaagcttagcatcccacgatcaccactggcatttgttctcacaatcgtagtccttatacacgttacgagcaatttaaactacagatgttgtgagtggattttcttgggagatcagcatcgattgtgtacaaaattggatggtcaaaaaggtccacttaaaacgcaaaaagattccctgatgcttttgtttctgccaaagtaga

SEQ ID NO: 3380 - DNA, 889 bp, Avena sativa
atggtgatgagctctctgtaaggcaggacacaccaaacacccatattcatgagatagttttctccacaattgacaagccaaagcttcttagtcagctctctgccttgctatcagacattggactgaacatcagggaagcacatgttttctccacagtggatggctattctcttgatgtttttgttgttgatggttggcccattgaggatactgatggtttagagaaggcacttgaagcatctgttttaaggaatgagggttcatggtctggttcatcccactcctcagctgcggaaagaacattgccattccaggtaaaaggtggtgaatgggaaattgataaacgacttctgaagatgggagatatgattgcttctggttcttgtggtgacctgttccatgggacttactttggcgaggatgttgctgttaaagttttaaaagccgagcatttgaataagaatgtttggaatgagtttacacaagaagtatatattctaagggaagttcaccataccaatgttgttcgattcattggcgcatgcacaaaaccaccaaaattttgcataattacagaatacatgtctggaggaagcctttatgattacgtgcacaagcagcgtaatgtctttgatctcccaactctgctgaagtttgcatgtgatatatgccgagggatgtgttacttgcatcagaggggtattgtccatagagacttgaagacagcaaatcttctaatggacaaagataatgttgtgaaagttgcagattttggtgtagctcggttccaggatcaaggaggtatcatgacagctgaaactggaacatacagatggatggcgcctgaggttataaatcatcaaccctatgataacaaagcagatgtatt

SEQ ID NO: 3381 - DNA, 650 bp, Avena sativa
ctcaaggatgatggcaccagcatgggaaagacctacgaacttggtggaccagatgtttacaccattcgtgacctggctgagttgatgtttgaaacaatacgggaatatccaagatatgtgaatcttccttttcctattgcaagggctattgcttctccgagggaaatgctgctaaacaaagtgccttttcctttgccaactccctcaaatttcaatctcgatcagatcaatgcactctctgtcgacaacctagtatctgaaaacgctctctctttcgcggacctggaaatcaagcctcacaaattgaagggctacccaacggagttccttgtctgctaccggaggcgccgtcttttggttctactgtcagcgagaagatggggagtgcggatgtagccccccgtttctgaaaatgcggtaaaatttataatcgtttagttgaagataaattgttgttgtgtttgtcaacttgtcatctgcggccggtgccaaggcaggactagatttgatgcaaacatttgctcctgcccttgtttctcctattactactaataagataaggcacggatgtattgtgaattttttgagctggaatgcaagtaataccgaatcattagcaacggcgaaaaaaaaaaaaagttattaatcgc

SEQ ID NO: 3382 - DNA, 763 bp, Avena sativa
tgaaaatcatggacgttagcttccagcatgttgattttgctgctcgttggtgggaatgcctgaactggaataatctgcctagtgtgaacttgtggtgtcaagttaatttcactgttacagatctgttagactattatgttcgcacacaatacatgaatttcataagcagcaagaatcttggctttgggattttgtggcttcggattgatattaaagcagatcccataattctggagttgatggccagtgctactacaattcatgagcaacattttctgtgttgtttaagttgcacttgcttgtcaatgtcaaaagatcgccatgttgaagatgcagtctctatgctgttcgggctgtttcactggaggtggacgacaactcctccgttgttgatccccagattcaatggcagggacattgtaagtttgagcttggtgaaggctattcgacatctacagctcatctctacacctcgtgtgcatattccagatagaccgttgggagagccacccacggggcatcagctggaccgcatctctatcgaggccattggggattgcagatgcggcaatttcgagtctgtgttgtcggctgatgaacgaacgccgtatggttccatttgtgatctccagcatcttcttcgtgagtttagatcgccttcttcatgtgttgtgcacttaggcacttatttctcttgctctactgttgagagccttgtaatgttataccatgatctttaatgctaatatttctagctttgtta

SEQ ID NO: 3383 - DNA, 912 bp, Avena sativa
acgcggcgatgtctgttgtcgaaagcagtaactggcaataccatgtcctcgtcatcatagctgatggacaggtgaccaccacaaattcaagtgacagaagattaagtccacaggagcaggcaactatacaagcaattgtcgatgctagcttctatcctctttcaattgtgatggtgggagtgggagatggaccatgggatgcaatgcaacattttgatgactgtattcctgacagagcttttgacaatttccagtttgtgaacttcactgatatcatgtcgacaaggaaggacatgtcaaagaaggaggctgcatttgcccttgcagctcttatggaaatacccactcaatataaagcaactcaaggcctccggccgtcagagaagcacgcacaaaaggctaaccctccgaggattcttcctcctccaaacaaagttcttgaacgggataatgctgcagctgcacatgctccaactacaacctcccggtctattgacgttggcaaaagcgcttcggatgaacaggtatgccccatctgcctaacgaatccaaaggacatggctttccaatgtggtcatcttacatgcaaggaatgtggtccgacactatctacatgccccttgtgccgcgccccgatcaccgtgcgtgtgaggctctactcgtaacattgatacagccggccttctgcaaacagagcaaaacctggaaggacaaggagatgtgaataaggatttactgcatatgtctagcaccaactatatctgctgatgagtaatttcagtcagctgttgcctgtacagattatgctatcatcttgtaaatgtagtagtagtagggaaaataagcttttatggtaaaatcaggaagggatactaacagttgtactgaaatgtattttgtctcgtcgaaaaa

SEQ ID NO: 3384 - DNA, 672 bp, Avena sativa
gcaaggccaagtcagcagtcctcagatcgacgagcaactgtgcagggggcttaagtcaacagttgtatattagccaggtatccattgaataggaagcttgtattatacattattaaacagcatttcctcagttcctaaatataagacatttttgcacttcaacttgagccacatgataacatctgtaaactgaataaactgtcaaggaaataagaaacaccggcttcccattgatactagaagagtcaaacataagttgatgaagaaatatactacaaacgggcccaactgcaatcaggatacaccagggaggggcaagttcacataaacacttgagaggtctggaaacacactggatagaaggagcatagcacgaattgcgtcgtccgttttagcagctacagctagtaggatgcttaactggaaatcgatcgaataagagttcacgtcttaaactaatatgcaatgcacagtccccggagcacggttcaatgctcatttggccatcatgaccttgacaaattcctcgtagttgatctggccatcgccgtcaacatcagcttcacggatcatctcgtcaacctcctcgtcggttagcttctcgccaaggtttgtcatgacatggcggagctcagcagcagagatgaagccattttggtccttgtcaacatc

SEQ ID NO: 3385 - DNA, 937 bp, Avena sativa
ggagacttagctgccatgcttgaaagagatgttctagattcgaccccaggagtgacatgggatgatgttgcaggacttagtgaggccaaaagactccttgaggaagcggttgtgcttcctatctggatgcctgaatattttcagggtattcgtcgaccttggaaaggggttcttatgtttggcccaccaggtactgggaagacccttttagcaaaggcagtagctacagaatgtggcacaacattctttaatgtttcttctgcaacattggcttctaaatggcggggggagagtgagcgcatggtccgttgtttatttgaacttgcaagggcctacgctccaagtacaatcttcattgatgaaattgactccttatgtacatctcgtggagcttctggtgagcatgaatcatcgaggagggtaaagtctgaacttctagtgcaaatagatggtgttaacaatagctctaccaatgaagatggccagccgaaaattgttatggttctggcagctaccaactttccatgggatattgatgaagcactcaggcggaggctggaaaagcgtatttacattccacttccaagttttgaaagcagaaagtcactcatcaacattaatcttagaacggttgaggtatctagtgatgttaacattgatgaagttgcaagaaggacagaaggctatagtggggatgaccttacaaatgtttgccgtgatgcttcgatgaacggcatgaggcggaagatcgcaggcaagacccgtgacgagatcaagaacatgtcaaaggatgatatctcgaaggaccccgtggccatgtgcgacttcgaagaagctctggccaaggtccagaagagtgtctcgccctctgatatcgaacggcatgagaagtggatggctgagtttggatccgcttaaacctcattcaaagcttgct

SEQ ID NO: 3386 - DNA, 885 bp, Avena sativa
tctatcacataatcacataaatttcacacatcatgtgattaatgtgatataaccaatcaagataccagataataacaaattgtgatggttacattagcaaaaggcacaaatttcagacaaaaaatagcaccattccacagatcatagttccacgaggtacacttttgcacttccataccatagatgcacaggtatggcatagctctatttgcccagctgtagcttgcaaaaactaggataagtacttagaagctaacctgtcacgcaaacagcttacaatagggagacatgagcaacaaacataatccgaccgacaatgatttctaagtctgcggcaaagtcatgactcgcgaccaggatttacaacatggatgatctgatgaattcattaatattcccacttcttcagctccataccatcaggggggctcccttcgaccgtctttttcccgacatctttccagttggttgagagaacagtcccattggactccacaaaagacttcatcattgccctgcgcatatcttcatcagcatcactgtaaatttcgcggaagaatttgttcaatgcagcatcaccatcaagcttttcatccttctcctgttttttcacttcagcctccagcttatcccagtcctttttgggttttgatgatggataagatggcctctgggctgattcagctggtgcatttatcttctgaggagcctttggtttacccttataatccaatgatgtccaagttacctgctcagcttttgcaaggcgtatttcgacctttgtagataatacagtatatttgcacttctctgggatgatctttgaaaacagacgaggctgaaaatggtatggttcctcaccaggaatttcaatagagacactca

SEQ ID NO: 3387 - DNA, 652 bp, Avena sativa
acctcggctctgccctggctatgagcttgcgcgtgttgtcatctcagttttcctccatcatctcgtaatgcgctttagctgggaagcggctgaagaagataggcttgtcttcttccccaccactcgaaccctaaaaggatatcccatcaatctcaggcgaaaatcgtaatctatctggtgactcacgcactggtcttcagctgctcctatctcgaaagcaaaattaaacatactagtactagatgaagagaaaagaaatcagtgatagctagtctacttttggtctgtttagtttgtttatcccctgctgtttcaaattactccaccggcgcgcttatgtaggtgaactagtactccctcatttttcattcaaaaaaatcctcgaatttttgaaatagatagtatgaaatatgtactacgtatactaaaaattctaagaattttttgatgaaaaatgagagaatagtaggccacctaggtaagcgtgcgcgcggagtaatttgaaacagagggagtatgtcacaacaccaagttgtgctgcttgtataatatgtggcctatacagttagtgcgtactggttacaagtgacattttgtcatgtatttggccatcttataagagatgcatcgcaatagtatcagacaaaaaaaa

SEQ ID NO: 3388 - DNA, 717 bp, Avena sativa
ttgaacagtggtaagtgccatttctagaaggcttacagatattaattcctataagcatcgtagcctgatctcttcaactattcttgagattatgttgttacttatcctcatgaaattgaatcttttgctgatgcagaactcaaattagtaacttctcgtgcttttgccccctcaactgcatttaatctaccgagtccacatgatgtagcactactggttacaaattctgggacatgaaaatttccatcattatggcactgctaatagtgctataaaaatcaacacacacaactgtataacatgccttttccattcacttctacacgcctacaaaagtttcatagtataaatattgattattaaaccttttgctgttacagctacatggagatgaacacggtagaatttaacctcgaggaagctctgaatacggtcctaatgcaaggcatgtctctgagcaaggaaaagcaaatttctcttgaccgtgattggcctgtagaagtatcatctatgtacctctatggggataacttaaggcttcagcaagtcctagctgactacttggcgtgcacgcttcaatttacgcaaccggctgaagggccaattgtactccaggtcattcccaagaaggaaaatattgggtctggcatgcagattgctcatctagagttcaggtaacaaatccctcctccccacctaattgctcttctagttgct

SEQ ID NO: 3389 - DNA, 882 bp, Avena sativa
acagctgagcatattgagaagatttccttcctgccatttccttcggatctgcatttccagcaagtatacataaaggacacagatgagagagcttgtgcatatattgctggcccggcacctaatcgatgggggtttgctactgaagggaaggacctctttaatgtcattcgaagttctagcgcagatgaaatctctgaaccagcaagctcggatatagtgggaaagacacatattaatgtccgcaaccattctcttttctttggcatcactttaagtttgctggctgaaattatcaattccaggctatttacaacagttcgagattccatgggattaacctatgatgtttcttttgaattaaatctttttgacaaactggatcttggttggtatgtgatcgcggtaacttcaactccgagcaaggtccataaagctgtcgatgcatgcaaaggtgttctcagaggtttgcatagtaacaaaattgttgaaagagagctggaccgggcaaagaggacactgctaatgaaacacgaggctgagacaaagacaaatgcctattggcttggtctgctagcccacctgcagtcttcgtccgtgcctagaaaggatatatcttgtattaaggaattgacgacactgtatgaaagtgccacaattgaggacttgtatcttgcatatgagcacttgaaagttgacgattcatctttatttgcctgcatcggtattgctggtgccgattctggtgaagacatgaatgatgatgagcctgatatggggcttcctggtatggttcccatgggaggccggggtctatcaactatgaccagaccgaccacatgagttgtacacttttcacgacccaacttctcagtatgtgatgcc

SEQ ID NO: 3390 - DNA, 865 bp, Avena sativa
gtcaagactgagaaagacagagaagttttaggttttcttttaatttggatcctggcagtattggttttgattcaaatgaaccacagatacagctctatttcttacttggtcttgtctatgctgtggtcacaccatttttgcttcccttcatcttgatattctttgtgctcgcatacgtggtctaccgccaccagataataaatgtgtacaatcaagaatatgagagtgcggctgctttttggccaagtgttcatggacgtataatcactgcattgatcgtgtcccagttccttttccttggattgctaagcacaaaaggcgcaggccaatcaacaccagtgctccttgttctccctgtagtaaccttttatttccacaaatactgcaagaaccgctttgaacctgcttttgtggaatatccattacaggaggcaatgaggaaagacactctagagcgtgcgagagagccagggttcgatctgaaaacgtacctggcagacgcctacatccaccccgtgttcaaatgcgatgacgacgacgagaagttctccatgggcgccgaaggggaggcggagcaggtcctcgtggcgacgaagcggcagtcgagacggaacaccccggtcccgagcagacacaatggttcggaagcgccttctctgcctgaaattgtaaatgaccagcgactatgaaatgatagtgagtgagtggcttgcgtgtccttaattaggtctgtagttttgtacatggagtaaagagagcaacagtaatgtgctgacgcgtccggtattgcttgttcattattacagtaaaaggagcgatatgaggttctgttgtcctcctgtgtttccacttgtacgacatcgga

SEQ ID NO: 3391 - DNA, 1039 bp, Avena sativa
cagggcggtccccgtacttccaatcaatctcgaggatgcagcccgtagtgaagcagaatttgagaaggctgagcagactggagagaagtgggtgcgtgttctccaggacacccgcttgaactatcgagctatcgatcttcggactccggcgaatcaagcaatcttccgtatccaattccaagttgagaacaaattcagagaatatttgtcctcgaaggattttattgggatccacagtccaaagttgatttctggatcaagtgaaggtggtgcagctgtgttcaaactacagtacaatggacagcctgcttgtttagcacaatcccctcaattatacaagcagatgtctatttgtggtggctttggccgtgtatttgaggttggtcccgtatttagagcagaaaactcaaacacccacaggcatctatgtgagtttattgggttggatgccgagatggagattaaggagcactactttgaggtttgtgacattataaatggtttattcgtagcaatattcaaacacctgaatgaaaattgccagaaggaactcgagacaataaataggcagtatccgtttgaaccgctgaagtacctagagaaaacattgaagctaacatacgcggaagggattcaaatgttgaaggatgctggaactgaaattgagcctatgggtgacctcaatactgaagccgagaaaaaacttggcaggcttgttaaggagaagtatggaacagaatttttcattctctatcgatatcctttggctgtgcgtcctttctacaccatgccttgctacgatgaccccgcttatagcaactctttcgatgtcttcattcgaggcgaggaaattatttctggagctcaaagagtgcacacacctgagttgctgaggaaacgtgcaattgagtgtggcatagatgcgagtacaatatcatcatacattgaatcattcagttttggtgcccctcctcatggtggtttcggtgttgggctggagagagtggtgatgctgttctgcgccctcaacaacatcagg

SEQ ID NO: 3392 - DNA, 623 bp, Avena sativa
ttggtggtcaatgtacaggttccactgtatcctgcttcactctttcagaatgaaaccgatggggaagggatgagctttgttttgtattttaggctttctgaaggttactcaaaagagcttccacccttatttatcgagaatatcagaaagttggttgatgatgatgtagaaaagataaaagcatttccaatggaaacaactataccatttcgagaacggctgaagatacttggacgagtggctaatctggaggaccttcctttaagtgccgcagagaggaagctaatgcatgcatataacgagaagcctgtgctttctagacctcaacatcagtttttcctgggtgataattactttgaggttgacattgatatgcatagatttggctacatctcaaggaaagggtttgaaacatttcttgacaggctaaaaatatgcatgcttgatgttggcctaaccattcagggaaataagccggaagaattgcctgagcaggtcttatgctgcgttaggttgaatgggatagattacgtgaaatatcagccactgatgacaaatggtgcctgaactcggcccttacaagaaccagctaacatttgtttggaatctgagaggtagccaaa

SEQ ID NO: 3393 - DNA, 869 bp, Avena sativa
atcaattagatattaaggatcagcagggtgatttctccaacgtgaccggcagaattgacactaacagcagtataactattcgggatgaaaacacttttgagatgcctacgcagtatccgttggtatgtttttcttcctctaacttgcatccagagcagagaactgaaggccaacaagatgtttcaggaactcctgtatatcatttcccatattattatccagggatggtagagcatggcatggcacttcagtcggtacagcattttcaaggaaacataaacaatgctcaagcacatacaccaccaacattgctccatcaatacagtgtttatcctcatacccatggtgtatctacaatgccgtcctttcatatatcctgctggtatgagtgtgcattcaagtcatctgtcaacagaaaatgcatggccaccggtatcaagcacaccaattcctgagggaacacatagtcgctctgacaggagggctgcagcacttgccaagttcaggcagaaaaggaaggatcgctgctttgataagaaggtgaggtatgtaaatcggaagaaacttgctgaaacaaggccgagggtgagaggtcaatttgtcaggcagaccagcaatgcagatataattagcactggagatgatatctctgaatatgaagacgacgatccatactccagggaggtcgaggtggtttcttcgtcagagtagtgtgaaaggtcatcttctatgtgaaatggtgtgctgatgatcattgctcactttgtgacttggtacaatacattgttcttcccgctactagcaatacatcatttgctcgtacaatacattctcagcatccacccccaaacggaacttgtggcatatct

SEQ ID NO: 3394 - DNA, 1006 bp, Avena sativa
cggccatctcctgcagcctgtccagcgccggcggcggcggctcggaccacgagcgctcgcgcggcagcactggcggcggccttcgccgcgcgtgctcggacggcaacctctcatccctccccgacgaccaccaccggtccagatcggcggcgctcgagacgatccagtcgttcgcggcccgggacggctcctgggacgaggaggaggacaacgacgacgacgaggaggaggacgcggacgcggaccaggagatgagcttcggaatgttcggcgccggcagcacgtacacgcaggagcacccgctgttcctggccaggggcctcgggatcgaccggctcggctcgggcctcctaagcgcggacggcggcggcttcgacggcgggggcggcgggggcggctacctggtggcctccggcggcggaggggaccgctccgggatcgaggcgcactacaagaggctcatcgaggaggacccctgcaacggcctcttcctccggaactacgcgcagttcctctaccaggtgagaggggaccgcaggcgggcggaggagtactactcccgcgcgatactcgccgaccccaacgacggcgagctcctctccgagtacgccaagatcgtctgggaggtgcaccgcgacgaggaccgcgcatccagctacttcgaccgggcggccagggcgtccccgcacaacagccacgtcctcgccgcgcaggcagcattcctgtgggacaccgacgacggcacaggacacgaagaagagaccatgacctacaccggcttcgccgctgctcacccgtccatggcgtcggcgaccacctgaaccttgctgctgctgctgtctcgctgaagctgacgttgttggtaggagctcgtcttcttgttccggcagtactagattcccaataattgtagcgactcatcaatcatcatggccatggcctagtccagcctgtgcgtactgcttgttgtagtgaacaagattcctagcatttggagcgttgcatt

SEQ ID NO: 3395 - DNA, 536 bp, Avena sativa
tataaatcgcggcttactgaaattatgcttgaggacaacaggacaggtgaatcttctcgtaggggcttttatctttacgatgataagcgaaaagcttctccagatcctgatatcaaaaagtacgttgagaaatcaagaatcatggcaggtcttgcaaaggatcctaagctgatgaaactagcagacaaggacatcgtagagatggtctttttccccgtggtgaacgaggcctgccgagtgcttgacgaggggattgctctgaaagcatctgaccttgatgtagcatccatcatgggaatgggcttcccttcgtttaggggcggagtgatgttctgggccgactctctgggcacggaatacgtgtacaagagactggacgcttggtccaaggagtacggggagttcttcaggccctgcgaatatttagcttcgagagctcgtcggggtgcatccttggctgccgcaggagccaagccgcgactataggtcgtggacccgttcctgtgcggagttcgagctctgttgtccagtccgag

SEQ ID NO: 3396 - DNA, 830 bp, Avena sativa
agcaagaaggcattgttgcaaaggaaacgaggatcacggagcagccggcgacagccataaaccacaactacggcgggaacgacagaagggacgagtacgacatggacagcgacagcatggacgacgacgaggatgacttcgacgacgacgatgaggacgacgacgacgttcgccgcatgccggtgcagtacgatacccacttcttccaaaagcagcagcagcagcaccagaaccagaaccacagccacagccacggcgtcgtccgacccaacgtgacaaacggcggcggcaacccgccggcaggcaacgccgcgcctgcagggacggcggcgacaagtggggcgccgttcctggccatggtccagtgacggcacgacgacggcagctagctacaaaccaagagatggccaggtggtctcgatctcgatccatcctgtgcccatgcatgcggatccggatctcgtacaattctacattgccacttgaatccttgatcgataccccctgcctgctcctaggtaaaattttcctactacaagacctggaaagcctacaccaaaatttacttgtgctccttccaatccaagctcttaattatttccattcctcgtgcacatatatatggatcgacgtatacatcatgtacatgtcacattcaatcaccacactgtagatgcatggtaaattaaaggcgtgctcatgcgggaattttccttttctttttcttttctttatgaggatacttttggagttacctttttacccttttgttcagaaacaaagttactgtccagtaagtgtcatgtaagaactttttcctcttcttaaac

SEQ ID NO: 3397 - DNA, 904 bp, Avena sativa
ctgacctcccgcacgaggagaacctgaaggtcgtgctggaggagaagctcgccgtgctgcaggtgtactggggcgaattccccaaggagcgggtcgacgaggcccatagcgccggcgtcaaggtcttgcatcaggttggtaaccttgaggaggcagtgaaagctaaggaagctggtgtagatggaattattgttcaaggccgtgaagcaggggggcatgtgattggtcaagagggtctgctaccgttgctgccgagagtagtggatctcgtttcggatagtgctactctggttatagcagctggtggaattgtagatggccgtggctatgcagccgcattggcacttggtgctcatggtgtttgcttaggaactaggttcgtagctaccgatgaaagctttgtgcatcctctgtataagaaaaaactaatcgagatgaactacacggactatacaaatgtattcggacgtgctagatggcctggtgctccacatcgtgtcctgaagacgcccttctatgttgagtggaagaacctcccagatcatgaaacagaggaaactcagcctattataggccactctatcatccatggtgtgcccaaggatgtacgtcggtttgctggtacggttccgaatgcgacaacgaccggagatatcgatagcatggccatgtatgctggccagggtgtcgggctaatcacggagatcataccagcaggtgaagttgtcaaaaggctagttgctgaagcacagcatgtcatcggagaaaagctttctgattttcccagatcgtcgcagcagtgacggtaaagtccttcatgaactgtaaaatcatatatggtgtatgctgcattgtatactttaggcaatagccaatcaaaataaataagttactccaaggcatt

SEQ ID NO: 3398 - DNA, 682 bp, Avena sativa
cttgccaacagcctttgcagctccagtgctgctgggaatgatgttgaagctagcagcccttccacctctccagtccttgcttgagggaccatcaacagtcttctgggttgcagtcatggcgtgaacagtggtcatcaaaccctcaacaatgccaaacttgtcattgataaccttagcaaggggagcaaggcagttagtggtgcagctagcgttggagacaatggtgatgtcagaggtgtattccttctcgttaacacccatgacgaacatgggagcgtccttgctgggagcagaaatgataaccttcttggcaccacccttgatgtgagctgcggccttgtccttgtcagtgaaaacaccggtggactcaacaacgtagtcagcaccagcagaggcccatgggatctcctcagggttcctgcagccaaagacagcaacctccttctcgccgaagagaagggtcttggcgtccttgaccttaacctcatggtgcttccactgtccgtgaacagtgtcgtacttgaacatgtatgtcatgtagtcggtggtgatgaaggggtcgttgacggcgacgagctcgacatcggggcactggagcgcaaccctggccaccagcctgccgatacggccgaaaccgttgatgccgatcttgatgggagccatggggaaaactggatcccgg

SEQ ID NO: 3399 - DNA, 978 bp, Avena sativa
cctccggcgacccggcgatctgcttccccggagacggtcaccgcatcaggttccgctgccgcgcctcctccgcgtgtctctataggctatcaagtatatagtttctagtggtttttggtgttcttcgtgaaatggtgaagctgacaatgatagcgcgggtcactgatggccttccactggcagaagggctggatgacgggcgggatcagaaggattctgacttctacaagcagcaagctaaacttctttttaagaacttgtcaaaggggcaacatgaagcctcgcggatgtcaattgagaccggatcatactttttccattacatcattgaaggccgagtgtgttatctaacaatgtgtgaccgttcttatccaaagaaacttgcattccagtacttggaagatctgaaaaatgaatttgagagagtcaatgggaatcaaattgaaactgctgcaaggccttatgcttttattaagtttgatacatacatacagaagactaagaaactctatttggacaccagaactcaaaggaacattgcaaaattgaatgatgagctctatgaggtgcaccaaatcatgactcgcaatgttcaagaagttcttggtgtcggtgaaaagctagaccaggttagtgaaatgtcaagcagattgacatcggacacgagaatctacgcagataaggccaaggatctcaatcgccaggccttcattcggaagtatgctcccgttgccattgtgattggggtcgtaataattctgttctgggcgaagaacaagatatggtgattccactaaacaacggaagctggcccgtggtatgacacttgaggaagaacacagataaggttgattctggatgaagagatatatgctttgatggcttgtatcccgtgtctgcctgttcaagcgagaactctgaagttatcttttactcctccatacaagcaattctactgaattcgttgtagtgtagaac

SEQ ID NO: 3400 - DNA, 769 bp, Avena sativa
acctctgcacacactgagcaagcttgtgttcttctcatcagcaaagagaaagaggataatgtacagaacctcagaagcaacgcaacagaaggccatgaatggccgatatccgtaatataatttcagaagcccattccctgtgtgcttcacatccttgtggctagttttacctgataagaaagaactgtacatttgaaaccagtggcttgaaatgtccaatccaagtaacagtatgaaaaccaagccaggtctgtaaaactgtgagagaagcgccaataaacaagcagtgctaaccctatctgttaccatgtccaacacagctccaaatgttgatgcttgattgaacttccgggcaaaccaaccatccaagccatcacagaagaagctgaagaagtacagaatagcaaagagtgtcctgttggaatagcacacagcaaatgcaatgaaattcatgatgatcctgagatatccgatgagattagggatgtacaggtacaccgatgggccctctttagctgacgtcgtcgccattgaggtcaggaggtaccaactgctagaaaactggcagttccttaaatgagatgagtatccttctcgggactccttcgaagtcgcagtcaccagcgcagcccggccgcgtcgtcgccgccgccgctggaccaccgacgtgccgcaaccgatgccgtcgtcgagggagggcggcgcggcgggagaggcgcggcagacggcggggtggggaggagcggcagagaggcgcggcctctggagg

SEQ ID NO: 3401 - DNA, 702 bp, Avena sativa
gcgtagtgttataagtcctggtgttcctaatggatgtcatgcagccaaatcatcaaagcgttgtgttgtacttgacatcgaaggaacaacaactccaatatcatttgtgactgatgttatgttcccttatgcccgtgataatgtgcggaagcatctgatttctacgtatgattctgaagaaaccaaagaagacatgaaactgttgcgtatccaagttgaagaagacctgagaaatggagttgttggggctgttccagttgcacccagtgatgctgacaaagaagaggttatcagtttgttagtcgctaatgtcgagtccatgatcaaagcagacaggaagattacgtcactgaaacaacttcagggtcatatatggaggactggatttgaaagcaaagaactgcaaggagttgtttttgaggatgttcccgaggcactgaaggactggcaatctcatggtgtgaaggtttacatatactcaagtggcagtagagaggcacagaggctactattcggcaactcaacctatggtgatctgcgacaatacttgtgtggtttttttgacaccacaaccggaaacaaaagagaagcaaggagttactccgagatcacaaaatcgcttggggtggataatccatcccaaatcttatttatcacagatgtgttcgaagaagcggttgctgcaaagagtgcaggtctcga

SEQ ID NO: 3402 - DNA, 776 bp, Avena sativa
ggtgagaggagtcctttccgtgcgctcttggatgttggtcttcttaggaccactactgggaaccgtgtgtccggtgcacttaagggagctttggatggtggtattgacattccccacagcgacaagagatttgctggtttcaagaaggatgataagaagctggatgctgaggttcaccgcaagtacatctatggaggacatgttgctgactacatgaggacactagctgacgaggaaccagagaagtaccagtctcacttcagtgagtacatcaagaagggaatctctgctgataacatggaggaaatttacaagaaggttcatgccgccatccgtgctgatcccaccctggtcaaatcgtccaaggagcctccgaagacacacaagaggttacaacctacaaagaagactagacctacgagcagaggaaggccagcctcgtggaaaggctcaacgccctcaactcctctgctggtgccgctgatgatgacgaggacgacgatgagtgaagattgttgtcaactgcagcagcgtagtcttgcaacgtgcatttttgttaaagttttggcactccgcagaacgggcctgtttcattctgttttgggtatcttgctggagttatagagattgttatcttgaccttgtaatgtgctggcgtttggatattgatcttaatccgttggttctgcactttcttatgttgattctgtggctatgtttctgctggttcttcatttgttaggtggttatattgtgtattcgttgccactattgca

SEQ ID NO: 3403 - DNA, 841 bp, Avena sativa
atacagaccagaattatctgaaggttcgtcagaaaggttagatgcctcaaaagaggagttgccatctatagaccttaaagggagttttgatctcactgaagcattacgtctccagttggagcttcaaaagcggctccatgaacagcttgaggtccagagaagtttgcagctgagaattgaggagcaagggaagtgccttcagattatgatcgagcagcaatgcaaaccaggtgcagacaaggtgctggatgcttcgacctcagcagaaggatcaaagttatcttctgaacccccagaatcttgtaccgtgaaggatgttccaaacaacagtcaaatggaacagcgccgcaagcagaaccaggtgataaggaatgaagatctaaccaggctctcctcaagacgtgaaccccattggccatgaagttgacttgatgacttgactcgctgtagccagagtaaaatcaggccatctttgttcttgcggaggacagggttgagcatttctatgaactaggtttagctgtacagtacccacagttgacggcagtgatgattccgtgatgtgtggatgatctaggtttgcagaaggctgcgcgagcaaatttcgcactgatgtactgttttgaggggttttgacttcttgctctcttcattgttaggaagtcaatagcttcttaggcatttggttatgaactagttcaagtatttgttatatcccctgccacctcgtgtgtttggaacatgctctatgttaccaaacacggccaggaatatattatctaccttcatttcttactttttcttatacataataatggaataaaaactctcccagtactaa

SEQ ID NO: 3404 - DNA, 686 bp, Avena sativa
gagtctgtcaagaacggcattggggacatagccggtggctgcgcagctttatccatgacttcaaggaggccaccgcgctggggaggctgcatgtagtatggcgcgttgtttcccaaattcatgcaggagttcaatttgtatctgtgagctgtcgcagggaagtcagtgatgactccatccactcctcctccacctccacctttctgcacaaaggcattaatctgcgccgtggcatccgagaagaagtcgtaaggttgagaaatgaactcgttcatgagcacatgagcatagactggaaggccagcagcctgcagggtcttcacaagatggctggtctggtttaacaggaaattgctggtcgatgggtaaatggacgtggtgctaacagaaacagcatcagcaaacttcttgatatctgcaacggaggaaggtgcagcatctttgacatcttcgtcgagcatgtagacaaggttatacttggcttcttgcttgaacttcactagagttgagctgtttgtcgactgaatcatgactttctgggtggtctgtttgctgtaaccagagtcatcaagagctttgatcactgcatctaccacaccaacccaagtttctctgccatgaacgtagcacgctgcaaagatccaaatggagtaatcaagaatgaagtagcaccacacggactagct

SEQ ID NO: 3405 - DNA, 872 bp, Avena sativa
acgcgccgccgccgcatcggagcccgatgggcggtgcgcgggcctcccgggcgtggagctctggggcccggcgctcaactcgggcgccgaccagcgcacgccctccgccgccgcctgctgcgccgcctggcagggccacgtgcggggccgacggcgactgccgctgcaactcctgggtcttctgcggggacaggggcagatgcggcaacaggttcggcgagtgctggctcaagaggcagaaggatgtgctatccccttcagtcatcgcgagaggggaggacgtcatgtggacctccggcctagtcttcggcacatcgcagggaatcctggggctggagacgaatctaggtacgcttcggatccaattgctgcctaattgcgcaccccgttccgtggactacttcatcgagctcttgggcctgcacaactgcgctgggtgcagattctatcgtgcagaaggccgtgggaacctgtgggatgcaggtggcgaccacatagaaaatgctgcatctggtccaccgtatgcactgctccaagggacgctggaagtcgacggcgtggccttcaaggagatgccgagagaagggtgctcggcggtgcgaagaggatccgtcgtgtgggtcgggtcagggccggagttcctggtcagccttgcgaaccacgaggagtggagcgatgcctacaccgtgttcgggtccgtggtgccggaggacatggccgttgccgaggagatggcgacgctgccgaccagcatggacgtctggagcgacgtgacggtgaggytgctgagagaccccgtgtatttcaaggtgaagcgaaggagcaacgctagcgccgtctagctagctaggtcttttgaatgaacttgctgt

SEQ ID NO: 3406 - DNA, 670 bp, Avena sativa
agacagtcttcctgggaaccagttctgggagcgggtacaacttctgtttgtcgcacgtcagcggcgctacaaggttcttgaaggcgcccatgcatccttcttggagtcggtgcctttcaacaagatatctgccttcacccttgtccagctggtttatctcttggtcgtctggggggtgacatggataccagtagtcggaatcctcttcccgctcttgttcttctttctcgttgtcattaggcagcatttgatcccgaaattctttgatgcatcccacctgtgggaattggatgcatccgagtacgaagaatgcgagggggtgcgccgtgatccagcgatatcagaggctgaagaagaagctccccctgaatatgcttctgagataatggaagaattcacgactcatcgaggagaactgaagcacagggccccgagcttccgcgacgagcggctgatacggctgaactctgtccacatgacgagacagttcttccggatctcttcttttgctcctccacggcacggatctttgtaaggagatgcgaggagcaatctttgtggcacggatctccaggcgattggtgcaaaatacatggcgtatcatggctcgcacacggcggagcaagtgataaattctttgtcttcataaagaactgctgtcgaggatacg

SEQ ID NO: 3407 - DNA, 766 bp, Avena sativa
ttagatcgtcagttcaacaccaagctacctgatacaaacgaactcatatgcagttaaatctttcatttgctgcagttatcagtcatgataacaagcaaacataccggtcatctcaaacaacacgaaaaaaatacttaaaaaagatgtacagaaagacaatgaggaaatcaaattatatggggaagactagggagaggctatatcaaacagcaggcaagcagaaccagacacaacaacctggctctgtccgagcaatcaatcacctcaaaccatttgtacatctatcggggaggggtcaactatcaatgtataacaaggcatgctatcgaagcttcgactcgttggtcttgctgctccggaagtttgagagggagaagaatgaccttgatgctttagtcgatggtgcagctccagtcctgtctcgtagcctatccgagctcgtggcattgaagctgcttgtggttgattgagctgataagatgctattagtcttggaaccatcaaaagttctcctgcttgaatttgcaccatcactagcaccggattcttcttgttcatcttctccttcagaaactaccgatgagcttgcccagccattagtgttgtctcctttgtttttccgagcaaattttagaagtctcttgaatccttttggagaatctttatgaaaaactattgcaggtgggttttcagcatttccccactcaataatttctggttcgctgctatctgcttgcaacatttgtgacaacgaatgacggatttt

SEQ ID NO: 3408 - DNA, 820 bp, Avena sativa
gtcctttctcataaaactaattggaagtaatcaactcacggcagcagaggagtgggcagctttcatggggaaagaaatgataattttgataattcagaagtatctagatattaaaatgctaaagaacgcgaataagttggtgaaacaatatgatcttgcagaagagttcccagatgttaattatttgtacaaagagagttcactgaagaagctggcagagaaagggtgctgggatgttgcagaagtccgtgccaagaaggaaacaaagctgatggaatacctggtatatcttgctatggaagctggttatatggagaaggttgacgagctttgcgaacgatactctcttgaaggttatgtcaattctttggtcccagaagaagtcttctgtcagtctgactacttagatctgaagaaattgattttagaagaaattgtgtgggttgatgagatcaagggactacttaatgcaacaagttatattgaagcttgtaaagttattggcgtggattgcgaatggaaacctaattacgaaaaaggcagcaaacagaacaaggtttctatcatccaaattgcgtcagataagaaagcttttatctttgatctgattaagttgtacgaagatgatcctaaagaattggactgctgcttcagacgaatcatgtgttcttctaacatactaaagctgggctataacctgcaatgcgatctgcatcaactgtcacaatcctatggggaattgttatgtttccagtcctatgaaatgctacttgatatccagaagctgttcaaagaaactactggtggcctctctgggttg

SEQ ID NO: 3409 - DNA, 802 bp, Avena sativa
  modified_base (771)..(771): a, c, t, g, unknown or other
cagcagccgcagtagcagtggcagcaaaaggacaagaagcattctcaccacagtagcagcggcagcagcagtaaaagagataagaaatcttctcaccgcagtaccagcggcggcaacagcagcattaggagcagaattgacactagtgatcctcaacatggcaaggcgtatgacagcagcatcagcagcacaaatgacactattgttcgtgaatacgatagtttatctctatggctgccaccagatagtgctaaaatggaagaggccctacccccggcacctgcgctgaagaccatggaacaaatcaagcgtagcgtgagcagctgcaaggagccgcccttaagcatgctatctcgccaggtgtctgcgaagtacaaggggatgttttccttttggggtcagaaccaactagcttcttgatcatatttgtgatctctttgagtgtgctattcacaagctgcttccgggtatcaggctaccaacaaagccttacttttcttgagaaaaccttttactttgcttatgtttcaatctgtgaacttctgggtttggtatctcagtctatgtcgaacggtttgcttcacttctgtttgaacgtgatctaaaagattttgaaaattgtcgcttatgtaagtccattttttacccatttccttgtgtatccagcacggtgtaatatgtgtgttttgttgactgtccgagtttcatactgaagcggcatttgttcagttcagttgttttctcttttcttaaacaatttcaaaaaacttnttgtgaaccttacattatgacaaaagaaaaa

SEQ ID NO: 3410 - DNA, 698 bp, Avena sativa
aatctcctctgggtgggacttctttgaagcgatgtactttggtggaagcatgaccgaaggtttcctccggggcaccggcaccttattcggaacctacgtgggtggtttccatggcgaggagaggctgggaaaatttggttatctagctggaagccagctaggcagctgggtcgggggaagaatcggactgatggtctacgacgtcatcaacgggttgaactatatgctccagtttgtccggccaggggagtaccattcatcagcttatgcttcagaagagggtttggagtacgcaggcaactacagaagtggcgaaggagaggagccgacgtacgacgaaatggcagaagaggagcagcaggaggaatctcggggtttggagtacgcagacaactacagaagtggcgaaggagaggagcccacgtacggcgaaatggtagaagaggagcagcaggaggaggaatctcggggtttcagcttgttctgaaaccgcaagctgcgataccagccaacttagtctgttcagttatactgataggattcgacacgattcttcttctctgtaatcttgtttggtcactgtatatagaaacgtccgcgtgcaaacattgtggtgttgtcctgctgaatggtataaacggcagygaacaactagaatgtcgacagaggacccawttkggagtatcttgtatcttcag

SEQ ID NO: 3411 - DNA, 631 bp, Avena sativa
gcctccatggggtccctcctgctggccgccggcgcgcgcggggagaggcgggcgctgcccaacgccaggatcatgatccaccagccatccggcggggcgcagggccaggccacagacatcgccatccaggccaaggagatcctcaagctgcgcgaccgcctcaacaagatctacctcaagcacacgggacagaagatcgacaaaatcgagcagtgcatggagcgggacctcttcatggaccccgaggaggcgcgcgagtgggggcttatagacgaggtcatcgagaaccgcccagcctcgctcatgcccgagggcctcagcggcattgacgcgcctagccagggtgggggcggcggcggcggcaacggacgtggcagggagatggaggagccctcggcggtatgagttccgggtgtacaccaaggtgaaaacctttttccgagtccggtggcaatgttgtttgttgttagatctatgttttgatgattcgtaatacaacagattaactttctccctgttattgcaatgcatgaattgagctattgctgatatttattgcaatttgtaaagggattttcattcctttgatactgataattgatagtgtggtgaatacctgttataccatcaa

SEQ ID NO: 3412 - DNA, 792 bp, Avena sativa
gctgttctccagcgggggcttgcagatgcacacagtgagaccgatgatgaactcatcgaggagctgcgcgaccacccgcttcctgatgtcggtgataaggactttgactctgactttgacgacgcgcacacaacggacgaggagcttaccgacctgtacaacgcgaggcagcatgttgagaaaaaaatgaggaagaatcagtgctttaacatggatgacaccaagtgggacatgatcaacaaatctatacagcaccgcgccgtgaaggacgacctgagtgagatcaaggaggatgtttttgaggagtgcaagagccaggaggttgtcatggatgacaccaagtgggattatgttgtcaacgaactagcagagggcgaactgaataccatgaaggtgtgtgaggatatactcgaggacatgctacactgggataagctactacctgatgagataaagcaaaaggtagaggctaaatttaatgaattgggggacatgtgcgagaggggggagcttgaacctgagcaggcttatgagctatttaaagaatttgaggataagatggtctcagagtgcacggaactaatggaagcagagccaccaactgctgacgaactttctgaaacagataataagagtgttgagttgaatgacccacctggtgcaggacctgttcttaggtgggagtcaactattgtctttgctcctggtggtgatgcatggcatcccaaaaataggaaagttaaactcagtgtaaccgtcaaggaactgggactatcaaggcacacaggggat

SEQ ID NO: 3413 - DNA, 680 bp, Avena sativa
gctctggatcattccttgtacaagatattggaggccatcgtactcgaactggcgggctgagtatttcactagcaggtcctgatggccgtgtcttgggtggcggagttgctggagttctgattgcttgtacacctattcagattgtggtgggcagcttcatcaccaacaccggcgaaaagaagccaaagaagcagcaagccgccccatctgaacctgcatcagcaccaccaaagctcgcgccgatcgcgcctgtgcctatcggtgtcgggatggggccgagcagcccaccatccaggggcacgctgagcgagtcctccggcggtccaggaagcccaatgaaccagggtgccgcggccactgccagcaacaacagccagcaggggggcctctccagcatgtcctggaagtgagcatcatcagtgacagcttgaccgtcgttcgtagaagtctgcaatgagaagaagaaaaaccctgactagatgttattatctagtgtaatttcagtgtgtcgagactctttagatgttaattcgtcgtatttcgtggattattatcattaggtggtcgttcatcctagtccggatgtcgtgaactggagtcggattattgctatgtcgtcgtcgtttaacttgtggttatcatgatggatttatgcttatttggacatctaggtaaaaaaa

SEQ ID NO: 3414 - DNA, 856 bp, Avena sativa
acagtgtgcaatgatatcatacatttgcatgacaagagtctgcatgtgtaccgtggcaattttgatgatttcgaaagtgggtatgagcagaagaggaaggagatgaacaagaagtttgaagtgtatgaaaagcagatgaaagcagcaaggaaaactgggagcaaggctgcacaagataaggttaaaggccaggcactgtcaaaggctcacaaagaagtagccaaggggaaggggaaggggaagaatgtggcgaatgatgatgatagcgtgaagccagcagatctgccacaaaagtggcttgactacaaagttgagttccacttcccagagcctactttgctcacaccaccactccttcagctcattgaggtgggtttcagctacccaggtcggcctgacttcaagttgtcagacgttgatgttggcattgacatgggaacacgtgttgccattgttgggcccaatggggctggaaagtctactcttctgaatttactagctggtgatctcaccccagctgaaggagaggcaagaaggagccaaaagctgaggattggacgatactcgcagcattttgttgacttgttgacaatggaggaaaatgctgttcagtatttgctcaggctccaccctgaccaggagggaatgagcaaagcggaggctgtccgtgccaagcttggaaagtttggccttccaggtcacaaccatcttactcccattgttaaattatctggtggtcagaaggctcgtgttgtgttcacttcaatatcaatgtcacatcctcacattctcctactggatgagccaacaaatcacttggacatgcaaagtattgatgctttggctgatgctctgg

SEQ ID NO: 3415 - DNA, 830 bp, Avena sativa
gtactctataatatgagtgtacgaccttatgtcaataactgcggttagaatgtaccgtaagtctagctttaccttaggaatattagtcttctgatgtcttattctgcttctactcttgtcacttcagccattgctcaggccatgcctttgttatgcttgataacaagactagtgatgtgtgtagtactactgatgaacaaatatgatgattgtgcaggaaaatcccaactacagaagaattgcaatttcatgtttcgtgcaggccgcatatgttctggagtttgacaggcaagagaacagaactggcgaaactgccattgctcctaactggtggaagccatttaaatataagttggtatgccctctaatcgattcgagagatggatccatatatggggcacttctagaatgggaccagctcgctgctctatcagacttgataatgttgagacctaatggtgctccgaaagccgtgctggcactgagaggaacagtactaaagcagttgactgttgcgagagacttggaggatgacctcaggttctttgctcaggagaacttgaggggttctgtcaggtacgccggagcactggaggtgctcaagtcggcaatcgataagcatggtagcaacaatgtgtgtgttgcagggcattccctgggggccggatttgctatgcaggttggtaagactttggctaaggacggagtctttgtagaatgccatttgtttaacccaccgtcagtgtcacttggcatgggcctgaggaaacttcaggagaaagccgacaaggttttgaagcgatatatcagtggcagctcttcaaatgccg

SEQ ID NO: 3416 - DNA, 420 bp, Avena sativa
cgcctcagaggacgacccgtcgaccgtggcggaagcgcaggcagagatggtggcgcagcataaccagcaaatgcaacagcagcagccaatgctgagccccatcctggaggcatcagaggccccaagcatcacccccaaggactcatccgaggagagcttgatgaggcaggaagcagcagcggcacacaagaggaagagcatctcagaccttgaagagttcgagatgggatctagctccaggatgaggctctccgatgtctcggatgtgcagctgtgcggttcaccattgatgagcttcacctgaaaggagcaacgaattgattgttcctccaggagcgggaagggttgtcgtagccggttatgacttgtgcgtttcttggacgttggggttagagtggtgtctctctgttgttgttgatg

SEQ ID NO: 3417 - DNA, 635 bp, Avena sativa
cgccggcaagacctacatctccggcgatgtgatcagcaaggatgacatcaaggtgttcgcggcggtgcccacgaagcctggtgctgagttcccgaatgctgcccgctggtatgacaccatcgccgcggccactgcttcaaggttccctggcaaggctgctggtgtgagtgcatccgctcctgccgcggctgctcctgctgccgagtctgcaatggatgtcgacgatgatgatgacttggatctgttcggtgatgaaaccgaagaggacaaggcagcagcagcggagcgtgcggctgccaagcctgccaagaagaaagaaagtgggaaatcatctgttctgatggacatcaagccttgggatgatgagaccgatatgaagaagctggaggagtctgtccgcagtgttcagatggagggtctcacctggggtgcatcaaagcttgttgccgtgggttatggcatcaagaagctgcagattatgatgacgatcatcgatgatctcgtctctgttgacactctggtcgaggaagtactccaagagccaccccacaatgaatacatccagtcctgtgacattgttagccttacaaacaagatatagaatctcgtttccatcagattgctgctgttggatt

SEQ ID NO: 3418 - DNA, 587 bp, Avena sativa
ccagtcctaaagagtatgagaagatcatctcctactgcattgaagatcacactacgctcggttagagaaagtcggaagcagagtcttcctgaatgtttgaagaaggaattcagactaacaattaacatcctacggtctgtcgttactggtgatgtctatgagggtattagagctttgagcatcgacaaagataatgcccctaagtggagtcctaccaccattgaggaggtgaacaatgaagacattgatcgtgttttcaaagaattcagctcagaacatgagctccaagtcccatcctctgattccaacaggtggagcggtaaatacgagcacacggtctatgcaaaatgttcaccgtaatcaggacatatcccagcagctcccctttatgatcatgacatggcggttttggtgcatggcatgcttgtttgattgctcatgtaccacctgtgtgtaaagattataccgagctgttgagaactactccctccgttttcaaaatataagatgttttagctttgtgaagcaaatgtgtctagacttattttaatgtgtaggttcactccgaacatgaatggacctataca

SEQ ID NO: 3419 - DNA, 795 bp, Avena sativa
gaggtgtattctcgatattgatgtccaaggagctcgagtctgtgagggcttcttctcttgaagcaatattcatctttgtgtgccctccgtcgttcgaggaactagagcagcgccttcgggcacggggtacagaaacagaggaacaaatccagaaacggctgaagaatgctcgtgctgagcttgatcagtccaattcaccaggtctttttgatcatcttctggtaaatgatgaccttgaaacatgctatgagaatttgaagaagttactttcgctggatgatggccatgaagattcagatgattgtttcatcaaggatggtgaagcaactgcatgctttgcaatcctgtcaaaaacagagtcagaaattttgttgcaatctgacattagtgaagtaggaaaaggagctgcaaacttgctagcgctcgacttgtcctctcttacaggatgcgctccaggccgaacaaggggtcttaagatacattcagctaactcaattgacaatggtttgaaggccattagatgacccaagatattcagtgttgactgatgattttttccagttagtgagatgaaagcttcagaaacatcttagttagggaaaaaagggaacacaaagtgggaattcatttccatttgtcatttgtttgccacagaggcacttcgttagttctttgtacttccagaaatgaggttaaatcataccttgagggatttgtaccttattggtgagggattgtatacttcattgcgtaccttatatttgttggttgaaaaaatatgatggaagaccaaaa

SEQ ID NO: 3420 - DNA, 901 bp, Avena sativa
gcaaggaattgcatactaagcactaaccctcggtgctctcgtctttcattcagtgttcagcttctccccctcgacgtctctacacgatacgcctttcagtttggctaccatttttttcccacttaaccaatttttcaccaaccgccagaatggcacactaccccccgataacagggtacaggaccgccacaaaatgaaacccacttgtcagtctaatgcaccccagagcataccacacgataccaccttcaaaaaatcacaaaatatcatcatcccttctactactctttgtcactcgcgctcggacaaaaccttgcagtcatagtgtgaatcggagatgctgtgcactactaccacggctagcggtggccaacgctttcttcagctacctcactttcttcagctaccggtgcttggttattgctggaagtcgatccattctgcagcacctcatgatggttctggtccacagtgctactagggccagctggttcatgcaggcccaggcctccaaggtgtgctgtcaaattattgacagtggagcttggtgcaggtgtagagcttgatggagtagcagggttgctctctcgaggaaacacccatttgtgccaatcattttgcctcctaactttgtcaccctgcacttctagcatagatgaggactggattgcttcttttatatactgcaaactggcagactgcagatcgttagtgatttctcggaccttcttgaaggttgcgataagagcgatatcaacccagccctcctgatccatacgttgccgcaaccaaacatcagcgcataagttgtcctagctgaagtaaaactctatctgtttcagcagcttcgcctggccttttagctcaggctcaggctcaggttcagactctggctcaggct

SEQ ID NO: 3421 - DNA, 809 bp, Avena sativa
gtcgcctatgatgagcaggccttcccctgtttcgtaggtgatctcaaagacacaatggacgccgttcctgctgatatggtagtaaatgccactctggtagccggggctgtgcactggaatgagaaagggcaagtcatttaccacgtgagctcagcactccaaaatccattgaccggttacgtttttgaggatgcatgttgggattacttctccatccatcctcgtgtactagagaatgggaaacctctccaaaacagaaggccatacttgttcaagaaattcgcttacttccgcgcatatctgacccttatgtataagctaccacttgagatgctgcatgcagtgagcctactattctgtggcttgttttcacaatattaccagaagcacaaccgaagatacactttcttaatgctcttggtcaagctgtatgcaccatacgccttcttcaaaggatgctttgatgacacgaacttgacaaggttgaggaaagaagtaaagatggatggcaatgatggtagcctatttaactttgaccccaagtctatggactggcaccaatatctcttgaatgtccacgtcccagctgtactaaagtatggccgcaaaaagaaggggagcgtgtaggaaagaacacaatcttcctattcttgagataaaggacaagcattgttctatacagcaaaaaatgtatatcatactgctaaacattaccatttgtatgaagttaagcacatacgaccatgtgatcaatctgtatgtgtttatactattcaatagaaaaaataagtactcatagaccccagtgt

SEQ ID NO: 3422 - DNA, 386 bp, Avena sativa
cttctcagaactattctttgcatcacagggtgaaccaaaggtttaccccaatatgcgatctgcactagtggacataattcaaactcgtggtgttcgagggctttatgctggtttaacgcctactcttgttgaaatcataccgtatgctggcttgcagttcggttcatatgatactttcaaacgttcgatgatgtcatggaatagatacagacatggaaatgaggtggatgactcggcgtcaagcttccagctatttctttgtggatttgcagctggaacattttcaaaaagctgcgtgtcacccacttgatgttgtaaaagaaaaaggttccagattgaaggatttaaaaaacgtcacccaaaggtaatggggcgcggattgagag

SEQ ID NO: 3423 - DNA, 758 bp, Avena sativa
acatctctgacaatgctttaggcgagaagggtgtgagggcattcacggagctgctgaaatcacagggcgaccttgaagaactatatgtgatgaacgatggcatatcagaggaagctgcaaatgctctgtctgagcttattccttcaactgagaagcttaaggttctccatttccacaacaatatgactggtgatgaaggtgctatgtcgattgctcagatggttaagcgttcaccaaatcttgagagttttaggtgctcagcaaccaggatagggtactgatgggggagtggcattggctgaagcattagggacatgtacctgtctgaagaagcttgacatcagggacaacctatttggtgttgaggcaggtgttgctcttagcaaaacgcttccaaagcttcatgatctcgttgagctgtacctgagtgacctcaacctcgagaacgagggtacactagcaattacggatgtcctcaaacagtcagcgcctcagttggagatccttgaaatggctggaaatgagataaccgctggtgcagccaaaggcttagcagaatgcttaactgcattgcagtcgcttaagaagctcaccttggctgagaatgagctgaaggattctggcgctgtgacgatcgcacagtctctgcaagaaggccacccagacctgaaggagcttgatgtgagcacaaacatgtttcagaggtctggagccaggtgctttgctcaagcaatcacaaacaagccaggttttgtgct

SEQ ID NO: 3424 - DNA, 894 bp, Avena sativa
tgatgatcagatcctcgggaccgcatgcgtcttgcctggctcaccaggaccatccagttgtcttcatggctagctgggagcattggtatgcaatcaagctacagcggttttgacggcaccattggcgatggcaggcttctcggacgttggtgctttctgggccaccttcgccgcgtaggtaacagctggagcagcagcaattttctccgctggaaccttcaggtccccattgacaccgtttggcacaggtgacttgggcttcccattagcgatatcctgctgtttctccccattggcgccgttcggtgaagacaaggttggcttcccattgatggtatcctgcggtttctctccgacaacaggattcatagccctactatcccagacctgcttttggatctgctgttgttttactctcttctcctgcatcaacttctggcggttctcatagaacgtgaagtcttccaggatagaggtcttactgacatgctccttgaatatcttcagcatctgaagaccttgctcgaggtttatgtcttgggtgtcacgactgtttgtgactggcttgccttcattgttctctaggatgatgtgcttcagaatattgttgggcacatctttgacgatgtgccacttgagagagagtgaaccattccacttgtcttgttgccagtactcaagagatttttcaaaatcaacaggaccagtcatttcagcaacaccaacaaactgtccacttgtatttaccgagaaaaacaagaatatagggcagctagagctctttgcctgcgcttctttgtaagcagcatcaagcttcttgtttccattggtggtacttgcccacacaccatactttatactcttgtggatatcatcctcactgtatgatttaat

SEQ ID NO: 3425 - DNA, 714 bp, Avena sativa
ttttttaattcaaccaaagtctcaacaattaacgaaaagatcaagagcacaaaatctctgaacagaatggacaaatcctattcagatatactgaccgacccataacgtgacataaagaccatccatcataggttgagcagcaaaacaaaatcaaaactccagaaatgacttcttattacagcagcaaagaagttactttaagagcacatctgtttcgacaatctccttgttattgacatggtagctaacagaggaaaagtgaacgaaaaacggaacacctgcttctcatatgcaatttccagtcagcacatcagcgttcggccatggttctaatttgcaggcttccctcatgcccttagctcaacataggaccccgagatccctgaggtaccaatcagggtaatcttccccactcagatcctatgccactgcatctcattttcaggtgaatcatttttgtccccaactcagtctccacctttttccgcagatggtgctcttcaggaccgaaggattccagatatgccatgtatcgattatatgcagatttaatagcttcttctatataaccaggcaaggagcccacgttctctcctgttaggccacaaagatcatcaagagccattcttagggtaaccaaaactccactgaactcttcacatgcttcagctgcacgaaatacattttccaaagcatcttgaccagccttatcat

SEQ ID NO: 3426 - DNA, 507 bp, Avena sativa
gttgaaggtttggaggctttgcagcagcttgtgtgcctgaacatcagcaacaaccagatctgtagtttcacatcacttgaacccctgacgaagataatttctctgaaagcactggatctgtcttttaatcaaattggagctcaccctattgacactacacggtatatctgctcgtctccgttttcacacaaagtccaaccatgtgaagcctttgacgagtgccgaaagaaaaacattgacgtggaggaattctgggacgccatactgttcttcaaatctgtgaacttggtgcagcttgacatcaaaggaaatgcagctgccgacaacttcaggactgttgtgacgacactcagtccttctctgaaatggcttgatggcacatgcgttcattagctgtatggtttttatcagagaaaaatacgaacttggataggatgtcaaagcagccgctgttaaactttttttgggctagcagccattgatttgcttcatatgtattcagtacaa

SEQ ID NO: 3427 - DNA, 957 bp, Avena sativa
atttaagccagcatccattgataagactcaggctggctctctacagaaaagcaaagataatcgggtagctgtagagtttcataacaatcagcctggcaaaccaaaggtggcatttgaaggaagccaagaagagtataaggatattgatggtgtcttgttttttgacggtgagacctttcgcttggagcgattgcatcgggctgtcaagagattaagacatgtccgggtaccgggagagtctgcagctacttccttggcagctacaactactggaatgggtgaatctcattctcctccatcagcgaaagttgtcaagttgcctaagcctcttatacactcagctccggttgaggttgagcgcattgaaataggtgaacctgaaaatccagagccaagaaacaataacaggagctctacatatcaaccagtcagcgcagacccattttccctttcacctgatccaaattaccaagatgaaaacctggacatacttggtgatgatgacaatggctcacccaataacatggcctcagcagaaggcgcatcttatcgcagtttcgacatcaacctaccaaatcagctcgacatggatgatgaggttgctgatgtagatgtaaacgatgaagctgacgaggggcttaacgcagctgaggcgcttcgagctcaagtcaacgcggaaggccagcaggcggagcaggccgccacctctagctccagcgggagcagcagcagcagtagcagcagtgggagtggtagcgcaagcgggagcagcagtagcgatagtgacggcagcgacggtgattcagccagctcgggaggggatgttgatatatgagtttgaggccgttgagcttacttgctgtgtatggttcgcacttctacatcgttgcaaaaggaggtgtgagctgatgcttcgctaatctgtatgtgtaatcttcgtatcatatgcctttgagc

SEQ ID NO: 3428 - DNA, 616 bp, Avena sativa
gcaatggtatctggcttccaggggtttccgaaggagatggtgagaagtggaacgatgacgaagctttcttcgcctggaaagacgatgccaagaactacgagaaccatctcgaggagttgaaggctgaaagagtgtctaagatgttctcgcatttagctgaaagctcagacgtgaaggccttgcccaacggtctctcgctcctccttggcaaaatgaatccttcaaagagggagcaggttctcgacggcctgaggcagcttcttggttgatcgttggcctctaggcatccagcataaacctgcttggtggactacaatagaagcgcagatgaacggcggcgaacttgcctgacgagttacaggaggattcaatggaagagtagaacacattgtttttctgtttgcacataggcacttggtgatggctaaacgtcaaggccatatattgttattatacacacaaagcataggttgttgttctcttctctgctggatatttgatcgtggttgtagattgccaggcgcatcagatgcgacctcactgctcgtctagttatgtactactagtatatagttctctttttacgaaagttattatgtgctaccaaaagtaaaaa

SEQ ID NO: 3429 - DNA, 723 bp, Avena sativa
cggctccccaagtcacggtgcccttaccgaggaacggcagcgatgactccctgacccgcgcctaccctcctgcgcccgccaccacgacaaccccaccagaatactttgttcccaagttcccggagaagccccaggtcctgcctcagtcatccgctccacctgcggcagccttcctgcaggtgccgccaggaaggtatgcatctgttgcccctggctctggccctgaccatggtcctttctacttcatcccggcgccgcaccaccacggttactacaccagcaccaaccccgccggcacctcctactacgccgtcgcaccgcacaacggcaatggcaacgggaatggcaccgccccagcccctgccatgtccaatgctcaggcctacccgcaagtggcgtacgacagcaacggccgcgcagtctactacaccggccttctccctcagtacccttcgcccgtcaacggcatgtcatcctccgcagcagttctcggcagcgagccctcgaagccggtggccgtgaagcccaccgtctcgtgatctcgcctatccagcatgggttaaaactaaagagtttgccaattttcgttcgttcgttcgtcaatatttatggggttaatatgtcggtcagttggattcgttattgtgtctagtattcacctataagtttttatcttttgtttagagttttggcctaatgggtttatgtatattgaactagttc

SEQ ID NO: 3430 - DNA, 705 bp, Avena sativa
gcagaaagttgttgagctatgcaaaaacagagtcgttctttttgacaacaagaccagggaccgaatgattcaagctaagcagctggaaaagttgcttgatgtggttgattctgttagtgcaaataatggaggaaaaccatttacagatcaaatgctcacccgcattaaggaggtgcatgatagagaaaaggaggttcatgatgtcatgggatattcagaggaccagatatctgaattgaagaaggagatccacagaactcgggatgaacaacttgcaaacattactgccatggtggaggataagctgaactgcacggtggagaagctgcaaggccaactcatggaagaacagaatgcaagattagaggcagagagggtggcagccgaggccaggctgaaatcggaggaggagatccgccagctcagagagcgccttgagaaggcccagctggaaaacgaggagttccgacggttggcgacgagtaacaagtgcgctattctgtgagacggatgtctctccggaaagttcatcggatgcgcgcggatgctttggtgcttttgttaatatagggtgctagtaatcttaagccggtttcgtgaactgataaatttgttctgtcatctcgtatatctactagtagtactgaaaccgaaatacctgaggcagtcgttttactatataatagttgcggtatatacttcwaa

SEQ ID NO: 3431 - DNA, 960 bp, Avena sativa
tccaagacttggatttctcatttattgagatgaacccatttaccatggtgaatggggagccatatcccctggacatgagaggagaactggatgatacagcagctttcaagaacttcaagaagtggggaaatttagagttccctttaccgtttggcagagttctcagctctacagaaagttttatccaagatctggatgacaagacgagcgcatctctgaagttcacagttctgaacccaaagggacgcatttggacaatggttgcaggaggcggtgccagtgtcatatacgccgacacggttggagatttgggatatgcttcggagttaggaaattatgcagaatacagtggtgcccccaaggaggaggaggttctgcagtatgctagagtagtacttgattgtgcgacttctgatcccgatggccgcaagagagcccttctcattggaggtggtatagccaacttcactgatgttgctgcgacatttaatggcatcattcgggcgttaagagagaaggaatccaagttaaaggcgtccaggatgcacctatatgttcgacgaggcggtccaaattaccaaactggactagcaaaaatgcgcaagcttggtgcagaaatcggcgttccgatcgaggtctatggacccgaagcgacaatgaccggcatctgcaagcaagcaattgaatgcatcatggctgcagcataaatcgggatacagttgagtagcagtttgggatctacaaacaagaaacttgatgcgcatagatgagagcatagctggaataatttacatcacatggttgatcagtttcttcagaagctatttgagcaaacacatagagtgttgtctcgaagaaacatctactgctgtaatgtgaaaaactaaagacttagcatttcttatttttggtttgtctggttgagctgcattgcaaccaccctgtttcaccatactataa

SEQ ID NO: 3432 - DNA, 636 bp, Avena sativa
gtcaggtttatctgtggtgaaattctttattttgttggtcatgggataggagaactgttccactgtgccccaaacatccctcattattcaagaaacaaggctgttggtatcatgaaagctggacaaacatttacgattgagccaatgataaatacaggaatttggcatgaccgtctatggcctgacgagtggactgcagtgactgcggatggtaaacggagtgctcaatttgagcacacccttttggtgacggaaactggagttgaagtcttgacagcacgactgccctcatcaccggacgtctacccatggttgaagccctcatcagccactagcaagtgatgcgtgcaactttttttgatctacttgccagtgagacggtgacaattctctgaagagcaaatcatgtggattttctttgggtcataacttgctgcaaccatcattctttttaccgggtgttaatctctatgtacttacatgaggttaaggcacttaagctggactgaggtttccttggtggtctatttgtgtgtgctaccattatggtaggttatgagagataacatgtgaagtattcataatttatagaaacattttcagcagctgaatggcatggctccaggtggacaaaaa

SEQ ID NO: 3433 - DNA, 714 bp, Avena sativa
gtgctacaagtgcggcgaaggtaaggggtttttttcctttttttactttttttattttttttcttttttttcctttttttaggggtttttttactttttttgttttttccccttttttctttttagggttttcggttttcggttttggttcggttcttacggtaggttggttggtggtggctacggaggcggtggcggcggcggccgtgggtgctacaagtgcggcgaggagggccacatctccagggactgccctcagggaggcggtggcggcggctacggcggtggcggctacggaggtggtggtggcggcggcggcggccgtgggtgctacaactgcggcgaggagggccacatctcccgcgagtgccccaagaagtccttctaggcgctgcctccagtcagatctgactgccctggttccgttaccttctttactctgcagcaagtcatacctaatctatcagtagtagtcgccgtagtagtgtttcctgtgttactcgtgtcaagaagagggatctgcctgtgatccgtgagatgggatcttgctgttggatgatgatggttccagaaggactggtcgtgtcgtgtttggtttcaagttatattttggtgtgtctcgtgtgatgaggacacagcctgatctatctatatctatatattggatggacctagtaatggaagaaaattgggttaatctgtgtgttgatgttg

SEQ ID NO: 3434 - DNA, 881 bp, Avena sativa
tactgaagttatgtatgacctaaaagctagtggtcaaggatctaacgaggcagatgccagctggtttgatcttttcagcaaacgctatttgaaagttgttagcatgggagcggcactatttttgttccagcaacttgctggtataaatgcggttgtatactactctacatcagtgttccgcagtgctggcattacatctgatgttgcagcaagtgctcttgtcagtgctgccaatgtttttggcaccgtgattgcatcttccctgatggacaagcaaggaaggaagagccttctgatgacaagcttttctggaatggctgcatcaatgttactcttgtccttgtccttcacctggaaggctttggcaccttattcaggaactcttgctgtcgttggcactgtcctgtatgtgctgtcttttgctcttggagctggccctgttccagcactgctccttcccgaaatatttgcctccagaataagggccaaggctgttgcgttatcactgggcatgcactggatatgcaacttctttattggcctctacttcctgagtgtcgttaacaagtttggaatcagcaccgtgtacttgggatttgcatccgtgtgcgctctcgcagttctttacatagccggaaacgtggtcgagaccaaggggcgatccctggaagagatcgagcgggctctaagcttgcccagtaaagccgacgctggtgcctttttggtgagtgatgaatgagcacggagcgcaaacatccgtggagctggaaaatagttcttcttttccagcttttacgtggttaaccgaaataagcgagctgcaagaccacccgatgccacggaaccatcggggcttaggggggcgtgcgggtcgagccagt

SEQ ID NO: 3435 - DNA, 857 bp, Avena sativa
agtacccaaaactgggggtaaaactggtggatggcaccagccttgctgctgcggtggttgtcaatagtattcccccaaggtacagatcgaagttgttcttgcaggaaatatttcaaaggtggcccgtgctgtagctgctgctctatgcaagaaaaacattaagatcataatgagcaacaagcaagactatcatttccttaagcccaaaataccagaagatgcagctgataagcttttattatcaaaaactggcattgcaaacgtgtgggtaatcggagaaggtttagatgatgctgaacagtttagggcaccgaaaggaacacggtttatcacgtactcacagttcccaccaagaatggtacgcaaggactgctgcacctactcgacaactccagcaatgagcgtacccaaaacactgcagaacgttcattcctgtgagaactggcttccaagaagggtgatgagtgcgtggcgcatcgccggaattgttcatgcgttggagggatggaaccagcatgagtgcggagacacggtgctagacatggacaaaatttggtctgctgcaactctgcacgggttccggccctttgctgaagcttgaaggtctggttgaaagccaacagaataagcattatgcagatataggtgccatatgcagactcattggctagcaggagcatagcctataattaagtaattcgatcaaccaaggttacttacatggttagctattaccgcactattcatctcctatgacaatgagttaatgacttggtttgatctggaatatttctatcacatcaataatgcaattaaagaaacaagaatgggcagttggcagtgctcccattgaacct

SEQ ID NO: 3436 - DNA, 661 bp, Avena sativa
ctcactaccacctagtagaagcagtaagttcaatactacctactctgcctgaatacatatgtgcagttacttatttcactgctgcttctgagtactaaaattggaactttcaccttgtcctgtgaaaacaaaaacagaccaaggcagcgagcccagtattgggtagatactaccgggagccggagaagtcaggcccgctgccagttcaccttgtcagcgtcctcctcaagagcttgagagttgatcactttgtcagcgacgagggagatgtcgtcttctaccaaactgaccccagcttgagcggcgacaaccggatcggaactgacaagcacaagtgataaaaagactgaaacttaagttactactgttgaaggaagaatgcctgatagaagatagagagacatcatagcctgctgagaataagcagaaaggccgcccctgctgaaatcaaagcatggagctctgtgaccgacaggaagcattgattcggttcatcatgggattcagatcattgcttagagttagcattctccaattgtggttgtaactggcagatgttgtttcagttttttacaagttttgcacgtggaactgtgtaacaaattgattaattattatccaaattgatattctgggatctacgacccccttatctagaaaa

SEQ ID NO: 3437 - DNA, 939 bp, Avena sativa
agcacaattgggtgcttggccgcaatgccactctgtggtggactcgttttatcgcccccctactggtttcgctggtcctttcattggccctggaggaataccaggcgtgcaaggtcctccacatatggtggtctacaaccactttgccccagttgggcaatttggtcaaatgggacttggatttatgggagccacttatatccctggtgacaagcagcccgattggaagcaaaaccaaggaccttctgttggcattggccagagtgatccaaacaaccaaaatatgctacctggtcaagtagcctcacacggtgttcctactcaagtgcaacatctacacccaacctctatcatgccaatcccatctccattgacggtgtttgacatggctccgttccagtcgtctggggacgtacagatgcaaccttgttggccacatatgcctgtacagccactacactctgtcccactatcagtgcaactgcaacaacatccaatggagggtacagcagcaccacagtatgttcataacatgccaagcgacaagtcaagtacaaatgaccgattccaggagccctcaacatctgctatgccatcagatagcaacaagagcttcccaagtacagctgcctctcagttctcagatgagttaggtcttattaaacagccagcctccagcagttcagatgctaaaactgctcatccttcatttatccggacaggcgtgatcagcaatgaagtcccaaacagtgccaaagttatggctaggacgaacccaccaaatatgaaccctggaaatgctacagggatgactagcagcaaccccaactctggtcaggttgccaacatgccctccaagccacaccagtcttcgtcctcatctgatcaacagtacaaacatccagttaacaatcaggatcaccgggcccgggttaccca

SEQ ID NO: 3438 - DNA, 845 bp, Avena sativa
acaagtgaagtttatggtgatccacttgagcatccacagaaggagacttattgggggcatgttaatcctataggtgttaggagttgttatgacgagggcaaaagaacagcagagactttgaccatggactatcatcgtggtggcggtgttgcggtacgcattgctcgcatcttcaatacatatggccctcgtatgtgcctagatgatggccgtgtggttagcaattttgttgcacaggcgctgcgcagacacccaatgacagtttatggtgatggaaagcaaactcgaagttttcagtatgtttctgatctggttgctggattgatggctctgatggagagtgatcatattggtccttttaatctgggaaacccaggagagttcaccatgttggaacttgcagaggttgtgaaggaaacaatcgacccaatgtccacaattgaattcaagcccaatacagctgatgatccccacatgagaaaaccagatattaccaaggccaagaagctgctaggttgggagccaaaggtctctcttaaggaaggtcttcccttgatggttacagatttccgtcaaaggatcttggatgagtaaacaaagcaaactgctctgaatgatgctgggaatataggaaaatttgcttcgccaactgtggattggtgcagcaagatatgtttgtatacacgataaaagttgtagaatcgtttaaatttatttccgtcttggtggaagtggacagaagtagtcgactagttttgtccagacttggaagtttagaagtgtgrtgaaagatagggaagggttgtattcaggagctattgggttcaacttcgaactttcagtta

SEQ ID NO: 3439 - DNA, 914 bp, Avena sativa
tgaatatcaagggtggcggccgggtgccgcttccgccggcgggtgcgggcaccgcggcaaaggtgttgctgttcggcggcgccgtcttgtacgccgccacgaactgcctttacaacgtcgagggtggccatcgcgccatcgtcttcaaccgcatccagggcatcaaggacagtgtataccctgaagggactcacttcataattccatggtttgaaaggccaaccatttatgatgttcgtgctcgccccaatcttgttgagagtacttctggaagcaaggatctccagatggtgaaaattggtctccgtgtgcttacaaggcccatgcctgagaaactaccaactatctacaggactctcggagagaactataatgagagggttttaccttcaatcattcatgaaacactgaaagctgtagttgcacagtacaatgctagtcagctaattactcagagagagactgtgagtagggagatcaggaagatactgacagagagggcaaggaacttcaacattgcccttgacgatgtgtccatcactagcctgagcttcggaaaggagttcactcatgccattgaagccaaacaggttgctgctcaagaggctgagcgtgccaaattcattgtagagaaagcggagcaggataagcgaagtgcagttatcagggcacagggagaggccaaaagtgcagagctgattggtcatgcgattgcaaacaaccctgctttccttgctctcaggcatattgaagctgccagggagatctctcacataattgcctcctcggccaacaaagtgttcctcgactccaacgacctgttgctcaacctccagcagctgaatgtgggggaaacaagcagaagaaatgaagttgctatctaagttacttcctccggcccatattaattgact

SEQ ID NO: 3440 - DNA, 545 bp, Avena sativa
tcgggatcactggcgaatcactcggaggaatgcatgcatggtttgctgcttttgtggatacccggtacagtgttgttgttccaataattggtgttcagggatttcgatgggcaatagataataacatgtggcaggctagggttaatagcattaagcctttatttgaagaagcaaggattgatttagggaagagcgaaatagatgcagaggttgtggaaaaggtttgggacaagatagcacctggtatggcttcacagtttgatgcccccaactcagttcctctgattgcaccacgtcctctcctcctcctaaatggtgctgaagaccctcgctgcccaatccttggttttcaagaagctgtctccagagctgctgatgcttatgatgaagctggttctgcagagaagttcgtgttcatcgcagagccaggagttggccacagaatgaccgtaaacatggtgaagcaagcaagcgattggtttgaccgcttcctgtaggttcttgatggatctgtcaaccgaatgccggctcccattgtacttaat

SEQ ID NO: 3441 - DNA, 994 bp, Avena sativa
tacgtcaggacctggagcaagttcagaatctgccaccacttctgttaattaacaattcatatagtggtaaaaggcaaagatcggacgatatcacagtgagatccgatgatgtcaccgtggatagtactatttccaggaaacacacagtccgatttccgattgatagcaaggacactgataggaataccgctgacagttcgacgtcaacaatatcatacaagcggaagttggatgatggggaattagttgctgataagaatcttgaagaaagagcagttgttgcctcaaagaaaccagaagccggagaaacgaagtcaacagacaaaaagtatggagaaacagttaaaattgagcctgtcacgacgtgtgaccaaactatctcacagaaacaactccctccaaagagatatttttatactcgtaaaaaaaagcaacggattcaggatgtggtacaagtgcctggggattgatagcagcagcggatcagagttgctccgtcctagattgatcgagggaacatggctcggtgtctgaaaagcagatggcagcaagcggggctggccagtgttgttattacgacacagccacacgggcacggaggggaggttataaaatggtgcaaaccaaagtccttcactgtgaattgagctgattgccaggtttcaccccccaagctgatgccactcagatgacgtggcaacatggggcgagttcattcatccactaatttagttattcaagggcaggttttgtgaaatatgctctgtacattgtcatctttgattaaattattagattagttttgtaaaagagaacagttaactaccattaggtggatgatgagagaaaaagggtagagttctcactaacttgacatctgtaggtgacaattgacatctgtagctaacaaccggcaggcctctgcacatgagttgtctctgtacaacagcagtagcatgtaggtctaaaatgtaacacataaatttgactgttt

SEQ ID NO: 3442 - DNA, 1018 bp, Avena sativa
tccatcgtggcacaggctgtgcccaggagaccaggatggcagcatcctggtcagactgcatttccatgactgctttgtcaaggggtgcgatgcatctgtgctactggacaacagcagcagcatagtcagtgagaagggatccaaccccaacctgaactccctccggggattcgaggttgtcgatcagatcaaggtcgcccttgagacagcttgccctggcaccgtctcctgcgccgacatccttgccctcgccgcccgtgactccactgtcctcgttggtggcccttactgggacgtgccactcggccgcagagactctcttggcgcaagcatccagggctcgaacaatgacatccctgcccccaacaacaccctccccaccatcatcaccaagttccagcgtctcggcctaaatgtcgtcgatgtcgtcgccctctcaggtggccacaccattggcttgtcccgctgcaccagcttccggcagaggctgtacaaccagtcagggaatggcctggccgacaacacgctggatgtatcctacgcagcgcagctgagacaagggtgcccaagctccggtggtgacaacaacctcttcccgctcgacgttgtcacctcgaccaagtttgacaacttctacttcaagaacatcctggctggcaggggccttctcagctccgatgagatcctgctcaccaagagcgccgagacggcagcgctcgtcaaggcatacgcagatgacgtgcacctcttcttccagcactttgcacagtccatggtgaacatgggcaacatcgaaccactgacagggtcacagggggagatcaggaagaactgcaggaggctcaacaactatcactgagttactgaaggtgctatatgtgctgaattgtgtgtggagttggcgccaagttttaattgaataagcaagtgtggttgtaatttccaaattttcttgatcattcatattgtgtaaattgcattgagaaatgtgtatgtactaaaaattcatataagatga

SEQ ID NO: 3443 - DNA, 653 bp, Avena sativa
tactactctgccatgtttgagtctatcgacgccaacttgcctcgagacagcaaagagaggataagtgtggagcagcactgcctggccaaggatatcgtgaacatcatcgcctgtgaggggaaggacagggtggagaggcatgagctccttggcaagtggaaatcaaggttgagcatggctggcttcaagccttacccgctgagttcttacgtgaactcggtgataaagaagcttcttgcgtgctactcggacaagtacacgctggaagagaaggatggggcgatgcttctgggctggaagaacaggaagttgatatctgcctctgcatggcactgacaactatatgtatgttcaccggaagaagaaaagaaaaaacagaggttatacaccgaagtccctggtctgctttccaaactcccttcgatgtgcctgtacatgatgatgtaccctcagtgattttgcataaatgtagaccaggaattgaacattgacattagattgtagtagaagttgtatgataatttcagttttcccgcgcttccatgtaattcaccattctcgcagtccatgatattttggatgtaattttccaggcatgctcttgttggtcagcaaaagtttcctttcgtggagcatgctctgagaatgcagag

SEQ ID NO: 3444 - DNA, 670 bp, Avena sativa
ggagaagctgaaggagcacatcgaggacaaggtggggcgggcggttgtgaaacatagccacctggtccgtgaggtggacgttcgcctctcggcccgcggcggggacctgggcaggggccccaaggcgtcccgctgcgagatcacgctcttcaccaggcgccacggcgtggtccgcgccgaggaggaggaggagtccagctacgccagcatcgacgtcgccgcagggatcatcaagcgcaagctcaggaagatcaaggagaaggagacggacgtcaggcacctgatgaaagggaccaaagagtggctcgatgctggggatgccttggcgtcggagtcggatctgctggagggtgatgacgaggaggaggacctggtggaggtcatcggcgccgaggacgaggagaccgtgctcaccaaggttgtgcgcaccaaggtgttcgagatggcgccgctgacggtggacgaggcgctggagcagctcgagaacgtcgaccacgacttctacgccttcaggaacgagcagaccggcgaggtgaacatcctgtacaagaggaaggagggagggttcgggctcatcatccccaagcaggacgaggagaccgtctccaagcaggccaacggcaaggagcaatccgtcgccggctagactgctcctcttcttctcaccgtc

SEQ ID NO: 3445 - DNA, 542 bp, Avena sativa
ttttacgtagcaaaacatttcagtatttttagcagcaccaaagtaacaacagcaacaggcagaaagatggaactgcggttatacatctctatggattttttactacaaaactggaccaatgcgcccagccttttacacacacattcaagatacaaatgtcagggttgcaatgtcagcacaccacatctaaggtaaaacaattcacagcaaacttcgcagcacgaatcacagaccctggaacttgacagcattgtcagttattcgggacatccagggatatttcttctttcgatatcgtgttgacgtaattgtaattctgtaagtgacatcagttggacaagcgcaggttttcttggtgtgtctgccactagtttggacggttcagggccatgaacttgcactgctcactcatcgcctggagctgtgcgtccttcttatctaccatggcacgtagcctcacgttttcctccatcaccttctgaacttcggcttctttctgtgctttctcagtctcgagctggttcgtccttgcgacatcccgg

SEQ ID NO: 3446 - DNA, 664 bp, Avena sativa
cgccccgcgcatcctccccgccgccgagctcgcgcgcttcaccctgcgcctactcgcgcgcaagctactccgccggaagatcaagttcgagggccccaagatcaacttcaagaccggggtgggaccacttctgcctccaccccggcgggacggccgtcatcgacgccgtcaggaagaacctcggcctcaccagctacgacgtggagccggccaccatgacgctgcacaggtggggcaacacgtcggccagcagcctctggtacgtgctctcctacatggaggccaagcgccggctcaaggcaggggacaggggtgctcatggtcacattcggctccggcttcaagtgcaacagctgctactgggaggtcagcaaggacctccacgacgccggcgtctgggaagactgcatcgacgactacccgccggagaccatggtcaatccgtacacggagaagttcggatgggtcaacgacctgcagggcgggggaggcatcctccctttctaacctttgcgtcttggtttttcttttttaccttcagaaaaaatgatttattcagaattagaagctcataaaaagatattttttcagtaattatgtgtatggtggtttttttattttcgttcacattttttctgttcgtcctgctgatacggatttgtat

SEQ ID NO: 3447 - DNA, 596 bp, Avena sativa
gttgctggaaaaaggcagcaagaagagaaagaaaggattgaggcccaggtgaaggcggctgaagccgctgcacagttcaagctggatgaagaaataaggataaagagggatcaggaaagagaggcagcacgcctggcactacacatgatgaagaagactattgatattgacaacagcgacattctaaaggaactggaaaacatgagcaaaaagtgggagctgaaccccccgggcaaattaattgttgattttgtcgacaggactgatcttccacctggcctgggaagcccgcttgagaggcttggccttttcatgaagaaagatcttgaagatttcgagtatgaaatggaggacagcatatcaccctccatggatgtcgatgtggaggaaggagagattggttgctgtgggtagcatatctcttaatcgtccatttttattcttccattgattcttagatcatagtcaatatgctcgctggggttataagattatgatcctgtcctgtaaccaagacccaccataatgtctacaccgaactctgaaatggagtgattctcgatcttgtggttgtcagcaamaatatgatggccgcc

SEQ ID NO: 3448 - DNA, 821 bp, Avena sativa
tctctaaagataaacaagccgatccagctttagcggacacactgaagcaatccttctcaagctccgagctttccatggcattcccttatgttgccatgtcagtcgatgaagaattagagagctcattgctctctggatttactgagaattgtgagcatggtccccgaggaaatcatatcacatacaccgacatgtgcactacaagcagtgaaagtaagaaactttcaagcatggattccattcaagacttggtgaagtcacggatggaaaacgacccaactggacagactgagctaattgtcttctgtagtggcggtttcaaggacaatgtgaaatcagaaggcgagttgctttcggaggtggtttctgtgcttaacaagtctggggctaaatattcgatcctgtatgcttctcaaccccatggtttgttggagcacacttccgaactgccattggccaggtatcttgcagagaagaccaatacaactaaacctgtcctagagaaatgcgacggagagtgccaactaaaatcaactctcctggaaggagtgtttgtgggactagtgctgcttatcatcctgatatcaggactctgctgcatgatggggatcgataccccttcaaggttcgaggctccccaggactaaacttgatctgctctcaaatcagatcagatatggatgtgccagtgttccctggtttgcactgtggatatagttagcttcccattcaaaggtgcattgtgtattttaccgagtcaaacaaacttctgcttttagcgtaccgtattttttgttgtaatatcgcattccatatccacg

SEQ ID NO: 3449 - DNA, 878 bp, Avena sativa
agtgaattgcttgctgatagctttatggacactgtaaggaagcttcagttaaacaagatggctcaggaaggtgaggctgcggtgctttcaaaggacgattatcgatcttccaagggaaagatcccactaggtggagggtcatcatctggtacaaatgtgggtctagacggtgaccctggtgccatttcaaaggtgttgggtgctaacagtagcagcagtaacaacagtaaacaatcaaagaagacatcaaagtttctcagagctcgattaggtgacaattctcttgctacgcttgattttagtcgacctgatatgagccctgaacgaccagaaagggagccgcaaggacaacacactggtttgcctgtgcgaggtgtttggaaaaatggtgcagcacagaagctgtttactagcaatggaaggaagtaacttgtgctgttgtgcagatgaagtttgatgcaagctggttgacgtacatgtggacattttgtgatccgtggttcgctgctttgagaaacttctgtgtagaagaccgcgtcggttggtttgaggttcattttgtacttttgctggttcaaaaccttggaagtaaggatggaacttgaaatagtcactgcacaatgtcatgtttgtggttataccttggtcgaagccagtggtaggcggtatattacatgaattaagccaaaggttttgtggcttgcatgctttgatttcactttcttttcaggctgcttgaattttattggcaggctcctgtatttactgtatgtggcatgaaaccgctctcatgtgacaatggattcatacaagctccaaatgtaatgacttctaattttcaagtgctaaataatctgatgtcctccactaacaaaaag

SEQ ID NO: 3450 - DNA, 677 bp, Avena sativa
ttcaccccttcaccgctggagtttatgtcgcactaatgatggcccagatcgaggtcctcaggaagaagggtcactcctactcagagatcatcaacgagagcgtcatcgagtcggtggactccctgaaccccttcatgcacgctcgcggggtggccttcatggtcgacaactgctccaccaccgcccgcctgggttccaggaagtgggcgccgcgcttcgactacatcctgacccagcaggccttcgtgaccgttgacaaggatgcccccatcaaccaggacctcatcagcaacttcatgtcggaccctgtccacggcgccattgaggtgtgcgccgagctgaggccgaccgtcgacatctcggtgacggccgacgccgatttcgtgcgccctgagctccggcagtctgcctagatagttctggtggttgtgggcacaagagttgtttttgatggaatggtcatggactgtaacttatgtgtgcggagtaactgtgagtttgtgagctgctgccagattagaaatcccatggttgggctggactgaaccgttgttgtcgtctccagaataaagttagttcgtgagctgctgtctgattagagagccttgggttgggctgaaccgttgtcgtcgtctccagaataaagttaagttcgtccaaaaaaaaaaaaaaaaaaa

SEQ ID NO: 3451 - DNA, 630 bp, Avena sativa
tctcaagctgatgtggataaaaccaaccagagttactacggcgaaaccaagttgcactacttgacaactgatagggcctttgaaggagctgttcctctcaaaaaggaggggccagtgcatgatgtccggtggtcttcctcaggttcagaatttgctgctgtctatggatttatgccggctaaagcaacaatattcaacaaaaaatgcaaccctcttcatgagcttggtgaaggtccttataatacgataagatggaacccgaaagggcgatttgttgttatagccggatttggtaatttgcctggtgatatggctttctgggattattcagaaaagaagttggtagggaaaacaaaggctgaatggtctgtcataagtgaatggtcccctgatggtcgccattttatgactgctactacagctccgaggcttcaaattgataatggaataaaaatatttgaccacaatggatctctccagtttaagaagatgtttgaaaacaagctgtatcaggctgactggaaacctgaagcacctgaaagatttgatgacattgctgacctcacaacatctttaagtagcataaaaattgaagatacaaagaaacaaggacaaggttctaaatcggtt

SEQ ID NO: 3452 - DNA, 742 bp, Avena sativa
actagtccatcaaggttcgatgggaagaagcattcccccactggcaaccagttgagaagggctccgatggaggaactatcatcagcacgctctcatcttcgaacaacccccatcacactcacagtgctgccttccttgatgtatccttctttgagtcgcattgtctgcccatcacttgagagcttcctttcacgtagccatcttagagattcaggagacatgtccttgttgtcaggattgatgtcaattactacagagtcgtcgacatatggtgtcacccgcgcaccataccctgttttcaccaatgctcgaagcccagattgaaaatctgaaatgtagaaatcaaccgcgtgtcgctctgctgcccttaatccccaactaaacagccgatgcttgacatttgcggctttcgagccccatcccctatactcataaaggctagttgaagtgtacacacatctcggaattctttgaaatgaggactccagagggaaatttccacaggtaaccacccctgtaaccttgacatactctccatcttttgtagttctgagatcagcatcaggatagccactgacatacccaatcactcctcttctcccccgccaaacattccaagacagaagtgcagcaacggcaccaaccatcgccaccataactatcagcagaattgcattgtgtacagcagcaagaatgaagacacccaatataaaccccccaatcaagcttccgaacaccctcc

SEQ ID NO: 3453 - DNA, 513 bp, Avena sativa
aacggcggtgtacttctatgtgaccaagggccttgacggcagccttctgacccacttctgccacgacgagtcacggtcgacgaatgcaagggacgtcgtgaaccgggtggttggtagccatgttccggtgctccacggcgagaccctttcggtgagggtgctagtggaccactcgattgtgcagagcttcgtgatgggcgggaggctcacggcgacgtcgcgagcgtacccgacggaggccatctacgccgcggcgggggtgtacctcttcaacaacgccacgagcgccaccgtcaccgccgagtcgctcgtcgtatacgagatggcctcggccaagagcagggacttcttggctgacgacatgtagatgaccatagcttgacttgttgccgcattcattgtttttgatgatcacacatctacacatcgtcgctggtgcctttgctggtcttctcttgaatggatgaagatggagtgcattagctattcaccctgtttttattttattttata

SEQ ID NO: 3454 - DNA, 634 bp, Avena sativa
ttataagggtaaaccaaaggctcctcagaagataaatgcaccagctgaatcagcccagaggccatcttatccatcatcaaaacccaaaaaggactgggataagctggaggctgaagtgaaaaagcaggagaaagatgaaaaacttgatggtgatgctgcattgaacaaattcttccgtgaaatttacagtgatgctgatgaagatatgcgcagggcaatgatgaagtcttttgtggagtccaatgggactgttctgtcaaccaactggaaagatgttgggaaaaagacggtcgaagggagccctcctgatggaatggagctgaagaagtgggaatattaatgaattcagatcatccatgttgtaaatcctggttgtgagtcatgactttgccgcagacttgcaaatcaatgtcggtcagattatatttattgctcatgtctccgtattgtaagctgtttgcgtgacaggttagcttctaagtacttatcctagttttgcaagctacagctgggcaaatagagctatgccatacctgtgcatcatctatggtatggaagtgcaaagtgtacctcgtggactatgatctgtgaatggtgctatttttgtctgaatttgtgcctttgctaatagtaa

SEQ ID NO: 3455 - DNA, 882 bp, Avena sativa
  modified_base (274)..(274): a, c, t, g, unknown or other
cattcgcatcatttcttggtttggcttgctgtctcttctggaacgtcatagcagttactgcagcctggatcaagggggaaggtgtgaaaatctggttgctagcaataatctacttcatctctggggttcccggtgcatatgtgttatggtatcgccctctttataatgctatgaggactgacagtgcgttgaagtttggattgtttttcttggtatacttgtttcacattattttcgtcgtatttgctgctgtggctccccctgctgtctttgnggggaaatctttggcaggaattttgccggcgattgatctcatcagcgtgaatgctttagtggggatcttctacttcattggatttggattatttgccgtggagtcattgctcagcatctgggttatccagcaagtgtacatgtacttccgaggaagtggaaaggctgcagagatgaagcgtgatgcgacaaggggtgctatgcgagcagcgttttgaccgcaacatatctcagacgatgataggtttcaaacgtaatcccatggatagatcgtgccataaacaaaagtatatgtttgcgttgactagttggccctgactataatcttaagctggcataggttactgtgatgaagtgacattgtatgacttgtccactttccttatcaatatagagaatgtgcagttctttacagcttatgatcgtcctggctgtgaatgcactctgtcttgagagagtagatacagagaatttgcccttacgatctggcctgtttgttgcagatcattggcaacatatcatgtgaatcacactacgtgtaccagtatctgagccttcttggacccactgtttagaaagttcatcttcacttatcaatttttggaaaaa

SEQ ID NO: 3456 - DNA, 723 bp, Avena sativa
ccatctgacaagacgcagcagcaggttccccatcagcagacatctggttcatcggcgatgctttctctcagctctggttccatgtcgatttcaacagctgggattccagctgatgcagggaaggctcttgccgcggcggctgccagcaataacatgaagggtcttcatccaacgcctggtagttttatgcaccttacgacagcaggccaatctgcgggtggttcgcctcactctcacatgtcagcagcacaactgacgttcggagctatgccaatgcccgtaaagcctacaagtgaccagaagcctgctgctggcaagtaaaatgatccagatgcctggagatgggagtggtaacctgagctaattgctaattttgaagaaggcgtggaaggctgctcaaccttgttgcgaggaagaagcaattgggataacagccacaggatgcagcatgagccggcccgttgttgaagaagaggaatgacagcgcccattccatccatgcggggagggctggcaaacatgagtaatcaggaatggctgatgggagtgatacttctgtgtagtaggttatcctctcaaggtggaaagtttggaggtgcatagaatctcttctttttttagctagttttatgcaaggatgtcaaaagctggtttctctgaattcttcttcctcccctccaacctgctgcgattctttttagctttgttcttttgctgttctct

SEQ ID NO: 3457 - DNA, 850 bp, Avena sativa
ttgggctcaggcgtcgatcccgttctctgaggaagagcttgagtacattagggatcttgatccgatgagggatgcttcaatgctgcggagagaactgcccatgatacgtgaggcttgcctccgagtccttatcctgtgcacaatcttcctcaaggaggctgcaactttcgggctttgcttggcagagataggagaaatgatgaccagggagttcagagggatggaggaggagccaagcaaactggaggttgtctgcatggaagctcggaagaaggtagccgaatgggaaccgttctcccctggggttgaacaaggggaggacatagatttccagttctcgatggatgtgttaggagggtacaatgatgtgattcgatcgccaagattccattgctcaggcttgaaaggcagcttcagaaatcccctgacgaaacttgtggagagcatgaacgaggacaatgatgatgaagaagatcaaaaggagttctccatgcattcatctcatcggatcccgtcttctgagttcaatactcccagtgtgcacagaactactagtttgaatggcagcgtgcctgccctgaacaggagcgcagacgaacagcttccatcgagcatgtgctttgtcaggttgtcggacatgagcgcagaggagtggcatgtcttcgtcgagaagttccaggagctgctgaaagaagcgctggacgaatgcaaggcggctggagcacagcggatgaagcaacggctgggcacttcctgcaagttttgactaggaccatagagcagcagagaaggagtactgtactgctacctgggttgcttttggggctgagtgcagcaagatatgatcata

SEQ ID NO: 3458 - DNA, 801 bp, Avena sativa
ggaaacttgaattggatcatcaggtgaaaccagagagcaaccataaactgacaaaggaggacgcgatgaaccagccttggtccagactaccgccaccagtaaggagcaacggaaactaccttgccaaggagcagatccctcgagcaccggacatagcagagaagctgtctcagctgtcaatggcctccaaccgggcaccggtcttgtcttctgacaggtttgcagacctgaaggcaagaacccacggggaccccgtgaggcggcccttgccttttgggtccagggcgtggcatgccccaaacgaccccttccggcgcacctacgagatgcctggtgagagggctatcctccaaaggaagctcgtcagctgaagatgatcccatcaacgacagtccgctgcacgtcgtcatggttgctgcccgttggaccaacgctacccgactataatccagcagtctccttaccctggcgatgctgtcgttgctgctaagttgtgtctctagtatggttgctgtaataaaataaagtcgtcgtttcctggttagtgcatcctgggaaagcacgcagtactgtgtttcttttcggccttccagcgtgaaaaacttcaatgctatgctttgtgattgcgaagtgacattcgtgagtttatgtagccgctgtgtggtggttaactcgttgtgcgctacatgttcagatgtgtgtctcctgttggttattcttatgatgtattcatattcgtagattttgattcttgaagatgatgtgtccaaaatgctgagacggactgtgaaccaaaaaaaa

SEQ ID NO: 3459 - DNA, 839 bp, Avena sativa
ggagactatcagtgtcaagcggactctcaaagcacacagtgttgctcttgcttttgaagtgccaggtggatggtatgaagagaaagcagctataattgttactgtccttcagatgctcatggggggtggtggctctttctctgctggtggtcctgggaagggcatgcattctcgactatatcttaggatattgaaccactaccatcagattgaatcattctctgcgttcaacagtatatacaaccattctggtctgtttggaatacttgctacaactagcccagattttgcctcaaaggctgtggatttggcagcaggagaacttcttgaaattgctactcatggaaatgttacacaagaagagcttgatcgagctaaacaggcgaccaagtctgcagttttgatgaacttggaatcaagagctgtagcatgtgaagacattgcgaggcagattttgacttatggtgaaaggaaacccattgagcacttcttgaaggatcttgaagcaatcactttggatgacatttcttcaaccgccaagaacattatttcttcacccctgacaatggcatcatggggcgatgttattcatgtcccaagctacgagtccgttagtcggaaatttcattcacagtgagcaaaattcggttgtgtagtttctgcataacatgttctggacttccggctgtattagatggtgtagaactgtacatgtgtaattcttgtggcaatggctctaactagtagctacataatctactgaacaaatcttctctcatttgtaattttcttggattatttatgtggataacatttgagagaattgccaatatacttgc

SEQ ID NO: 3460 - DNA, 1028 bp, Avena sativa
ctacatgccatggatctcagtggtctattgcttttgtattcatccaccggggatgctgaagggataacaaaattggcgtctatggctaaagaacaaggaaagaacaatgttgccttcctttgtttgttcatgctaggcaagttggaggaatgccttcaattgttgattgaaagcaatcgtattccggaagcagcattgatggcgagatcttatcttccaagcaaagtccctgagattgtagcattatggaaaaaagatctccaaaaagtaaactcaaaagcagcagagtccttggctgatcctgatgagtatccaaacttgtttgaagactggcagattgctctcaatgttgaagctgccgttgcccccaaaaggggtatctatccacctgctgaggagtacatgattcatgctgagaggtccaacgagagtcttgttgaagctttcaaaaatatgcatgtagatgaagaggaggatgcacatgaagaggatgtacatggaggggaggagctaacaaacgaaaatgataacgttcacgaggttttcgaagatgacggtgtagaagatagccaagaggatgctgttgaggtcgatgctgatggttctactgatggcactatccatgtgaatggaaatgacagtgaggaacagtgggtgctgactcctgaccaatagtcgatagtggaacagcaacttgctacaatggtttagtttgtaaaggtttgttactgggacgatgtaaaagctgtttctcctcatttgtatcagcacggcatgtgttctaggactggtgcggccggttacaatgttcagcagcaatttgattagcacttcgccgtgtcatagagaattttgcgcttcattttcatatagtggtcgggccagtaggtgtctggaatgtttcatagggtgtaagaggattattatcttcatttggagatcggatttgttggagttgccattattttacacaaagtacatagggcagtgccagtttgggaacgtttctcccgcccgtatgtaaacct

SEQ ID NO: 3461 - DNA, 805 bp, Avena sativa
tctggtatatgtcacttttcatctgcatttttgctacgggcattctggagatgagatgggctcgtgtagcggttgacgattggtggagaaacgagcagtttttgggtcattggtggtgtctctgcccatctctttgcggtgttccagggacttctcaaggtcatagctggtgtggacacgagcttcacggtgacaacaaaggctggagacgacgaggagttctcggagttgtacacgttcaaatggacaacgctgctgatacctccgaccaccctgctccttctgaacttcatcggcgtggtggctggcatctccaacgcgatcaacaacggatacgaatcatgggggccgctctttgggaagctcttctttgcgttctgggtgattgtccatctctacccattcctcaagggtctgctcggaaggcagaacaggaccccgacgatcgtcatcgtctggtccatcctcctggcctccatcatctcgctcctttgggtgcgcgtcaaccccttccttgccaagactgacggccctaccctggaggagtgtggcttggattgtgcctagtagatcactgtccagcaaatgtgaattcccctgcccagtgtgtgcgtgtgtatgcccgaaggagtatttttgcaggtgtttctgagcccataatttatttttcttctcccccaaattgtagatagaaacctttaagtgtcacgttcgttttgttcccacggtggtagctgggcatcatatatatgcaatattgggcaggcgggaggccacgacaaccttgtgcagttcagttcagttc

SEQ ID NO: 3462 - DNA, 857 bp, Avena sativa
ctccggcgaggggatctacttcgcggcgaagagcgggcggatgtgcgcggaggcgatcgtggccgggtcggcgaacgggacgcggctggtggacgagagcgacctgcgcaagtacctggcggagtttgaccggctctactggcccacgtacaaggtgctggacatcctgcagaaggtgttctaccgctccaacgcggcgcgggaggcgttcgtggagatgtgcgccgacgactacgtgcagcggatgaccttcgacagctacctctacaagcgcgtcgtgccgggcaacccgatcgaggacatcaagctcgccgtcaacaccatcggcagcctcgtcagggccaccgcgctgcgcggggagatgaagaagctcaccttgtgatcatcgagatgattttcccaggaacctgacatctgcacgctcgggttgctacttccaactgcggtggattgatcggtatagtagagattccccggctgatcgagcagatttgggatcggacgagaagagaataaggttacgtggatcgatcggaaggtcgtgcctcgaccgatcgtgtacgattttcttgtacaacaatacgcacggtgatgttcagaattcagagcagttcgtctgggttattgaagcaaaccgatattccatatgtgactgaatgtagtataaactaagataaatcgcgtgataaacagcatacaacttcgaacaatagtcacaactatttgtaattgcaacggtgagacatggactcctccgcatattgatacgctctccgggcccacttgcatgtgctctttattttcaactgtgcatgttcttcgcatgctctgttgcaacgtgatttttatatataaaa

SEQ ID NO: 3463 - DNA, 918 bp, Avena sativa
atctggtggtggaaggatgtacgttacaatggaccgttatgagaatgactggggtgtggtcaagcgtgggtgggatgcccaggtgcttggagaagcgccatacaagttcaaaagtgcacttgaagctgtgaaaacactaagagcagagcccaaggccaatgatcagtacttgcccccgtttgtgatagttgatgagagtggcaaatcggttggtcctatcgtagatggtgatgcagttgtgactttcaatttcagagctgatcgcatggttatgcttgcgaaagcgcttgagtttgctgattttgataaatttgaccgtgttcgtgtaccaaaaattaagtatgctgggatgcttcagtatgatggtgagttgaagcttccaaacaaattccttgtttccccgcccttgatagagaggacatctggtgaatacttggtaaagaatggtgtgcgcacatttgcttgcagcgagacagtgaagtttggtcatgtcacatttttctggaatggaaaccgttctggatactttgatgaaaccaaggaagagtatattgaaattcctagtgatagtggtatcacattcaatgagcaacccaaaatgaaggcacttgaaattgctgagaaaacccgggatgctatcctcagtggaaagtttgaccaggtacgtattaacctgccaaatggtgatatggtgggtcacaccggtgatattgaagccacagttgttgcttgcaaggctgctgatgaagccgtcaagattgttttggatgcggtgcagcaagttggtggtatttatcttgtcactgctgatcatggaaacgcagaggatatggtgaaaagaaacaaatctggccagccggctcttgacaagagtggcagcatccagattcttacctcgcacacgcttcagccagtacc

SEQ ID NO: 3464 - DNA, 811 bp, Avena sativa
  modified_base (796)..(796): a, c, t, g, unknown or other
cagcatgaagcaggaagaggccggcggcaagccggaacaggccgccgacgaaggccaaggccgaccccgagaagccacctgctcccaaggcacaagctgtgggctggccaccagtccgatcataccgcaggaacgccatgaccgtccagtcggtgaagatcaagaaggaagaggaaaccgagaagcagcagcagcctgcttctgctgttgctgctgctgctactgctggtggcaacggctctgcctttgtgaaggtgagcatggacggtgcgccctacctgcgcaaggtggatctgaagatgtacaacacctacaaggacctctccattgcgctgcagaagatgttcagcaccttcaccgcaactgggaatgaggggaagatggttgaggcagtgaacggttcagatgttgttactacttacgaagacaaggatggcgactggatgcttgttggagacgtcccatgggagatgtttgttgcttcatgcaaacgcttgaggatcatgaagggttctgaagccatcggccttgcaccaagggccaaggacaagtacaagaacaagagctaaagatgggggcagtaagagggagaggttgatgccataagaatggtggtgttcttgcagtgtgctatggtttccttagatatataatgttttaattactagtttgattaaaagaagggagagttgccatgtttaatttgttggtggaccagaagcaataatctatctgtgtgtagctggattggtgttatgtgatgttcccttccatgtgtcccagaatctacttggtnattttatccactgtt

SEQ ID NO: 3465 - DNA, 973 bp, Avena sativa
ggccgcctcctccgctgcgcgtctccggcccgagcctcttcgccgcgcgccgcaagatggccagcggcggcgataagtgcggcggcggggagccggcggccggcggcgacctgtacggggtgctcgggctcaacaaggagtgctccgacgccgacctcaaggtcgcgtacaggaagctcgccatgaaatggcatccggacagatgctcgtcctccagcagcaccaagcacatggacgaagccaaggagaagttccagcagatccagggcgcctattccgtcctctccgataccaacaagcggttcctatacgacgtcgggatgtatgaagaagaagaagacaacgacaatgggaacctgcaggggatgggggacttccttggtgagatggctcatatgatgagccagacgcggccaacgaggcaggagagctttgaggagctgcagcagctgtttgtcgacatgttccagtctgatcttgactcgggattctgcaatagatccgccaaggaccagtatgatccgtttcaaggacagactcgaacatcctcgacttctccttcgtcgtcaccatctccaccacctccgttagctacggaggcagaagcaccattgtgtaacggcattaacaagcgcggctcatcagcaatgggctctgggaagcctccaagagctgccgaagtggcggccgggcatgcgcagcctgagttttgttttgggatgaatgatactacgcaaggtccaaaggcgcgaggcgggaacgccagcaggagaaggaacggccagaagcagaaactgtcgtcgaagcacgacgtttcgtccgacgatgagatgctgactccacagcggtacacagtatcttaacgttcagtgtcagctgctgctccttgatgtcctggccgtgtcaaggatcactagtagcgcagccaacaaaggagaccccgggagtggatggtgttacagagatcatggct

SEQ ID NO: 3466 - DNA, 896 bp, Avena sativa
cagctctacaacgtcatagatgctgagaatgatatgctggacttggggctcactgaccctattcctcaaccattgccacctccacctccacaagaggctgatgctgatgattccgggtcggagtcggattcatccgttgtatcatgccctgccacatcctcctttgaggagcgccagaggctccgtgggccactcccacgccccgcaagccttaacgcgtttgatatcatctcattctcaaggggtttcaacttgtcggggctgtttgaagaaaaaggggacgaggtgagattcatatcgagtgaacctatggcggaaattatagttaaattggaggagattgcaaacgtcaagagcttcgcggtgcggaagaaggattggcgggtcagcctagagggtacaagggaaggagttaaggggccactaacaattggggcggagattttcgagctcacgccctcccttgtagtagtagaggtaaaaaagaaggcgggtgataaggaagagtatgatgatttctgtaacaaggaattgaagccaggaatgcagcatcttgtgcaccagatggttccaactccaattacacctaccatttcctactaggtcgaaaggctttcaaggttaccagcgccactgcccctggagctaacggggataataggagcaagtctccaagcggcgtgagctagaaaccggagctgagtgcaactgacaggaggatctcttgtagtgggactgaaaacctgaccagttcgggcactgatgatgagcgcggttacttggttctctcgtaagagttcgtctctggagagcataatgttgttcgagacggggctagattgtgggtgtatatactatggttggtgtctccttatagctgttaaatggacgtgctg

SEQ ID NO: 3467 - DNA, 940 bp, Avena sativa
ctcgatggctcgtctggaccgtgtcaagaacttgactggtcttgttgagctgtatggccggaaccctcggttgcaggagcttgttaaccttgtggttgtttgtggtgaccatgggaacccatcaaaggacaaggaggagcaggctgagttcaagaagatgtttgaccttattgagcaatacaacctgaatgggcatatccgatggatctctgctcagatgaaccgtgtccgtaatgctgagctctatcgctacatctgcgacaccaagggtgcttttgtgcagcctgctttctacgaggcctttgggcttactgtcatcgaggccatgacctgtggtcttccaacatttgcaaccgcatatggtggtccagctgagatcatcgtgaacggtgtttccggataccacattgatccttaccagggcgacaaggcctcggctctgctcgttaacttctttgagaattgccagggagaccccagccactggaccaagatctcactgggcggacttcagcgtatcgaggagaaatacacctggaagctttactctgagaggctgatgactctcaccggtgtatatggcttctggaagtacgtctccaacctggagaggcgcgagacccgccgctacctggagatgctgtacgcgctcaagtaccgcaccatggccagcactgttccattggctgtggagggggagccctcgagcaagtgatctggccacctctctctcggccaaaagaagaagcgtggcttggatttctgagagattgagatttgagaatgcattggttttcttcctggctagaggtgctgctcttttaaagatttataaggtcgagttactgctgtgctagtttgatttgagaagaggtgccagactgttggtgctgcttatcgtgttctttggatgttacccctgaataataatagcggcctt

SEQ ID NO: 3468 - DNA, 902 bp, Avena sativa
ggctatcttcattgccactggtcaggatcctgcacagaatgtggagagctcgcagtgtatcactatgctggaagctgtaaatgatggcagagacctacacatctccgttacaatgccatctatcgaggtgggcacagttggtggaggcacgcagctggcctcacagtcggcctgcttggacctactgggcgtcaaaggcgccaacagggaatctccggggtcgaacgctaggctgctggccacggtggtggctggtgccgtcctagctggggagctgtccctcatctccgcccaagctgccggccatctggtccagagccacatgaaatacaacagatccagcaaggacatgtccaagatcgcctgctgagcgcgtcaccttggatggacccccctgccagagcaaattagacggaacccaaatcataatgttcgccaccacggtataattaatccccttcacctttgggggatcaccttttgtgggggtggactttgaagggttcccaacacaggctgtgggcagcattctcgggaggtgaataggggaataccccctacgtcgggtgaagctgtcttctgtagagtggtgatggttttgcctggaggaggagggagagccctgctgtatgtacatcctggagtgtgtgtgccctatttactttcctcgcgtttgctgttgttgttcctgttacccgctcagcctcttgttggggaatatgaccgcgagttgttttttgtccaaaagttttacagtttacaatttacacacccgtctctattttacgcaattgcatcggttgcctgttacccgcttcagtatgctcgtagtaataacattgtgaactaattcggtgtcacctgttgatatctttttgttgtcagtagccttgctgaagcta

SEQ ID NO: 3469 - DNA, 638 bp, Avena sativa
caaggaaaagcataattgatgttgctctgagcaaaggcttccaggtggaggagcgccttgtgtccgtggatgagctgcttgatgctgatgaagtgttctgcacagggaccgctgtagtagtgtcccccgtgggtagtattacatatcaagggaaaaggattgaatacgccggcaaccaaggagttggcgccgtgtctcagcagctatacacttctctaacaagcctccagatgggccaggtggaggatccgatgggctggaccgtgcaactgaattagcaagaaccttccttgcatcgttatttccagaaggtcccagcctagattaaacatgatcatgggctcgcagggtcctccactatctatctagattgaataaagcatgatcatgaccatcgtcagttttgtaggctctgtcgaattggcgtcctgtacatctgtagatggtgcacaagtcgcgtgtagacgttgtgcgtatgtgccctttcttttacagatttacttttgtcgataccatagtcttttgtgctgactagcgagcgatgtaaagtagatgaattctctttttgtttttcatatggaatacctttgtttatgatggtaataagagctctggcgatgtttcttgctagaaaaaaa

SEQ ID NO: 3470 - DNA, 764 bp, Avena sativa
atgcgccttggatcaaggagaacatttttcgaggttactgactgcacatctgccaagctctatggtgatgtcaagtttgtagatgagaggcaccggcacagatatgaggtgaatcctgatatggtgccagcatttgaaaatgctggacttcagtttgttggcaaagatgagactggaaagagaatggagatcattgaaatacctgagcaccgattcttcgttggcgtccaattccatccggagttcaagtcaacaccctcgaaaccttcacctctatttgttggactgatcgccgcggcgtgcgggcaactggaccaggtgctgcgagacggctgcgatgagcgcgctgtcgtaggtaaacagatgctcggcaacggttcctcgacaaccctggtacacgagaatgggcacgcgaagaagcaagccaatggtagcacagcaaatggaacctaccatgccaacggcaagcactgctgacgcatggtcggccttgccaagggtcccccactgattactgcatcggttgagccgatatgatacggaccatctgttccaaggggatggttcagttcttgactaacagctggctcagcaagagttgtttttgttaactgaagaaagggaccgaggttggtataactgagaaaggcaggatagcggctctccgagttccccaatttcctatgggtgatatgataggattttagaaagaaaaggtgaaaagaacgatttwgtctgatgtacgacagtcaaacggatcaaat

SEQ ID NO: 3471 - DNA, 580 bp, Avena sativa
acggcgttcccggcgaagcgagaggacgccgtgccgttcgacttcgagggcgtgtggcgggggatggaggagtgccaccgcctcgggctcgccaaggccatcggcgtcagtaacttcaccaccgggcacctagacaagatcctggctgcggccactgtcccacctgcagtgaaccaggtcgagatgaacccggcgtggcagcagaggaagctgagggcgtactgcgcagagaagggcatccacgtcgcggcgtactcgccgttgggtgggcagaggtggtccggatcggggggcaacgccgtgctggaatcggaggtgctcgcggagattgccaaggctagaggaaagagcatcgcacaggtagcactgaggtggatttatgagcaaggagtgagccccatcgtcaagagcttcagcaaggagaggctcaaacagaaaccttgacatcttcgactgggagctcaccgacgacgaccgcaccaagatcgcccagtttccacagaagaagatcgtcaaaacygccgacggaatttctcgacggaggggagttcacgtcagttgaccttgcagacatcgaaat

SEQ ID NO: 3472 - DNA, 771 bp, Avena sativa
caacttcctcgttgccataactttcttctccagcctatagcaaaatgtgtatacgtgtccagagaagatgttatccaataggccttgaaggctttatctttggagatacatgaaatcagaacttgtgctattggcatcgatcacataattgcctccgtatgtatcaacgccccaccggttggcgagtattctatgctacaccagaagaaaatctttggtgattataagttaactgcagaggcatctctcgagtctgcaaaacttgctactcttctccatctacagaagataggcgtcatctatgtagatgacatcaatctaggcgaggttgccaaatgtgaagctaagcttgcagcttgccagcgagagttgctaaccgcaacagactggtcaaccatatttcaagaagagacagaatgtctgaaggctcagctagatagtatctgcacaaaggatgaaaaacttactgccgcagccaagacatttagcgtcaagaaggaagagcttattccccagcaagccaacattaaagaaggagtgtctgatgcacaatcatccactccaccacctttcgatcgccatatcaacgctagggaatccacggagaaaaggaaggtacctaggatacaactcactatgtgagatttgtaagcatgctgtagtctcatctgcatttgttcttagagcatctggctctttgatcgatccttgtcctaagaactatgattccttttgatgatactaccacctctaagtaagatgatagcatct

SEQ ID NO: 3473 - DNA, 679 bp, Avena sativa
gtcttactgaggagcaggctattgaagagtatggagatgttgatgtcttcatttcgaacttcagacctcttagggccactctttctggattacctgatcgtgtactaatgaagcttattgtgtgtgctactacgaacaaagttgtaggtgtgcatatgtgtggtgatgatgctcctgagataatccagggaattgcaattgctgttaaagctgggttaacaaagcaagattttgatgtcactgttggcgtacacccaacttcagcagaggaatttgtcactatgaggagtccaactagaaaagtccgaagaaaaactgcagctgaggtagaatctaaggatgaggtcgtcactcggcagtagatactgtcattgaccattgtacatagaaggcattctggaggaggacgtgaccctgctaccggcccaaaacctgactagaaacctgatgaatcagtcactgaagatgtatcattacaacgattatgcttgccttgtttttttgccctcgcgatttttgctatttctttccttgaggcttgagcatgctagtagctgagttttcttcttctcttgatctgctactcgtgtaataaatggtacaaagatgttggtatcccagcctggaaatattgacgggaaaagtgaaccagtggagagtcttatctgacaaaaaaaaa

SEQ ID NO: 3474 - DNA, 827 bp, Avena sativa
gtgagtatgctgtttggagaagtgatgcaggtagaggaagtcttcttgcttcactggcagaagctgctttccttactggactggagaagaacagtgacattgttcagatggcaagctatgcaccactctttgtaaacgacaacgatcaaacgtggaatccagatgctattgtcttcaactcctggcaacaatacggaacccctagttactggatgcagaagtttttccgtgaatccagcggcgccatgattcatccagccacaatcagttccagctactctagttctctggcagcatctgctatcacctggcaggattctgggaatagcttcctgagagtgaagattgtgaactttggttcggaccaggtgagcctcacaatcactgcgaccgggcttcaggctagcatcaacgcgctgggttcgaacgctactgttctgacgtccagcaatgtgatggatgaaaattccttcagtaacccgaacaaggttgtgcctgtgacaagccagctgcgcaacgctgcggagcagatgcaggtcacactccctgctcactccttctcctcgttcgaccttgcgctggctcagtcacagcttgtcgcggagatgtgaagcagcgacacagagatcagagacagatggtaacacggtaaatacacagaggcgtgatacacgtgtgcaggaggttgccagtaattattactatacgtgtatatcttgataaagtactgtacagtgtaacaaagatgagatactgcgtactgcagtactaaataaagttgatatcaggctgatcgatctgcaactaatttgtcattgtacatgttg

SEQ ID NO: 3475 - DNA, 741 bp, Avena sativa
gcagaatttcaagtgaaatttattaaaaaggacggtctcaattctctaataacatcttcagttaaaccatctgttgcaacatactgtaacatgacatgacatccacaatgtcctagtggactgcagacctgaccagccaaactgccaagagctatagcgtacagctccagcagcaaacaatggtaagtagatgcgaaacagacggccgccctgtgcttaaacatgtggtagtaccatctgtctactatgatgatggaaaactagaattaagcaccggctatatagtactaattgctactaacttcttatatgtgttcaaaagaaaattactaacttcttatatatagcactagaaatgaataaccaacagtcaattattgttgttctgaactctgaagcttggggtaaataaacatccatcgccctctgaatttggagacacgagctgagtgctcgtcatctgatcatatctcttgctttattattgccacttcttggcctagcccgagccaggagttgtcgccgttagcttgcttggacggagcagcagatgagctgctagcttggtaaggcgccttggcagttatcctgccctttcttttctcgagaaacctatggagcgagttcctccgcgctataggcagatcagctggaaggttttcgtgtgcaggtcggagcaggccctgcgcaatctcgccgccgctgccggccttgtctgcggcgccatcatcgccggcggcg

SEQ ID NO: 3476 - DNA, 718 bp, Avena sativa
ctgcattgcaaatttgacatatgatggtgggaaaattgcatcccatgtcagtgtcaatttaataaaaactaaaggcacaaaagaacctactaagtaataagtaccttaaagtaactggtgagaattagaggagacaacggtcacatatcacttcccaacttctatttctttttctatttattgttccttttcatcgtcactaatgaatttggtacaagagatgaatcatccgcaaagttgatgctttagctcaagatttacagctgagaaaagcgtgtaatgcggttattccagctactcaagacccaacgagacccttgtgccgagcataagcgacaatggagacgaacatgaaggcgcaaaatagccctgatacaagaacaacccatttaaagacgtatccatggtcatcattccaagtgtaaggtatgttcataccaaagattccagcaaccaacgagtaaagtgacaagcagacagttccagaactcaagaatagctcaagctgaatcaactgattacgatggttgtcaagctgaatattgatgtaatcttccgtgtcatcaatatactctctcagcgttgttaatttgtttaatgtgccgtcaatctgcatgaaatatgcctccagcaacatctccagctcttccacatcattctcatttccatgtatagttgctgcactggctctactagctcttgatatttttgaaccaat

SEQ ID NO: 3477 - DNA, 821 bp, Avena sativa
gcacgagtgcatggactggctcgacaagcagccagacgcgtcggtgctctacgtctccttcgggaccacgacgtcttccgggttgagcagatcgcggagatggccgccgcgatcaagggcagcaggcagaggttcatctgggtactgcgtgacgccgaccgggccgacatattcgcagcgtcaggcggcgagagtccctacgagaagcttctgtcacagttcaccaaggacacggaagggacagggctggtgatcaccggctgggcgccgcagctggagatcctggcgcacggcgccacggcggcgttcatgagccactgcggctggaactcgaccatggagagcctcagccacggcaagccgatcctcgcttggccaatgcactctgaccagccgtgggacgcggaccttctctgcaagtacctcaaggtcggcttcctcgtgaggccatgggagaagcatagcgaggtggtcccggcggcgtccatccaggaggtgatcgaggaggcgatggtctcggacaatggcatggcagtgcggcaacgggccaagattctcggtgagggtgttcgtgcctccgtggccgaaggtggttcctcaagcaaaggcctcgatgacttcgttgcttacatcactaggtgatcgccgtaatccgcgtacgcgatactgggtgtggctatgatcctcagatgcacggagcggtttggtcagatgagtttgaatttaatttcaacataaatactagctcatgtttgtagttctttttttagttgtgtgaggctataactcattcactgagaattagctttaattctagtcaa

SEQ ID NO: 3478 - DNA, 909 bp, Avena sativa
cacaatatctgataaggtattcattctacagctgaaaaagatgagcaatacaattccagcgtcttctgattcgtctaaagatcctgaagaagcggctgagggtgttgatcttgacagtgatgatgaagatgagaaggatgttcctgatggacaaccccctaagtcgaaaaagagaaatcacaaagatggaaagaagaaaaatgaagaagcaagcattcctgaaggggctgaagaccagagacaggcacctgaaaaaccagcaaaacaactcaagaaccataaaggtgtgaagaagagcagtggccctaaaatttctgaaatgaatggcgataaggaagaaacacacaccgaacaaacagtgcatgtcaagagccataagggtgcaaagaaaaatggccctaaaaatgctgaaaggaatgttgacaataaggaaccaagcaacggagaaacagcgcaggtcaagggccaaaagagtgtgaagagaagaaatggacctaaaagtgctggagtaagtgcagataaggtagatacacccggtgaacagaccgagcagactagccacaaaaagaaaccgttggataaaattaaaaaatccgattccaagagcacctcagggatcaaagaaaagaaaccggtttctgacaacaagcggaaaaggaagtggcaattcaagctgaggcgggactgggaagcaaaacaaaagtctgagaagaggacaaaggtatgaatgttgggggttcaagacggccccattagccttaagctaagttaagtgaaattggatgtgctatatatgagaatgtaaacggaaatacagtacacactcgattttgtatggtgctactttggaaggtaaaattttgttgtatgcaggaagtgattttgaatttgataattatcataatttgt

SEQ ID NO: 3479 - DNA, 624 bp, Avena sativa
ggctaaggttgatgccatcaaggtacaccttggacaacgaggagcagaaggttggagccgaaatcgttagaagggcgttgtgctacccacttaaattgatcgccaagaatgccggtgtcaatggcagtgttgtcactgagaaggttctttctaacgacaatgtcaagttcgggtacaatgctgctactgggcagtacgaggacttgatggctgctggtatcatcgaccccactaaggtggtgagatgttgcctggagcacgccgcgtcggtggccaagaccttcctcacctcagatgtggtcgttgtcgagatcaaggagcccgagcccgcgcccctcgttaaccccatggacaactctggctacggatactgatgaatgacggctgagctgtttgggaagaaaggcggcggcggccgtgggtcatttttggtagcatgaactaagtttttgagaggtcgatgatggatggatggatgtagttcgagataaagtgtgatgtgttgtgccgccagaaaaaggcgaaataagaagagaaactttagcagaatttcgtgatgtaattggaacatacggcccatgatttacgcggaaaaggatcttatatacgttaaaaaaaaagaaa

SEQ ID NO: 3480 - DNA, 701 bp, Avena sativa
ttttttgtataaccatccgtcttgtatctcttcatctgacatgtgagataaacaaaggtctgcttgtgaacgaatcacttgcttgcacggccaatacacacaacggaccaaagaccatatatatatatataccacacagctaaagaagcattacattgccacattctcgtgcagtttctgccgtacgtagtgcctggaggttatttactgggtacactaatagcccgatacaatactacatacacatattcacatacgtatcttcctggcaccagaagccacacattcacacaagctgggaacgagtaacgtagtagcagtaatctcagcaaatcgatcaagcgctatacccttggatcagggggctccatctcgcggagttgtgaccgccacaagcattgatgcttgcttccttcatcgtgatgcctgaaataccgttgttgcatatgtttgcaaatgctcgcatgtgcttcatgccgtactgactgagcgagccacaatgggactcgaagatccgtaccgttctcttgagacaatcccagtcgtccacgagtggcttgccagaaggtctaacagcttcgagcacggaaggtccattctcaaacccaaagagaagctttccaataaaatcgacgctactgtcgagatgcttcctatgtgttactgtctcgctgatctccctcagaacattcaccctctct

SEQ ID NO: 3481 - DNA, 906 bp, Avena sativa
tgcttgcttccttcatcgtggtgccagagataccattgttgcatatgtttgcaaatgctcgcatgtgcttcatgccgtactggctgagcgaaccgcaatgggactcgaagatccgtaccattctcttgagacagtcccagtcgtccaccagtggcttaccagaaggtctgacagcttcaagcactgaaggtccattctcaaacccaaagagaagcttcccaataaaatcgacactgctgtcaatatgcttcctctgtgttactgtctcgctgatctccctcagaacattcaccctctctttagactttacatgtaacatctcataccttctccacagaaaaagaagatcggcatctctttggttgattgcagccttcggggcttgccagagtagcttatttgtcatgttggcgtttgcaggattaaaaccttgatacaggtaaagcttctcatccttgaatgttttgtccccatactccataacatgagaaccagcactatacatgttcaagtctgaggtacgcttctttacctcttcgtactgctttttgattgtctcctccttcagattatgattctcactatcttccatccatgcaacactgtagaggtcacctaagcaggtaatatattcagaaggaggtgatggttccattccagggcaatatgtaccccagctactttcttctgcattagatgccgttgtgacataaatattgaggtctgcaggcatcaaaccctcaaaaatactgccactttcacaagcttccacatatataaccatttttgcataggtattagaagcatgtttctcttgcaagaccttgatgaagtcatcagcataaagatatggcasgttgggcataccaagaactccacgggccccatgatctgagtaatagataa

SEQ ID NO: 3482 - DNA, 618 bp, Avena sativa
gccggcgccgtcctccccgattcctcccgcctccactaccgctgcaacgggctcctctcgctactgctgctcctggggctctccgcgctcggtgtttacatggggtggatgactcccacggtcgtcgctgaccttggactcgagctgctgtcgacgaccttcattttcagtgtcattgtctctttcctgctttattttaccgggttaaggtcccgccatcaaagctcttcattgaaaccacatgttagtgggagcttcatagaagattggtggttgggagtgcagcttaatccccatttttatgggagttgacctcaagttctttttcgtgagggctggaatgatgggatggttgcttatcaacctctctttgtttgcaaagagctacctagctggctcagctaaccgctcagtcattctttaccagttcttttgtgcgtggtatattatagattacttcgttcatgaagagttcatgacctccacatgggacattattgcggaacggttgggtttcatgctggtgtttggtgatctttgttttcatttccttttaccttcacttattcagggctggtggcttctgaaaacaagtggagctgccgcttttggcttgtg

SEQ ID NO: 3483 - DNA, 744 bp, Avena sativa
tttagtaaaaatttagctttattcatctgcgatcgaacattgaaacttacagaggcttgcacaaaaactgacagctctccaacttaagcctactcactaaggaataatcaaggtcatatataataatgcaaaaggaaaatgtgagacagaaagaaataaacgaagaaaagacaagaggaactacgtaagaaactactaagcttcatccaagttggcaaagactgcccttgccctatatatcctcctagtgtacatcatgcttgaccagaagcacaagacatcgtctgtcatctttgcctatgtcttcatattctggcggcaccagacaactttatgcacccccagcattcattctgatgaggaagcacatggaaatttcaagaacagcccagtcgcactttctattactctagccgctctctttaacttcgacaggcttcgcagcaacagatgaatccccaacaggccctttctcggccgaaggatttacactcttggtttcaccaagccgcacagcctgagcaaaggtcttggtgatatgacccacaatgtcagtgggtacagtcaaaggcttcttagactccacaatgccaggactcttggtgatatgacccaccagctcagagggtgcagccaatggcttcttgagctcagcaactctggaagttggatatctgttgttgctcgatcggagccgcgccttgttctcgagcagggctttctcacgttcctcgcaaaagtcaa

SEQ ID NO: 3484 - DNA, 861 bp, Avena sativa
ctggagcaagtggcacgtcttctgggtcgacgagagggtcgtgcccaaggaccatgcggacagcaactacaagctcgcctacgatgggttgctctccaaggtaccaattcctggctggccaagtgtacgccatcaatgatggcattgtctgctgagggagcagcagatgactatgagactatcctgaggcaacttgttaagaatggcgtccttgcaatgtcagcagcaactgggttcccgaagtttgatgtcatgctcctaggtatgggcccggacggccacattgcttctctcttcccaggccaccctctcgttaacgagaagcagaagtgggtggcccacatcacggattctccaaagccgccaccagagaggattacgttcacgtttccggtgatcaactcgtctgcgtacgttgccatggtggtgatcggggctgggaaagctggcgccgtgcagaaggcgctctcggacaagaagacttctgatctgctacctgttgagatggctgtactccaggatggagagttcacctggttcgctgaccaggaggcggtgtcgatggtgcggaactagcgatccatggcgatgatctgagcgttaagctcttcgcttgaataataaaaatccaggggcttggactgctgcattcctcccttgtggatgacctgtaagtggaacttgattatgtagtatattgtgctcttagagtaatgtgtttgagacactccgtcggcttccggcttttagtgagtaaccatttgccgaggtgttgcccaataggggctcgggttatttaccagacttctgcttttaaatgttatggtcgcatgattgagaatggaatgactgtcagacaaa

SEQ ID NO: 3485 - DNA, 928 bp, Avena sativa
cccaattccatcctctcgatcggaagcaaagcatcaatggcggggctgtccctgcgatgcggcgactgcggcgtgcagctgcggagcgtcgaggaggcgcaggcgcacgccgaggccacctcccacaccaacttcgccgagtccaccgaagccgtcctcaacctcgtctgcgccgactgcggcaagccctgccgctcccagaccgaggtggacctgcacaagaagcgcacgggccacgccgagttcaccgacaagaccatggaggcggccaagcccatcgatctcgaggcgccgctgaagccggcctcgtcagaggccatggacgtggatgcgtccggaagtgcggagccgcaagagatggtggcgccggaggtgaacaaggagatgctcgcggacctcgaatccatggggttttcgaccgggcgtgccactagggcgcttcacttttctggtaatagcaccatcgaaggtgccattaactggctttctgagcatcaggaggatcctgatattgatgaaatgcctatggtgccggccaattcaaacaccgtggctaataaaccctctcttactccggaggaagcgaagattaaagcacaggagctaagggagcgtgctcgtaaaaagaaagaagaagaggagagaaggatggagagagaaaaagaaaaggaacgcatacgaattggtaaggagcttcttgaagctaaaagaatggaggaggtgaatgaaaggaaacgcatcatagaattgagaaggcttgagaaagaggaagaaaaagggcaagagaaaagattcgccagaaactggaagaggacaaggctgaacggagaagaaaacttggattgcctgctgaagtcccatctgcatccaagccaagcacaccacctcctgttgaagagaagaagagtgcattacctatcagaccagc

SEQ ID NO: 3486 - DNA, 796 bp, Avena sativa
ccactcttgagtttgcaattgtgcaagatgcagatcgtctggatgcaatcggtgcgattggtgttgcaagatgttttacatacggagggagcaagaacagtgcactgcatgatcctaaagtacttccacgggataatctgtcaaaggagaagtacatgtccaaggaggagaaacaaacatcaatcaatcatttccatgagaagctctttaagttgaaggacatgatgaagacagaggctgggaaaaagagagcggagaaaaggcacatgttcatggagaattttgtgtctgaattctacgaggaatggagtggcagggcttgaagtgaccaatcagactgtgagcttgggggaaggcttgaagttggccaaccaattttcaacaactcacatctatgctttatttcctgcttggcatctagcaagagacaagtcgagaagatttattggatcactagataatgataagacacttctaaataacagggctgacatcccggcccttatctatattaaggaaaagccacggattgccatctgtaagttccaacaaaggtttgcgaaaagcactaagattaaaaataattgaacaggccatgtcatggcagtctgaacaataagttaatgatacggctcttcggaaagtaattttgtaccaagtccctgaatgttgcctgtgttttttcctgactgggactcttcaaggatctctggccgtgttgttgattctgtgccatgtattgaattgataacactgctcctcgtgatataagcagttctatctaatattgagagcg

SEQ ID NO: 3487 - DNA, 650 bp, Avena sativa
aggtttcaaaggaaggaggtctatacagcaatttgttcacggcacacccaccattccaaatcgatgcaaattttggattcccagctgcattatcagaaatcctggtgcagagcacagggagtgagcttcacctgctcccggctctaccccgtgacaagtggcctcaaggctctgttaaaggtctgaaggcacgaggcgggttgacggttaacattagctggaaggaaggcagcctccatgaagctctgctgtggtctggctctggcagcagccaggattcacttgtgcgggtccactatggtggccacactgccatgatcggtgtctctccaggtcaagtctaccagctcaactcgggtttgaagtgcttgaaaacctggccactttgaggatatgcatgcatttgttcggcagtcggaagggcgtgatctgtagaggcaaattgactgaatcttgttaaacgatgcgctgattaaacatcggcgtgtccttcaatttctcttgtgcttgtcttcaggaacttatcttgagatgtacgcggtgctctatcgcatccagaaagaccgagttactcaaatttatacttcttaataaagggcccaaaatgctgtatagggtggccgttcaagtgtgatcttaataactaaaaa

SEQ ID NO: 3488 - DNA, 840 bp, Avena sativa
gattcggtatcattcctcaagaaccagtactctttgaaggtacgatccggagcaacattgacccgctccaggagtactcagatgttgaaatctggcaggcattggaccgttgtcaactgaaagaagctgtgacatcaaaacctgaaaagcttgacgcatcagttgtcgacaatggtgagaattggagtgtgggacaacggcaactgctttgtctaggccgggtgatgttgaaacacagtaaaatactgttcatggatgaggccactgcatcggtggattcccaaaccgatgctgtgattcagaggatcatccgggaagacttcgcagagtgtaccatcatcagcattgcgcacaggataccgacagtcatggattgcgacagagtcctggtcatagatgcaggactagccaaggagtttgatcggcctgccactctgatcgaaagaccatcgctctttggggcattggttcaagagtatgcaaaccggtcgactgacgtgtagccaatgagataatggacaatttttggattcaagatttgggaggaattaagggatagaaatctccaggaggtggcatgggcaactttcattcatgctctgaacatcatctcctaaaagatatgtgagtggtgactgattatcagaaagatcaggagaagccagagtgcgagataggcatccagatgcgcagaaacaaactccaggatattttcagcccattaagctgaataccttctactactatgagctgaagatggtattataacatattgtgcaaatatttttgttccaacggatgagccgtataaaatgaaattgaatgtcacggtacttgaag

SEQ ID NO: 3489 - DNA, 816 bp, Avena sativa
atagataagaattcaactatattcagaagccgaacacacacacacaggcaaagctgacttataacaaagccaataaaagcaagcagtctcacccagcaaaccatgatacactcctaaaagatctctttacggtttgagatccagaaagacgacatatcaacaatggacaaagaaatcaagcaccaaatgcccaatactccatattcagcaaacagagggtttgaatctgaagtcggtccgtccttttctaaaacttccctgtgctatgccattgccagcatctattggcatctcagactcccccatgttctccttatcttcatatgtgatctccatcaccacatcaacagatgcctgctctgaaccaactgacagagcctcactgccaccattcacatcctcctgctgctccttggcctgtttcttggttttcttgacgccatttttggcagctgtttccttcccaggagcatttttggctggattccggttgtaggaacctctgaccttcgcatcaggcttctccttctgaatgttctctttcttgccatctttgttttgagttgcaacagagttcagtgacctaggcttcagattacccttgggagtcacattggtagcactaggagcagccttgtcagacttttttggttcttgtgaggactccacagagatcttcagtttctcaaagtcttcagcaatatcataaacctgaagaatgcccttaactggttcctccaattctgtcgtgaggccatgacgggctacataagccttgagctcttctctacaattacgaatctaagtggctcgcat

SEQ ID NO: 3490 - DNA, 765 bp, Avena sativa
caggtataagagagttaactgaagtaaaaccacatagagcacagatagaccgaatgctacgcgctggtgagctacggctctatctccgacttgcggatcagatagaccatcatcttgagactcttggtgttgctgtctgccagtttgaagatgcagatgtcgcccagctctaggccgttctgctgggcgaattccttccagcctgtgtaaatccacctcacattggtactcccagtgctcaacatggtgctccacagcttattttccccctccatctgaaggagcagaacttgtttcttgcccgggagacgcgccgccgaaacatattccgcgcagaaatgcatttgacatggcatgccaatgcgataaacatttgcagtggtcatcgctttcacataaataggaagctcagatcgaattgaatggaccttctcctcaactttcctctccatttgcagaggtagagttgccccccaggctaaaatgtatggccgctgggaaggccccccaagattgttggaaggagattccgaaaccactccgagcttcgcagatgctggatcatgcgacctatgagcttcatatcctggtttagtagaaggggaggacgttgaagacatcttctgagctttcgcacaactacgcgtcacacgctgttgcgccctgcaagattctctcgtgccttctctcatgatgtcatcctcatcagaactgctcaagtcaataatctgaggtggaggtggatcaacaaactgaactgaatca

SEQ ID NO: 3491 - DNA, 606 bp, Avena sativa
actgcaaggcatctggatttttgcctaacaaaagagatttctctgatcttgcagaagatggaactggcgacgcagcaaggcatccacgagtcgtactaccgcgacatgatggtgatgttcggcaagtgggagttcgacccgatgagcctgccgaagccgacctgccccgtccacatctggcagggcgacgaagacgggctggtgccggtggtgctgcagagacacatcgccagccggctcagctgggtgaactaccacgagctctcagaaaccgggcacttcctgtcgccagtccctgggttaggagacaccgttcttaggaccctcttcagctaggctggcttggcaacgtcgtagcagtgatcacaactcagaagcagaagctccggccatacggtgctcaagtatagcgttcttccggtacattggtttgttctaaggttgtcagtcaggtagtcgctgattagcgacgatgttatagatgaaaggggtggtgtaagatgaactgttttttgtggggaatgttgcccgcgtggctaggttgtctccgaaaaattctgctcaaaccttggaaagaaacaggaaaatggaactattataccatga

SEQ ID NO: 3492 - DNA, 729 bp, Avena sativa
ggttttcaggaagtggctgtaagagctaggcgtgtacatggtgggtttcgatcgtgccggttacggtgagagcgacccaaaccccaaccgatccgtgaagagcgccgccctcgacgtcgaggagcttgcagacgcgctgggattggggcctaaattctatgtgatcggcatctcccttggctgccatgccgtctggggcgccctcaagtacatccccaataggattgctggagccgcaatgatggcgccggtggtgaaccactggtggccgggcttccctgctgatcttgccgcggaggtgtacaacagacaggaggtgggcgatcagtgggcgctgcgcgtgtcgcaccacgctcccggcatcctccactggtggatggaccagacctggcttcccacctccaccgtcgtggccggcaccaccccgctccccaacaaacgcgactccgagatccgaaccaagctcaaggcagacggcacgttccagcagaagatggaactggcgacgcagcaaggcatccacgagtcgtactaccgcgacatgatggtgatgttggcaagtgggtgaactaccacgagctctcagaaaccgggcacttcctgtcgccagtccctgggctaggagacaccgttcttaggaccctcttcagctaggctggcttggcaacgtcatagcagtgatcagaactcagaagcagaagcagcagcttcggccatacggtgctcaag

SEQ ID NO: 3493 - DNA, 809 bp, Avena sativa
ctcagaaacccgctacaacttccttgagaatcgaccgatttgtacggccatttaccttgagagctgtgcaagagcttcttagtaaaactggatctgtttctagcttctggatggatcatatcaagacccactgctatgttacattctcgtcggttgaggaggctacggctactcgtgatgctgtctacaacctgcagtggcctccaaacaatggcaatcatttgttagctgaatttgttgacccccaggaagtgaaattgaagcttgaaccccctcacccagcagcagcaacagcagtggtggcaccaaccgttcctattagcccagctactacaccaagggagcctccttctcaacaagctcaggctaatcaaaatgttcctcgccaagctgctacgccaagggagcaattgccgcctccaccacctcttatgaagcctcctacatcggatccaggatctgtaagggacaagctcctgcccacgcccactccaaagaagccagaacctcctgttgtgacacttgatgatctcttcaggaagacacaatcctctccaaggatttactatctgcctttatcagaagaggaggtgtcagccaagcttgctgcacagggcaaagcaaaatagtgtgcttgcctatgggctttgatgttgtttttcgtggtatgtagaagcagcaacatgtattttctgcaaagacttattttacctcttctagattgtatgcctgcctgactcaaagttgctttggaccgctgagatactggtttttagtttgaacaaccaggaactttgatatcctggtct

SEQ ID NO: 3494 - DNA, 559 bp, Avena sativa
ctttaacttactacagtacattgtagtaatcttaggtatgaacattggcaagtattaatgtatggtgtggcataagcagtacagatggtaactttttaatggttttgcaatgaaatgtgtaactgtgaaaacttcgcctgtaatactacttttgggaccctgccttttggttacatcacatttgttcattgaaacactgtttgttttggtcctttatgatacactatatagtgctacgagccttctgatcgaaaatccctactaaaatgcagggacattaaacaagatggtggccaatggtgatgcaccagcaagggggagtgcagcagctgctgcaagcttgcgcaggcgtcgacctgctggcggtgctgctgctgctggaggtggtgctggtgccagtacaatgcttcagttctacaccgatgagactgctgggcgcaagatgtctccgaacgctgttctgatcatgagcattgggtttattgctgttgttgccgtgctgcatgttttcggcaagctgtaccgccaccccaactaggttccatatgcaagcaagagt

SEQ ID NO: 3495 - DNA, 597 bp, Avena sativa
aggagcgacgacaccttctccaagaagctcgccgccaactgcaccaagcgccccaacatgctgcagaacctggacgtggtcacccccgacctgttcgacaacggctacttcaaggcgctcaccttcaaccagggcgtcttcacctccgacatggcgctcgtcaaggacggggccaccaagggcatcgtgaagcagttcgcggacagcaaggacgccttcttccagcagttcgccaggtccatggcgaagctcgccaacgcgcccaagacggacgggaacaagggggagatccgccggttcagctgcttcaggaccaacgccgcccagcgcgtcatcgagaccgccgtcgtcgacgccgttgaagaggaggagggtttcgccgcttcggcttgatctgtagagctagctagggatgccggtcggctggccggcggcatgcatgagtgtttttcctgttcatgtagactctctgctctagtagtaatagtaataatgtagtttgagactaaatgcttaattccgatcgatcaatgttcaccgtgttttgtactccgtccgttcggaaatataagatgttttaggtttgygaaaaaaaaa

SEQ ID NO: 3496 - DNA, 648 bp, Avena sativa
agactgtaaaggatgattttggcagcattgacatccttgtgcattctcttgccaatggtcctgaggtaaccaaacctttgctggagacatcaagaaacggctatcttgctgcagtgtcagcatctagttactcgtatatttctttactcaagcacttcctccccatcatgaatccaggaggtgcaagtatctcgttgacatacattgcttcagaaaggacaattcctgggtatggtggtggcatgagttcagctaaggcagcacttgagagtgataccagagttcttgcttatgaagcaggtcgtaaaggcaaaattagagtgaacactatatcagcaggtccactggggagccgagctgccaaagctattggcttcatcgagaagatgatagagtactcttacgttaacgctcctttgcagaaggaactcttggcagatgaagtggggaacgcagcagcatttttagtgtctccgttggcgtctgccatcactggctcaaccgtttatgtcgacaacggactcaacacaatggctatcgcggtcgatagccctactctatccacctgagaattctcttgatctcttaatatgctttcgtgagttcgaactggagtagtttgtcgcttgtccatccaaacgagctgtc

SEQ ID NO: 3497 - DNA, 1123 bp, Avena sativa
ggggaacattttgatcggggttgcttgaagggagggtacatggtgttgtttatggatcgaagcgtgtaccggagaagggggagggatcagcaatggaggcgcccgtgccctgcctcttcttccagttctttgctctgcttctcgcagtaatcgacgaagtttgtgctggcggtgctgctcgtgcgctgtgaaattccggtgaagcccagtcatgaagcggcccgtcggcggtagcccctcctccctcctccagatggccaatccgaacgatatggattacggcgtggtcgggatggacgcggaggtggaggcggaggaggagatgatggcgtacggcggcggccgaggggagaagaagcggcggctgagcactgagcaggtgcgcgccctcggagcggagcttcgaggtggagaacaaagctggagccggagcgcaaggcgcggctggcgcgcgacctcggcctgcagccgcggcaggtcgccgtgtggttccagaaccgccgcgcgcgctggaagaccaagcagctggagcgcgactacaacgagctgcgccactcctacgacgcgctccgcctcgaccacgacgcgctccgccgcgacaaggaagccctcctcgccgagatcaaggatctgaaggggaagctgggggacgaggacgcggcggccagcttcacgtcggtgaaggaggaaccggcggcctccgacggcccgccgccagcgggcgtggggtcatccgacagcgactccagcggggtgctgaacgacaccgacgcgaccggggccacgcccgtggcgccgggggaggcgccagcaccggatgctgcggggatgctcgtcggtgggcccggcgcggcggtggcggggcacgggcacgtgttcttccacgggagcttccccaagttggaggaggacgagacggggttcctggacgacgacgagccgtgcggcgggttcttcgccgacgagccgccgctggcgtggtggaccgagcccacggagccctggaaatgagccttgggctgggagagacaccttgcgcgcggggaataaaagatagcgaaggaagcaggggttttctgcaaatttgtaaatcgtattttatctagtcgtttctgtcaattct

SEQ ID NO: 3498 - DNA, 1020 bp, Avena sativa
gtaaccagagaagagcaagataaggctgctgctgagtctcatatgagagctgccgcagccacagctctggaagttaaggatgagattattccagtgcatacgaagatcattgacccaaaactggagaggaaagaaagttgtgatatcagttgatgatggaattaggccagggaccacagtatctggactggcgaagcttaaaacggtttttaagaaggatgggactacaacagcaggcaattctagtcaagtgagtgatggtgctggagctgttcttctcatgaggagatctgtagcagcaagcaaggggcttcctattcttggtgttttcaggagcttcgttgctgttggagtggatccagctgtcatgggcgttggtcctgcggtggcaatacctgctgcggtgaaggctgctggcctcgagattgatgacattgatctctttgaattgaacgaggcctttgcctctcaatttgtgtactgctgcaacaagctggggctcgaccggtcaaaagtaaacgtgaacggaggcgccatcgctatgggacatccccttggcgcgacaggtgcccggtgcatctcgacccttctgaatgaaatgaagcgccgcggcagggactgcagattcggtgtcgtgaccatgtgcatcgggtctggcatgggggcggctgccgtcttcgagcggggggactctgtggacgagctctccaacgcgcgccagatccagtcccacaatttcctttccaaggacgtgaagtagaggaggcgagggatggttggttgccgtcttccaagcgtcgaggtatagatcctcaagcagcaagatccgtagcgtgataataaatacaagaaggaaggaagatatgtgtgattccctgggacagaagatgatgtagtagcgacatacggttcccatgtaccctttgcactcggcgactaataaaaataattttccactgtaacgcgcgccctcggttgtaattgtgaaagatgaaaaggacttgttgtttgttagcttgc

SEQ ID NO: 3499 - DNA, 698 bp, Avena sativa
  modified_base (1)..(1): a, c, t, g, unknown or other
nttttttttttttttaacttttatccaacctttttcttatcgttcataacgagttacacgagagagaacacctcaccgccgccgcgaagcgcgggcttaatgctagttcctgtgcaagaatgcacaccagcggggggaaaccagaagctactcaaaatacaatcagtaccgtattccccagaggcaatatccgtaaccgtggtgcggtgttcattacattttacatttataacacctgacgaataaacaaaatcgagcttttgatatcccctatcccacctctgtaccccgcttgcgatgaattcaatcaaatgaaaatatacatgtatgcaacgttatggaagaactactttccttgctccggttctcggcgcactattctcagacgctctacaggtgcaacaacgccggaagttggaatgctcacgaggactggacgatcggttggtccgcgaaggggccgtatagccaacccttggcgatgtgaccataagcagcctctgtcaagtggataccgtcccagctccagtgggtcgtcggatcagcacaagcagtagccccaggctcgccgcatttggctgtcacgttgaagttgtaagcggctttctcaactgacccaggacgccccacagcatgccctaggtagctgcttagcaaatcctgaaatgaaaggcagaaatggttaggccactgcatca

SEQ ID NO: 3500 - DNA, 937 bp, Avena sativa
attgctcagatggttaagcgttctccaaacctagagagctttaggtgctcagcaaccaggataggatctgatggtggagtggcattggctgaggcactagggacatgtacccgtctgaagaagcttgacatcagggacaacttatttggtgttgaggcaggagtagctcttagcaaaacgcttccaaagcttcatgatctcgttgagctgtatctcagtgacctcaatctcgagaacgagggtacgctagccatcaccgatgtcctcaaacagtcagcgcctcagctggagatccttgaaatggccggaaacgagataactgctggcgcagccaaacgcctagcagagtgcttgacagcgatgcagtcgctcaagaagctcatcttggctgagaatgaactgaaggattccggtgctgtgacgattgcacagtctctgcaagaaggccatccagacctgaaggagcttgacgtgagcacaaacatgtttcagaggtctggagccaggtgcttcgctcaagcagtcgcaaacaagccaggatttgcgctgctaaacatcaatgcgaacttcatctctgatgaaggggttgatgaggtgaaggcgattctgaagggaggtaggaactcgctggaagtgcttggcccgctggacgagaacgatcctgagggggaccctgaagatgatggtgaagaagaggatggggaggacgacgacaatgatgaggtggagaaggatggggacaacaatggcgacggtggtctggactcaaagctgcaaaacttgaaggtggaggaggaggaggattagtcatgtctagatggactagcccctatctttggctccaattagcctctaaaattttcactagacggtttaaattttcacataaagcgaacacaccgtggctctattgtcttgaactgagtcaaagcagccg

SEQ ID NO: 3501 - DNA, 774 bp, Avena sativa
gctcagagtttctaaagccggagttaacttgctgttgacaaaatggatgaaagagctagagaaaatattctatgggaacattgtgaagtatgatactgcaataagccaagaggcacgccaggacgatcttgtagatgtcatctggaggaatgtgtacgctgacgaagcttcacagcctatggatgcagctgctattcctgctgtccaggcattggcaagatatactcgaagggaggcaacttgtctatcattgacagataaagaagctatgttctctggcaacttcaatttttcaaatgtgttgccaaacgttcccagcccagcgaagcaaaggcgatgatccttaccatggtagaccagtattccatatgaaggtttgtatacattgacaagaaagacttgaagacccatctacaaataatagtagtaattttccaatatttatctatggtcgattctcagcattttgtgccattttgacgaggtgtacctcgctcaagctaggaacttcccttatttttattaccccgcgtgagaaatacatcgtttgattgaatggagcacacatggtggaaacattttcgttgttgaacactgggtagtttttgtttcccattttggttgctgatttgaagtactccctccgatccatgttaattgactttgatttgtcaaaatttggataaacctatatactaaatgtgtctagattcattcaaatctagacaaatttaagtcaattaatattgggccggagggagtagcatcattcat

SEQ ID NO: 3502 - DNA, 787 bp, Avena sativa
tcttccgccctgacaacttcgtgtttgggcagtctggcgctggtaacaactgggccaagggtcattatactgagggtgctgagctcattgattctgttcttgacgttgtcaggaaggaggctgagaactgtgactgccttcaaggtttccaagtatgccactctcttggtggtggtactggatctggcatggggacacttctgatatccaagattagggaggagtacccagaccgcatgatgctaacattctctgttttcccctcaccaaaagtatctgacactgtggttgagccatacaatgccactctttctgtccatcagttggttgagaatgccgatgagtgcatggttcttgacaatgaggctctttatgacatctgtttcaggactctcaagctgaccactcccagctttggagatctgaaccatttgatctctgccacgatgagtggagtaacatgctgcttgaggttccctgggcagctgaactctgacctccggaagctggcagtgaacctgatccccttcccacggccccacttcttcatggtcgggttcgcccccttgacctcgcgcgggtcccagatgtaccgctccctcacggtccccgagctgacccagcagatgtgggactccaagaacatgatgtagcgcggcggacccccggcacgggcgctacctgacggcctcggccatgttccgcggcaagatgagcaccaaggaggtggacgagcagatgatcaacgtgcagaacaagaactcgtcctacttcgtggagtggatcc

SEQ ID NO: 3503 - DNA, 660 bp, Avena sativa
tttccaatcttgggcgaagaaccttcgtgtgaaagaactgaagcctgagactgcattaacagcactaaatgaggatgctgaggaaatcctcgaaggcataaagcccagtccgacatttgttgttgggtctctgttgggcctctcagcagcgacttatgctttgctagaatgggagacgactttgcagtacatcggtgttctaagtcttggactgactatctacgtgcggttctcctcatacgagggctccgaggatttccagcaagacctaaagctgttgttctcccctgtaagagtgggtgctgaagcgctctcgtgggcagctaagaagctagaaccaaacaagattggcctggcgacgtccccctccaccacagcggtccaggaccgggttctccaagcggcggcgaagcacgagtcgaagccgtctgacgcggaggagtcctctgccaagacagacagttttgcctccgaagcatgagctgggtgagtgggtttagactccgatccgtagccacttcaccgtcagtttggtgaattgatgtttctgatgtaagtaattgatatggtaccttgagccgccatgcatgatgaaggctggcactgtaaatttataagcagcagtttatataatggaacacttgttagcaaaggaaaaaa

SEQ ID NO: 3504 - DNA, 711 bp, Avena sativa
atcctgtgaagggagagatagtccttgctcagtttagcctcgacaattcctggaatagagcatgattgtaatggacctcgaggagctgtagagtctgtagatgacaagtttgaagtattctacattgattttggtaaccaggaggtggttccttacagtcgcatacgacctgcagacctatcaatatcctcctctcccttggctcttgctcagcttatgcagccttgccttcgtaaaagtgcctggtttggaagatgattgtggtcaggaagcagctgaatatcttagtcaatgccttctcagcagttcaaagcagtaccaagcaatgatcgaagagcgtgacacttctggtggaaaatcaaggggacagggcactggaactattctcattgttactctggtcgacccagagacagaatccagcataaatgctgccatgcttgaggaagggcttgctcggcttgaaagaagcaagagatgggacaccatggagaggaagacagccctcaagaacctggaagagttccaggagaaagcaaagaaggaaagggtggggctgtgggtctacggcgatgtcgactctgatgaggaagagcaagctccaggtggaaggaacccgcaccgcgtcggtagacgagagaaggcggctgctgaagatagtggcgaggtcatggtttagtttgaagttttggacccgagcggaactcagtc

SEQ ID NO: 3505 - DNA, 699 bp, Avena sativa
tttttttgtacagaaacaactctatatttattgcagtgaagataacaataggcatcaaaacctttgtatgtgagaaggacatggggagcaaactacaggaactacggacacaccatagcagcataagcacgcatagcgacattgatcttgggggagaatgaaacatccatcgtaagcacggctatcagttcacaatgtagtaaacataaacaaaaaccaatccccaatttgatcaggttcgccccttcatgaatgaatcatctaatggggcgatcgaataataccaacgcgaatggaaaaggcattgtttattacaggcctaaaataccactcacgcttccgacaacaggcgccccccctctctctctctctccctccattattccaaacctttgggcaagtgtggtgttgcttggcatcaacgatgacaaaaactctcaacaagtacgaccttacaggctcttggctgcggcaacaacgctctcggcggtgataccgtactccttgtagatgatcccagcaggagcactggcgccgaatttgtcgatgccaatggtcttgcccgcggatccgacgtacttttgccatcccagggtagacccagcctcaatgctgatccttgcagtgacggcagcggggagcacgctctccttgtattcatctgactgctcgtcgaagagctcccaggagacaaatgac

SEQ ID NO: 3506 - DNA, 750 bp, Avena sativa
acgactatcagtccacaatgtagtaaacataacaaaaaccaaattcccaattttgatcaggttcgccccttccatgaatgaatcatctaatggggcgatcgaataataccaacgcgaatggaaaaggacattgtttattacaggcctaaaataaccactcacgcttccgacgcacgcaggcaccccctcctctctctctccctccattattccaaacctttgggcaagtgtggtgttgcttggcatcaaggatgacaaaaactctcagcaagtacgatcttacaggctcttggctgcggcaacgacgctctccgcggtgataccatactccttgtagatgatcccagcaggagcactggcgccgaatttgtcgatgccaatggtcttgcccgcggatccgacgtacttttgccatcccagggtagacccagcttcaatgctgatccttgcagtgacggccgcagggagcacgctctccttgtattcatctgactgctcgtcgaagagctcccaggagacaaatgacacaacgcggacagtcttcccctccttggtcaactcttcggcagccttgacagcaatctccagttcagaaccggtactcatcaggatgaagtcgggcttgttgccggttgagttgtcagagatggtgtacccgcccttggcaacaccctcaatcgaggtaccaggcaggtgaggaagcttttgcctggagagagccagaatagatggcctcttcctgttgaggac

SEQ ID NO: 3507 - DNA, 829 bp, Avena sativa
cagagcccacatattgtttcttgccatcaatcgttttaccacaatggtgtaatatatcttgttctggaatacatggaccgtggatctcttgcagacataattaaacaagttaaaaccattctggagccatacctcgcagtactttgcaagcaggttttggagggtctattataccttcaccatgataggcatgtgattcacagggacataaagccatctaacttgttagttaaccataaaggtgaagtaaagattactgattttggtgtaagtgcagtgctagcaagttccataggtcagcgtgatacatttgttggcacctacaactacatggcgcctgagcggatcagtggcagctcctatgactacaagagtgacgtatggagcttgggcttagtaatacttgaatgtgccattggccgcttcccctatattcctccggaaggagaaggttggttaagcttctatgaactattagaagcaatcgttgaccagccaccaccttctgcacctgcagatcagttctctccagagttctgttcattcatctcttcctgcatacaaaaggatcccactgaacggatgtctgcttcagaactcttgaaccatcctttcatcaagaagttcgagggcaaggacttggacctgaagatcctggtggagacccttgagccacccatgaacgtgccagaataaggtctgtcacttggaggtgtgagaggcttgggagcgagtttcagggtccgtcattctgacagcgtcacatgtttgtcctggaccgcatcatcttctgccgtatatgtgaagatgtatgttgatttggcgagtc

SEQ ID NO: 3508 - DNA, 680 bp, Avena sativa
agagcagtatgcatgcaacttagaatgaagcacatcgaagtttacaaaatggcaaaaggatctgtgtaagacttaattaggtccagatcttgccaagtacatcatcagaacaacaacacgcgggatgacgacagccccaggcaatgactacaactgcttaacaggctaacatctgcagtaactgcagaacaaaaactagcatgaacctaggtcacataaatctacagcaatacttactccttgcttcctcccttctcatttgctacctcacttctcaaatggcttttttttggattttctactgcctcggatcgccggaaggggaacaaacactcgagggcatcttacagccgtctaaacgcaggcagcaagatacattatgtacaagggaatatggcacaacaatgctgcttgtgggtaaaacgtggcatgttaaactccacccagagagagctagtatgcccatccgtacatcccaacactgacaaggacgagcagagccaccgaaagaactggccacataatgtgtgttgagaagcctcccctcttatttggtgctctcacgtgtgactgaaggccacactcctgcttctccttgccgcttttctccagtgtcttacgctgcctcataactgagttggtgtcatgatcaggggatgtccgtttgtgcatcatcctgg

SEQ ID NO: 3509 - DNA, 868 bp, Avena sativa
atgaccaagattatcccaaggaacacgaccctgcctacttccaagtcagaggtcttctcgactgcagctgatggacagacaagcgtggagattaatgttcttcaaggagaaagagagtttgtgagggacaacaaatccctcggtagcttccggcttgatggaattcctcctgctcaacgtggtgttccgcagattgaagtcaagtttgatattgatgccaacggtatcctgtctgttgctgctgtggacaagggcactgggaagaagcaggacatcactatcactggtgccagcacattgcccaaggacgaggtagagaagatggttgaagaagcagagaagtttgcagcggaggacaaagagaagagagacgcaattgacaccaagaatcaggcggagtctatcatctaccagactgagaaacaactgaaggagctcggagacaaggtcccaggtgatgtcaaggagaaggtggaggggaagctcaaggaactccaggacgccgttgctggcggatcaacacagaccatgaaggatgcgctagctgcattgaaccaagaagtgatgcagcttggtcagtccatctacgggcagcagggcgcccctggagctggcactacccctggagctgacggggccgctgactctgcagcttcatctgagaagccaggcgatgatggtgacgttatagatgctgattttaccgacagcaaatgaatagaacagtaggtaggtggcaacaacgtagtacttgggttgcaccttgttagattggcaccttgtttcctatcgggctataggtggagttttttatggtagttgagttgagctttggggggtttgaggtctttcacgttcagatagatag

SEQ ID NO: 3510 - DNA, 757 bp, Avena sativa
aagcttatgcatggcttagccataacacagatgtagatgacaaggttgcatcctggtgggactatggttatcaaacaactgctatggctaacaggactgtgattgttgacaacaatacctggaacaacactcacatagcaacagttggtacagcaatgtcatccccagaaaaagcagcatgggagatctttaattctctagatgtcaaatatgtgcttgttgtgtttggaggtctggttggctaccctagtgatgatatcaataagttcctttggatggttcgcataggaggtggtgaattccctcacatcaaggaaccggattatcttagagatggccagtaccgtgtcgatgctcaagcaactccaactatgttgaattgcctcatgtacaagctttgttattacaggttcgttgagactgatggcaaaggctttgatagagtaagaggatatgaaataggaaagaagcatttcaagctaacacattttgaggaggttttcacgacacaccattggatggtccgcatttataagctgaaaccccaaaagaaccgggtccgaggcaagttgaggaagttgaaatctggttccaaacctagttccactccttcagcagcccggaagaacccatggcaatgaagagaaggatgctctccattttgttggaacttgatattgtagcttaaagtgcactaagctcagaactagaatactacagaattagattagaattgctgtgctcggaaaggacattg

SEQ ID NO: 3511 - DNA, 650 bp, Avena sativa
ggtacaccagggcttgaaatttctagccatcttctgtcacccatcgtcttccttaagctgaagaaatcgacgggttctctgaccactgatctagagcttcttgaaaccattgccgagcaggtaagtttgaatggactcggcgagacatccagacgcgagttacctgaattttcatatgcagttattgacaaatcctttctccaacaggctttgaaggaagattcagttttcgttgtggcatcgaaaaaggtcaactctggacaggtgcaagcttccgcttggaatccgcctgtttgtatcagctggccacacggaattagacatctccaaagtttgttcatctttgaagagggtttccgcgttggtcctttcagaccacatttgatcccgtattacctgcaagacgggagagagcttggtcggttttcgacgccctgtgtactctaggttgagtttggttggcaaatgtacataacagttatgtacatttctagactgatgtattcatgttgttggtgaaaattttgtaaacgttgcggctggagctggccccatcatgtacatttgacttttttttagaagatcatgtacatttgactgatttccatgttgtaaaccagatacatatatttcttcaatgcaaaaaaaaa

SEQ ID NO: 3512 - DNA, 937 bp, Avena sativa
gtccacgggcatcatcttctacgtcgccgtcgtgcagcagtccacctacgtggtattctccgcgctgcagtccgaccgacgcctcggcggaggcagcttccacgtgcccgcggcttccttcaccgtcttcgccatgctggcgcagacgctctggatcccgatctacgaccggctcctcgtgccaaggctccggaaggtgacgggaaaggacgaagggttcacgctgctgcagcgccagggcatcgggatcgcgctctccacgctcgccatggtcatctccgccttcgtcgaggaccggcgcagggacatcgcgctcaaccagcccaccatcggccagacgcagaccggcggcggcatctccgccatgtccagcttctggatggtgccgcagctcatgatcctggggctcgccgaggccttcaacctcatcagccagatcgagttctactacaaggagatccccgagcacatgaggagcgtcgccggcgcgctcgccttctgcaacctcgcgctcggcaactacctcagcggcttcatcaccgccatcgtgcacaggaccaccggggacggccagaactggctggcgcaggacctcaaccagggcaggctcgacctcttctactggaccatcgccggcatcggcgtcttcaacttcgtatacttcatcatctgcgcgaggtggtacaggttcaagggagccagcaactgaggaaagagacgcttgggcttaatttgtgataaacatcattaattcgtaccacagtatgtcttataccacagtagctatttccttttctcgggtggctctgttgttacgaatccaaccaaagtgggtggtggtgaaagagaagaaagatagtaacaacaatgggatggttaatttcttgtaagttgttaaaatgaaagataaatggatgtcttcctctagtaaaaaaaa

SEQ ID NO: 3513 - DNA, 882 bp, Avena sativa
catcgtcgaccgagtcaaggagctcatcaagttcaagggcttccaggtgccgccggcggagctggaggcgctcctcatcgcgcatccgtccatcgccgacgcggccgtcgtcccgcaaaaggatgatgctgccggcgaggtcccggtcgccttcgtggtccgcgctgccgattccgagatcgccgaagaggccatcaaggagttcgtatcgaagcaggtggtgttctacaagaggctgcacaaggtgtacttcaccaacgcgatccccaagtcggcgtcagggaagatactgaggaaagaactcagagctaaactcgcctccctggccactctctgaagaagccttttctcgttaaatgctacctaatcgtttggtgacggcaattccaagagaaacaggacgatacttgagaataatacaaacaggttaccatttgatttcaaccacaagatactcttatttggcattctggcgtactccctccaatccaaattactccgtctgatccaaattaattgacttcggtttgtctagatttggatgtatctagacatgttttagtgttagatacatccgaatctaaataaatccgagtcaattaatttggatcggagggagtattattctctgatttgtctagattcggttgtatactagatacatctgaatctagacaaatctgagaataataatttggattatgttccacttttggcatttggaagattgtaccatgggcatgtctgcaagtctgcaactctctaaggcacgggcgatgaaagtttcgtccctacatttatttgaacgctactctctccattgcggagtaggagtaccatgtgttggtggattcattgcgatcttaaataagattgcttcag

SEQ ID NO: 3514 - DNA, 594 bp, Avena sativa
agagtgtcgcctacgaccgatctagtgctcccaaagatttccaggtcagcggatggtaccaagggctaggcgatgattcagacaagcaacagcctacagctacaaatttaggagagttttcgtacgacattgagaagagcaatgcccagaccttccaactagacaaaaccaccgctgatgcacaggtcatcaacatggtccggctggacttctcctcgaaccacgggcagccagcgctgacctgcatctaccgcttcagggtgcacggcaccgagcctggctctctcggtaccacggcatcgaaggcctgatctggtttctaggagctacgtacacgcctgagtccatgtgacctgtagtgcattgatctgtagtgtagtggcattatggacagatgctgacttgctgttcttgttgctagctagacttcgtatcaggccattgtggctgctatttggattgtaattgttagcagtaaattgtaatgtagaattcagatttgaactgctgtattgttcatgtgtgtatgtatgcgaagtttttatttgtaatttctggttgctttatattcttatttaatcaatcctctctaaa

SEQ ID NO: 3515 - DNA, 615 bp, Avena sativa
gcagaagttacgtctatcttttcaactagctacaccacttgggcgcacatttaaacctcaccaggtgttcttgaagttgaagcatgaaagcaaggttgaacacatatttgtggtgccaggttctgcgaggcaattcaaaatagttctagattttcttggtttactggagaaattttactacctttctggtagatacgacctcgagctttcagttggtgatgcttcaatggaaaattcgttcctacgagcccttggccatctggagttggacttgccggaggccccagagaaggccccgcgtcctcctgcacaagctgttgacccgttgggaaagtttaggccacagaaggagatatcacacatattccgttcaccagagaagaggccgcctaaggaagtctcattagcatttactggtgtcacacttttgccttttattgggtttttgattgggcttttgcgtctgggagtcaacatgaagaacttcccatccctgccaggaccagctgcattcgcatcacttttccatgtcggaatcggagcagttctgctgctctatgttctcttctgggttaagctggatcttttcacaactctgaagtatctcgcttcctc

SEQ ID NO: 3516 - DNA, 874 bp, Avena sativa
gtctacaccctcgtctatcacatgatggagccgcccatgcagtactacgagattgtcggcgagatcgaggaggaccctgaagaagaagagcatgtcagcaacttcagcagacccctgctccacgaagcagagtggccagggatggctgataaagaaacagagcactccaagacgcccttcatcgccaggatcttcatgagcatctcaggctcctcacagaccacgtttcccgacatcgacttcacggaagaggggggagtctcgggtggtgctggacctagcagcccaaagtcgctccggtgcttggcggagccaaaagtggtcaggaggatgagggttgtcgccgaaaagactccgattcagcatgtcatgcagccgcccaccatcgcctccttgctcgccatcatcatcggcatggttcccgtgttcaaggctttcgtgttcgaggctgacgcgccgctctccttcttcaccgacagtctggagatcctggctgctgccgtggtcccctcggtgatgctcattcttggaggcatgctcgcggaaggcccaaatgacaacgccctgggtatgcgcactatcgtcggcataatcgtcgcaaggcttctgatcctcccgtgcattggcattggcgtcgtcatgctggctgacaagctgaacctgctcgtcgaggatgaccacatgtaccgcttcgtgctcgcgctgcaatactccatgcccagtgccatcctgctcggagcaatcgcgagtctgagaggttacagtgtcaaggaagcatccgcgatcctcttctggcagcacatctgtgcggtgttttcactttccatctacctcatcgtatatttcaagctgctctcctacatctgaaagatga

SEQ ID NO: 3517 - DNA, 783 bp, Avena sativa
ccagagggagtccacgagctgccgctcctcacgagctgcttggaggtcgtcggcgtccattgcgccgatgctttcgattcggctcctgaggatatccttcagcttgtcttgatcaggtagagtcttgtcacgcgccagctcaagaaggccgcctaaggcagcctctcggactccagaatcatcactggatgcgaggtgcaccatttgatttggaagaccaagctctgtagctgcactcctatccgcctgattgtgcagcaggtactgtgttagatgcagagcttttcctctgaagtctagcatcatcagaaccaagtgcatctctcagtgcagcatagccatttcctaggcgaaatgcagaaagtccaggctggttattacgaatcagagaagatatagctccgagagctttggtgcgtgcattcgtgctaggatcagacttgaagtttgtcaacagtggctccagtccatttgattccatgacaagttgctggcttttcgggttattctgcacaactgtactcacaacttctgctgcctttgctcggatgccagcatgtgaatttttcaagtaaccaagtagaggatctaatccaccaatagaatgaagatcatttgccatatcaatggattccacatgctcttgtaactcatccagcatatcttcaatgttctctgtagtcacgccatgagactgcaacacatcatcaggggttttcatcacctgggctatctccttcatcctgccgacaacatcgattgtatygcctgcattgcctctat

SEQ ID NO: 3518 - DNA, 584 bp, Avena sativa
gacaacttagctccaagagcgatgttgtacagtttcggagttgttcttctggagctattgactggaaggaaacctgtcgaccatacattaccgagggggcaacagagccttgtcacatgggccaccccaagactgagtgaagataaggttaggcaatgtgttgactcaagacttggaggggactttcctcctaaagctgtcgcaaagtttgctgccgtcgctgcgttgtgcgtccaatacgaggccgattttaggcctaacatgagcatcgtcgtgaaggcgctccaacccctgctgaacgctcgagcagcccaccccggagaacatgctggtcgttaataagctccattccaaccttttgtactccgtatgatatcgggaaaaggagcatgtggcagacagtgtgtgtctatgttttgtgattattcttctcgagtttcaaccctcaaaattctagtacagtaccaaacatactggattcttcctatctgttgcaagattggctattggtgacttgactaacttgcgtatgtctccatggaacattttattagttagtaaaaattaagaatgaactctgcagc

SEQ ID NO: 3519 - DNA, 422 bp, Avena sativa
cactacgcaggctgatgtagagatagattttgagctgacgtccatcgatgacgccgacccttttgatccttcctggcttttggacgctgaaaagcactgccgggaagcggatgcatcagttcatggggggtatagggccatttgggcttgttattctggcctctgacaacatggaggaacacactgttgtgcactttagagtctacaaatcacagcagaagcatatgatactcatgtgctctgacctaagaaggtcttccttgagaccagaactgtacacaccagcctatggaggcttctttgagtttgacctcgaaaaagggaaaggaagatatcgctcagaactctaattgaccggtcggccgtggagagctttggtggcggtggcaggctctgcatcatagcaagagtctatccagtgg

SEQ ID NO: 3520 - DNA, 611 bp, Avena sativa
  modified_base (597)..(597): a, c, t, g, unknown or other
gctataagtttcttggttgatgatgtacttgagacgaagttagacaggaaatttaaaatcattacagataaagggacattggacgccatcggattgcatcccgacgggcgtgcaaaaagagtgatctattgggaatctgtatcaaacttggttgaacctggtggtcttgtggtcataacatcatgcaatcacacaaagaatgagcttctgcaagaagtagaggacttcagtgcgcaaaagtctgtcaaggaggacgcggacagcggtgtgcaccaggtcttccggtacttggatcatgtccagacgtatcctaccatcatgtttggcggagttgaggggtctcaagtgtgcaccgtggctttccaacgggtgtgaaaggccaattttaagcgtgtctcgctcagtgttgtagcccgttttatcctcggttgttattgttgttgctgtagcctagactggctgctgctgttgttgttgtagcctagactggctgttgttctttccggtttgcaagaacagagagtaaagagaatgtaagcgtggatgtgtgcactcttttatacagacctgcagtttctagtttaaaaaaaraaaaanaaaaaaaaaaaaaa

SEQ ID NO: 3521 - DNA, 867 bp, Avena sativa
tggagaatgagaggaaaaagaatgatgttcaaaatgattccctccacatggccagaattgagcaaaagaaagccaatgaaggtgtgcgaattcttgttgagaaacataagaaagagaaggaagctgctttgaataaaatcttgatgttagaggagcagctggataagaagcaaaagcttgagctggatatagaacaacttagaggcaaactggaggtggtgaaacacatggagggagagggtgttgatgtgaagaaacgcactgaggagctgactaaggaactggatgaaagaattgatgccatggaaaacttggatgagctaaatcaagctctgatcatcaaagagaggatgacgaatgatgaactgcaagatgcaaggaaagagctgatcaagggcttggcagatttgttaaaccctcgtagcaacattgtaatcaagaggatgggtgaactggatgagaaggcatttgttagagtttgcaaggaaaggtatgtcgcagacgccgaaacaaaggctcttgaactctgctccctgtggcaagattatcttagggatcctaattggcatcctttcaagatggtcgccacaggtgaaacacacaagcaaatcatcgatgaagatgatgaaaagctggtgggcttgaaggagcagcttggagaagaggtctacaaggctgtgaccacggcgctactggagatcaatgagtataacgccagcggcagctatgtggtctctgagctgtggaacaacaaagagaacaaaaaggcaagcatgggagaagttgttgagcacatcctgaagcactggaaggtgcagaaaaggaagagatgatgaattcatcactcacactgaaacaagataaggc

SEQ ID NO: 3522 - DNA, 879 bp, Avena sativa
gttaaaatttggatgtatacacaccaaaacatatctagatccattcaaaatttgtgacatccttttaaggacagagggagtacaaaattccctagaccgcactggtcaaacaagagaaatgctttaatgcacacaagtaagctccacggaaaacagaagacaagaaaatagcaacagaaatccagagacagtgtcttgtacaaactagatgtagatgcacactcagtagtaataccacgactcaactcgacctccaaagacattacaggaattgttttgccaaaccaagacgatcatagcaatgaaaaactgtagatatattgtgctgctacattgtccaccgaccaccatcgcctgcctcatggaagatttaaattttgttgaacgcgacaatgtcgcagctctggatgtactcgttcgctggttcaacgcacaaatggtcctcaatgagtgtgtcaacagagacaagatcatcaacgatggtcatcatgatctgaagcttcttgatgccatatccaactggcatgagcttggaagcaccccacagaaggccctccatcttgacgtttctcacagcttcttccagcttaaccatgtcagtctcgtcatcccatggttttacatccagcaaaacagaggacttcccagattctttcttcttgccagaagccttaacttgggcagcacgttcttcagctgccttcttctcctcttcagtctcctcaccaaaaaggtcaacatcgtcatcatcttcatcatcagctgcaggagcctttcccttatcagaagttgatgcttcaggtacagctgatgactcaaccttgacaccttgacccgcagcagtaactccgctcagctttaggagcgcatcaatgtgat

SEQ ID NO: 3523 - DNA, 985 bp, Avena sativa
  modified_base (48)..(48): a, c, t, g, unknown or other
ccggcggcacggtgctccgcctcgccaagggacctggctgagacaacngcggcgctcgcgtgttggtggtatgctcggagatcaccgccgtgaccttcccgcggcccccacgaggcccacctcgactcgctggtcggccaggcgctcttcggggacggcgctgccgcagtgatcataggcgccgacccggacgtgtccgtcgagcgtccgctgttccagctggtgtcggcaagccagaccatcctacctgactccgagggtgctatcgacggacacctcagggaggtcggcctcaccttccacctcctcaaggatgtgcccaggctcatctccaagaacattgagcacgctctggaggaagccttcaagccgctgggcatcgacaactggaactccatcttctgggtcgcgcacccgggcgggccggcgatactcgacatggtcgaggccaaggtaaacctcaacaaggaacggatgcgcgccaccaggcacgtcctctcggagtacggcaacatgtccagcgcatgcgtcttcttcatcatggacgagatgcgcaagcgctccgccgaggatggccacaccaccaccggcgagggaatggactggggcgtcctctttggcttcggccccggcctcaccgtcgagaccgttgtcctccacagcatgcccatcgccgctggtgccaccgcttgatcgatcctgtcatctccgtttacgagcgacgtcgataaaactactagttctactgccgccgccgccgctatccaaagtaatatgcgttgtattcgtgcgtaagtggtttgtatttgttggtaggattcgttctgccattgtgtcgccagtgtcgcgtacgccgtcgtataatagtagaagtaatcaaaccgagtttttaaggagatacaatttacttataagtgtcataaaatgggttgtgaggtgtatttacctgtgcatgagaagatattttctgtttaatttcaagcat

SEQ ID NO: 3524 - DNA, 588 bp, Avena sativa
cgggatgatatgatggcgagaaaaaggagtgggtggaatctacgggcgtgtcagatggtgattttgtttcttatgtaagcgagtggtgcaaagatggagctgcgcttattgggggttgctgcaggacaactccaaacaccatcagggccataactagaacccttaaccaattctgccctgcaccataactatccgcggcatacagttgtgccctccttgagaggtggtttttcccttgggtgttggcgtatgaagatgtcctggagatttagtaatagcgctgtgatgttctcctggaaacgagacggtttcttttaacttggagatgctaccggtcaacgattaacaaagaagtaagttgtactgaggagcgagtgaaacgatctgcggcgaagttcatgaccccttattagctattgagagagtgcaagactatgtagtatgttatacaaactgttgggtcgttcgagagatgttatcctggaataagctcttatgttgtgtactagtactgccttgaactatatatgtatgtatgtacctccagctgaaatgaacactccctctgggttagggttaaaaaaaaaa

SEQ ID NO: 3525 - DNA, 697 bp, Avena sativa
gcttctcatccagaggtggaggagtcctggacttcatctgacctcagcgcggaagggcttggtcaatctgtcaagccttgccgtctgaagtcgtatgtcatgtcatttgatccagacacgttgcaaacttacgcgacaattcggtcgaaggtggcatttggcatcatagagaagcacacagaggcgctattcgggaaaccggagattgtgatcactccggagggaaccgtggattcttccaaggatgagcatgtcagcataagcttctcagggttgaggaggctgatcttagaggctgttactttcggatccttcctttgggatgtcgagagctatgtggactccaggtaccattttgtgaccaactagttggatccagatagtgtagattcatgggctttgctgaagaccgttgtacaatggtaattaccccgtgctgtatgccgagaaacatatgattctggcatcacgtcattgtaaaggggaaatgtcattagactgatatctagctactaagatttattaacatttgctctgtcaggggtgtttacttgctgctttttatgactttctcctcgtgaaattgaatcgaggagttgtagctagtccttgtctgaacctattgttgatgttgtgttattctatcatcttctgaaacttgaacttttttgcaaaaaaaagttaaattaatccgatc

SEQ ID NO: 3526 - DNA, 847 bp, Avena sativa
tccaacttcctgacttcattgctgcaactggaatacgaaaaataagacaggcatacatcgagaaagaggatagcaaaaagttgaagcaaaagcagcgggagcgtatgcagccaaaaatgggcaagatggatatagattatcaggttttgcacgacgccttcttcaaatatcaaactaaaccaaaattgactagtcatggtgatctgtactatgaagggaaagagtttgaggtcaaacttagggaaatgaagccaggtatgctctcccgagaacttaaagaagctcttggcatgcctgatggtgcgccacctccatggcttataaacatgcagagatatggtcctccaccctcttatccttcattgaagattcctggtctgaatgctccaattcctcttggtgctacttttggttaccgacccggggaatggggaaagcctcctgtggatgagcatgggcgccccctctatggagatgtttttggtatcctacaacaggatgaacctaattatgatgaggagcctgttgaccgcagcaagcactggggagacttggaggaggaagaggaagaggaggaagaagaggaggaggacgaggaagatgagccaatggaagatgaagacatggaggaaggcatccagtctgtcgaaaccatgtcaagcactcccactggcattgaaacacctgatgctatcgatcttcggaagcaacagaggaaagagcctgaaaagcaaaccgaaaagcagctataccaggttcttgagcagaaagaggaaagaattggagctggggcactctatggatcaagccatacgtatgtggtcggggcacaggataaagctggggt

SEQ ID NO: 3527 - DNA, 585 bp, Avena sativa
gagatgcgcagaatgaaacaggatgaaggtttggatattatcggcgaagggctggcaacgctgaaaaacatggctgctgatatgaacgaggaattggatagacaagttcccttgatggatgaaatggatgacaaggtggatagagccaatgcggatctgaagaacaccaacgtgagactaaagcagactattctccagatgagatccagtcgcaacttctgcattgacattgtcctgctctgcgtcatacttggtatcgctgcctatctctacaatgtgctaaagaagtgagctagctgctgcagcggtgcctcgtgaccatgggtgtggttgcggtctcgcggtggctcctcctctacgtgctacgtcttctcatgaatggtttcaaccctggtgtgccacgagttatttcgttcgtcccatctgtgtaatatcatggtattgttaggttattattatgcttgttgacgcggtggacattgtgtgtgtggatgtggtgacctgatgacgtctgctgtatgtatattcgggagtaaatttcgtagcaaagagtaacaatgtcatcattcttttgttmtaaaaaaa

SEQ ID NO: 3528 - DNA, 624 bp, Avena sativa
actaagcagacagcaagcgtatgcgcacacgtatccgaggatcatcctgaccaaatcgataactggctctctccccagcagaagctgcagaggtccgggccagcacttcgtctggagtgcccaaaaccaggccaggtcatcaacagtatcaagtttgcaagcttcgggacaccaagtggcacctgtggaaattacaaccatggtgaatgcagcagctctcaggctctagcagttgctcaggaggcatgtgttggggtaagcagttgcagcgtgccagtgtcagcaaaatactttggagatccatgtagaggagtcacaaaaagccttgcggtcgaagctgcatgctcatgacatgtttgagaaatgtttgttagtaggaggtaaaagcagactgaggggttaaaacaaaaatcctcctctgtgtagacaagcaggcaataataattgttctagaaatgctggtgaaatggaacaaaataatcccaaaatctactggagcgaagcaagccattaaattgtatgcttagagtgagttgtacttgttagcatgacaaatatatatacatttttacaatgtattcttttacaagtttagagataattcaatcaacacaagcacacctt

SEQ ID NO: 3529 - DNA, 618 bp, Avena sativa
  modified_base (604)..(604): a, c, t, g, unknown or other
  modified_base (612)..(612): a, c, t, g, unknown or other
ccgttgcacttgttgcgctctcctccctcctcgtcgcccacgtcgctggtggtggcacgggcaacttcagcgctgccgacttcaccgccgaccccaactgggaggccgctagggccacctggtatggcgcgcccaccggcgccggccctatggacgacggtggcgcttgcgggttcaagaacacgaaccagtatcccttctcctccatgacgtcctgcggcaacgagcccatattcaaggacggcaagggatgcggctcctgctaccagatacggtgcgtcaacaacgaggcctgctcgggcaacccggagacggtggtcatcaccgacatgaactactaccccgtggccaagtaccactttgacctcagcggcacggccttcggcgccatggccaagcccggactcaacgacaagctccgccacgccggcatcatcgacatccagttcaagagagtgccttgcgagttccctgggctcaaggtgaccttccacgtcgagcagggttcgaacccggtgtacttcgcggtgctggtggagtacgaggacggcgacggcgacgtggtgcaggtggacctcatggaggccaactccgggactggacnccgatgcncgagtc

SEQ ID NO: 3530 - DNA, 695 bp, Avena sativa
gacatccagttcaagagagttgccttgcgagttcccctgggctcaaggtgaccttccatgtcgagcagggttcgaacccggtgtacttcgcggtgctggtggagtacgaggacggcgacggcgacgtggtgcaggtggacctcatggaggccaactccgggacgtggacgccgatgcgcgagtcgtggggatccgtctggcgcctcgactccggccaccgcctccaggcgcccttctccatgcgcatcaccaacgagtccgggaagacgctcgtcgccgacaagatcatcccggccaactgggctcccaccgcgtcctaccgctccatcgtccagtacagctagctgaagaagctgcatatcatttggaacgaatcattggctagatcgatttggtattgtatcgaggtttgttttgcatgcatgatgcatggggaatgaggtcggatcggaggttccctgctgattattaggtgggacgtcgggtgtcgggtgtcatgtaggcgtcgttgatcgatcgtgcatgtgtgtgtcttcaatatgtctgtctgtgggatatggaggagaggcacgtttgcatgtgctctcccgcgctcactttcattgtaccggtgtgtaaccacatcatatcataagttattacagtttgtgcttaawtgttgtccctgcttctactcctcttatcagttcgtaaga

SEQ ID NO: 3531 - DNA, 844 bp, Avena sativa
cacatacttctcgatttctgatataagcgagataagagtagaaggccttgaaactcttgattacctagacaacttacaagatagggcccgctttactgaacaaggcgatgctattgtttttgaatctgagttagacagaatatatctgggcacaccgtcaaaaattgccattattgatcatgagaagaaaaggacatttgttgtgaggaaaggaggccttccagatgctgttgtttggaacccttgggacaaaaaagctaaggctatgtcagattttggggatgatgaatataaacgcatggtgtgtgtggaggcagctgctatcgaaaagccgattactctgaagcccggtgaggagtggactggaaaattggaactgtctgcagtcccatctagttactacagtggtcaattggatccggaccgtgttatccaggattcagttgtcccggaggattccatcagctagcccttggtgaatctctgtgcaggtagactattaatatcacatgcacaagggaaatggcagcaaggagtgtcaaaacattccttccattctattcaaatctttgttgttttcggcatgcgcatcggaacaaggtggatctacatgacataaaggacaaaacgttgtttatatcctttttagggatgtttgaagaaacatcttagatgggttgtaaaataaatgtgtaactgtattttatcagcttcttttattctcggatgcgtaagtttcatactgtaaacattccgagatatatttggatgcatagataacctgtgctgtgcattatgcacgattggatggttatttgaatgaagtgatgatgtttttgcgtcg

SEQ ID NO: 3532 - DNA, 908 bp, Avena sativa
ccacaagccagagcttgtgtcagagagagaaagaatactaaaagcaggcggattcatacgtatggggcggataaatggaagtttgaacttatcaagagcaattggtgatatggaatttaagcagaataaattcttgtctcctgagaagcaaatagtgacttcaaatcctgacatcaatgttgtggagctttgtgatgatgatgactttcttgttgtagcatgtgatggcatctgggactgtacgtcaagccaacagttggtggatttcatccatgaacatatgcgcacggagagcagcctttctgcagtgtgcgaaagagtgctcgacagatgcctggctccatcaacaattggtggagatggatgcgacaacatgactatgatcttggtgcagttcaaaaatcgaggcagtgagaagaaaaaggccgacttggctgagcgatctggaaaaggcgaggaagagtctgaggttcggtgagtacacaccgttaatggaaggctctgcgacaagtgatgccgacggcaatggttcttgacgctggcaaggatgcaaatatgtcaatgtgaaattgtgtgcatgctttgttgatggagtatcaaccttatgtcagtcaaatgatgtgctgtgcacattctgcccgagaacatgggataaaataaccttggttggtgcaacagcagaatcccggtgtggagttctattcgtcctcatgccaaagttgattattttgggtttggtttcggtcatcaacgcttcccagactcgtcaatctggctaccggtgtctatgtatgctataaacgtggctggggtattcgttctttttgttggtattcttgtgctattcatacaatttaacaattccatgcctcagggcttggctgttgttctgatcatgtaacgtatcc

SEQ ID NO: 3533 - DNA, 817 bp, Avena sativa
tcggaaggctccaagcaagagatatgctgcagcatttgtggacaggtccgatctcaaatgcagctgttgatgttgttcaagggagtcggtcagttgaagttaggtccgttggggttacaaagggtgctgcaattgatcgcattttaggagagatagttcatagcaaaagcatggttactccaattgactatgtactatgtataggccacttccttggaaaggacgaggacatctatgtattcttcgaccccgaatacccttctgaatccaaagtaaaaccggacggtgcatcggtatctgtcgacaggaggcagaacggacggccatctaatggccgaagcaattccaggaactcgcagtcaaggacacagaaatcgcaggccgcactcgagaggtcatcgccgacgtcgtcaggccagggcaatgcaaacagccaccacgactggcgcgaagggtcttcggtcctcgacctgaagggcgacaactacttctcctgcgccgtcgggaggaagcgttccaacgcccgttacctgctgaactcgtccgaagacgtcgtcgccttcctcagggagatggctgaatcaacaacacctcgcgccggcttccagtccggcgccgccgccgctgattacatgttcttggataggcagtagataaattttcctctagtaattaaccacccgggcctcgtcggagaagagagtttaaccctcaataaccttatttgttatatgcgcgctggagctacccccgtagctgggtacgcgtggtgtacaatcctgtacaaaatataatctcatgctaaaactgcgagatg

SEQ ID NO: 3534 - DNA, 665 bp, Avena sativa
ggtactcaaggcagctcagcacctgaaggatgtgttacatgcacccgaggaagtttgggcaaatgacaagctgttacgcagcatagctacatactttatggataataatttgcctatatctaccgacaaagaggagatttcgcttgctgatgtgcacgctgcagctacgtacctcaaggatgtcttgcacatatcggaggagggtagttctgctaccggcgaagagatgcccacggtagcatatctcaggcatgtcttgtttgtatcagaagaaaattccgaccagcaagtgctcgcaatagctacgcacttcaggaatgtgttacatgcatctgaggatgtttgggctagcgaccagctcttacgcagcgcggcaccattatataaggataagttgcctgtctccgaggaagattcggacaccgacgaagaggagatttcgcttgctgatgtgcgcgcggcagctacatacctcaaggatgtcttgcatgtattggaggggcgggtttcagcgaccgacgatgagatgccaacagtagcgtacctcagggatgtcttaggtctgtctgaagaacattccgacgaaaggatgctcaagatagcgacgtacttcaagcattgttatgtgcacccgaggatgtttggctcaccgaccgaatgttacg

SEQ ID NO: 3535 - DNA, 872 bp, Avena sativa
agttgtgggcaacttcaaagcatgatgtgtatttcatgtcgaattccacagtaggccactggtcatcattgtctcacaaaatgtcagatgttcttgatttctcagggcatgttgctccagcgcagaaacatcctggcagtttactagaagggtttactggcgttcaagttagcacacttgcagtgaatgagggtttattggttgctggtggttttcaaggagaactaatttgcaagagtttaggagaccgtgatgttaagttctgtacaagaactactttgagtgataatgctatcacaaatgccatggatatacacagatctacaagtggaagcttgcgcattacggtatcgaataatgattctggtgttcgtgaatttgacatggaaggatttcagctcttgaatcacttgcgttttgattggccagtgaatcacacatccgtgagcccggacaagaaacttttggcagtagttggggatgatcgggacgctcttcttgttgattcacgaaatgggaagatagcttctaccttagttggccatctggactactcatttgccacggcgtggcatccggacggtgttacctttgcaaccgggaaccaggacaagacctgccgggtctgggacatccggaatccatcaacctccctcgaggtcctgaggggcaacatcggtgcgatccggtgcatccgctactcctccgatggccggttcctccttttctcggagcctgccgactttgtgcacgtatacagcgcctccgagtgctaccggaagcggcaggagattgacttctttggcgagatcgtccgggatctcgcttacgcccagacgatacgaaacccttgttgtggggtttgcgaccgt

SEQ ID NO: 3536 - DNA, 895 bp, Avena sativa
cctgcagataatagtcttgttggaagccattaggtgttgtcaagattgttcactgattgatcagatttcagcagtcaccaccagtctattgatgatttcctacaaatggtatgcaaagctcaattttcttcatgtctccatcttggaaatcatggacgttagcttccagcatgttgattttgctgctcgttggtgggaatgcctgaactggaataatctgcctagtgtgaacttgtggtgtcaagttaatttcactgttacagatctgttagactattatgttcacacacaatacatgaatttcataagcagcaagaatcttggctttgggattttgtggcttcggattgatattaaagcagatcccataactctggagttgatggccagtactactacaattcatgagcaacattttctgtgttgtttaagttgcacttgcttgtcactgtcaaaagatcgccatgttgaagatacagtctctatgctgttcgggctgtttcaccggaggtggacgacaactcctccgttgttgatccccagattcaatggcagggacactgtaagtttgagctcggtgaaggtcgacatctacagctcatctctacacctcgtgtgcatattccagatagaccgttgggagagccacccacggggcatcaactggaccgcacctctatcgaggccattggggattgcagatgcggcaatttcgagtctgtgttgtcggcggatgaacgaacgccgtatggttccatttgtgatctccagcatcttcttcgtgagtttagatcgccttcttcatgtgttgtgcacttaggcacttatttctcttgctctactgttgagagccttgtaatgttgtaccatgatctttaatgctaatatttctagc

SEQ ID NO: 3537 - DNA, 651 bp, Avena sativa
caagatcatcactgatgtaaactgtgatgtggaatccgctgagatcgacactgagggcttggttgccaaggacaagtttcatgtgagttacagaggcgcaaaactaaacagctcgttatctcaggtgctggttaattgtttgcgttattacctccggaggcctgagacggatgaagacagctattgattgctgtgtggtgcacgggctccgagctacagactgtggacttacaacagttctgccccgtctcagagttcctgtctttgaagcccttgctgtgaaatttctgttgtaagcacacaaaaatgttgcatatatgttcccaaaatgcattaaaactgggccttgtgatgcagttcgatgttttgttgtcgaacctctgcccctgggagctttcactagccgttatgccattggtttcctatctagaggaatcacattggagagcattcatgtgttgggtgtgtggtctgtaacttcatcgtatagtataattcatgtgcatgtaaaaaaccaggttacgtgcgtggacatcttggtcttgcttcatgtcaaatggtgaatcaaaggtacttattaccaaaaaagagtacaaaaggtaaaggtgcctttgatccagcgtggttgtttcatttactaactgaagcctg

SEQ ID NO: 3538 - DNA, 805 bp, Avena sativa
ggcacccagggtgtattagatggatttatgatccagtttaacaagaatacatttggtcttgcagctggtggaccacttcaggttcctccactgcaacctggggcctcagccaggacactccttcctatggttttctcccagaatgtttctcctggggcaccaaactcgctgcttcaggttgcggtgaaaaataatcagcaaccagtgtggtatttcagcgacaaaggttcgctgcatgtcttctttggtgaagatggcaaaatggagcggacgagttttctcgaagcatggaaatctttgcctgatgacaatgaattttcaaaagaatatcccaactctgtcatcaacagcatagatgctaccatcgagcaccttgcagcatcaaatgtgttcttcattgccaagcggagaaatgcaaacatggatgtgctgtatttgtcggcgaagattccccgtggaattccattcctgatagagcttactggtgcggttggtgttcctggcgcaaagtgtgctgtcaaaactccaaacaaggagtttgtgcctctattctttgaagcaatggagcctcttatcatgtgacgtggaacctaaggacggttattccttcaaaatcagtcacctactaaaggtgttggatgtgggcattgttccgcggaagctagtgtgaattgtatttgttgttttttgtattagaatacagtatttgaactgccagtttcctggtctcaaaagttttcctctagggatactcaacatggtgatgttgtgttgcataaagtgtacatcttctttctagtaaaaa

SEQ ID NO: 3539 - DNA, 745 bp, Avena sativa
atattggagccagtgttgctgtcctcagcaagatagctgctgattggaagacgctgtctcccaagctcaattctgaagctcttaaagcaaccctgaagagcctaaaggctaagaacgaggttgctctggaagaggcagaagactctgggaagaaggcttcaatcaaggaagcagacaagtactgcaaggtgatcatcgggaggctgtctcgtggcaccacctgcctcaagggcagcgtgctcgtcatcgccctcgctgctgctgcaggcttcgcgctctcccccaaccttgacctctctgccgacctggcgatggtccaggagcacctggcgaagctgccagagcacctggcgaccgttcctgagcacctggcgatggtcccggagcacctggcggtcgtgtcggagaagctccaggcgatggcgtcggagtacctggggtccttctgaacataccgtctatccggctctatttatacaggcagtgaaagggagagaaataataatggagaggatgataggttctagataaaagatatactagctgtgagttgttattaccgttctttagcatcttcctcccaagggaggggatggcagcgacattgcagagtctgtttttaagttatgttaattaatcgttaatcggtagactgatccgtgaggatggaggagatatgaaggtctggccaaacggcccggcctgcggactgattagcacacccttatggtggatctgctgagac

SEQ ID NO: 3540 - DNA, 839 bp, Avena sativa
gacagtttgcttataggaggaagcagaagaaaaaaggaaaaagaatgatgaactagagaaacagaaacaacttgaagccgactctgttaaggaggatgccgattcaaagctggcaacagtgttagtcaggttagatgcactacaaaactggaagaacttaaaaaggttggtggccctatcgagttacgctacaaagaatccaaagaaagagggcccgctcttgaacaactggcgtactgcatccggagtttcagggaggctgcattgtctaatgaccaaaagtttgatcatatcgacatagcagagaaacaaaaggttgttaatgagtgctccgcattggagtcttggctaattgagaagaagcagcaacaaaatgctctgccaaaacatgctaatcctgccatccttgtttctgaccttaagaagaaggccgaagaacttgacagattctgcaaagcgatcatgactaaaccaaagccagcgccgaagctgcagaccccacctccatcggatgccccagcaccagagcctcaatcgccggagcagcacccaaacggtgccactaagctggtgacccaaccagtgagggaggtgctcaggagcagcctgcaggcgagcaaatggacaccgacaaacctgagggttcacccgatccttcctcggcataagcatattgctgatcgaaggaacttatatctccgtgatcgattgcaatcgcctgtgtcttagcacacagttgttttacatgtttgtgaggttatgtatgtattggaacatcaaatgttctgtagcgtttagtgtcgttgtcaatgaagttagctctcttgactggttaaaaa

SEQ ID NO: 3541 - DNA, 626 bp, Avena sativa
cgacggtaggtcatgaagagaaggtccctgagaacgctgatgtcatggaagagaagtcagatgccgctgaggagtcaaaagcggcagatgccgctgaggagtcgaaagcggcagatgcacagtctctgaacaaggatggtaaaagcccttcggaaaataacaaggaaccaattacaagggaggatttcaaagaatatttcgcaaaatttggcacagttcggtatgtggacttcagtaagggggacgattcagggtatcttaggtttgaggaatcgaaggcagcggaaaaggcccgtgcattggcagctctttcggatgaaggcggtttgattatgaagggccaccttgttactttggaacctgtgtctggacaagctgagaaggattattggagtgaaataaagggtggccaagggaagtataaagacaacaacagaagtaacaggggaggaagggactggaagaacaacagaggtggtggtggaaggcacttcggtggtgggaggcggggtcgccactctgactcctatgaaagggctagtaaagttcaaaaggtcgatgcgtctgcttagaggcttgatcggttagctccagcgggaaaggaggcatatatacctatgatatgt

SEQ ID NO: 3542 - DNA, 540 bp, Avena sativa
cctaactccatgggcactaggttctgggcaagttctgttctgataaatgccatcttccgtgctgtacctgttgcaccagagtcagtatggatagagggtgccaatctcttggagaaactacaggcctcagagattgtgaagcggttccaccagcaggcaacatcagtgtaccccttctccttcaagctatggcatgcttacttgacagcctgcaaggccagtggaagcaacacagagagcattgctgaagctgcgaggcaacgaggcattgagctgaatgtgatgccaccctagttttgctgcatcgatctgaagctcagggatttgtcaggtggagctgtagttagtgttgtgttttactggaagtgacatagatacatggaatcagtggagctggatataccaggttgaggctgtagtttagaatgttgtgtgtactgcaagtgacatagttacctggaagcgatggtggtggtgtggtgatgatgacgactgggtggttcttgttttagggcacagttttaggattcagattgtcgt

SEQ ID NO: 3543 - DNA, 645 bp, Avena sativa
ggcggagccttcttcgcggcaggaaacgccacaccttcagctgaagcaaatatccacagcgacccggaagcggcggacatcgtgttcacctgcggcgcggacatcgccgtggtcgggctgaacatcaccacgcaggtgagcttcacggtggccgatctggcggaactgaggaggtcggaggggaagcacgcgcagttcctgtgcgacatctgcaggttctacagcgactggcacctcaagtcgtacggcgaccccgccgtgttcctgcacgacccggtgagcttggcggcgctgctgcggccggagctgttcacgttccgggagggcgtggtgagggtggagacgcagggcatctgccgtgggcacacatccatggacatgggactcaagaagttcaacacggagaacgcgtggtcggggtacacgcccatctcggtggcctggacggtcgacaaggccatggtcgtcgccttcgtcaaggacctcctcaccgtttaagaaccaagggatcacatgatccgtcgtctcagcattggtttgatctgctgatatttgaaaatcaaatgatttgaaatgtaaaaattgatcgaattgtatgtatactccatccattggatgcactgcgagcatgaaggcacattgtac

SEQ ID NO: 3544 - DNA, 882 bp, Avena sativa
ctatgctgcatggtgccctttctccagcaattttcgaccaatatttgaagctctcagcactgtgttccctcagatacatcacctggctgttgaggaatcttctgcgatgcctagtttgttttcaagatatggtgtccgtgccttcccagccattcttctggtgaataagactacaatggttcgctacaggggtacaaaagatctgcagtctctgattgatttctataaagagaccacaggcctcaatccaattgcacatgttgatgttattcagaaagagagccctggaagcttggggccagtcatgacaggaggccggtctcttcgtaaaatggccaaagacgagcccttcatgtttctctcggtgcttttatcatcctcaaggtcgcggcacacttcgtccccacggtcatctcccgtctgagagccttcttgactgtccgtgttacaaacttgaacttaggaatacgtaggggatcaagccaacttatggaacgtgcatcgactgtgcttgatgttaagagactttggagcaagcttagactgagcagtaagacaagggaccttagaaaaggggcgagtaatgctcgagcctgggcttcgtcatttgcgtctgtctcactgggtgaaccgtcctcctcaaggcaagggtagcctttccggtctgtttgatagtctagctgctgatatatgatccaaaaatcatttgatcttgcttccccatcctgctatgtatgtgagttcacgcacgtggggaacctcacaggaatgtaaattttcagaccacatcttgttgtatagaggaatacattttgtgttgctgtttgcaatacctaatctttctgttaattaactcgagtaattctttgatgtatggtgaag

SEQ ID NO: 3545 - DNA, 800 bp, Avena sativa
aacagacttaccactagacaatggtgtccgagcgctgctgaggggttgcactaagcttcggaggtttgctctatacttgagaccaggggggctttcagatgtaggccttggctatattggacagcacagcggaactatccactacatgctcctgggtaacgttggggaaaccgacggtggattaatcagttttgcagcagggtgccggaagctgttgaagcttgaattgaggagctgttgcttcagtgagcgggctttggccctcgctatactacagatgccttctctgaggtatgtatgggtgcagggctacagagcttctcaaactgggcgcgacctcatggtcatggcaaggcccttctggaacatagaatttacacctcccagttctgagaacgcaggtcggctgatggaagatgggcagccttgcatagataggcatgcccaggtactcgcatactgctcacttactgggaggaggtcggactacccgcagtctgttgttcctttgcatcctgcgtcactgtaaatacactaagccggtgtcttcctgctatgtgttctagcccccctgcccttggcgggcaataaggatgtttgtgtgtggttattgtatggatctactagatagctagcagctatgtactggaataagcgtgtaagcgcacgctattttttgcctaggaagatgtatactaagtaatagtactgtgcaggtgcaactgtgatactactatgctttgttccccagatttgtaccattgaaagtataaacatgcctggatttcgcagcctaaaaa

SEQ ID NO: 3546 - DNA, 896 bp, Avena sativa
caatttattcgcaatcatcaactcaaactatcaagggttctccacacgatctcgagacaaacatgaccagataggtttccatattgtggaggcatacgctgcttagatcttgtcaagggcctgaccaatgtcatttttcaggtcctcaaaatcctccactccaacgctgaacctgatcaggttgtccttgatcccatagatgtccctctgctccttcgaatcccagtaggacatgatggcaggctgatcaattatgctctcacaacccccaaatgaaggggcatggtagggtatcttcacagaatcaatgaatttcctagtagaatcgaagtctccattaacctcaaaactaacaacaccaccaaagccagtcatttgactcttggcaatgtgatgttctgggtgacttggcaagccaggatagtatacacgtgcaatctttggatgttcctctaaaaactgggccatccgtagtgcagtattattctggcattgaacacgaagatgcagtgttttcatgccccggaggatcaggtaggaagcattcggatttagaacaccaccaactacatggtgataaatgcggacttcggaaactagctcgtctctgccactgatgcagcctccaataacatcattatgcccagcaatgtactttgttgcagaatgaacaactatatcagcacctaacgtcagtgccttctgattgataggggaggcaaaggtgctatcaatgcaaagcaatgctcccttgctatggcacatcttggagacaagctcaatgtcaatgcatctgagaaatggattagtaggagtctcagtgaagaatagagatacattgttattatcaagtgcgtcttgcagagcatccaagtcagcaggtctcataacagtca

SEQ ID NO: 3547 - DNA, 814 bp, Avena sativa
gatcggacggaaaagtgaagaacagccttgttgtaaggcatcgccctggaatcactatcgactagttgatcgagatgccgggcatgctgggcagctggcttcaacaaaagacgatgttcctggtaaatgtgcttcttttacctgctttggctgcacacctgccaggcttgagggtgcatctcctccgaaattgagcacaagtaacacgcctccgaaattttcaagttccacaaatggaaaccgaacaaccagtggttccatcaatggaagtggaaaaaaaggttgtctgaagagtaactcgaaaagggactcttctgaccgtggttctattgtaagtgattgtgaggaaccacgggagtctctggaagaggtgcaaactttgagaactggaatggagcggagaaaagttcactggactgacacgtgtgggaaggaacttttcgagatcagagaattcgaaacaagcgatgaaggcctgtcagacgatgaaggggagaacgatggtttcaggaaatgcgagtgcgtgattcagtagcttcgcatggcgccttgaagctccctggttgatcagatttgatagacacagggttttatgtgtacctggtttctactttaggcttacaattttgtccaggttgacctctctctttgttgggttcttttgtttccttctctttgttgggtttggcctgcacatgtaccatatgtaacttgccatttttctttccccactgtgacccgctgatgttggtttcatgttttggttttgtttcgctgttgatatatagactggtggatgaaaggtgtagtgatc

SEQ ID NO: 3548 - DNA, 932 bp, Avena sativa
actatcaactgaaatagttacgaacatggcaacaaacaaaacattttataccgattccagtggccgtgatttcatcaaaagggtacgggattatcgatcagactgggagctcgaagtgcaccaacctattgctggaaactattatcctgttaatcttggcatttatgtggaagatggcagcaaagagttgtctgtacttgtagacaggtctgttggaggttccagcataaaggatggacaaatagagctaatgcttcacaggaggctagtcaatgatgatggacgtggtgttgacgaagcattagatgaacctgtctgtgtcgatactcgttgtgaaggactagttattcaaggcaaatactatatgaaaattgacgcactaggagaaggagctaggtggcgtcgtacattcggtcaggaaatatactcccctcttcttctagctttctccgagcaggatggaggtaactgggtaaattcacatgttccaaaattctcatcaatggatccaacttacagcttacctgataatgttgcattgattacccttcaggagcttgaagatgcaagtgttcttcttcggttggcccacctatatgaggctggagagcataaggatctttctgctctggcgagtgtagacctcaaaagagtattcccagataaaaagattggcaagatcgttgaaacaaacctatcagcgaatcaagaacgcgctgacatggagaagaagagactgaaatggaaggtggaagggcctaccccccacgaaaatgtggtccgtggaggccctatcgatccttccaagctcgtcgtccagcttgggcccatggagatccgcacatttatyatcagcttcgaccaccaatgaaactaaaaaaagtccagttgtggaggagcccggctgaattttcattaagaatggtgagaca

SEQ ID NO: 3549 - DNA, 1044 bp, Avena sativa
caagaacgcacacacgcgaccggcactactgcctacacagatctcgcgtccccttcttacccctcggcaatggcgaccacggcggctgatgccaccgccactgccaccgccacggtggccaaggagcagaccgccgccagcgctggcggcgaccaggtcacccgccactccgaggtcggacacaagagcctgctccggagcgacgacctctaccagtacatcctggagaccaccgtgtacccgcgcgagcacgagtgcatgaagcagctccgcgaggacaccgcaaaccacccatggaacctgatgaccacgtcggcggacgagggccagttcctcaacctgctcctcaagctcatcggcgccaagaagaccatggagatcggcgtatacaccggatactcgctcctcgccaccgcgctcgccatccccgacgacggaaccatcttggccatggacatcaaccgcgacaactacgagaccatcgggctgccgtgcatcgagaaggccggcgtggcgcacaagatcgacttccgcgagggccccgcgctgcccgtcctcgacgcgctgctcgaggacgaggccaaccacggcaccttcgacttcgtcttcgtcgacgccgacaaggacaactacctcaactaccaccagcgcctcatgaagctcgtcagggtcggcggactcctagggtacgacaacaccctctggaacggctccgtcgtgctccccgccgacgcgcccatgcgcaagtacatccgctactaccgcgacttcgtcctcgagctcaacaaggccctcgccgccgacgaccgcgtcgagatctgccagctccctgtcggcgacggaatcacactctgccgccgcgccaagtgaacggggcagcacccgtctctcatccgtatccgtgccgatcgatgcgccgcccctgtctctccatagaagcggacaagaattaattttccccattttggctttctcgagagtatttttctactatatcttcttggaaattgtcctcttatgtacctataagatttggaatatcat

SEQ ID NO: 3550 - DNA, 949 bp, Avena sativa
tatatcaagaagaactagttttatgctataagtctgaaataaaaacgaggaatagtatcatccctgaaacaagagggaaatgaaaaagtggcgtgcgaccggcttagaaaatgaaaagtgaaacctttgactgccgcctggggcatgcgaccggcttaggaaatacagctgcaacaatgcaacagaaccaaaactcatcgtttcaccaattggtacaagttcattgtgcataattcaacaaactagtgtaatctaggcgcacagaatcaacaatagtgttacaacaatacactgatccgaactagctagctacaacaaagccacaggctgagaaaggcagcaacacatgtgagttgcaaaacactccaagaagaattgagactcatctcaccttactggaccagatattcaggaggaagctgcgcatgtattgacaccatccttgcaatcacgtgtaaggtcgttgaatgtctccaacttcctcttccccctgaggaacacctcagtgtcgactgcaaccctcatgtacccatcgaattccactggattgccattgtttagctcctttgtttcagcataccattcactattttcatcccaaagatccttgaagtcatccaggaagcgtgttttgtacttgttgttgagtgggtcgaagaatgatttgtcaggctcatcggtggcaatgtacaaataccggccagcaccaaccttgtcattcagtgtcacaaggagattttccggtgaggtgtctgcatcaaggtttggccacatctttgtgttttgggccttgtctcctctcacgacgtgcatcgaatcaaaatcccaactcattcgagaggcaatggcagacacaatctccatcaagcgacgtgatttccacagcaaatgccatggccgcttaatcatggcctctgtctcaccctcgcacacacgtgaccagtagtta

SEQ ID NO: 3551 - DNA, 737 bp, Avena sativa
aacagccttattttaaggaaggctggtgcacaaatatctgaccctgcaatcactactttcaacggtcaagaggtggaggtttggccacgcataacctggagcccgaggtggggcctgacattcaaggacgtcacgcaaaaggtgcacggaaactcttcagtatcccagagatcagttttggttatcaatggccagaacatcgtcatcgacggtctttccttggacggcgctcttattgtcaactccgttgatgaagcagaggtcaaagtcaccggtcgcgtagaaaacaaaggctggactatccggcctgtcgatcacaaggacacctcggagaaggaagagaccaggatccgcgggttcaagttcgagaaggtggagcagctggaggtgaattacaccgagccagggaagcattgcttgagcccgtgaacaagcatggccggttgacacatggtccctgccagtttcagtttgcagctgggaagtaccctatctttcctcccaaattgggcggccttcattgtgtaataatagcaataagctgaaaccattctttgaacttgctagagggtaataaggagcaaagctgcttcaccaaccagtcagtcacaatgtaaatttcttgtaactctttattttagtgtccaacagtagtctttgtacagtaaaagagttaacagtacttgcatatggttggcatctgagaccgatttataattcgtgtactcttgagactt

SEQ ID NO: 3552 - DNA, 816 bp, Avena sativa
gacctgatatttccacaccatgagaatgaaattgctcaaagccgtgcagcttgttgtgacagcagcataaattactgggtgcacaatggttttgtcaatgtaaatggccagaaaatgtcgaaatcgcttggtaactttatcactatacgcaaggttatagagctgtaccacccacttgcgctcaggatgtttttacttggtactcactacagggccccgatcaactacacagtagagcagcttaatgttgcttcagatagattgtactacacttatcagacattacgggattgtgaagtgagtacccagcaggaacagagcagtagtggagattcattacctgctactactacactttgcgttggaaagcttcacaaagaatttgagacttcaatgtctgatgatctacatgctacagtggcgctagctgccatttctgagccgttgaaagttatgaatgatttgctgcatactcgtaagggaaagaagcaggagaaacgattggaatcgctttctgccctggaagagaagataaggacggtcctctctgttctagggttgatgccttcaagttatcatgaggccctgcagcagctgcgggagaaggcgctgcggcgagtgtccgtcaccgaggagcaagtgctgcagaagatcgaggagcggacctcggcgaggaaggcgaagcagtacgcgaggtcggacgagatcgagggacgagctggctgccctcgggatcgccctcatggacggacccgacggcaccgcctggaggccgtccgtgccgtcctccgagcaggcggtggtcgccagcagcac

SEQ ID NO: 3553 - DNA, 804 bp, Avena sativa
atgggtggaacagatctcaaccatccgttgaacaagctgggaaatgggaatatactggtgtggaaacggaaggcggagcagtacctagcggactctggtttaccatatacgattataagggctggaggactacaagacaaagatggtggtgtgcgtgagttgatcattggcaaggatgatgagatattgaagactgaaacaaaaactattgccagggcagatgttgcagaagtttgcatacaggccttgctatttgaagaagcaaggttcaaggcatttgatctggcatcaaaacctgaaggtgaaggtacaccgacgacagattttaagtctgtttttgcacagattgctactcgcttctgagaagacaagagcattcagggtgaagaaatgagacagttttctcttaggcgatatgggatgtgtattggttcagtgcaggacgtagacatggcagcatggagagcaagtagtgaaagtaggcaaagaaatttccaaaagaaaaggtagggaagcacacattaccttaagtggcgagcatcaggttcgggcaccaaggctttggaggagaggctgaagagggtgcgcttgacatgtcaaggtgctgttgaaaaaactgagcagtgaggctgtgtgtggcgtcgatgtaaacgagagttgtatgttgttgttttcttctcaatatttttccatggtgattgtgacagggaataatctaggtatttcttggtcagtatcaagactgtcgattacatctaggcttggctgtgcatcagaagtgaaaaacaagtgtttaattaggaa

SEQ ID NO: 3554 - DNA, 732 bp, Avena sativa
ctcataagtaacgataggtacattgtgtattgtacattcaggcgcgcatggctggactaaattagctaggggagtgtgctcgcctccgagcacctctttatttgatcgacatcaataagtcgtagccgagagtatatatccatgtacaggtgaaggaagcgtggcggcggcgaggtcgatgtcgacgacggcggggtacctggcgcggcgcgcggcccagaaggagcgggtgcggctgctctaccgccgagctctcaaggacaccctcaactgggccgtccaccgccacctcttctaccaggacgcatcggatctcagggacaagttcgaggccaacagaaatgtggagaacctcgacgtgatcgataggctcatcgacgacgcggaagcgcagcagaggaacttccagcacccggatccttacattgttccatgggctcctggtggtactaaattcacaaggaaccctcctccacctgaagggattgagattatctacaactatggaaaagaagaccattgaacaagaaaccctgcatttgtgagcagaacccggtacccgctgagtgcaaagaacctactttccattttccatgaaaccgagctgctgtatgattatgaagaacaaaataaaattactcgcctctttccatgtgtttcttttatcatggatgttgtatgacaaactattttgtgctcaccagctagttcatcgttacggttacactaaaa

SEQ ID NO: 3555 - DNA, 824 bp, Avena sativa
aggtctcgaagatggttgaatgaccgcttgctgattgagctcgtccctcggcttcatgttgaagaaatcaaaggcctctttgccctcctccatttggtgaggaagcaccctgtcagcattttgcaggacaagtgttggtgagtgggatgccttcaggagcattgacatggacgttgaggtaagattgatgcaacgcatgaagcaatcaccagagaaacagaagaatcgtttgaatgaagatgagttaattgtgctgaatgcttggcgtcgtatagattgccaaacaagagatgctatgaagagaaacttcctacctgaactgcttgaaatatatgaagaacgagttagggccttcattgaagatagtgttgataaagatgtgcttgtgctgaatgtccaggacccattccagaggttgcttcttcacggtgtgtgtgagttctataatgtaacatccatgaccaccgacacgagaaaagatggcaagccgtggaagaccacaacgatcaagaagcgttccggcacaggtgttgccccaaggatcacattggttgggttcctgagagcaaagaagaacgggtcacatgtggatgcgtgaggaccagacccccctcccattcctcggccagtacactggccgtgatcatgttcctcaagaaggcaaacttgactctttaggttattatctttagaatgtacacaaatgtaaattaccatttaccatgtttcaacttacctttaaaagatgacaaggcatgcaaatgacgagtcaacttgctaaacgaagcacctattttgcgttctcgttacatcttaccgtcagc

SEQ ID NO: 3556 - DNA, 835 bp, Avena sativa
aaattcgttggacaaagttgaatctgagattcgcgatattgtggcggcaaccaagaagagccctatgttttctcaattcttgaaggactcttcagtgccaaaagaaaccagggtgaaggctgtaactgaaatattcgctgaagctgggttttctgacgtcacaaagaatttcttgttggtactggcagccaatggaagactgaaatttgttgagcgcatttcggagaggtttgttgacttgaccatggcacataagggggaggtgaaagttgttgtcaggactgttgttccactccctgagaaggaggagaaagaacttaaggagaccttgcaagatatccttgggaaagacaaaactatcttggttgaacagaagattgactacagtattatgggaggactagtgattgaatttgggcagagggtgtttgatatgtcgatcaagaccagggcgaagcaaatggaggcgttcttgaggcaacccattcatgtgtaactgccttttggatcgaaagcaacaccagggtgcagtggctgcgctgctgagggttccccacatgtctacttcttcgacgtgttcctgaaataaaagctttcatctacgagagaacaacactctgttttattttgtcttggggggctagaagcccgctgaagaatcttaatttccttttttctaccaaaaaagcattggataaaaacatgaagagaggtcatggaaagtttttaattcgagtgcttgtaattttctgttcaaatggtctcttttcctcgtgttcagtgggggtatgaaataatttcatgacaatagattccacctgcattttacccaaaa

SEQ ID NO: 3557 - DNA, 559 bp, Avena sativa
agcatttggaaatgtgtgcagcaaggagcatcccgaattattgtcagtccgtacttcctttcacctggacggcactggaagcaagatatcccttccttagcagcagaagcctctaaagagcactcgaacgtggcctacattgtcactgctcctcttggattgcatgagcttatggtggacattatgaacgaccgcatcaagtactgcctgaagcacgtcgctggtgatgccgatgagtgtacagtatgtgctgggactggaaagtgccacctctactcttgattttggcgatctcattttttggctaaccgcagcacggatggctgcgaccaaacactccccatatttttcgagagttcaactgtgttccctgtattgtatctgccatgtaaccagaaagcgatgtaacgattatctcagcggtcttgttcagcctgttgttctagaacgtgtccagtagtcgtcactaacaggagagtataaatttgttgctatgtactccctcagttccaaaaataagtgtcgtgtgtgcagcatgaacaaattgtgaaccaaaaaa

SEQ ID NO: 3558 - DNA, 764 bp, Avena sativa
  modified_base (725)..(725): a, c, t, g, unknown or other
aaatgctcaagctatgaggatttacaggagtacattcgtacccgagggcgtgaagcatacttccaaaaagctgaaattgtggagaagcaagctccaggcttgatgaaggaagccgagcgattcctaattctaagcaatatcgataagctttggaaagaacacttgcaagctttaaagtttgtgcaacaagctgttggattgaggggctatgctcaacgagatccccttattgaatataaactcgagggatataatcttttcttggatatgatggctcaaattcggagaaatgttatttattctgtgtatcagttcaaaccaatgatgaaaaagcaagaagaggaaaattccgaaaagaaagatccaaaaaagaatgtagagaaggctgccaagaaacatggtgcagcccaagctgcatcctaagtttgatgtgaatttttttgtctcttacttgtagctacggtttggtggtgttatgaatccttgggtgtataggtctattttacactatacgatggttgcagagtaggggaacaacagtacgaacgtgtctcgatagcctcatgctgggacacagctgcgagatgtgactttttccttggattgtcagatccaatcgttagttaccttcctgcatccaacatctcaagtatgggtagcataagttttaatcgttatacaaagagtggagcttaaaagttaaaaaaaaaaaaaaaaaaaaaaanaaaaaaaaaaaaaggacagaagttatggacgccattggt

SEQ ID NO: 3559 - DNA, 943 bp, Avena sativa
tctatgttactggtttgcctgatgacgtcacagccgaggagattgtagaggtattttccaagtgtggaattataaaggaggatctagagacaaggaagccccgagtgaaaatctatactgataaggaaacaggcagaaaaaagggcgatgcactagtgacctatctcaaggaaccgtctgtgccattagcaattcaactattggatgggacatcattccgtcctggtgataagatcctgatgtctgtaagcgtggcagaatttcagcagaaaggtgaggtattcttggctaagaaggcagataagcaaaagaaaaagaaaggcaagaaggttgaagataagatgttgggatggggtggacacgatgataagaaggtgatgattcctactcaggtgattttgcggaatatgttcactcctgctgaattgagagaggatgaaacacttattcccacccttgaggaagatgttaaagaagaatgcgttaagtttggtccggttgacaatgtcaaggtctgtgaaaatcatccacaaggagttatattggtgaaattcaaagaccggaaagatggtctgaaatgcatcgagacgatggatgggagatggtttggtgggaggcaggtagaagcgagcgaagatgacggctccatcaaacatgctctgatccgtgactacgacgccgaggtgtcgaggctggatcgctttggagaagagttagaaggatccacataggaagtctcgatcatcctgcagtttaggactgttttcgagaagatcatatgttttctcgattgatcttaccaagactgcttctgggttagctttaagcagcggagccaaaaattgttaccagtcgtcagctaaacgttttgtcttaatgtacattattacgggcattgagccattttaccgtactaacatgtacaacttcgtactctacaaaa

SEQ ID NO: 3560 - DNA, 635 bp, Avena sativa
ggaaagaagtacgatttggaggatctacggaagacaccaaacccgttctacatcgagtcagggaagaaagcagacaatgggtacagttttgtgaaaacaccatcgccagcacctggcgtggatgagtccccattcatgacttggggtgagattgatggaacgccactgaggttggatcctgacgagacaccagggggtagtgagaggtcgcatttcaagatcccacctccacctgttcgagatgtgaaggcacacgtgctgtccagggatgctgcaaagaggataaaggcacggacaaatatgttccacaagccacccctaccatcccctgtgaggggaggcagtgcaagccccaggacactgtctcctgcagcacagaagtttgtgaggaatgccatcgcaaagtctacacgaaccatcgatgagtccctccgtgcaagttacagagggtcaaccccacctgcaagcactccaaagacaaggttttcaacagacccaggcttgggatcacgatctccttcggcgaggaagggttccacgcctccttggtgattcagtaatcctcatggtgtcatatgtatccgattcataaagtggataactgttcttgcctgtattgtatcaaattatatagc

SEQ ID NO: 3561 - DNA, 899 bp, Avena sativa
gattccaagaaccgaagttcctatatcactggatgcatcaaatgcaattgctgtaaatgagttggtgatccctccacctcgattctctgcctctatgccacctactgcaccgagagttatggagaatggtaaggagactggtggaaagagcttcaacacaaaacctggtgataatgtgcctcagaatggctcttcaaagcctgaaagagaaccagggaattcgtcaaacaaaagatcaggtaaattagaggacaatgctcacaaggatggatgccctgaagcatcttatgagtactgtgtgaaggttgtcaggtggttggagtgtgagggctatattgagaccaacttccgagtgaagtttttgacgtggtacagcctgcgtgctaccccgcacgagaggaagatagtcagtgtctatgttaatgcacttatcgaggatcctgtaagcctttctggccagctctctgatactttctcagatgcaatctacagcaagaggccaccttcagtcccatctggtttctgcatggacctctggcattaagcgacgggaagctatatactgttctccttccgagggtacggagcgtatcttggtcccattctttcgtagcagagcgttgcattgattcttcattggagatttcattgaagtagtagttaacttatacaatgtgtcacattgtaaacttgttcgctgtcaccgtaggagttttaatttatctcgcaaacttatttcatgtcttgtttactttctagtctgtcgtttacattcctgtcaacccacaggagcagctccattaggccaggttagtgcatggaacctgaaagcttgtattgccagctgttgcatatttcttatgttgccttgtcatgtcagttagatgatgcgctgtatc

SEQ ID NO: 3562 - DNA, 766 bp, Avena sativa
atagccgtgatggaaaagttatagcaccaacctagcttacacccctcctgagtttctaagaaccggcagagttattgctagaagaagtgtgatatatagctacggaactgttttgctggatcttttgagcgggaaacacattcctcccagtcatgcacttgatttgataagaggaaagaatatactgttgctgatggattcctccttagaagggcaatatgctaatgaagatgcttcaaaattagttgatctttcatcaaaatgtttgcagtttgaagctagggacagacccaacataaagtatctattgtcttctgttggccctcttcagaagcaaaaagaggtggcgtcacatgtgttaatgggcattacaaaaaccacgtcagtcttaccaactattctgtctccgcttgggaaggcctgtgccagtatggaccttacagcggtacatgatatattgcttaaaacaggttacaaagacgatgaaggtgcagaaaatgagttgtcctttcaagaatggactcagcaagttcaagagatgctgaacacaaagaagtttggtgatatcgcatttagagataaggatttcaagactgcaatagactactattcgaagctagttggcatgatgacagtgccttcagctacagtttttgccaggcgaagtttttcctacctgatgaatgggcaatcagagcttgctctccgagatgcaatgcaggcgcaggtatgcatgcccgaatggcctaccgccttctacctccaa

SEQ ID NO: 3563 - DNA, 648 bp, Avena sativa
gtctgaaagagacgcagcatttggtctgaaaacatctgtgggtcttggagcttatctaggtgtgatggggtctcgacgagatgttatcacagccgtgtggagaacaggtcttgatggtgaatggtataagtgcatacggtgcttgcggcaaacttgtgcatttgcccaggctggtgccccgaacccggcaaatgaacgtgaggcatggtggatcagccggtggacccaagcttgtccaatgtgtggtgggtcatgggtgaaagttgtatgattgctgtctcatgtgacaccttgaccacgctgattcttccctgttagtagcttgctaggccaaatctgaaacagcattgttgtgacaattttgtctgaggccccagatctgttctttgcctgcaggcccaaagcatacagacaaggcttagctctaacagctgtgtaaaaatatagttgtattaggagagagatattgtgcgttcatcatgtgtacaaatgtatcacaatgtaggaaggaagctgttagatgggttatgcatactgcctgagtgcctgtgtttgttgtagctaaactagctggatatgggtatggtgatttcccctgatccttacggcactcgaagtctgtgtttgacaaacaaattatagtagaaa

SEQ ID NO: 3564 - DNA, 845 bp, Avena sativa
  modified_base (823)..(823): a, c, t, g, unknown or other
gccttcatcaccgccgccgccctcttcgagcctcgcgggttcggcacaaccggcggcaaggagatgggcatgaaggaggtcgccgccttcttcggccacgtcggcgccatgacctcctgtggattcggtgtcgccaccggtggtccactggcttggggtctttgctacaatcatgaaatgagcccaagccagagctattgcgacaacagcaatgaattataccgttgtgctgaaggagtcgagtactacggtcgaggcgcccttcctgtttactggaactacaactatggtatcgttggtaagggtataaagcaggatctgttgaaccacccagaattattggaacagaatgccaccctagcatttgaagcagcaatctggaggtggatgactccaatgaagtggaggcagccatcagctcatgatgtctttgttggcaactggaaaccaaccaagaaacacactttgtccaagaggtatcctggcttcggtgctaccatgaacatcttgtatggtgattccacctgcggtaaagggtacattgataatatgaatgtcattatatcccactatcaacattatcttgatttgatgggagttggtgttcagcactctggagataacttggattgtgctgaccaagtgccattcaacccgccgtcaaagaatcccgactcataagcacgctgcatgtcagatccatgtatattttacatttaaggggaagccatcttgcttcccaagctatagaaatcttgtatgcggatctataaggtattattttgtagctctgaggagtactattgcgtccgtgaagttttgngacatatttatgtaagcgagta

SEQ ID NO: 3565 - DNA, 798 bp, Avena sativa
aagcctgcgaggctgcgagtattacagattgtcataaagtaagttttactatacatcttgtaagctgttcaattagcaatctgcagcgtgtagtagcatgataattacattggtagtgtttagttttaatttaaaatttgaaggtttgaatattagaagttccactatagatatttcacattctgacatgattttcacttctatcaggataacttcgctgccttactccataggagattgtgaatctctcattgaggttaacttatcatcaaatcttttagctgagctaccagaggcttttgggaaccttcacaatctcaaggctttgcacataaggaataatggtattaattccctaccgtcaactttattcaagaagtgctggcggctcaccacacttgatctccatggaactggaatcacaaatgatattcttcgacaggtcgagggctgggaggagtttgatgaacgtaggcggcagaagtaccagaagcagttggatttccgtgtgggatcgtcaggcgttttcgatgaaggtgcggatgatgacgacaggcgttcataaatgcttctcttgccatgtgcagggttttctgcttcttgaacagaccaggaacttcttgaacattctggatgcatacttgtttacttctcttttttcattacacatgaagaccaagagatggaaaagggtggtgactctttaatcacttgtcttttttaattacacttgaagaccaagtattgtatcttctaaaagttattgaaaaaacgatctgtcaggtggattaacaaaaa

SEQ ID NO: 3566 - DNA, 860 bp, Avena sativa
tccgagtggataccttggcgaagacccatgtggaattcccaataatcttatgccctatgttcagcaagttgcagttggcaggaggccagctctgacaatattggggaatgactatgcaacaatagatggaactggggttcgagattacatccatgtcgttgaccttgctgatggacacatcgctgcattgcagaagcttttcggaaattctagcataggatgtgaagcatacaatcttggaactggaaaaggaacatcagtgttggagatagttcatgcctttgagaaggcttctgggaagaaaattcctctgatcattggcccaagacgccctggcgacgcagagattttgttttcctccactgccaaagcagagagggacctgaactggaaagcgaaatatggcatcgacgagatgtgtagggaccagtggaactgggctagcaagaatcctaacggatacggatcagctgactccatcaagcaaaacggccaccgcggatatggatcagctgacccctgcaaacagaacggccaatatggatcaacggagtctgtcaaacacaatggcaacggacacctccactaaacagtgtcagttggcctgtggctctccttgtatcagttggcctgtggctctccttgtatatgcgatgtatcacagagattatcacctgataccgatgtggatcaatggatttgaaggccatacagatcgacacggtgcttagataatattcttctaccatagtattaataccccgtatcattattggctgaagaattccacttgtgggtagaatttttcctacttatgcatcagtgttttcttcttccaaatctgttgtaggatatggtca

SEQ ID NO: 3567 - DNA, 823 bp, Avena sativa
gagcggacgcggccggctggcgggggtacgggcttgccgtctacgtcgacgtcgaccaactcgagcctagctccggcgctggacggagctcctccgtcagtaccttcttgaagttgaaccatatgttccaaaggacagtaagggcaatctcctcgagaggcaaacctttgatccaaaaaaagttgcaaaagtgtttagacattacgttagggaaacagaaaacctactgatagcaaatctgattttcatccctcacttcaagcaccaccatcacactatatatgtgatgaacaaatacactggtacattggatatttttgactctagaagatatgcccagttgaaacataccaccaggaacaagcaccatgaggatcgtgttgcaattattacaaggatggttgccgtaatgaaggaggtttgcggtgaagctgctttcaataagcataatgttgtcaactgggagatggctgcagataggtgcaactttacgaagatgccggagcaaggggctaatgaatgtggtttttatgctctgaaggttccacgcagttttggtggtatcaaatttgtcgagaagatcgctaagaaagatcggcgagttgaggattggaaggctgagtacatgtaccaattgttgctccatcccaagaacacaatatcgccttcacagtggccaactctgctgcacgatttgtgcctgctccttagtcttgcctcccaaacgacccagccatcattgtgaagcctgaaacctgatttgatatttctgagtaggaagaatttgtactcattcatagattcatattggagaattattctt

SEQ ID NO: 3568 - DNA, 727 bp, Avena sativa
tgaaactgagaagaatctgccttgcaagctctgctttgtatgaatctctcatcgtgtctctccctctgttttccttccctttacctgaagttgtcttctccaattgtcctgctttctctgcggcatgaatatcgactttcacttcatctgaggtctgtgatgatgccaactgctgctctgctgaatcagttacatgttccccgttagccgaatcagtttgttgcgcagtttttccaggcacaaactcggcagcatggggattcatggctggaggggaggtgctacccctcagaatagtgctctggctctgtgtataaccctgcttcctttggaaagaatgcccagtacgatagtacaaggtggaccgaggaccacgaggtaccctagtatcaacagcatgaggaagaatctccattgcttgacttgggattggatgaagaacaacactagcatcatagattgctactgtgctgtaaggatgggacactgataagagtgatccaggattgaatggaggtgctgaagctgaaagtttgcttccacttgttttcttgtgcggagatgtgcttccgtcactattgctgtcagaagctttctctgaatgactgcctccctctggctgacttgagacaatctctttgctgcactcatcactcgacttctcgacttcatctgtaaccttcctatcttcttcctcagacgagggtgttacatcagtatcttgttc

SEQ ID NO: 3569 - DNA, 884 bp, Avena sativa
gtagagagggagatgatgaccaaggaggccttgaggacgaacagggtagagtcacacacgtggggttgatggccatagctgaaggctgccctgatttgcagtactgggcggtacatgtgtctgacattgcaaatgcagctctagaagccatcggtacgcacagcaaaaacctgaatgacttccgacttgtcctgcttgatagagaactgcttataaccgatttgccccttgacaacggggttcgtgctttgctgagcggatgcaccaaactccggaggtttgcattttatgtgagacctggagctctgtcagatgccggcctttcctatgttggtgaattcagcaagaccgtccgctacatgttgcttggaaatgttgggacttctgataatggactgctggcactcgtaagaggatgcccaagcttgcagaaattggagctaaggagttgctgcttcagtgaacgtgcaattgccgttgctgcgttacagctcaagtcactcagatatctatgggtgcagggatacagggcatctcgtactggtagcgatctcatggcaatggtacgcccctactggaacattgagttcattgcaccaggtcaaggtgatactcaatcagagggccaggcccagtttctggcatactactctctggctggggctaggacagatcgccctccgtcaattattcccctccatccaccagttcgaatctaaaaggtcatccagttcgagtgtacataaatgtttgttgccaggctgtgaaacccatgatgggataataggatgttagaaatgtccgcaaaactggcaggtcatattatatgctctacaacggtgatatttccacggcacaggggccaattacagaactgaaagctc

SEQ ID NO: 3570 - DNA, 595 bp, Avena sativa
gtgccatgtatggacgtcaaagaggagaattgctaaaaacaacaaactgaattcaaacattgagaaacacaaaaactacggaaatcgcccttttctatcatcaaacaacttcacagtgcaactataaccatcaaactgaaactacgccaccagccaatacaacatttccaaaagttacaaaccaagaaatatccatagcatattctgtatatgctgcctattgttttcatcatcgcacaaatctgcaggaactttccacctgtttctgtcggtcacctaggtctgcaggtaacttcacacagtggcgcatgttgctccaacaataccctgggagcagaactccaccaggaagaacctcctgtcatttctcgtcttctgcttaatcttctttcttctctttcttcggcacaggcttttggtacatcattatctgactcaagattgtaccgtttgtcacgatgccaatggcagagcccataagcacacttaacggagtcttctcctggatgctggtaaaaactctaacaagggaaccagcaaagttcattaaacaagtcaggaagctcagctcgccagtgctcttattcgtgaaatt

SEQ ID NO: 3571 - DNA, 724 bp, Avena sativa
ctccatggagccagcagtagcaacacaagatccatccatggacactgtaatgctgcaacctgatgaaggagctggaagaatggaacatgagacgaccagtgacactccagttctgcagcctgatggcgaaactacaaaagtagaacaagagtcacccactgacactccaatgctgcaagctcatgaggaagctagaagggttcaacaggagccacccagtgatacgccgatggttctacataatgaggaagctagaagagttaaacaggagccacccagtgatactccgatggttgtacataatgaggaagctagaagtgtaaagcaggatccattcgatgacactgcaatgctgcaagctaatgaggaagctagaagtgttgaacaggagccacccaatgatactccgatggttctgcataatgaggaagctacaagagttgaacaggagccgcccagtgatactccgatggttctgcataatgaggaagctagtagtgtaaagcaggagccattcaatgacagtgcaatgcctcaaccccatgtggaagatagaagtgtggaaccggagccacccaaagatgctgcagtggtgcaacctaatgaggaaactagaagtgtaaaggaggagccacccattgacactgcagtgcctctgcctaatgaggtagctaaaacaagcgtgatacatgcttctccgagcgactccacaatagagcaacct

SEQ ID NO: 3572 - DNA, 643 bp, Avena sativa
gcatgctggtgggcttggtatcaaccttacttctgctaatacttctgtatgacagtgactggcacaccttctcttcactcttgaagcaaaagtcactcaaggctagtccgccaaggcctaccatgggcaggtttcaatgagggacgtggatcctgcatttcaaggagctggtcaaaaggacggactagaaatatggcagattgaaaagttgcaagcggttcctgttcctagagaatcacatgacatctgcccttaaaaatgcttctttccagcaagatatccattattggcttggtaaagataccagtcaggatgaggctggtacagctgcaatcaagactgtggagctggatgctgcgcttggtggacgtgctgttcaataccgtgaagtacagggaaatgagactgagaaatttctttcatactttaaaccatgtattataccagaggaaggtggagttgcatctggttttaggcacgctgaagtcaatgcgcgggagcatgtaacacgcttattgtctgcagaggaaagtatacagtccatgtcaaagaggtccttttgcacgatcatcactcaaccatgaagacatattcattttagataccgagtccaagattttccaattcaatggatcgaattcta

SEQ ID NO: 3573 - DNA, 952 bp, Avena sativa
gaacttggccactccgagtcaaagtgctttaccaggagtgtggaggtcattcacaagaatatagagcacggtgcagaaggctgctcgtctactgccaagagagatgttaagagtcaaaatggtaggccgtcaggcttcatggtgcgccagctaggtaaagtattgcggaaggcatgggctgaggaggatggctgccccgatgagttttgcaaagacgagatcgaagattcatgcgaccagagtgattcactaccagacaaggatcaagttgcacatgtttcacgcaaactcaatcttaatgaaaactcagtcccagatctaaacgctgaggtagtcatgccaacagagtgcccccggaatgagaatgggtgtagttcaggaaagaatggtttgagagcatcaaatggttgtggtgattttgcgacctgcgccgaggggcatgtcggggaggcacctgctatggaatcccgatcacaaagtcggaagcagacatcagacttagaacaggaaacttgtgcagaggacggcaatttggtcactggatcacagaggcacttctcccgaaggttaggtcagctagatgataactatgagtactgtgtgaagattattcgttggctggaatgttctggccacatccagaaggattttagaatgagattcctaacctggttcagcctgagatcgacagaacaggagcgcagggttgtgttcacctttatacgcaccctccttgacgagcccagtagtttggcagggcagctcctggattcctttgaagaaattgttgccagtaaaagggcaagaattggtggtttctgcactaagctgtggcactaatctggataggcaaaaactaaagtcaccagtatagtatccaatattcttacacggagaaacataacacttatttctgtgctaagccatgacactaatctggctaggaatcgct

SEQ ID NO: 3574 - DNA, 541 bp, Avena sativa
atgcagtagagatcaccctgaagaacaaaaaaaaaaattgtatgtagcatactgctgcaagccgccccacctcagtcgccgtaatccgtgctgccgctgcacgagctgctgctgttcgacgacggacccctgaggtggcccggcacgccatccatgctcttctcgcggaagaacctctccctctcggcgtgcttggcaggcggcggcgggatcaagacaacagatgggtcgggtctcgcctcctggtggtctggtgagcggatgttcagcgcgctgggtttcttgtcagggtgaggtggctggatggtgagcgggcggcgcagcttgtcctcgggtatggatcgaaacgatggcacagactcgtctaggtagtcttgagataaagccttgcccttccgcagtctccgataaagactctccgcgtcttcttcctcgttgtcttcattgagatttagatggtactgtcgtcgtagttgggtgaactgaaagcagtccatcatgacgtacaagaaccttctgcagctcttcattcagctctatg

SEQ ID NO: 3575 - DNA, 954 bp, Avena sativa
agaaaacattgcaaccatgttagagaaatagtactacatagtggttggttgctgaaccatgatgtttaccttctcatgctatatgcgcaagctctaagtcatgactcatgtttgggtgaaacgtagccttttcactttttgtccgctgggaaaatgtatatgcgtgtgctctgttctttggcctgtctcagcaaattctatttatgaatccaccatttttgcaggtgatacatctatcacgaatgatcatggcacatgatatgattgcccggcttgggttgtgtttgtaagttgaagatttgcacaaactgatgttaggaaaggtagttgcctggaggaggtgctattgctgtaccaaggaaattttgtttggagttgcactttggaaatcctatggaggacagggttggtcagagattgatgcttgggaaagcctaggcatagaagtgatatggaagatcatgtaggacaaaggtgataatattaatgatgtaaactaccaattctgtgatgtggttcgaggccatttacatagttgcatagcattgctggaggggtattctagcgacgcattgtgcctggtagagatcacatattgctactactaactcgcttgatgaactgatgaactagctttcatgcattgttgtttagtatgaggatgtgctgctattttccatagcgagggacgcactccatgacagcctgccatccatacaaatggaaaggcttgctatggagctagtcaggctgtcgtgcgtcgatgagtcggacctgatcagtgtagtccagaagggccaacattgtaaggtgctgtgctttggagcatggttcctgttcgcagaaaatatccaaagccgtgatggtgcatatgggtgatggtgcatatgggtggttcttctctctgttccgcatgtaggtgtaggcgtgtagcccttctagatcatggcgtag

SEQ ID NO: 3576 - DNA, 791 bp, Avena sativa
gtatttactgaaaatcccttatctcctgaagttgtggttgatgagaagttcttttctgttaaagaactctgtgaaaaagctaaggaatggtatgttttatcaaagacactagctgaacaagcggcatggaaattctcagaggacaatggaattgacttggtgacaataaacccagctatggttcttggccccttactgcagcccacactcaacacaagtgctggattgatcaagtatctaataagtggttcacctgtttatcttaattttagtgttggctgggtgaatgtgaaggatgttgctctggcacatgtccttgcatgcgaggttccttcagcaagtggaagatactgcatggctgatagagttctccatttctcagaagttgtcaaaattatccatgaaatgtatccttctcttccggtgcctgagaagtgtgccgatgacaagccattcgctccaacataccaggtctcaagagacaagataaaaaccttggggatcgagttgacccccttcgagacgaccctcagggagaccatagaaagcttgaaggagaaaggctttgtcagcttctaaactaaatcactccactcattcagaaaaaaaagtggcagttaagttgcaaataaatctcaagataggtccagatttggaacatatcagcaatgatctagtatcggcattttttgttcatttgcaccttccagtgtcagtgccactcaacaaggacattgcaggacaccaaaaatataaatacagtattatcttttaaggggtatttcagtatc

SEQ ID NO: 3577 - DNA, 482 bp, Avena sativa
tgcagcagctggctctgaggcgacttcttccatgatgcagaggttctgggattcagcaatgtcaagtgggccttttgatgatgatgatgactccagaagtgaaggatcaacaaaagtggcatctgagatgacagatataggacgatcagccttctatccgccttcaggcttatcaaacacatttgggttcaagattcaggataaacaaggcaggatgcacagatttaactgcgacacgagcagcctgacagacctgataacttccattttacaaaggcttggcgatgacattgataaattgaacctccctcaaattttgtatgaagatgaggatcacgataaggtcatactttcatcagacgccgaccttacagcagctgtggaccatgcaagacaaattggttggcagagtttaaggttgcacttggattactccggcgttggccggcgtaagcgaggagccgtctcggcggatttcgagt

SEQ ID NO: 3578 - DNA, 849 bp, Avena sativa
aacattaaggctcagcgaaagagcctcaaggagtacttaaaaacatttccacgtgccaaatatattgatgatgctaagccatggggcgagcagtgtgatgttgcattcccttgtgcatcacaaaatgagattgaccaaggggaggctcttgctatagtcacctctggttgccgtgttcttatagaatgttcaaatatgccgtgcactgctcaagcagttgatatcctaagaaaggcaaaagttcatgttgctccagcaaaggcaactgctgctggtagcggttggagaacttgaactgaattctgagttcagtttaatgcagtggtcggtggaagattttgagaacaaaatacaggatgcagtaaagcaaacatatgacaggtcgatgaaagctgctcacgattatggaatcatgaaagagaacccagagtcgttggtgcatggtgcaaacatatctgccttccttaacatcgcgcaagccatgaccgatcaaggatgtgtctagttaaacatttggttctgtcaagaagcagaattagacgttgatgcagcccttcttgaaactgtgattgttgatgtcatctttcgtgaggaaacatatgctatgtttattcctagccacacaaatcgatttacctttcgacctttataggaaagaaagcctggatctgttgtagaatatagaaggccattctgttgtagatcaccaatatattttattcattgttgctcatagatatcaattgaagaagggaacatgaacaatcatcttatagtcaggatttgctgttaaggctgaaaataatgtagtataagctttatgcaaaagcggtaaaattcagtcaggga

SEQ ID NO: 3579 - DNA, 944 bp, Avena sativa
gcaatagagttcatttacttaactgctgttatgtcaaagttgctagaaggaggatggttaccgcttgctttctcgtcattgtttctctgcataatgtatacatggaattatggaagcgtattgaagtaccagagtgagatgcgcgggaagatatccctggactttattcttgatctgggatcaacacttggcacagtaagagttccaggtattggacttgtgtacaatgagctggtccagggaatcccatcgatctttggccaaatgttggtcaccctgccagcaatgcactcgactatcgtctttgtttgcatcaaatatgttcctattccatatgtgccacttgaagaaaggttcttgttcagaagggttggccagaaagactatcacatgttccgttgtgttgcacgatatggttacaaggatgtcaggaaagaggaccatggcttctttgagcatcttttggttgaaagcctagagaaatttctgaggagggaagcccaggaacttgctcttgaggtgagcacaatggaggcagagcgtgatgatgtctctgatgtgtccgagacacgtccatctcctgctactgctgctggggatctgcatgttccactgctttctgatcagagactgggtgatgacaatcgaatgtcgggcaccgaaggaagcgttcctgtgctcccttgtagctccatctccccagatgaagaccccagcttagagtacgagctttcggcactgagagaagccatagcatccgggttcacatatctcttagcacatggcgacgtgagggcgacgaagcaatcattcttcacgaagaagttcatcatcaactatttctacgctttcctcaggaggaattgcagggttggcaccgcgaccttgaaggtccctcactcgaacatcatgcgtgtggggatgacgtacatggtctgattggc

SEQ ID NO: 3580 - DNA, 805 bp, Avena sativa
  modified_base (123)..(123): a, c, t, g, unknown or other
ctgatcagctaagcattatgaagaaggctattgtctcagagcttttaggtcaacagccccagctttgtccgtaccattttgttccccctggattgcttattcctattacagctatatacgacncaagatatggggagattgaggagaagcaaagtgaagtgagaagaaatctgcacttcaggcttggtctgcccttagaccgtcctttactccggacttgtaatgcactaacgtttggtggcatgagaggagataaaaacccatcgagaaatggctcctccattcttcgtgatgtccacaaagatattccatctagtgatgtatctggagggatcatgtcactgattgatggttcatatgagtactaccattacctccatgatggtatcgatgacaatggatggggatgtgcctaccgttctctacaaacaatcatgtcttggtacaggctgcaacagtattcagctacaaatgttctttcacacagagagattcagcaagttcttgttgaaatcggtgacaagaatccagcatttgttggatctcgggattggattggagcaattgaattaagctttgtgcttgacaaaatgtttggtgttagttgcaagataattaatgtgagatctggtgatgagctccctgagaaatgcagagaacttgcgatgcattttgaaacccaggggactcctgtgatgattggtggtggagtgttggcgtatacccttctcggagttgattacaacgaatccagtggtgattgtgcttttctcatccttgatccacattacactggttctgatga

SEQ ID NO: 3581 - DNA, 420 bp, Avena sativa
  modified_base (87)..(87): a, c, t, g, unknown or other
gtgggagaagcatggaacgtgctcgtcccctgctgttgatgatgaattgcagtacttctccactgcccttgatctctacttcaaatntaacgttacagaaatgctggcaactggaaatatcttcacctcaaatggtaaagaatatgcattgagtgatgtcatcgatactatcaaacatgcttttgggggctcgccacagataatttgcaagaagggctcggttgaagaactaaggttatgcttcaccaaagacttgaagcctcgtgattgcctcactacttcttctatgtacaaaaacttgtccaaagcaaagcattgccctcgaagcatctccctgccagcatatgatcccaatgcattcttaaattcaaccttggagattctcccagaagccagcgacagtggatgtattttatacat

SEQ ID NO: 3582 - DNA, 829 bp, Avena sativa
atagccttacagagataaaggacctgccaaaactatctgatgaactctatctgaaagacaacagggcgcttcagagaatctccaacctgcccgggcttcagttcctcactattgatgactgctcaaagctgaagcatgtgtcgggccttgacacgctgcagcatctccgactcgtgtttcccccatccacagagacattctatttcgaggagttgatcatcttctggagtatcgcgttgccacggtggctggaggtgctgatccgtaagcgcaatggcctgcgccggttcgagctgcagtgcacactctctttactgaggagctgcttggacggagggaagaactggcacgttgtgcagcagatccctgaggtgcgcatcacgagcactgatggcaagaagtacatacggtacaacaagggacgccgcatctatgagacaaatgctcagtctgaagactgaaatcttcctgaaaatcttgccacttgtttgacttggtagggggacatgctttggtcaacccattacgattgcttcaggagtgtttacgttatgggagttttatcatacatatactagaaatggcttgatgagctctgaggaatgattagggtacttttgttgaatcagtcagcagatgcttttgttcctccctttcccaaaattgaacatggcttaaatccttcaccaggacacaatgtgtgatccttctctgtttcctggtgttacggcaatttgtaaagtgtaaacactgagcttgctggatttcgatgagtgtaaagtattgccacttgtgtacatggattttgtttttgagaaaacaaaaaaaa

SEQ ID NO: 3583 - DNA, 769 bp, Avena sativa
agactctcctatcagtgatacatgccgtcgtagttcagcaggtggaggagcagaagcaaaagaagaggtcagatgctgcattcaaggaattcgagaagaagacggaggagctgagatccctcgagtccaaatacgggccatactctgctgagggttacggagaaatgacgcggaagacgccggtatcagagaagcgggcaaaggtggaggccctgaggagcagggcagacgaggagaagagcaagtaccagaagagcgtcggggtcacgagagcgatgaccctgaacaaccttcagacgggcttccccaacgtgttccaggcgatgacgggcttcgccagcgtctgcatggaggcgttcgagtcggtgtacaacttcaagcggagctcggaccgggctccgcttgacatgaagaggctattgacctgagagagtggcatcgccttgagttggtgtagggtcactgtataaaatgtatacaattgtggacttctagcgtaatagtaggcctggagagatttacctgggtaggcacagaaatgcctcgagctcgtttacttgctgtaaatgaacttgagcctttctttttcgcgcagctatgaggtgctaatctgctttcgaattttaaatctggctggttttgagagctctgttttttgagtcaaaatgtgtcttgtagtttgtgttaggggatcagtttgggttttgatggcagcagttttgtgacacctaggattcaaacatatcgtcgctattacaattgcattcaa

SEQ ID NO: 3584 - DNA, 943 bp, Avena sativa
gtgtcgctcctgcgaggccctgcggatgacgcggcgcaaatccaggcaatggagctcctcgcagcgatcgcctcaggcgacagctcgtccagggaggcggtgctccaagaaggcgccgtcgattccctcgtccgcgcgctcgacccgggcatcccgcgctcctccaaggcacgggaggtggcgctccgcgcaatcgacgcgatctgcttcccgtcgccagagtactcgatcgaccggctcctcggcgccgtgttcctgaaccgcgtcctcttcttcctccgcaacggcgacagcacgctgcagcattgcgccttaaagtccgcgcaccggctgtgccacgtgtcggaggagacgaagaaggcgatgggcgacgccgggttcatgccggagctggtgggcatcgtccaggcggccaagtccctggagacgagggagatagccgcggaggcgctgtgcgccatgatgtccgtgcaccgcaaccggaagcggttcgtccaggacgagcgcaacgtgacgcagatactgcagctgctgggccccgacgaggagaaaccctcgccggcgaagcggttcttgctgtcgacgctggtgcacctgaccgagagcagctccggccggaggaagatcatgtcatcggagcatgtcaggaatcttgagaagctcgcggagacgaatgtgatggacgccaagaagatcgtgaagaagcttggcgggagcaggctgaagaacatgttccatggcatttggagcgtgtgacagacctcgtggacaaacacgcactatttcttgattagtgtaccgtgcgtgtttctatagctaacataaattatgttcactccacattttcttaccgtgaatgaaaaatcaccgtggtgtgttgctctcctgagacaacaaatcatcccacacgctcgcactggcgctctctgtatatttcccatct

SEQ ID NO: 3585 - DNA, 782 bp, Avena sativa
cttttcagaaaagtaaaacgaaactgctactctgcttcgtttccacgcgcacgaaaccctagaaatccgccggttcctctcgtcaggatcccctctctctcgccccggaagccgcaggtccctaaccccagtcgctcaattttgccgcccgaacccgggacttccgcgcccttctcctatccgttcgggcggcccgccggcgagcgactcgggatggttttctacttcaaagcgcggcccgacgccggcgactacaccatcttcatggggctcgacaagcatgagaacgaggacctcatcaagtacgggttccccgaggacatctggttccatgtagataagatgtcctctgctcatgtatatttgagactgaataaaggtcagacaatggatgacataagtgaaggggtgctggaagattgtgcccagcttgttaaagcgaattccattcaaggtaataaggtgaataacgttgatgtggtttatacaccatggttcaatctgaagaagacaccatccatggatgtgggtcaagttggttttcacaactctaaactggttcggactgttcaagtagaaaagcggctcaatgaggtggtgaaccgtttgaacaagacaaaggtggagaggacgcctgacctgaaggctgaaagagaagccgtgagtgctgctgagaaggcagaaagaaagttgcagcttagagacaaaaaacgcaaggaagagatggagaggcttgagaaggagaagcaggctgaataaggagctacaagggcctgatggtc

SEQ ID NO: 3586 - DNA, 653 bp, Avena sativa
ggtcctggaggtgcgcacggagttcgggcacgacgacccgccggagttcggcaagtacctggtggagcagctcggggaggagaacctcatccggcaggacgacggcgtgttctggaagaccgtcgcggagctgctcccgcggcgtgtgatctgcgtgtggaagccgaggaagtcgccggcgccgggacacggcgagccgctgtggagcgcccggtacctcaaggacaactggatcgacacggacctgccggagaccaagttcgagagcaacctcaagttcctcgggcagcagcccaacgtggccgaccggcgctacttctaccgggtggagaacacggtgacgccgcaggccgacaacccggtgctgtgcgtcaagcccgtcacgcgccgcatccatggctacgcgaggctcttcctcgccgaggtcttcgccaagggtctcggcgacaagctccaggtcttctccaccgacttcatcgacggcgacttcgtcgacgcctgcgccggcgtcaccaaggcccgcgtcgacgccgccgccgcgtgacacccatccacgccgtgcatttgtagtaattagagggggtggccaggcgcggattagtgggtttcttgttaatttctttctctgtttcttggcgggtttcgtgttcgtc

SEQ ID NO: 3587 - DNA, 542 bp, Avena sativa
  modified_base (483)..(483): a, c, t, g, unknown or other
caagccggcgagggagaggaagctgagcgccaggtaccatgccgacgaggacgaggagctgccggagtctgtcgactggagggacaagggagcggttggtgggggtcaaggaccagggtgattgtgggagcagctgggctttttcagcaatagcagctgttgaaggaatcaaccagatcgtcacgggccagctcgtttctttgtctgagcaagagctggtcgactgtgacactctatacaatgcgggatgcgacggaggtctaatggatgatgcattcgtgttcatcattaacagtaaaggaatcggcacagaacaggactacccttacattgggaaggacaaccgtagttgtgctgctaacaaggagaataagacggttgttacaattgatgactgcaacgatgtacccatgaacagtgaaggagcctgcaaaaggcagtttcaaaccagccaatcagtgttgcaattgagactagtgcagngcattccaactctatgagtcggtatcttatcatcgggagcctgtggatcagacattgac

SEQ ID NO: 3588 - DNA, 763 bp, Avena sativa
cacatcgccaacggcgcctgcctcaccatccagttcgtcaacaacatcatcatccacggcctgcacatccatgactgcaagcccacggggaacgccatggtgcgcagctcgccgagccactatgggtggaggacgatagctgacggtgatgccgtgtccatcttcgggtccagccacgtctgggtcgaccactgctccctctccaactgcgccgacggtctcatcgacgccatcatgggatccactgccatcactgtgtccaacaactacttcacccaccacaatgaggtgatgctcctgggtcacagcgactcctatctgaaggacaaggcaatgcggaggtcgacaatagctttcaaccatttttggtgaaggactcattcagagaatgccaaggtgcaggcatggttacttccatgtagtgaacaatgactatacccactgggagatgtacgccattggagggagtgccgagccaaccatcaacagccaggggaaccgctacctcgcgccaaccaaccctttcgccaaggaggtgacaaagagagtcgagaccgcccagaccacctggaagggctggaactggaggtcagagggtgacctcctgctgaacggcgccttcttcaccccgtctggagcaggcgcctcagccagctactcgcgcgcctccagccttggcgccaagtcctcatccatggtcgggaccatcacctccggcgcgggggtcctgtcgtccgcaagggctcctcctgctaacacgcgg

SEQ ID NO: 3589 - DNA, 699 bp, Avena sativa
caagaccatccggctggccaactcggcagccaccatcaacgggaagcagaggtacgccgtgaacagcgtgtcgcacgtcaatccggacacgccgcttaagctcgccgactactacaagatccccggcgtcttctcggtgggcacgatctctgcaagccccacgggcggcggtgcctaccttcagacgtcggtcatgggggccgactacagaggctacgtggaggtcgtgtttgagaactccgagaacgaggtgcagtcctggcacatcgacggctatgcgttctgggtcgtcgggatgaacggaggaaaatggtccccagctagcaggcagatctacaacttgagggatggcgtttcgcggtacactgttcaggtttaccccaatgcgtggactgcaatctacatgccccttgacaacgtgggcatgtggaacgtgagagcagaaaactgggccaggcaataccttggacagcagttctacctgcgcgtgtggacgccgtcgacgtcatggcgcgacgagttcccgatccccaagaacgccctcctgtgcggccgagccgccggccgccggacaagaccgctctgactttgcgacacggtcaaaccaagtctgtcatgagaggatgacaccttggccggcatcaggcacacaaaatgtaccttgacagaaaagctacacaaaaaaaagagttaaccact

SEQ ID NO: 3590 - DNA, 782 bp, Avena sativa
caatttaccaagaagcaaggacaaagcggtatcttgtgaagaaaacgaagatctgagatgctccaggagtcagggttaccaaaccagtgaatccaaagccaacattgggatgatggtgggtttcagtggcgcacctgccagcttccacaacgaggcgaactccgatgatggcttcatgaacctgctgttgaaggaccaaagaccggacgaggcggatgacggtctcctccatgatgccgctgtccatcacgccgacgagagcgcgcggttcatggcctaccatttggcggagcttgggggataccggaacagcaatgtgtcgttgacgctagggctgcagcatgccgagaacagcctttcagctccaaacacccatcagccgggtttccctggcgtggaagagggcatctacaacacagcattgcatcccggagttgccgccgcctcctcagactacgagtcggcgaaccaattagaccagcggcaaaactttgaaccgtcgcctctacttcatgattttgtggcctagtaaatgctcgtcggtaaaagatttggatggaggagcatttgtaatctgtagggcaaatgataacacgcctgaaaagcaatgggaattgtagctgtagtcacatttggtacagaagagggggggtatgggtatagcatgaaatgtaatataagttttttcttggagcggttaatataagttttaggcggcggcggggggtaaatgatcttgtaaagatggatggaatgcattatacgtgtaaaggttatggccg

SEQ ID NO: 3591 - DNA, 728 bp, Avena sativa
gcaagcacggcggctccggggtgaagctggtggtttccgagagcgggtggccgtcggccggcggcgaggcggcgaccccggcgaacgcgaggatctacaaccagtacctgatcaaccacgtcgggcgcggcaccccgcggcacccgggcggcatcgagacctacgtgttcgccatgttcaacgagaaccagaaggacaacggcgtggagcagaactgggggctcttctaccccaacatgcagcacgtctacccaatcagcttctgatcgaatcaacgatcagaggtagagctggtgatggtggacaccgtatgtccgtacgcgcgcgtacacgcgtataaagagcgtgtacgcgtacgtatgcgcacattatgcatatgtacattacatggggcttgatgatgcgaccgctgaggtacgtagtatactcagatgcgtacgccatggtagtgggtttggtacggtataccctagtatgctagtatactagtagtaatctagtatacgattgcgattgaagggaagcagatgtaaacgcttcccttcctagtggtggaggctgattggtataaggatacgtacacagatgtacgtataggtagggtctactatatattgtagcagggttcaaagtttcgtcaaattttgatgaaatttttgtccgaaaataaatcctgaaattcggccgtaaaggaccgaaatactactttacattataaaaaaaataaa

SEQ ID NO: 3592 - DNA, 882 bp, Avena sativa
cggcggtggcaaccgcgatgccaccgtcgacattccccttgataacatgaacggttcgaacggcaagggcagtgagctctcgcagtggcaggcagatctcaagaggcgagaggcggacatcaagaggagggaggaagctctcaggagtgccggggtgcccatggaggataagaactggccgccattcttcccgatcatccaccatgacatcgccaatgagataccagccaatgcgcagcggttgcagtatcttgcttttgcaagctggctcggcattgtgctttgcctcgtctggaatttcattgctgtcattgtctgttgggtcagagggggagactccaaactgtttttcctggctactatctatggtatgcttggaattcctctgtcgtacttgatgtggtataggcctctgtaccgtgcaatgagaactgacagtgcattaagctttgggtggtttttcctttgttacatgctccacattggcttctgtattattgctgccattgctccaccaatcgtatttcatggaaaatcactaacgggtattctggctgcaatcgataccttctctgataatgcattagttgggatattttactttgtcggatttgctttgttttctttggagacagtcgtgagcatctgggttcttcagagagtatacatgtatttcagaggtcacaagtgaagtgggcgaccgaagaaatttacagaagtctacatgtaccattcaagcgtgctgcggttctgtgcatacatacaagcacatgaaattctttgtatgttatatggtagtgatgattaattacctttgatgtttctttggtggagggtggcagtgtagcaccattcataatagtgttgttctggactatgtgt

SEQ ID NO: 3593 - DNA, 887 bp, Avena sativa
tatgagctttatggaggaactatcatggttttcctcttccttctggtaaatacatggttccacggcgagattcatgcgtaacattacaccgatatactatatagtgtggctgcaccttagcagccaatgtcttaagtcagccatgccaaatctgcctaggaaatggcaagcacagacagggttggcctgaaatcctcatctacaaaaacaaacaaaacccagcaaccagcaaaggtccaccatggcaaatcagcaacgaagctctaaggcgaaggctggtgcacgcttatcccaattcctttatgagcctgacgtgtatgtataccgcgactgagccccctccactagctccacaagtttacctatgaggaaaccaaccagcggcactggattcagcgctttctcggctttctctaggtgacacttggtgtagtttgcgaagaatggatctctcatgacataaagtgcccacatcatctttcgccttttcaactcgtccctctcagcagatgagagatgatgaactttcccagctctatgatttagatctgttgcatgtgagtgaatgccaaggcttgtgagttccacagctaacgacactaaccatggggtccaagatctgattccaaacttcctgatcataaggacatatacaagtggtctgaatatgtggacagcctcccctaacataaataagcgcccagaaacccctttagaagaccaagcagttgccaaagttggcttctcaacctccatcacaggtggaacaggagtaggttggagcctcgtcatccacatgggatctgacatcatctttgcattctggccaaacttgttcaaagcagctaccgctcttccctccagaactcttagatataaatccaggt

SEQ ID NO: 3594 - DNA, 696 bp, Avena sativa
tgatgcgcggtaaccgatggcgacgccggccgtagaaaagcccgacggggtcgagatccgcgaggtgtgggcggagaacctcgaggcagagttcgccgtgatccgggagatcgtcgacgactacccctacgtcgccatggacacggagttccccggcgtggtctgccgcccgctcgggacctttaagtccaacgccgacttcaactacgcaacgctcaaggccaacgtcgacatgctcaagctcatccagctcggcctcaccttctccgacgagcgcggcgggctacccgccctcggcccggagggccgcccctgcgtctggcagttcaacttccggggcttcgatccgcggaccgacgtcgccgccgcggactccatcgacctgctgcgccgcagcgggatcgacttcgcccgccacgcctccgacggcgccgacgcgcgccggttcgcagagctgctcatgtcgtcgggcgtcgtcctgaactccgagatccactgggtcaccttccacagcggctacgacttcggctacttgctcaagctgctcaccggctccaacctgccggacaccagctccgggttcttcgacctcatcaagatatacttccccgtcgtctacgacatcaagcacctcatgagattctgcaatagcctccacggagggctgaacaagctcgccgagctgctcgacgagct

SEQ ID NO: 3595 - DNA, 749 bp, Avena sativa
aacataactgtgacatttacagaagcgagcacgaagaaccatatctgtacagatacaactcgtgtctcgggcgctgtcaccatgatttagttgctattgtacaaatcatgaccaccatcttcttcgatatgttttgatggtatatataatttttccggatattgccgtacagtatttagaagagcaaggtcaagtagaaaataatccatcctgccatggagaatacagcaaaaatgtgcacccagaataaaatcgaggctgattcttttccacaccctctcaggtttgcgacagcacctgacaacaccgatgtgggcatagaatgctgcagtagtaggacaaacttgaacattttgtcatctttgggaatgaaaccgagtttatcaactagcatgacgatcccaaccccagcaattggaaccaagatcaaccgtgcaaagataatggcaacggtggttcgcataccaagcctttgacttccttcgccaggaccatcaacaagattaccccccacagcaagcaaaatgcaagggatcatagcttccccaagaatcagacagctgtctgtgaagaagaatagaggtgcatcatccgtgaatatcaaattcttcaagactggaacaacaccaatgccaattgcaaaaacagaggcaataattggtggctgaagaagctgcttgtctttcaggaatttaaccacacatccagcatagctcattatctctgaccctacagaagtagcacccttt

SEQ ID NO: 3596 - DNA, 699 bp, Avena sativa
tgtgtggtgtatcttgctcaagacatccatctgcttttactgccctttctattgggcgatctaagtggaatggtcaagtgggtagttctggagtagtagtcacgttggaaacaccccttaacaacattggaaggccatcattatctgtgcaattgaatggcggtttcgagatttgatatcttgcacagaagttgtacataccactgtacataacgcccccactaatttcgatgctccgtactagctgagatagcgcctcgacctgtttcgtgtatttggaagagagatgcagcttgtttgtgtggcgataggtcttgaccaggtaaatctactatatgtctcccaagagtttgtgattaagcgataaaccagttcaagtgctctcttctggaagtcggaaagatgaagctttgagcccagtctagtttgcggattggaggttggaaaagttgtcatgcaatggagattctgtgagaagcttttggtgcaaggctggcaaattttatactttggtgctgaattgtctgccagttttgttagcatccagggttgattgtatacatgctgcgtagttgagaaccgagacagtctcttggtggatgaattggtgtgcttattttcccctgcactcttgtaatccttcctctacatgtaacggtcacttaagactaagcatatacttgtctggcggaaaaaaaa

SEQ ID NO: 3597 - DNA, 996 bp, Avena sativa
gctaccatgaacatgtgctccaagtgccacaaggagttgacactgaagcaggagcaggccaagctggcagcctcctctttcgacagcatcgtaaacggcgccgacgccacgaaagaacatcttgttgctgctggcaacacggcggcggtagctgttgcccacgtcgagctgaagacgacacttattgctgcacagcctgctgatgtcgccggtcccagcgaggcggcccccaaaggcccaagccggtgcggcacctgcagaaagagggtcgggcttaccggattcaactgccggtgcgggaacctgtactgcgccctgcaccgctactccgacaagcacgagtgcaagttcgactaccgggccgcggccatggatgccatcgccaaggccaacccggtggtgaaagcggagaagctcgacaagatctaggggcccctgaatggtcggcaaacgaaaaggtctcaaatctcaatctgtgcgtctttgctgcattatcctttcatgttgcaatctagttgttgggcatcgtgatgcatggcgcgcctcggcagctcccaagggttctctccctctctggccagctcgaacggttccatgctggctatgttgtgtaagcttttattttgtggtcgtctttgcgtggcggcggaccgtatcgtggcttcgcatttagctagcactctgtaatgtacctgtttcgttcctggtgtcgcaaccgataatagtaaccagtaatcgtcgtcgtgtgttataatggtacccatggttggtcgcttatcagatactactttctgtgcttgaaactgaagaactcctgagaaatagcacatcacatacggttgttgtctacataatactcaacaggaagatgaagttcagtgtcaggtgagatgctggtggaattctgctggaggttggtttgttcaggcttcccttcctcatggcttgttgtgaaatggtctgatgtgtggacaattctggcatcttgtgctcgtc

SEQ ID NO: 3598 - DNA, 630 bp, Avena sativa
attctagagcaaacaaagccacacttcatttcagcaacccaagctgttactggagctaagaagagttctgaagctaacatggaaaagctccaccgtagaattgtattcgatctggtaaatgaaattatagctcagaagatgaacatctacagctctgcaagtggaacggcgaaacttcttcaatcaaggaagttaagcgggtggagacttttcaaggaattgtgcacagaggttgacaggcttttatctgagagctcggcagcaaaatgctccgaagaggatgaggatgagaacacaccgttaactgaggatgcgttgtatgatatgaaagactgggggagccctggcaatgagctacaaggcatgattttggatattgaaagatccatcttcagggaccttattgatgaggtcataggtgtcgaggctatagaaaggatgcaagctggacaaccgaaattgcgtaggcagctgtctttcagcagtatataaactgaatatgattggcgatagttgtttccattaggaagcttagccactagtaaatgtaaccctctgtattttgctgaagactgaattatatagaagaaatataattattcctggcctcagtgtcattgacaagtagaa

SEQ ID NO: 3599 - DNA, 705 bp, Avena sativa
acgtttggagtggtgcctctcccggggcagatggaaactgaagttaaaggttgcctcgaatacaccgctggaccgcatcctcaaggcgatctggcaatagttcacctggacgatggatggctttttcggtgggtacttacccgtgagggagatgcagcaaactggaatcaggaggcaagagtggatgtggctgctgcttttggacacctaatgaacatattcatgatgcacttgcggttcacccatctgattgacatgctatacaggtacgagctgtatctcctgatggacggtatgttcttatatctgttggggtgatctatggcctgaatgtggtggatatggctgaagaaagggcggaagctgctccgcaccttggccagatgggttgtgtgtttcctatgttccagacctggccgcctagggcatgatctggtggcagctacccgtttgtttgtggccgacttatttgaagacatggcaagatcggttcgaggcattggcaagatggcgtgggttttttccttatgtaagaaccggccttcctattatggaatgcctgtactctgtagctgaatctactaagcaagtccatcttatgtaataatagagtacaaaatctatattgtaataagattctatgactaaacatatgtgtagtgaatgctagcagtaatgtctatgacawatatatggtgttgtatg

SEQ ID NO: 3600 - DNA, 879 bp, Avena sativa
gctggaaggcgcaagtacttcatggtgatcggcatcaatacggctttcagtagtcgtaagagaagggattccatccgcaatacctggatgccacaaggagagaagagaaaaaaactggaagaagataaggggatcattattcgttttgttattggtcacagtgctattgcaggtggaatagtggatagagcaatcgcggcagaggatacaaaacatggagacttcatgaggcttgatcatgttgaaggataccttgaattatctggaaaaaccaagacatactttgctacagctgttgctttgtgggatgctaacttctatgtgaaagttgatgacgatgtgcatgtaaatatagcgacccttggacagattttgtccaaacatatttcgaggcccagagtatatactggatgcatgaagtctggtcctgtcctatctgataaggatgtcaggtattatgaacctgagcactggaaatttggggataagtatttccgacatgccaccggtcaactgtatgctatttcgaaagatttggcaacctacatttccataaacaagcatgtgttgcacaagtatatcaacgaggatgtttctttggggtcttggttcatagggctagatgttgagcatattgatgaccgccgactttgctgtggtaccccacccgattgcgaatggaaagcccaggcagggaacacctgcgcagcctcattcgattggagatgtagcggtatatgcaactcagtggataacatcctgggagtgcacaacaagtgcggggaaagcgaaaaggcgctctgggccgcttccttctgaccaaacctggaggaagatcggattgaagttgctttgttgtagtatattagaactgagtat

SEQ ID NO: 3601 - DNA, 490 bp, Avena sativa
tggacgagggcaactttgaggccgcggtggccgccgttgattacctcttcgtggacttccacgccccctggtgcggccactgcaaacgcctcgccccgcagttggatgaagctgctccggtgcttgctgcgctgagcacgccaattgtagtcgcaaaagtaaatgcagagaagtacaagaagcttgggtccaaatacggagtagatggcttccctactctgatgctttttgaccatggagtccccacggagtacactggttcaaggaaggccggtcttctcattgagagcctgaagaagcttgtcgcacctgctgtttctattctcgagtccgattcagcaatcaaagttttgttcaggaagctggttcagacttttccattattcattggatttggggtggatgagtcctcaattgctgagtatggagcaagatacaagaagaaggcatggttttctacagcgaaagatttctccgaggatatgatgtc

SEQ ID NO: 3602 - DNA, 995 bp, Avena sativa
tacacagactatgcattggacatgaacctcattcagaaatctgactatgaaaggatcaacaggttcatcccaccatgtgaatttgcgataaaactttgtggtacaaatgggaaatcatcttgcatggcagcatatatggtctgcaatactattttcaactctatcatgaagcttgtcgggacaaagaattattatgacgttaggaaggagtgtgaagggaaactttgctacgacttctcaaacttggagaagttctttggtgataaagcagtcagacaggcaattggagtaggcgatattgaatttgtctcatgcagcacttcggtttatcaagcaatgctcacagactggatgagaaatttggaagtcggcatcccagctctacttgaggatgggattaatgtgcttatatatgctggggaatatgaccttatatgcaattggcttggaaactcgaggtgggtccactccatggaatggtctggccagaaagacttcgcatcatctgctgaatcctcatttttagtcgataacacacaagctggagtgttgaagagccatggggcactcagtttcctcaaggttcacaatgctggccacatggttccgatggaccaaccgaaggccgccctcgagatgctgaggagatttacgcaaggaaagctccaggagacggtcgttccagaagaggagacatcgacattttacgccacgatgtgatcggcactgacctccattccagaagaggagatttacccaagaaggaaacctcgctaggtagcctgtcttggcgtctcgaggagcgtcaggaaccttcctcttcacattctctttttcccactgtttcggctgaatgtgtgtatagtatagtcctaataacaagaacaacggttggccctgcaatgtaactagaccatgtatgctgttgttgatgaagcatgaaccacaccacacactggggcacgatgtttctgatgttaattgtgtctatgtat

SEQ ID NO: 3603 - DNA, 773 bp, Avena sativa
attgagatccaggatacactgaagtcaccaccgtctgagcacaggaccatgaagaaggcagcaatgtatggaattggagccaccaccgtattctacatctctgttggctgtgcaggatatgctgcatttggttcagatgcccccggcaacatcctgacggcccccggattagggcccttctggcttgttgacatcgccaacatgtgcctcatcctccacctcattggggcatatcaggtatacgcacaaccgatatttgctacagcagagaggtcgattgtttcccggtggccggacaccaagttcatcagcagcgcatacaccgtcagcatcccgctcacacaacgaggctcggtgaccgtcgcaccttacaagctcgtcttacggaccgtcatagttgtcgcgacaactgtggtggcaatgatgataccgttcttcaacgcggtgctggggctcctgggtgccttcagcttctggccgctgaccgtgtacttccccatcagcatgcacattgcccaggggaagatcaccaaggggatgaagtggtacctcctgcaaggtttgagcatggtctgcttgatgatctcagtggcagtgggtataggctctgtgactgacattgtggatagcctgaaggcatctgcccctttcaaaactgtcagctagaggatgtactagtcttgtgtagaatagcggttgaatctctgtactgtatcatttttctctgatttccacgtgccgggagccaatcagttccataaagacttggagtt

SEQ ID NO: 3604 - DNA, 571 bp, Avena sativa
  modified_base (432)..(432): a, c, t, g, unknown or other
cagatgcaaagcttgcaagattgggtgctgacagctgaagatatctgcttcaggaatgcattcatgtcttacatgtttcgtgttgggaaatgcgtgccgatcacaagaggggctggaatctatcaagagcatatgaatgaagccctcaaagtgcttagttctggaggctgggaaaagtagcccaagatcaccagccaatcagacgattgaagtggggaactgccagtcttattgtgcgggcacctgtaactccaatagttttacctgtcattcacaccggttttgaaaaggtcatgccagagaaatcattcttcgggcgccgtccaccattgcctctctgcggcaagcagatacaaatcatcgtgggagaaccggtagaatttgatctgcctagcttaaagcaggaagcagcaacgataccccaagacacancgtttgaaagggaagggctggccaaccatcacgcccgaggggctagacgagtccgcgcagagatggctttaccagaagatgtcggacaagatccggtctgtgatggaggggctgaggaaacacttgtgaaccagaagca

SEQ ID NO: 3605 - DNA, 746 bp, Avena sativa
gatcaaattccggaagacctgtttcacagtcattttctccgttcattgctccgagatcatttcctggatcacactcatccttagacagcattttaccagtctgagtcacttcgtctttagatagatcgatgccagaataaactctggcattgcaagaaagagaatgttgtaggttactctcctggcctctcgcatggctcatcttctctccactctcaacagaatcagctttagttgaaccactctcaactcggcccactaacctagaggccatatcgtggctatcaccctgaggctcttctcgaccaacatcttcagggacaaactcgtccatcattccaggtccaggggctgactcaccagtatgccccatggtttcaataagctcgggaactggttctacatctgcaacaacgctctcagctttatgttcagaaacctcgactccatgaatttcggtttcatgactagcacccattccaacactccctccgctaactcccaagctaagttgatccctggccaaaatgggagctgtatctgcattgaggacttcttcaccttcattcatactactcccccctatatctcttgcattactatcagcagcaggctgcacgaaactgctctcttgtgcttggttgctatagttgagatccaatgtgtcgctcattccaccacttctgagtgcacttgaaggcttctcgacatcatcaccatcacatggatggtattgaacactatcc

SEQ ID NO: 3606 - DNA, 817 bp, Avena sativa
  modified_base (39)..(39): a, c, t, g, unknown or other
ggaagctcaagagcaagaacaacagctggcctatcaggntaaacttgtggagcgaacaaaagagcggaagaatgcattggaatcctatgtgtatgacatccgtaataagctttctgagaggtatcggagctttgcaactgattctgaaagggaagaaatctcagttaatcttcaacagacggaagaatggctttatgaagaaggtgatgatgagactgaagcagtttacactagtaaacttgaggagcttaaaaagcttgtagatcccattgaaaatcgttgcaaagatgaggaagtcagagctcaagccatgagggagcttttgaagcgcattgctgaccacagaatggctgccaagtcattatccacagctgaacgagacgctattgacaatgagtgcacaaaagctgagctgtggctgagggagagctcgcaactacaggagtccttgcctaagaatgttgaccctgtagtttggtctcatgaaatcaagaagaaggaagaagagctggacatgtcatgtagcaacatagtaactagcaaggcacgggggcatgccagcgatgatggatgctagcgggggttttcagatcaaaatgcataaatcggatagaaatattttaccttgctgaggtttccctgctgaattgctgtggtcaagtctgacattttgtagaaatatagagacagatgaatttcttctaacatcaccatacgatcaactctgtaccactgcccgccattgggtctgcatctcaatacactgacatgaagttttcactttgctccccaacaaacaagagagagaggaatggaa

SEQ ID NO: 3607 - DNA, 669 bp, Avena sativa
agacatagtacagttcgacggagtaactctgaatattttgcaccaggcctgggagctatatgaagcagggaaactagaggagatgattgatccggcttctggaagttaccctcaagaggaggccattcggtacctcaaggtagccctcttctgcactcaggcagcagcgtcgcggcgcccctcgatgctgcaggtggtgaagatgctgtccaagcccatccggatcaacgagagcgagctgacggcaccagggtacatcaacgagtacaagagcaatgattccaaggcgacagtctccaccagttcaaggctgaaaaactcgacggcggagtattccgacatgttcagcacgtatgttccgcagacggttactgatgtaagccccaggtgaagcaggcaaccagcgagggtggtctgctttgttttactgtcactatgtagactgtagactgatgatgccacacgttttgctgatcttttcgttcgtgaaatttcccattgagagggcacatatttagctgagaagctctaagagtgtgttgtagtgatgcggcagctagatcttgtatataatagactagttattcatgccatagcaatgcaaaatagctgcttgtttggacaatttgaagtaattcgatggcttttccagagtcatcagtcatgcca

SEQ ID NO: 3608 - DNA, 695 bp, Avena sativa
  modified_base (135)..(135): a, c, t, g, unknown or other
catgcatggcgttatacgataccatgctaagcctaaaaagtcctattggtactcattgcctgggctttgcattcaacttggcaggattcattcttgcagctggcaaaagggttcacgaactggtatgcctctttnccgggtttcacttcagtcacctgctggagcagctcgaggccaggccgatgacatagagaatgaagcaaacgaacttaatcgaataaaaaaactatctttatggcaagttagcagagcacacaggacatactgttgaacaggttcatgaggacctatccagggtgaagcgcttcgacgctgagggagccctcgattacgggatcatcgaccgcatcgtcaggccttctcggatcaagaaagagggcggctcgaccacgggccagaagaaggatctgcggaacctggggcttggctaatcgtagatgttggctagcgtatcggagtcgtagcgttagaccgccactattttttccacgtctgatcctgctttgaagcctcggtgcttccgttattgagttcatgtggagctatgagattttgtagtttgttttctcccagtgtccctagacttcagacagcaatattaggatgcacaagtgatacctgtggcagttttttattaacataccaaggaacacgcggcatacatttggtagttacaaaaaaaaaaagttattaat

SEQ ID NO: 3609 - DNA, 668 bp, Avena sativa
aggatattcatgagtttttacctaaagctgataaaaccaaacttccttcattgcaagacttcagcgaatttcgtgtgaaacttgctggtttaacaagtgtaacccgcacctactttgagaaccttgttcaagcactggaagcagggttggaggacgtgcgtggtgcgggccagtcgacgtcaaagagaaggtcgaacgataacgccggcgccaactgcaagaaaccatccgcgagaggcaggccaggcaggaataaggcggcaagaacatcccgctagcattcagctatgcggctggccttgtgagcgctgccgatgcgcatttagttgacccattttcgcagatacctgcgatggtcggaggtcgcgataggcgcttagagattgatgatagataggggcgatgcagaggctcctcaccagaatttgtatagcagtccggttgctagttaggtcgtccaggcattcgggtgccatggacatgaaatggagctcccagaggatggatgcgccgatgtacaggtagcaatggacacaatattagctggggggagtcttggcattagctggcagtatatgagtagtactctttctttttcttttgcggtgtctgatgcaagaatattgctaagatttatggttccaaaataatattgtataatgtttgat

SEQ ID NO: 3610 - DNA, 940 bp, Avena sativa
ccgggatccgccaccgccccatcgtcattggagatcgagcgagggtgcgggaatccaatcccgtgagaagactcgcgggatgaagttcggcaagagcctgagcagccagatcgtggagacgctgccggagtggcgcgacaagttcctctcctacaaggacctcaagaagcggctcaagctcatcggcggcatcggcgccgacggggaggagcggcaggccaagcgggcccgcgtctcggaatccgccgcggcggatggcgaggaggccgcggcgatgacgccggaggaggcggagttcatgcgcctcctcgaggccgagctcgacaagttcaattccttcttcgtcgagaaggaggaggagtacatcatccgccagaaggagctgcaggacagggtggccagggcggccgggatggagtccagggaggagttgctgcgtgtgcacaaggagatcgtcgacttccacggcgagatggtgctgcttgagaattacagcgccctcaactacaccggactggtcaagattctcaagaagtatgataagagaactggggccctgatccgtctgcccttcatccagaatgtgctgcttcagcctttcttcaccactgacctcctgtaccagcttgtgaaggagtgcgaggccatgcttgaccagctcctaccatcaaacaagctgtctgtatcaaatgaagatatcaacactgaggacaagcctctgaaccccagttcttctttgggtagcagcagatgcattccagagcttgatgagatcgagttcatggagagcatgtacatgaagagcacggtcgcggcgcttaggtctctgaaagagatccggagcaaaagctcaacagtcagtgcgttctccttgccacctcttcagggcaacaatgcaccagaggagcaggagaggtggcagawgatatctgtgatcgaa

SEQ ID NO: 3611 - DNA, 841 bp, Avena sativa
gatgaagcaaactacgatggagaaggatttgcaatgatgtctggtactagcatggctgcaccacatattgctggcattgcagcgctaataaagcagaagaaccccaagtggagcccctcagcaataaagtctgcgttgatgactaccgccaacacgatcgacaaggggagccatcatcttagagcgcagcagtacaccacatcagaaatgctgacgctcacacgggccacaccgtttgattatggcagtggcgcggttaacccgaaagccgccctggatcctggccttgttctcgatgcaactcaccaagactacatcacatttttgttgctcgatccctcgacgtcgatccgagcgaagtgttgaacatagccggatcaagctgcagctccagcccaaaggggcggcgaccctatgacctcaacatcccgtccatcacggtctcgcagctcgaaggcacgcagacggtgaagcggacggtcacgagcgtggccgacgaggcggaaacctacaccatcatgaccaggatgtcctcggagatcgcgctggaggtttctcctcccgcgctgacggtgctcccggggaagtcgagggagatcacggcgaccctcacgacgaggtcggtgaccggcacctacagtttcggcgagatcaccatgaagggcgaccggggccaccttgtcaggatccctgtggtagccatgggattcaagtagagtttgtgtatggctctctgaagccctgggctgaggagtgttgtaatattttttagcttggtaggaactaggaaaaataataagagctactgtgttatatgatgtatctgtgtgttatggtagtg

SEQ ID NO: 3612 - DNA, 739 bp, Avena sativa
gatatcatgcagtatcatgtcaacctagagcttagctaattaggatcaaagttgggcaacggagcctttgctcacgcaggaggtgaactcttcagctgttcctgtcggagacgtgttatatgcagaacattcaatgacgatcttgtaatggtcaactggagagagaatattgttccaaaccatctcttctagactagtgttatattcatccttcagtgtggttgctgaataagttcaggtataagccggagcaagaaccccagctgctgctgcgagaaggcctcatgcatttcgcctgtgccagaactgttactgaatgtgctctggctgaggtctggtttgctgaaatcttccacagcattcgagatatcctccaccagatcaacaattacaccattcacacccataagatactggagataaacagcctcccacacattattgagttgcccataggtaagaagtgcaaggttcgattcttgtgctttgaggattgcagagggattctttaaaacccctctcacttctgacacgaccccatgcaagtcatattcttggcatactcggatagcattgtcaagggagttctttctctcgtcattgtatttagctgttcccccttcggttaagaacagtacaggatatatgctttggagttcccgtgctatccgtgccgcatcaggttggaatgttgagaaaaatattggcctgttaccagcatactggaaaacaacttgca

SEQ ID NO: 3613 - DNA, 574 bp, Avena sativa
cagcaaccacaactcgcagctgcaggccaagctgtcggcgctgcaggccaagtacaagtcggcgcggatcatgtacgccgacttctactccggcgtctacgacatggtccggagccccagcaaatacggattcagctcggtgctggaggcgtgctgcgggtcagggggaggcaagtacaactacgccaacagcgcgcggtgcgggatgagcggcgcctccgcctgcgccagcccggcctcgcacctcagctgggacggcatccacctcaccgaggcagcctacaagcagatcaccgacggatggctcaacggggctttctgcaaacccgcaatactacacagctagtagtattattcaccatcgatccgtctagtgtggttgatgatcaattattattattcttcattcggttgggataagttaaaagctcgatctggggaacaagctaagttaaagctgtcaaaaaaccggcactgcgtgcgtgtaacggtggaaacgaaacgagttgccgaagaaagaagatgaaatcacggcaactcgtttcgatcaatatatattgttcactaccagtac

SEQ ID NO: 3614 - DNA, 683 bp, Avena sativa
agatatacaagacaacattgtcaacctgaacagaaaatctatactgttcattactgccagctcttaagtacaaacagcacagttttgatttcacagctaaacaaaacctttatggcgcagcacatcatgtgacaatcactcaacaggtcatctatatttgagattaattcggtataaaatgaatgtccatctgttctcaacgagctaaaatttctcggtccaaatgcaaactgaacttaaggcaatcggacgatagcaaatacataagagaagacggaaaaaaggggggcctaaaagagaagccgggtgcttccttctttccaggagacttcaaaaatacacaaacaccgagctcttcctttcctactagctgcagttagtgtcccggagaaggcctggaagcttggatcgatcatactaggggctgctggctaacccggaagccaacactcttaaaatctgaattccggctcgacatccattgcccatccaaactttgctagaatcgtcttgctgaatatcttctcaataggcacttcatgggttttgcaccatgccacagtaattctaggatcaaggtagttgatctttgatgtcccaagtgctactgtcttcaaatcctcttttattttcttatccatctccattttctctatcttggtttctatcgaagtgattttctt

SEQ ID NO: 3615 - DNA, 868 bp, Avena sativa
tcaagttgctgtgagagctgcgctgcaatctagtggtcaaaactgtgctggtgctgaaagattttatgtccacaaggatatatatcctacctttgtttctcgagtagtgaagataatcaaatcgatatctgtgggccccccttatctggtagatacgatatgggtgcaatttgtatgatagagcactctgagagacttcagaatcttgttaccgatgctcttgagaagggtgctgaaatcgctggcagagggagctttggcaatttgggtgaagatgcggttgatcagttctttattccaactgttctggtgaatgttaatcacacaatgaaaataatgcaagaagaggcatttggaccaattctaccaatcatgaaattcagttctgacgaagaggtcatccaacttgcaaacgactctaaatacggtcttggctgtgctgttttttctggcaaccagaagcgtgccatcaaaatagcatctcaactgcactgcggtgttgcagcaatcaatgacttcgcttcaagttatatgtgccaatctctgccattcggtggtgtcaaagacagtggtttcggaagattcgctggcgtcgaaggcttgcgtgcctgctgccttgtcaaggcagttgtggaggatagatggtggccatatatcaaaacaatgatccccaagcctattcagtatcctgtatcggagaacgggtttgggttccagcagctgctcgtcgagaccctctacggcatcagcgtgtgggacaggctccgggcgctcgtgaacctgctgaagatgatctcggagcagaaagctactccggccaccaggaagaagagggctgaagaggccgggggcagatgcgttctgtcgg

SEQ ID NO: 3616 - DNA, 819 bp, Avena sativa
agatgaccatgccgacactcttagccttgtaagggctgttggatatgatatggcttacatgttttcatatagcatgagagagaagacccatgctcaccggaattatgaggatgatgtcccggatgatattaagcagaggagacttacagaactgatcaacaccttccgtgaaaccacaagaaagatctatgactctcaggttggcacaacacaactagttctagtggagggtccgaataagcgagctcctgagacagagctgtttggaaaaaccgatagggggcacagggtctcttttaccagtttccctgtaccgcatacatcggaaggtgacggagctcgtaagccagtggttggtgaccttgttgaggtaaaaattctcaggtcgtcaacagcatcgttatctggagagccaattgcgcgcacaagcttgggcatgtaccgcaagaatcatgcatctgcagcatgcgctgttgcttcctaaggagtactcgagatgatggcattccacatctgaagttctgaactgaaccagagaaccctgcacaatatttcacttgaaatgactgcaattgggatagtgcaatttaacttagcgtggacatcttttcgtgaggaaatattggttgtctagttttggatggaaaggtagcatggtgttatgcttcgagcagctgaaatccgaataatcgtccaccttatatgcctgctactggtgtgctgaagtgtactggagcagctgaaatccgacgtaatccgaagtacttgttgtaaagttcacattttcaattaaaaaaaattgcacgctgcagtgcttaa

SEQ ID NO: 3617 - DNA, 769 bp, Avena sativa
  modified_base (760)..(760): a, c, t, g, unknown or other
ctagtgaagatgctgctgctgattacgtgcaaggaattcattcattgtcacagtatgctgattacttggtcataaatatttcttccccaaatactcctggtcttcgggcattgcaaggtagaaagcaactgagggaacttgttaagaaggtgcatgaagcacgagatgagatgcagtgggctgaagatggtccaccaccattgcttgtaaagatcgcaccggacttgacgaaggaggatcttgaggacattgctgcggttgctctttcttccaagttggatggcctgattatatcgaacacaacaattgcaagaccgcctcctgcagatgcacatccattagctcaagaagccggtggattaagcgggcagcctctatttgactcgtctactcgcgtcctcagtgagatgtatagccttacagggggcactgttcctctcataggctgtggtggtgtcactagcggcgaggatgcgtacaagaagatacgttctggagctacacttgttcaactttacactgcccttgcctatggtggtccagctctcatcccaagaataaaggctgagctagcagaatgtctggaaagagatggtttcaaatctgtccgggaagcagtgggagcagattgcaagcccaagaaggcctgaacaaccaccaagatgacacgagatgctagcaagttttccctgaccatgcttgtcctactcatccggatgagtaggacaagagaaaccaagtctgaaattatttgagggtntggtactaa

SEQ ID NO: 3618 - DNA, 703 bp, Avena sativa
ctcttcaaatacttccagcagatccacaatcacagaatcatcccaaggataccagttctcaatcacaccatatgtagccccagaaataaattctggtccagcaccaattttttcatcctctggtggttccccacttgcgtattcaactggtccatctactccgaagttctattctggtccaacatcacccgcaagatctcggtctgaagaccaatcagcatattcagcatggaatggatcaagtcatcagtattcagcacccgtttctcctcatcatcaccgctcattcgcagggcgacctcgtatagatggaaaagaattcttccgacaagcacggactcgactttcttatgagcaatttggagcattcttggcaaacatcaaggaattcaatgcacagaaacagtcgcgagaggacacactgtcaaaagcagaggagattttttggaacagagcacaaagacttgtacatttcctttcagagtatgcttaatcgcaaccaatcgtgaacctatcactggctgctattacttctctcaaggaaacaggtttctttcattgataggcctctttcgactgaatgaatatacaggcctctaccatagccatcttttccaagcgaacataatgtattgttggagtgaacactgctctcattgatcacaggatcatattattagaaatctgtgcataggacaccgtg

SEQ ID NO: 3619 - DNA, 658 bp, Avena sativa
tggtcttctgagtagccagtctggaatagtgtatctaagatcaaaagaagaaaacggcaacgtcaatctaatggcaatggtgaaagatgcggattatcaaggtttagccactgagctcgaggatgctaaaaaaggaactttctgatatccattctaagctgattaagggatttgttgatatcagcagtactggcggacggaatatttccataaagaacataggccaattaagcgacaagccattcctacaggcttgcctcaagaagctgactcccaaagaagctacaagaaaagcttctgagctgtgtaagttttggcagatgcagctgctgaacccagaatggaacccggccaagactctctcggatgaagatatccctaaggaaatttgtgtccatgatgttgatctgcaagagctacgtgctgcttggggtgaagaggtgtacatggtcgtggtgaattgtttgatggaaattgaagaatgtggcaggctgacagacagaaccattttccctgagctttggaatttcaaggagaataggaaggccactcgcagtcaatgtgttgagtacctatgcagccaagtgaagcgtctgagcaagacgactcgcaggtaaaaaatgcgtggtcatgatgggatcgtggtatgcacgaagtt

SEQ ID NO: 3620 - DNA, 915 bp, Avena sativa
ccatcagaaaagaaatggacaacttttcgtccaagagaggtgaattccatcaagctacactatatatgtagtgtagaaccgcacagataataaagtcctaaaaccaccaacgccgtcagcccacgatcagtggcttatttttcctcagctactagaacaagtttagcagatactactagactagacaacaggatcacttggcccctccaggccctccgagggtgagcacaacatcatgcaggtcactgcttcttctcctctctggctctggctctggctcgggctcggacttgacgacctttgccgggaaaccacgccgccgcgtatgctgctgctgactgtagtcaggcagcaggacatagcctgtggcctgcggcaccggtcgggtgtgaaccggaaacgcatgagccagcactggacgctgctggggaggaactgccgagctattcagaatctgatgatgcattctggtaggtcttggagctgttactccaggtccaggaccaaacaggactcctctcaagagttgcccattaacgacggctgtcatgaggtaccccgaatcgaaagctccatcgattgtcccctgaacctcggctccaatgagggatggacagaggtgctccttaggttctgctcttaggaactgcatttcgtgccgttgctgtggtgcaacgttgttgcggagaaactggtctgtcttcagaggcctcggtgtcggcgacatgcctccggtagtccttggagaaccgttgctgttgagacgaacgaatggttgcagcgctgagattgatgcgtttggagatcctgaaagcttctgagctccattctgctcctggtcgtgatcggactgggagggcgacgagtgttgggaaagagacagcgagtgctcctcctgctccagctccagctcat

SEQ ID NO: 3621 - DNA, 588 bp, Avena sativa
caggtcttgggcaggaagtatattagactctatcctggttccatatctgaggacttatacccacacacagaaactatgttaagcaatactagccaggtggatctggacaacatagatatggaggagttcccgagggtagaaaacctcgacttcatggactgcatactggaggaaggtgacctgctgtatattccaccgaaatggtggcattacgtcagatctctctctattagtttctccgttagcttttggtggcgtacgacagttataaccccgagctcttagtgacaacattgggatctttggaccagacctcgggattcaggaatttggtaagcctgactggacactacgtttgaacattctgtcgacccagtgtttcgtggatgtagccgttcatacctaccatcgcagacagtgtacattgttaccttcactataattattttgaacatttaattatcttgaggttaaggttgaatggctgatgcatttaaacgaaaccctgtaacccgtgagtttcattttcttaagcaaatatgtgtagaacttccctgtaggtcacgttgcagctcctgtgcattcatt

SEQ ID NO: 3622 - DNA, 529 bp, Avena sativa
gcaggccgcgctcaccgccgtcgagctctgccggaagcccgtcatcgcggccgtgcacggcgcctgcgtcggtggcggcgtcgagctcgtcgccgcctgcgacatacggtactgctccggcgatgccaccttcgtgctcaaggaggtggacatggccatcgtcgcagacctcggtgcgctgcagcgcctgccgaggatcgttggttacggaaatgccgccgagctcgcgctcaccggacgcaggatcaccgcgctcgaggccaaggagatggggctcgtcagcagggtgttcgattccaagcaggagctggatgccgctgttgcaaagattgccaaagaaatatcagagaagtcagcattggcggtgatgggaacgaaggccgttctgctgagaagcagggatataacagtagagcaggggctggagcatgtagcgacgtggaacgcgggaatgctgaagtctaatgacctgatggaggccatcaaagcttttgtggagaagcggaagccgtttctcaaagctctgaat

SEQ ID NO: 3623 - DNA, 832 bp, Avena sativa
aatccgatcggagcgcgatccggaaggtcggcggccagccatgtcggggatgttcggcagggtgttcgggaagtccaaggagcagagccaggcgtccgcgctggcctccatcgacaagcttagcgagactcttgaaatgttagagaagaaggaaaatttgctaatgaagaaggcgaatcttgaggttgagaaagccaaggcattcacgaaagccaagaacaaaaaagctgcaattcagtgcttgaagaggaaaagactgtatgagcaacaggtcgagcagcttgggaatttccaattaaggatacatgatcagatgataatgctggaaggtgcaaaagctacaacagagactgtggatgcactgagaaccggagcatcagcaatgaaagctatgcacaaatcaacaaatattgacgacgttgacaagaccatggatgaaattaatgacaatatggagaatatgaggcagatccaggatctactatccgcgcctattggagcagcaagtgatttcgatgaagatgaactggaagctgaactcgcggatctggagggggaggagttggaggcagagctactagcacccaccacaacggctcctaccactgccccagtgcgtgtacctggtcagcagtcgactcggcccgctgctagtaaaaccgagatgatgagttggcagctttacaagcagagatggctatgtaattagtttgcaggccttggtgtggtcatgtttagagaccagattctacagatatattgtggccacggtgttttcatggaggtcttcctaggaagatgccagagttacacacacaaatgagttgcatca

SEQ ID NO: 3624 - DNA, 949 bp, Avena sativa
ctgtctgctgatgatttgagccagcacttattccatcaaagactattcctgatcctgacgacaagaagccagagggctgggacgagagagcaaaatccctgatccagatgctgtgaagcccgaagactgggatgaggatgccccactggaaattgtcgatgaggaggccaccaagccagaaggatggctggatgatgagcctgacgaaattgatgatcctgaggctgctaaacccgaagactgggatgatgaggaggatggtgaatgggaggcacccaagattgacaaccccaagtgtgaagaggcacctggatgtggtgaatggaagaagccaatgaagcagaaccctgcctacaagggcaagtggcatgcccccatgatcgataaccccaactacaagggaatctggaagccccaagaaatccccaaccctgcgtactttgagcttgacaagcctgactttgatccaattgctgctattggaattgagatctggacgatgcaggatggcatcctgtttgacaacattcttattgccgatgatgagaaggtagccagctctatcctggagaagacatggaagcccaagtttgacgttgagaaggaaaaacagatggctgaacgggcagcaaagggttcatcagatggcctttctgaattccagaagaagatcttcgacgtcctatacaaaatcgcagacattccattcttggaaccttacaagaccaagatcattgatgtaattgagaagggagagactcagccaaacattaccatttcgattgtggcctcaatcgttgtcgtccttgtcagtgtactcttcaggaccctgttcggtggcaagaaggcagtggcacctgtgaagcctgctgctgcggtgaagaagcccgctgccccggaggcagctggaagcagcggtgtcacggaggagaaagaggacgagaaggac

SEQ ID NO: 3625 - DNA, 742 bp, Avena sativa
ctataaattgcttccatgagcagtaccgaaacaagcaagtataacaggacagatgttgatgacactgtttttgataatgctgttgacgctaggataagctctttagtggaggacatcatcaaagagcgtccggaagcaagtagcagtgaaggtgacgaggcagatggtgttactactgccgcacttgatgatttcctgagctgtaacaacaatagaagctcgatggatgaggacaccaacatagagctgctaggatctggtgaaagcaaaacccatggtgctttcatggctaagcttaaagatttgatgtgctgcagtgatgatataagctcttcaagcgaggtcaatccttgtcagctccaaacagcaagcacaaatgaatctagccaatttggtcagcttgaagacggtgttatggccagattgcaagtactgagaagacgtatagataacactagcagcgtggagggagaagaggtgtttgattcagatgattggttgggtcactttgaaagaaaacaatctcgtcgtggagcgtatgatgagctaattgagaaggctgattcgtctgatgatgctgagttgagagctctatctgatgaagcggacagcaaaactgcaagccagtacgtcggctcattgcttgaagagtgtcatgttccctcagcaccagccgaagctgcaactgctcatttgcatgacgagcggttaagccactcgccgtcagaatgggagcatgtgc

SEQ ID NO: 3626 - DNA, 738 bp, Avena sativa
aggaaggaacttcggccacggaccttcagggtgaaggcaggacaatccgtccacattggagggttaacacgcttggatattctagaagcttcagttcaaactatctatgtaactgtttgggcatctgccaatatttcccttcattttggtaagactgaaaatgctgaagaacttcggaacaaacatgttggcatcagacttcagccaccagttgcgccagagcgagccaccgagtggggccagtggatagagagacggatcgatgtgtccgggatcagctgggatgtgaacagtacggacatcgcagtttctggcctaggctggtactcgctgggcctgaaaggccatgccaccattgccgtgcatactttcgatggcatcgatgtgacgcaacgtgacgcgatgatccttcaccgagccaagtttctggagaggccagggtttttgctgcccatcgccattgccaatgctataggcgaggagactaggaagaagaacgagaggataaagggtcaacagagtgacgatgatgaccttttggatgatgaaagcagcttggatgatgaaagcagcgagtgactgcctgaggtgaccacagactgacttctgtcatggtacctatgtttagtgagaggcccttgcttgtaaaaggtaaacattgtgttagaattgttagataggagtgggaaaaaaatggactgatgttcctagatggtcattgtgaattgtgatgtgtac

SEQ ID NO: 3627 - DNA, 684 bp, Avena sativa
cgaaagtaaaagtcacctactacagataccatggcggcctcagtagccagctccttcttcttcttcgactccgagccgctgggcgagaccggcatgcccgcgcaggacgcgtgcgcgctgtgcagcaagcggctggcgcgcgacagcgacgtcttcatgtacagaggggaccaccccccttctgcagcgaggagtgccgcgaggagcagatgcagctcgacgccgtctgcgccaggcaggccgcccggcggctgcggcagtacgccgcaggaactgaggcgcggcgcgggcaccaggagtccagggaaggtctccgtcgtgagctgaccagcagagcccgtggcccgcgtagagcttagtagcttgaaccaacggggtctgaagaatcgccgatctgacgagatgaagcagtttgatcaacttctctctggtgatctcgtcggagcaggagaagcagtgaaggatctgaggaagaagttcatgtgatgaggctctggccatctggggtcgcccactggacgcgtccttctcttttcttgtctctctggcttggctccgttttgcctctgtgtgtgtgcttgtctgaaagctttgatccgctgttggtgccacaaccatgtgtaaattgaaaccatttggaaagcctttatgttggatacaaattttgcgcaagattaaaaaaaa

SEQ ID NO: 3628 - DNA, 655 bp, Avena sativa
gttatatcttctgacattgcaaattccattttatcggaatttacaaaccataaattaaggcttttcaaaatggaagatgtgagcatgggaatgtgggtggagcgtttcaacaaatccaaacccgttgtatatgtccacagtgtcaagttctgtcaatttggatgcatagacgactactacaccgcgcattaccaatcacccaggcaaatgctatgtttgtgggacaagctgcaggcagggaaaccgcggtgttgcaatatgcgatagcaatagcggaactggtgacatttgatccttcttttgctgaaaagtaagatgatgataccgagcccaagattgaaggagtactttttgatgggaaattaaagcagctagaagactaacagtgggccctgactaggccaagtctcagctagtagaaaaaaaaatgagggaatgaacagccggcttgtaatgcgctttctgaatcagcttgtagccctcttctttccccccatatatatagaaggaagttctgtgggcactaatagaaccgctcaaggacttcggttgtaaatgtgaagggtagaaaagattagacaagttgctggtaatttcggtactgactgattgtggtcctagtcatcatcaacagcccacaaggcacacaggggat

SEQ ID NO: 3629 - DNA, 841 bp, Avena sativa
acctcagcaccgattcaaaccggttgtagcatggattgaatacacggaggaagtgtggacatttgtacaaagaaagttacaagttacagtatgtcacagatgcaggcgcagaaatagttgatgcaactattactgataagagattcaacatttccgatcctgaggatatggacaacctacatgctattctttgtacagtagatgtggtcatagatcagacatatgcctcagatcctgcagagtacaagctatccacatttctggagaatattaatgtgggccgtgactcttgtttcagttttattactaaccaaagtatatggagatttgacaagagaataggagtttcaaagacacttgattggtttgatggagctatgtcccagccccagttggttctggctgatctaatagaagttttcttccaaacgggaaactatacaacaatttacttcaggaaccttgcaaaggaagagggggtcacagaactaaaccctgcactgtgcagtaggagcatatccacgccaatggagcctacgatcctgtcctgccaatgacgcccctagatgaacattattacaattcaagctactgtgctcgcaaaacagtggaagtgtggaactattctaattttgtaggttactgacaaggtgacttgaccgccagtgtttgttaagcatgttagactgcgtacttgacaaagacatatcactatagtcatccattgacttacccaaaagcaaaagcctatctttacctgtcgatcatctgataaagtggttacacaaccaataccagcttgtttcaggaatactatcacttgagaatgactaaactattc

SEQ ID NO: 3630 - DNA, 1062 bp, Avena sativa
acgaggcggcgaaggctgcggctgctgctgcggcctccaacaagggggatgggagaagaaggaggtggcggtcaacagctactgggggatcgagcagtcgcagaagctggtgcgcgaggacggcaccgagtggaagtggtcttgcttcaggccctgggagacgtacagcgcggacacgacgatcgatctgaccaagcaccacgtgcccaagaccatgctcgacaagatcgcctactggaccgtcaagtcgctgcgcttccctaccgacatcttcttccagaggaggtatggctgccgcgctatgatgctggagactgtcgcagccgtgccagggatggttggtggcatgctcctccacctgcgctccctccggcgcttcgagcagagcggcgggtggatccgcgcgctgctggaggaggccgagaacgagcgcatgcacctgatgaccttcatggaggtggcgcagccgaggtggtacgagcgtgccctcgtcatcaccgtccagggcgtcttcttcaatgcctacttcttcggctacctcatctcccccaagttcgcgcaccgtgtcgtcgggtacctcgaggaggaggccgtccactcctacactgagttcctcaaggacctcgaggacggcaagatcgacaacgtccctgccccagccatcgccatcgactactggcgcctcccggccaacgccaccctcaaggatgtcgtcaccgtggtgcgcgctgacgaggctcaccatcgcgacgtcaaccactttgcatcggacgtctactaccagggtatgcagctcaaggccaccccggcgccgatcggataccactgagtctggccgtgttctgctgaattttgcatcggttctaagcaatatgagtgtttcgttttgaaggcaaagcaaatgagagctcttttagctgtataggatgttgcaattgttgctcgtttggtaactactactgagtactgagaaataagcagtgtgcttgcgagtttcttatttaggatagtcttgaaccatttcgctctgagatgaacctatttggcgtacgctacaatgtc

SEQ ID NO: 3631 - DNA, 899 bp, Avena sativa
gttcaccgtgatttgaagtctccaaatcttctggtcgacaagaagtatactgtgaaggtatgcgactttggcctttcacgactgaaagccaacacctatctgtcctcgaagtctttagcaggaactcctgaatggatggcacctgaagtgctccgagatgagccatccaatgagaagtctgatgtctacagtttcgctgtgatcctatgggaacttatgacattacaacaaccatggtgcaacctgaatcctgcccaggtagttgctgctgtaggctttaaaggaagaagacttgaaattccaaaagatttaaatcctcaagtagctgcattgatcgaatcctgctgggccaacgagccatggcggagaccctcatttgctaatatcatggaaattttgaggcctttaataaataaggtcgccgtgccgcagctgctctgttcagactcatagcagtttcatggtgtttaggaaagaatcatttgcttaaagacgtcgtgataatatcggcaaggaggaccttttctttttggtatctagcctgttaatgaaggatatccatcgacactgttactcaatgctaatgataaggagttattgaattacactttcaagtaaaatgatccctggcaactcccttccatggcttaagatatcatggagagaagtatcctccagcattgtcgatcacgcaactggagtttcaaacaccgtaaaacttctggttaagctgtgtaaatttatagtttccgctagacatctctgtatatattatgtatgtatatgtaactagggttaccctggaaaatatgggctatgctggctgacctgacgacctcagccaggcctggagcaagcagtagtactgtatgtatgacttcttgtatgtatctagatgc

SEQ ID NO: 3632 - DNA, 738 bp, Avena sativa
aacaacatcgtccgtggaaactggatgaatgcgatcgaggagcatcaccgcaagaactcggggagaaactgccagatcaacgacattttggacattggctgctctgtcggagtaagcaccagatacctggctgagaggttcccacaggctaaagctgttggactagatctatcgccctactttctcgccgttgcagcacaaaaggaagaacaactgtctcggcaaaatccaattcggtgggttcatgcaaacggtgaagcaactgggttgccctcgaattcattcgacattgtctccctcgcatatgtgtgccacgagtgtccagcacgagcaataatcggattagcgaaggaggcatttagactacttcgcccaggagggaccattgctttaacagataactcaccgaaatctaaagtacttcaggaactatcacccgttctgttcactctgatgaagagcactgagccatttctggacgagtactacatgctggatttggaggcggcgctgggccaagccggcttcgtcaatgtccattccattctgacagaccccaggcacagaacagtcactgccactgtaccctactgagaggattgttttgccaaaccaaaattttgtgacgtcttaattcaatatttggctagtttaaacagagaaaaaagcttagtggcttgtacaaatgttctcaaatctcatatgatagaacaaagggcctaccggtgcttcagttgc

SEQ ID NO: 3633 - DNA, 891 bp, Avena sativa
gacgaggaggaatcaagtgaggaagagaatactaccacagagacctcagaggaagaagagacagaagatggtgaagagaagaagcccaagacgaagacagtaaaggaaactactactgaatgggagcttctgaacgatatgaaggctgtatggcttcggaatcccaaggaggttactgaagaagagtacgccaagttttaccactcactagctaaggacttcggcgatgacaagcctatgtcttggagtcacttcagtgctgagggagatgttgagttcaaagctttgctctttgttcccccgaaggctccacatgatctttacgagagttattacaatgctaacaagtcaaacctcaagttgtttgttagaagagttttcatctcggatgagtttgatgatcttcttccaaagtacctcagcttcttgatgggtattgttgactcagacacactgcctcttaatgtgtcacgagaaatgcttcaacaacatagcagtctcaagaccatcaagaagaaactgatccgcaaggctcttgacatgattaggaaacttgccgaggaagatcctgatgagtacagcaacaaagaaaagacagatgaagaaaaaagtgcaatggagaagaagaagggccagtatgccaagttctggaatgagtttggcaaatcaataaagctggggatcatcgaagatgcaacaaacaggaaccgtcttgcgaagcttctgagatttgagagttccaagtcagatggcaaacttgtctctctcgacgagtatatttcaaggatgaagtcaggacaaaaggatatcttttacctcactggaagcagcaaagagcagctagagaaatctccattccttgagcagctaaaccaagaaaaactatgaggt

SEQ ID NO: 3634 - DNA, 607 bp, Avena sativa
tcagcttcaatgtcatcagggatagtaggaagaggtggccaatctgcttgctcgttgtcgtttatgcagaaacacctacagtatagctcacttcgaactgccagacgccataaagatactttgcttaatttctccatcattttctcatgtatattgagaaggaagcgcacatcatctgtggctgctcggatcatcatttcagacaagggcctacttttccagaagtttgggtcctgccttagaagagtacggacttcttccttttcaggatatggcattccacaataacgaggatcagcaagaaggctcacgaaagatatgtaaacatcatatgctctctttttcccttcctgctcttctatcagagaataggcgatctgtgtatccatcacattgtgcaatttaatgccaaactggaaatacagtgcctcactgtcccttttacagtcgtgaataactttggtgatataatctgactcaagtgctggtttgcaagcttcaactagttctttgccaccctcaatagcatcaaccaagtaaaacagcatcaggaaaatgcaatctgcatgacacagagagcaccatggcggcaaaagatcaacacctt

SEQ ID NO: 3635 - DNA, 956 bp, Avena sativa
ccagatccctcccgctcctcaggaaccggaggtgcgctcggtccgtggccgcggctgccgggggcggtggggccggactgcacggagccgctcagaggcacgggatttggtcgatcagggatgacttgctgatgcccaggtcgccctacttccctgtggaggctgctggggagcgcgggccctcgcccatggtgatggagcggttccagggcgtcgtcagccagctcttccaacatagaattatccggtgtggcggtcctgtggaggatgatatggcaaacatcattgttgcgcagctgttatacctggatgccgtcgatcccaataaggatatcattatgtatgtgaactctccaggaggatcagtgacagctgggatggccatatttgatacaatgaagcatatcaggcctgatgttgccacagtttgtattggacttgctgcaagtatgggtgcttttctacttagcggtggtacaaaagggaagagatacagcttgcctaactcaagaataatgatccatcaacctcttggaggagcccaaggacaagagactgaccttgagatccaggccaatgagatgctgcaccacaaggctaacttgaacggatacctagcgtaccacaccgggcagcccctggataagatcaacgtagatactgaccgtgatttcttcatgagcgcgaaagaggcaaaggagtatggcctcattgatggagtaatcatgaaccccctcaaagcacttcagccacttccaacttccagttagcctggctagatgtttttgtaatttcgtgatctatttttgttgtgatcttttggagctgtatttgtaccacgctgttctggttagtctggctagatgtttttgacagttcgcatcctgaagcctcagaggttgtacgaaacagttgcactactagaatatttatcatttgcagtaaaatattgacaa

SEQ ID NO: 3636 - DNA, 1020 bp, Avena sativa
ggaactcccatcctcagacaagcagcaggtacaggaggcaagataagttacacaattaacagcatcagatctcaagaaggacaatgcattttgcttggagaaggtggctctgtgaccctaagtgttcccccgagctccgcgggaactagaggaacaagggagtggagaacatccgttatcagtggtctgtaactcggttcgggctgcacgcatagaactgccaccgccgcgacttggtacaagtgttttgggtccattgtgtccttgatcactgggtcaattatgttggggagcttcgatctgtcggttagctgcggcatggcccaagaaacaattgattggcactgagatggtgacatcttctcaactggcttccttcccatcaggagctctagaagcactactccaaatgcgtatacatcactcttctcagtcaacttcccatctaataagtactcgggagctacatatcccaaggtcccagaaatcttcaggttccctttgtcgagattcccaccggtcactgcaaggccaaaatctgcaatcttggcattgaagtctgaatctaaaagtatattagatgatttcaggtccctatggatgactggaggattgcagtgctcatgaagatattctagtcccctggctgtgtcgagcgcaatcttcatgcgaacatgccagctcatagctgatccatgtgaaggcccatgcagctgtgtctccaatgatcccttctccatgagctcataaacaatgtagtgattgccaccatggacgcagaagcccaggagggacacaatgtttgggtgccgaatcctgccaagcagatccagctcattctcaaattccttctcgcagtctggcccgccgccttcgagcctcttcaccgccgcggtggcaccaccgtcgaatgcagccttgtagacgcagccgaatccgccgacgccgagcacattgccctcattgaacttgcccgtcgcggcctccagcgacgggtactcgatcatcgccacgagcccc

SEQ ID NO: 3637 - DNA, 595 bp, Avena sativa
agaggggagatgggagaggggagagcagtacaaaactgacccccccgtctccctctctcttcctgcaaggaaaaatgatgaggtttcctgagccggcgaccgagcagaaggcctcatcgtccttcgctaacctcctgtccatcttcctcggggccagctcctccgagccaaagcccaagcggagcttcgacgcagagggcgtcgtcgggctcggcatcgtcgcggccatgagcgccgagatgacgcggcttgcggccgagccgatcgccatcggcgccgcggcacggcggcgccatgcccgggaggaggacgagctgtccgagagctacacgtgcgtcatcacgcatgtggctggcgccggcgagggcggtggcagcgtgcggaagcgcgtgtacttcgggtttgacgacggtgggggcggctggttcgtggaggcctgtgaggaggcgccggcgagggaggctgacttcttgagccggtgctgcctgtgcggcaagcggcttgatgggcttgacatctacatgtataggggggagaaggccttctgcagctccgagtgccgatgccaccagaatagctaatggatgaatcacgc

SEQ ID NO: 3638 - DNA, 881 bp, Avena sativa
gagagaggggagcagcaacaggatgatgaagcgccgccgccaccagtggattcaaggaaggctaaacaggaccggtatgatcaaatgagaaggaagaaggatgaggagcgtgaggcccaagagagattattggaagaagaagcaatggcacggaaagcaaaggaagaggaggcagctgctcttgaatttgagcaatggaaaggggccttttcagttgatgctgaagggacaactgaaagcgagacacaagatgatggccagggtttgctccatgattttgtggagtacataaagaagcagaagtgtgttccgctagaggaccttgctggagagtttggaatgcgaacacaggactgtataaaccgaattattacgctggaaggcatggatagattatccggcgtgatggatgaccgtgggaagttcatatacatatcaatcgaggagatgcaggctgtcgcagactacatcaggaagcacgggagggtgagcatatcacatctggccagcaactcgaaccagttcatcgatctggagccgaagcccctgtacggggagaaggaggagagccatcaggaagacgggagcgcgccgccccagcaggcgcagacagtcgcggatctctgattaggataagtcggggatcgttgcttattgtccctgcaacatagcacatacccttttactttgtgcgtatgtggaactttgtgctaaccttgggtggggctcgtgatgtgggtctgacagaaaaaatagtgctgacaagctgatggtagttcatacattgtcatgtttggccttgtactatgcaccaacgcaaaggatccaacgagcaactgccagggtcacactgcttgcgaagtagaaaaggtaatgattct

SEQ ID NO: 3639 - DNA, 689 bp, Avena sativa
gttggagaggaaaacttttccttttggtgcacacgcacctgaaattgctggtttgaggcaagagagagccgagggaaagtttgtgcctgacccgagatttgaagaggttaagggatatgtccgcagtggtgtctttgggactagcaactatgatgaattgatgggttctttggaaggaaacgaaggttatgggcgtgcggattattttcttgttggcaaggattttcccagttacattgaatgccaggaaaaagttgacgaagcataccgagatcaaaagctatggacaagaatgtcaatcctcaacacagccggttcccccaagttcagcagtgacaggacgatccatgaatacgccaaggacatctgggatatcaggcccgtcatcttgccctgaaaaatacaatacaagcggcgctttcgggagtcttgggagtctatgagttcggtttggtcacagcttgcctcgactcctcagcgagaaggttctgctcgccccagtttcgtataggctttatgcaagttctgacatggacctgggagcttgcagcgtagttcatctttagcagtcatatgcatgtcagttagccagttctgtatcctgtctgaaactgcttatgctgcctgtactttcgtaataaatgtggggcagaaacatcaaacaacaaatttggttatctagacaaaaa

SEQ ID NO: 3640 - DNA, 807 bp, Avena sativa
tataagatgttttaggtttgtgaataaaacatacctagacttgttttagtgcgtagattcactccacctaagtgaacggagggagtagaattgatacatcttacagggatttggaccaaacacattacacagtcgtaactctgcattccaggtaaaggaaaactattctcctagaaaaaaaggtaaaaacctatgctgctggcatttcttttttgaaacaagggtgctgctggcatttccgcattccataaagccaacaccgtacaggccacaacacacgcttagcaacgggcaggatatcaaagacagatcaaccctgtcttgccaacagcttcgacggaccatcattcctttggtgtcctgtactcaatcatttctgggcagtagcgcctggacagaacgtcgacctgctcgatgaaggacttctccctgtggccgccgatgcctcggaccatctggttccatctctggcgacagacctccccagacctgtgatcgagaaggctgtcccaatcaacatcttcaacacaaacagcatcatccttctggagcgcttccaccagtagataatcatcaacatctgcccagattccttccctaaccagcggagatgctaatgtatcgtaccacttcagacagcaattcttgtgattacgggtggttaatttgtcactgatggcctcccagccaatgttatcccttagcttccgattagtacgatcttttatttgatgagctttcatacgcaagtcaaggttcaccaaatcaaataactgttggtgctcatcctgtgtccattggcctgaa

SEQ ID NO: 3641 - DNA, 944 bp, Avena sativa
cgcccaagaggtccaggacaatggccacggacgcggcggctcctccggcctcggcggggtgctccgcgatgaaggccgagttcgccacgcacacggagtacctcaacacgctgaatgataaagggaaaggctagtgaaaagcaagtcgggatgtgacaatgaacagcaaaaaagtcatctttcaagtccacaggatcggcagaaataacaaggaggaagttctttcaaaggcagaaaatgatcttgcctctgtggttaaccaacacattggaaagttagtaaaagaattacagggaaccgacttctggaagcttagaagagcctatacctttggtgtacaagaatatatcgaagctgctacgttttgtagattttgcaagactggcactttattgagtctagacgagattaatgattctttgctagcagtaagtgataaatctgttgagcccttgcagataaacgtgctcgactatctattaggggttgctgatttgtcaggggagctaatgaggcttgcaattggccgtatatctgatggggaaattgaatatgctaaagatatatgttcatttgtacgtgacatttatagggagctgacccttgtggtgccactgatggatgataataatgagatgaagaagaaaatggaggttatgcttcaaagtgtcgtgaaaattgagaatgcttgctttggtgttcatgtgagaggatcagagtacattcctatgctggggtcgtcggctgacccagattacgcgtttcttggtgccgctgactacgattagtgaagccagaaagatcacaaccttctgatagagaaacgagtcccagaaagatcactaccttctgatagagaaacgagtcccagaggacatgttacaggaacttgtctcagaaaagacagttttgaacgagactgaacatgtaatcctgtctaagat

SEQ ID NO: 3642 - DNA, 827 bp, Avena sativa
ggagaagtcaagtccaaattgagtgatacatttgttgagctgtttgctgaggtattttgttgcttgcctcttgctcatgtaatcaacaagaaggtctttgtatgtcatgggggtctctttagtgttgatggagtaaagttatccgacattaaggccattgatcgtttctgtgagcctcctgaagaaggtttaatgtgtgaaatcctatggagtgaccctcggcctcagcttgggagaggcccaagcaaacgaggtgtagggctttcctttggtgcagatgtgacaaagaggtttttagacgataacaatctggaccttgttgtccgatcccatgaagtgaaggatgaagggtatgaaattatgcatgacggaaagcttatcactgttttctcagctcctaattattgcgaccagatgggcaacaaaggtgcatttattcggttcagtgcaccagatttaaagccagatattgttagtttctcggcagtgccacaccctgatgttaagccgatggcctacgcaaacaatttcctccggatgttccaatagcagcaggtcgcacctgtgtgtggtcaattttgatatgcttaacttttctctgcccagctcatttcgtaccaagtcacatccaagtctttgccttgagcagcaaatattttgctacaacagttctatatgctgctgttacggtgttagccctggggtcccttcgttacattattggtgctagcatttatttagatgtgtagttgtacaattgtttatctgtgttcttgtctctgtgattccatttatatctccagtacgttcgtcctgtgggattgctt

SEQ ID NO: 3643 - DNA, 744 bp, Avena sativa
aactcgcagtcatgagttaaacagcggttgacagacaagacaaggaagtggctggtagatatcttgatgaaagttacaagctggtagtcgtatggaacttcaatcaagtgggaaggaaggtgttcctggtgctacagtcccgcacaccatgtcgaataccttgatagatcttactaaaaactctgtgtctgggacctattcattgccaaatgcaggtgctcctgttgctgcaatctcacagaaggtgaacttgacaagccatgctgaaaactctgggatctcggcagtgataaacgcaggaacaagtaagcttctgggttcggaaaattccaatataagaaagcatccgaggacagaagaaataacttttgagcaagatcctcatcgaaaaatgcaacggacaggtggggcttttggtgaagcatgtctggcatcaatgagtgaagctgaaactggagctggctcgcacgctagtattttcctggaaggtcctcagcatgaacttgagcatgcctagctaagctaatggtggcccttttgtacttctgattgagaggcggttgatgaaacaagatgctgttggaacaaaagaaaatttttatcttgctgcttgtgctagtactctgtttatgtgacctactcccacttgagagttgcaagcctcgtagaacttgtatattatgttatcccacacctaattctctgagttttctaatatgtatgaagcagtatgctcttgtacaa

SEQ ID NO: 3644 - DNA, 591 bp, Avena sativa
tatctggttgcaaggtaaacaaagtctgtccactggagttcgatgacccttcgtcagtcgcaaaggcatgtggcaatacatcttcttcaaggtctgtatgctgtgcagcgttgcactcttacattgcaactagacagaagcaaatatttgtcacgaacttgcaagcaattaactgtgcaacattgttcggatcaatgctacagaaagctggtgtaggggttgatatttatgatctctgtgatatcgacttgaaagattttagcctgcaagcttttgggcaacaaggctgtctacttcggagcttacctacagacattgtattcgacaacattacaggcattagctttacatgtgatttgagtgacaacattgcagcaccatggccagcctcatcatctcttcagtcattgtcgctttgtgctccagaaatggcattgcctgcattaccagtctcaccactatcaggaagctcagcaggtatctccagaactggaatcgggattctgctgcctgttgtactcctcaccatgaccatctccatctgagtacacacttcatgtagcaaagccaggagcgtcttaccttgtcagg

SEQ ID NO: 3645 - DNA, 676 bp, Avena sativa
cgtggatgtggactacgagcgcttcgccgacggcgtgagcgtggacaccttcgtggagtgcatcggccggctgctgacccagctcaaggccaagttccccaacatcaccacctccatcgcgccgttcgaggacgacaccgtgcagaggtactacaagccgctgtggagcaggtactcccgcgtcatcgactatgtcaacttccagttctacggctatggcgccaacacggacgtcaagacctacgtgatgttctacgaccaacagcaggccaactaccctggcgccaaggtcctggccagctttaagaccggcgacgtcacggggctgctctcgccggaccaaggcatcagcgccgccaaggagctgctgcgccagaacaagctgccagggctcttcatcttctccgccgacagctccaaggtcagcacctacaagttccagtacgaaaccaaggcgcaggagatcgtcgccaaccactgatggacggtcgacgatcgcgcggtgtttgggctcgcgatcgagaagagccttagaataagtgcactattcagcacatgtattggctcgcgtatgtatgcttgtttgcaaattccgatatggaccatggtgttcctcaaataaactttccaaacaaacactcccaattgttctaaaaatgtgttttcatttctaaaa

SEQ ID NO: 3646 - DNA, 975 bp, Avena sativa
ccgaggttacggttcaggttagggttggatggtgctttattgacctgcatgctgcggcttagatcatgaggtcaagaataaggcttgaagtgtgagttgctgcgactctctagtaagtaggctacttttctcatctccggaggcatttgctttccttccgtcttcggtctcgtaaccccatgactgcgcgcctggtcgatctgacctcctcgcgggatccgattcctggcacgccctcgcgggttctcctccgtgccgccgtccatccgactggtccgcaagcccacgcgtcagcggagatgcagaggccgggggatttcaagctcccccctttcttcaactacccgccctactttactttgcagcctgtgagagaaacacgcgaaaaacaggtgcagctatggaaagatctgatacttgattactgtagaagtcaaaagatgtatataatctccctgggagaggattttccgttgttctccaatccgaagattgagagaactctaagctatgaagcaaaggaagtgttccttgcagctcttgttagtgaagggcgcgccgagtggattgacaaaagtcacaagaagtgccttattctttggctgcggattcaagattgggccaattacatattagactttgtgaaggaaaatgggttggaagtaacaacagttgaagatatccgctctggaattgaaacacatggaaccgaacttgcgggaattgatcgtagtgtcctcatgcgagctttgaagctgttggaacaaaagggaaaggcggccatctttaagggcacttcagcagacgatgaaggcgtgaagttttgtgtttaaactttgtgcgctcctcagcaacagatgaataatcttgatcggtgtcgttgaacttcgtaaattgttttttacccgtatgctgatcacatcattccgagtattcgccaacatctttctcactgcttggtatttgtaagacagt

SEQ ID NO: 3647 - DNA, 761 bp, Avena sativa
ccatctgacaattatggtaggctggtcatctcaaagtctccaaatgctatcaatcctcttgtctggggccactctccactccttgcgatcgatgtttgggagcacgcatactacctggattatgagaatcgaagggctgaatacgtctctgcggttctagagaagcttgtatcatgggaaatggtggagtctaggcttcggaaagctgtcctgcgagcaatagaaagagatggtcaaaccagcacaaagcagcgaaggaaggaaggccgcgccggagatgcaagcaccaacggtgaggcaaggaggcgaccaagaagtcaggatcagcaggccccttccagcgtgacaatggtgcctgcaggtgaggcagtaccgagctgagtctcaaggctggctgactcgtaacacaggcaggcagctatatcccaaatccctctagaaccgtagtttctgaagactgtgcaccgcactgcaggaggcacttggtgaccattgtagcacaatctggacgccccagtttttgtccatgtttgttgaataggagtgtagcatgtctgtaccacttgaccagcaagcaccaatgttggttggataggctaaattttggtaagtagcctgagggtctgatgtcctgtatggatgtagagataggcttaggaggtggactgtagtcttagtggacttgcttgaagagaaatcacaatttctgtccctttctttttgaacatgaatatcaacaattttcattcgatgctcaaaaa

SEQ ID NO: 3648 - DNA, 795 bp, Avena sativa
cgccaaccaccggaaaatcggttgccgcaatgagcgagcctagcttgattcgtgtcactgcagggttcgtccaagttggtggtctcagtattactggtagctctgaccgctggcccctacagaagaatggaaacttcagtctacacctttctctcacggtggagagcagcgtgtctacaaaatccattggcttcgacgaggagccagccacacggatgaacaccgtgccctcagtgctgcgtggcggcctgtaccttttctttgtctcggccatgatcctcgtattgagtttcaaagtagggtcctgtatctacagcaggtaagttaaggcgctgttttattctggttttatagtggaacaatacatggtgcccccttgatgacgacgagggaagaacagcgcaagaaggttctcttttacgtgtttagtttgcatacgattctgacttggtgaaaaggtatagtagcaataaactcttggaagtggagaaagcacccatttggtgcctgagaccttgtgcttcatttaggacctgtaatctattcttcttatttggttgttgcgcagaggcctggggcccctaacgatgtaacattgaatatagaccgtgattttatctctttgttgtttttgtgtgtccgtttctaagcactggcgttgagtgcttttgtaacagttgaagattgtttagtcagtgtggtgcgcttgtagcggttttctagtgctatgtttctgccaaatgaagatggcagtcgtcggtattctctggcactcatgttattctggagagcagt

SEQ ID NO: 3649 - DNA, 549 bp, Avena sativa
aacactacaactgattcttatgggaatgcacgaccaatagttggtggatttgtgattcaaacatcatctggggttgttactcctacaagctttgacatggcttcaaggtgtcctgatgaaatagtcagaagaattcgtgtgagtgtttcttcttatgatccaagctggaaaggaaagttactggagacttacgacacgcacactgatactttccaaattgcccctgcctgctggatgccagactgggcagaaatagcatcctcacttaacgagctttcagactctgaaatcctgcttcagtgctccacctctccagctgcagaaccacctcattttgtggaaactgagagaaggatatggaaatatttgatcgagaatccagactgggaaaacacatttccaaagtacaagccccgggtcttccatttgaccagtgatggaaggtggtcaaggcactcttagcatcatccagatcttgtcatccgctggtgctctacaagcgaaacagacgagccttacaccagcacctctgcgatcccatcccagtca

SEQ ID NO: 3650 - DNA, 1101 bp, Avena sativa
gaagcatgtttctcaagctctacatctagtgctttagaaaagcttgacaaggacaagatggtcatcgattgtgagtctcttgggacaaataatccaactacaaattcccagtactcacagcccttgcatcattcatccgagctatcatgtcctcctagaacaccggcagaaaattctaccctagcttccatagctactaagaaactgtttggtgttgacattgaatacggcgtggccaaggctttgcatgcccaggtttgtcaagtggccaaaccttcttcaaggcaatctgatcaagtctccagggcaacaatattaaagcatgtggttgagccacttgactatggaacagtgatggttggcaaaagttggtgcaaccatcaagctatcttcccaaaaggatttaggagtcgagttacatttcacaatgtactagatccaacaaggacatgttgctacatatcagaagttcttgatgctggacttctcggaccattgtttagggtggctgtagagaagcttccagagatttcttttactcacacttcaccaattcaatgttgggacagtgtgagagacagggtgaatgaagaaataaaaaaacagcatagcgctggaaagcctggcgttcctgctttattatccaccgattctgtaaatgggcttgaaatgtttggtttctttttcccgccaatcattcaggcaattgaggctctagatcccaatcacaagtgcttagactattggttgtctaagcgtacacctcctttgaaaagactccctttggagtctgtgatggccggcactaataattccccaatgaatttacttggggttgatattaccagcaaggaatctgaacaatccagtttcagcaataattcctgtgccgaggaggttaaacttggtaggctgcttaagaaggctaaactaccagaagactcaatcggcagcagagtggatagcagcagcatttggagtggcagtcgacaatctgcaggatgagatgaagaataatgtggataaatagtgccctcaatagataaaccatttttatctattagaattgaactagagccaccattgatttgcttcttatag

SEQ ID NO: 3651 - DNA, 723 bp, Avena sativa
agtcgctcttacaacgtatgctcacattcatgcaattgaaactttctatgtgttcatgggattgtcgaaggtcccacaccatccacgactggtcaaatcagcatggcaacccattccatacatcgtgtgttctcagggatagcttacaggaatctaccgagaagacattccccttttgtgtgtcatcatgtgagggctaagaaagtttacgcttcatcatcactgtcgtttccaaagactgaaggaactttcgtggcaatctttggtttcttgctaatcgtggcccaacaggagccttggaaggggccattttggagaagccaaacttcaatgttcgacgctgatcctgattgccagcggtaggctttgacgtgacttgctctaccgagatctctggctgttcttgcttctgtttctgctgctttctatgagcatctgccagctgggcaaatttggccagttccttctcttctcgctgttgctcacgtttctgcctatcatcacggttgctgttgctgctactttgcatttctctcatttccttaaacctcttcctgtgattatggtcatatgagctcagatgactctcaaattcatgtgccagcttgtactgtttattacacaggctgcaaaagaacgtcttctgtatctccttaacctcactgcggattttctgctcacgttctgctgtgacctggattgtcatgatttgcaccaagcagg

SEQ ID NO: 3652 - DNA, 837 bp, Avena sativa
ctccaaggaagatcttagcctcactgattccttgattgcaaagatcttccttggagtgtaagccacagactccactgtatggaagatctttgcaaatcaaaggaatcagtgaggctaaagttgacaagataattgaagcagcatcgaagattgttccactgggatttacaagtgccagccaactacatgcacagaggctagagatcattcaagttacaactggatcaagagagcttgataagatcttggaggggggaatagaaacaggatctatcacagagttatatggtgagttccgctcaggaaagactcagttgtgccacaccctatgtgttacttgtcagcttccattggaccaaggtggtggtgaaggaaaagctctttacattgacgcagaggggacattcagaccacagaggctcctccagatagcagacaggtttggactaaatggtgctgatgtattagagaatgtggcttatgcaagagcttataatactgatcatcagtccagacttttgctggaggcagcttccatgatgatagagaccaggtttgctctcatgattgtagacagtgccacagctctgtacagaactgatttctcaggtagaggggaactatcagcgaggcaaatgcatatggctaagttcctgaggagccttcagaagttagcagatgagtttggagttgctgtggttatcaccaatcaagtagtggcacaagtggatggatctgctatgtttgctgggccacaggtcaagcctatcggcgggaacatcatggcacatgcttccacaacaaggcttgctcttcgcaagggaagaggagaggagc

SEQ ID NO: 3653 - DNA, 793 bp, Avena sativa
cgcggcgtactacgatcggccgtccgactcgatgccgcggctgcacgcagactcgagctgctcggagcaggtgctgtcgggcgagcgcggcggtggctgcggggaggtgcagagccagcccaagatcagcgagtgggagcgctcattcgccaccgtttctgaccccgtcaacccggcggccggcggcctcggcctcggcggcgacccgctcctccaggacatcctcatgtactggggcaagccgttctaagcgaaaacaagcgatcggtccatccatcgaagccagtactctactcctattcttggcgtttgtggtggcattggggcgatgacgcgggcgagccgccgttcctgacctgatgaacaggacattatttaagcagatattagttggaagatgaagacgaaagaaaaatcaggtgcttgatgacgacttgaatgaagcaggcggcgatgatacggcgggtccccgggcctggagatgacgcggagatgatagcaacgtgattgtgcgaagcatcatcgggcagttgtgtgcgaagcatgtgtgtgtgtgtataggtgtacatacatggaacatgattgattcggtgcaggggtattcctgctcctgctagtctcttcattcttaattttagggtttccttttgatactgcaataaacggccattgtgctattggcagaagtgtccactgcccactggtgcgatggtactgtatttgatcatcaaaatgaaactgaataatggtcatgtggcagttgttgatttctctcccctgaaaagaaaaaaaa

SEQ ID NO: 3654 - DNA, 445 bp, Avena sativa
  modified_base (22)..(22): a, c, t, g, unknown or other
tgtctccccatgatgagtcagnaatactgagcaatgatgctacagtcaatgatatggagggagcagcggtggcatatgttgccgaaatgttctcaacacctgcaatttttgtcaaagccgttactgatatagttgatggggagaaaccaacagccgaggagtttctacagaacctgatctccgttacgatggcgctggaccaagcagtcaccaaagtgatcgacttcatcgatgggaaatgcgtttcggatctctgaaaagcccaactatgccgtatgctgttctgggttccacaaatggaaggagcctgaccaaacacaagtcccccttttgaatgtactgatgggtgtataatgttttcagggggattccatgcacgctatttcacattcttgtgactccctgtgtacaaaattcttggcgattgcttggagccatttacagg

SEQ ID NO: 3655 - DNA, 781 bp, Avena sativa
aagaacctttagttagacaacgttctaggcgtgttctatctggaaatgcagagccaacagaagccgtgcaaagcgctgacagtcctcccatgagccctcagcctcatggtgctcaaagttgctcaccagcacaatggaggtttcgaggagtggggtggcatttcttccgaagagcatgatgaagctgttatgcttgaggctgcaatgtttggtgggattcctgaacacacagcatatccatttcctcgcccatctcatggaatctcagctggctatccccgagtagcacatcctccatcaccagcattaactgcacagaggctgttaagggagcagcaggatgatgagtatcttgcagccctccaagctgatagagaaaaagagttgaaggctgtggaggaggctgagctccgtagattagaagaagctgctgcaagagaagctgctattgaaaagcaaaagcaagagaacgaggataaactgagaaaacaacttgaggaagaggagttggagtcgatgcttgcagccaagcgagaatcattaccgaaggagcctcttccaaatgctgaaggagccgtcacagttgtagtccgcatgcctgatggtactcgccagggaagacgctttttgagatctgaccagcttcaggttctttttgatttcatagacatcagcaggacattcaagccaggaacttatagactggtgaggtcttaccctaggcgtgcattcaccgatgaggagtgtcagatgtcgctgagtgatgttgggctcaccagca

SEQ ID NO: 3656 - DNA, 652 bp, Avena sativa
ggaggaggctgagctccgtagattagtaagaagctgctgcaagagaagctgctgttgaaaagcaaaagcaagagaacgaggataaactgagaaaacaacttgaggaagaggagttggagtcaatgcttgcagccaagcgagcatcattaccaaaggagcctctgccaaattctgaaggagccgtcacagttgtagttcgcatgcctgatggtagtcgccagggaagacgctttttgagatccgaccagcttcaggttctttttgatttcatagacatcagcaggacattcaagccaggaacttatagactggtgaggtcttaccccaggcgtgcattcaccgacgaggaatgtcagatgtcgctgagtgatgttgggctcaccagcaaacaggaggccctgtttctagagcaaatttcagggtagtggataggatttagtgatggatgtcatccggctggggatttattacagttttagttctatctgctgccatatgttgacgaaaaagttagcaaggtttctcatgaaccttggtgttgaaaaaggtcgttatcctgtgttgttttatggaaaccgtgacactacttatgtcctactcagcgtctcaggcccgctttaggcatgcagtcagatgtacgtatatgcagtgc

SEQ ID NO: 3657 - DNA, 674 bp, Avena sativa
ccagtatttagatggttgctgctgcgcaagaccaacaatgacattgcaaggaggaacaaggccagagaagaaagagcccaggaactggtttcaccagaaccttctctcagaaggaagttgctcagtgcacgcgacatggctcagcggaaggtgattacaccggaggagattgtctacacaaccgaaaaggatctattggatcaggaatatgaagcgaaggagtgggaaaggcgatttaaggaatcttgagtcagactgatgttaatgatggatatacttggcattcatattatgcacgaatggttatttggtctggcttgccgatcatttttgggtggaggatagatctgactgaaccattcaaccaagtgggcagaatgcgtatacgacagactggatggttccgaggcttgctgatattgtgtgaaatttttgcacaagcggttggttttaattccatggatcaaggtactgctgctgcagctgtacatatatgtaacattagtctgcagaattgtatagatagttgtagttcaatgcagaggatcaggaaatcgaaattaagaacttgacacaagagccagggataatattactcccaaatggagggctagtaggaaatgcaaaggatgatgaccgttgaactgtggccaagacattggcatgctggattc

SEQ ID NO: 3658 - DNA, 888 bp, Avena sativa
  modified_base (887)..(887): a, c, t, g, unknown or other
gagcacacaaacaccatcctgctccctctgctccacgttgcaactgctctatctccagttctgtggcagctgaaccttcctgacagatttgacatatacagcttggggctcatatacttgcagatggcatttccagcgttgagaactgacagcagcctgatccaatttaaccgccaactgaagagatgcaattacgacttggaagcttggaggaatctggtagaaccacgagctaccccagaccttcggagggggtttggacatcttggacttagatggcggtattggatgggaactcctgacatcgatggtccggtacaaagcgcggcaaaggaccagcgccaaggctgcattagcgcacccgtatttcaacagagaagggctcctcggcctctccgtgatgcagaacttgaggctgcaagtgttccgcgcaacccagaaggactatagtgaggcagctcgatgggtcgtcagcctcatggcgagatcaggaacagaggcagcaggagggttcacagaagcacagcttcaagatctcagggagatcaagccgaagaaagacagcgcgcagcgcaacgtgctggcatcgatgctgcgcgtgcagagaaaagtcattagaacgatcaacgagagcattggcgagcttgccggcgagagcaaaagcatctggtggagccggtggatccccagggaggagtaggcaggggggcagctcggctctgtacattgtccagttcttctgtaaaattctggtaacggaatgtcctactacttgcatcctagtttctaccgttggtgagtacagattggtccatcggaaacagcacgataaagccgataacatataccgcgatatgaagatagatgtaaataaaaaaaaaaaaaana

SEQ ID NO: 3659 - DNA, 623 bp, Avena sativa
gctcatcgaccgtttcaagaacaagacactcaccgccgaggagatggtcctcctctccggcgcccacacagtcggccgctccttctgcgcctccttcgtcaaacgcatctggaacggcaccacccccatagtggatgcagggctcagcagttcgtacgcggcgctgctacggtcgctgtgtccgtccagcacgacgcagacgacgctgatcacgacggcgatggatccgggatcacccaacgtgctggacaacaactactacaagctgctgccgcgtaacatggggctctttttctccgacaaccagctgcgggtcgacgggaatctcaacgcgctggtcaacaccttcgcagcgaacgaaaccatgtggaaagaacggtttgcggctgccatggtgaagatgggccgcatcgaggtgcagacggggaggtgcggacaggtacggcttaactgcagcgtcgtcaaccccgccgcctcctcgccgtctccggtcgagctggcctccgtcgacgaggagggcggcatcgccacgagctagctgattaaccatcccgccatcgagttccatcttctacgtggtcgttttttttctattttacgttgtgatgatcgcccatgttggt

SEQ ID NO: 3660 - DNA, 866 bp, Avena sativa
gaagtgacggtgctacatgccggaaattcaaaaaaagtagtatactttcatgataggaaaaaatgataggaaaatgccgaaaaatctacaataatctgatgtctgatctgattacaaccaatacaacgaagcgacagtgctatcatgaacatcatggttgagaagccattgctacagcgtggtgatggacatgccttcgctgattgatcttacaaactgctttattccaattgtcttcattggctcaacgaaggcaacatcggagctaacaattattcttgaccgagaagtgaggatatatgcatctttgatgaggaagcccttgatgataggcaatgggaagccttttccgagatacgagttcacatagggtacaaacaaatctttcaggacgatccgcatcaccctctgcactacactagtatggagtttgccaatgtcgctccacttcaagtcgaacgagaaataatccaattcaactctcccaacgagattattcccagaaacactagcacctccagaaacagcaaccgacagtgatatgcatgcaactggaactatgtcaccagaactcaaaacgttaacaatgacatctaagtcaactgtggcatcaactccacccacattaatcctcacggagggaggtgctatagcagaaatattcagcagcatatcttcgtttggatatttacggtacaacctaggaatcaaaaacctccagctagcagtgttcaaaagaaactgattaggaaccttgtccactatgtgttgtagtgaacctgccttgaagtatagagctgacacagagttgaaaacatcttcatccaatgaaatccatagcatgtttgaagacttgccaagaggct

SEQ ID NO: 3661 - DNA, 487 bp, Avena sativa
gccaacgagaaggatggggatttcacgcttgctgatttggtttcatgtcaggtttacctcaagggcaaatgccgggctctgtacatccataagttaagagactgccgtgtgtttattggccctgttttcggctcggtgctcatagaggatgttgagagctgtacatttgtaatggcggcacaccagatcaggattcacgaagcgagggcaacggatttctatctgcgggtgaggagcaggccgattattgaagattgcagtggtgtgagatttgcaccacatgctttgaggtatgtaggaatcgaagaggatctgagggattctgggcttgaggaggatactggtaactgggccaatgtggatgacttcaagtggctcagggcagtgcagtcaccaaactggtctttggttccagaggaagagcgtctgccgactgtcgacatttcagaagttcagkaaacagaggattgtaactgagctcctcgag

SEQ ID NO: 3662 - DNA, 592 bp, Avena sativa
aagatcattcaacactggactacacacagaaccttgagctggagctcgcattaatcaagcaggccaagcaatccggagccgtctatcttatcgacaaccccatcgtcaaagccaggaaggactcctggttcttcaagaagttgaccataaactacttcttcgcgttcctgagaaacaactgtcgcagggcggtcgtgtcgatgagcattccgcactcaaacctgctgcaggtgcgcttgacctcctatgtctgaatgcggaagctaccgtatcagcactggtagcttttgttcatggcgatctacttatctggtagagataacactaaccataacgacaatggtgatttgcaaaagatgatacttcgcttctggctatattcagaaggcggtaagtaggacagtaggaacacatctctcctgtaatttttgtacaatgtcgaaatgtagccggcattgtggcagcaggcacatcacatgatgatgtattaacctgtattcagcagattgttgtgtactacgttgatcgtgtggggccagttttgatatttgcaaagggcagagttttgatatttgcaaaggcagaaaaaaaa

SEQ ID NO: 3663 - DNA, 604 bp, Avena sativa
attcattaacttggtacaaggaaggctcgaacaaggacagccgagccgctagtgcctcttcaaatgcatggaaaagaggccaccaaggatatctcctggaatcgctaaactgattagaatgctaagagccaaaaatgttgatgtgtaccttgtctcaggtggattccgacaaatgttcaagcctatcgcgttggagcttggcatcccccctgaaaatatttatgcaaaccaattactgtttggaaattctggagagtatgttgggtttgacccagcagagcctacttcacgaagtggcggtaaagccgtagcagttcaacacatacgacagaagtgtggttacaagacactcgttatgattggagatggtgcgactgatcttgaggctcgccaacctggtggagcagacctattcatctgctacggaggggtgcagatgagagaagcagtggcagcaaaagcagactgggttgtctctgatttccaagagctgatggcttatttggcatagtaccattctgaactacagtatgagtggtgcgtagttttttctatgatttggtgagttaattaaatgctcatggaaatgctttccaggctgtat

SEQ ID NO: 3664 - DNA, 792 bp, Avena sativa
cggccgcctcagctgatccaccgcccacacgccggagatggtgaaggccatcagggtccacgagctcggcggccccgaggcgatgcggtgggaggaggtggaggtcggggagcccaaggacggcgagatccgggtcaagaacaccgctgtcggcgtcaacttcatcgacgtctacttccgcaaggggctctacccagcgacactcccctttataccaggttgagtctggtcatactgttctggtccacgccgccgctggtggagttggttcactcctttgtcagtgggcaaacgcgcttggtgccactgtcattggaaccgtctcaaacgaagagaatgctgcgcatgcgactgaagatcggtgccaccacgtgatcatgtacaccaaggaagatgtcgcggcgagagtcaaggagatcacggacggaaaaggcgtaaatgtggtctatgattctgttggaaaggatacgcgactagaaaggaggcggtggccaagtggaggagacacgtgtggaagaagaaccggacgaagatcttggtgccgctcctcctcaccggcatcgcggttacggtgtactacattctgtcctaaggtaggcggtgacaacatttcgcggttgtaagttatgtgagtgagatgaacacttgtgaaatatacttgtacacttattcggttctaagtgatatgattgatgaacacttatgaacattcgtgcttgttgatgtattatatgtgaactggaacatttgtactgctgtgtgcagcttttctgtgaatttctagttaaaaaa

SEQ ID NO: 3665 - DNA, 524 bp, Avena sativa
gctggctcgcaagcactagttcatagccaccgtgaaacttgctcctaacaaagataaatttatggaggtcattagtggaacgggtgacatcaatgcagacattgagaaattttgcacgacctttcatccttttctcaaggagaatcatgaattcctggcaagtgttggactcgatgatatgaaggcttcttaatgctatactatacacagcaaaaattatcacagaataaacgtgtctagccattttatggaacttaactgtcacagaggatacactgttatgttatatcttcagaaaattacagattaataatatgtatgtggggatatttgggcagtcatgacccatggctacttgcacaatgtattgaacagagtgtcacagacgaaatggtctttcggagccaattcccttgtcgggcaaatttatccaacttgagcattttgcaatctttattagcctttggcataactgagaagtttacatatttgtaatgcgatttagaaatcgttataatacaagt

SEQ ID NO: 3666 - DNA, 861 bp, Avena sativa
gcagaagctgtcaggcagggtactgtcttgttgaagaatgataacagtttcttgcctctgaagagaaagcgaagttagtcatattgctatcattggaccagcagcaagtgatgcatacataatgggtggagattacacaggtgttccatgtgaccctatcacctttcttaaaggcatgaaagcctttgtccctcaaacaaccgtctctgccggatgcaaggatatatcttgtaactcaacagatggatttggtgaagccattgaagtagctagaagagctgacgttgttgttgtgattgcggggttgaacctgactcaggagaccgaagatctcgatagagtgagccttctccttccaggcaagcagatggacctcgtaaatagcattgctagtgtaacaaagaagcccattgtgttggttatcacgggtggtggccccgtcgatgtttctttcgcaaagcaagatcgaacaatcgcaagtatcatctggatcggatatccaggggaagttggcggacaagttctcccggaaattctatttggagagtacaatccaggtggaaaattgcccatcacatggtaccctgaatccttcaccgccgttccaatgaacgatatgaacatgagagccgacccctcgcgtggctaccctgggagaacatatcggttctacacgggagacgtggtgtacggttttggacatggcttgagctactcgaaatactcatacaacatcgtacaggctccaaggagaattagcctgtcaggttcgtcatccccgagcctcatcagtaggaagcctgcatacacacggagggacgggctagactacatccaggttgaagagatcgcgtcatgcga

SEQ ID NO: 3667 - DNA, 692 bp, Avena sativa
tcagatgatcctgtctcagttcacggtcggtgcaatcctggccgtgaagttcaaggaccatggagccatggagaaggagtacgcatacctagtgttgatcatcatgtgtgtcttcgtcgcaggatttgcctggtcttggggacctctcacttacttggtccctacagagatctgcccgctggagatccggtccgcagggcagagcgttgtgatcgcagtcatcttcttggtgacatttgtgatcgggcagacctttcttgctatgttgtgccatctcaagttcggcaccttctttctgttcggggggtggtgtgcgtgatgacgctgttcgtcttcttcttcctgccagagacgaagcagctgcccatggagcagatggagcaggtctggaggcggcactggttctggaagaggatcgtcggggaggaggaggaggaagaggatatgcagactgcggcaggagccgtagccttgtccaccacagcacataataactagtcaaagattcttgggggtgaaacaacctgcaccccaaaaatgatatgaactagtctgatctgtatatctggatgtacaaggggaggtactcatataaccatatatatactgtgtctgtatgtatcctaaccggctcgctagtcgaattaatgcaactgtcagtatgtaacctatgattaagttggcattctcgg

SEQ ID NO: 3668 - DNA, 892 bp, Avena sativa
caatacagtaataacatataactcgactatatgtaagaaccaactatgcgtgtgtacttgctgtctgtcttcgtccagtgtatgtataaacttgtccccacaccatgtgctctttgttgatcacaaaacttaatgcaaatatggttctcatatgatatgtttgtgcctgtaacacagattcaatcagatctcaagtattaactatagcaaaacgatttaccaatacttatgacacaaaatcacccctagttttctttatggttccttagcaacacgaaatagtatgcaaaataggtctacagcttggcaactctgtcacaggttgcagtagatgcaaggcactgactcctggtacttccattatagcacctttcttagactccactctagcaaccttcttcgatttgtctctccaggaaatcagaaggatcaagaccctcgtaaatacatcttacagaggcctcctcagcttccagctcgtacatacgtcttacagaggcctcctcagcctccagttcggcactagtatatcccaaatcttccactggtccattgtaagaaaacatgcccctgaagcgacaagtttcagacagaccaccactgtatgcagcagccttggggtgaagcacattcctcaaacaagcatagcaacctcttgcatcagaagaatcaaccctgcagatacagctgactaccaactcttcacgtcctcttcgcacaatttcagcaaagaacaacagattatcgaggtcacagttagaaccatctactcctttggtatttgtagtgaagttgatatgatagtaaatctcatcactaacagcatcatgaaaatatttgtagcrcccaagacagcagaaagttcaatgcactgcacgcccttaaggaccaa

SEQ ID NO: 3669 - DNA, 865 bp, Avena sativa
ggctattgcctggtgtggatttggtcgtattttgtgctaatgtggcacaccctgcaggacgtcgtgttgatcgttgccatgatattattctcgagtgatccacgcaccatcttcacttgtgaggatgatggccgccacaacgagactcgccgaaagcgcttcgtgcatcggacctttagccttgacgacgtcaagttcatcaagactgtcatgaactgcactattaacgacgtgctagtcggtgtgacctcagctgctgtttcacaatattacttccggaaatccggtgacatcagaactaggagaatctgtttgagatcattcctccctgtcaacacaaggccaatctcgagccgacaaacatatgttaccaaggtagagacagggaatcgagttggaagcatcgtttgtccattttatatagccttgcacgatgatccccttgagtatgttcgcgaggcaaaaatgcttatgcgtaggaaaaagagctctttagaagtgatgataacacaaatggcgggtgaacttttggtgaaatactttggtataaagataggagcatttttattccgtcgcattctcacacagacaaccatactcttatcaaatgtcgttggaccagctgaacagataacattatgtgggcaccctgttgccttcctagggattagcatctacggtcaaccacaagctgtgaccgtgcactacctaacttatggtagctctatcaagataactctcgcagttgatgacaaacaatttccagattgtcataaaattttggacgattttgccgagtccatcaagctcattaggaatgctactgcccgcaagatatcaaatagtagtgttcacgattgtgtaa

SEQ ID NO: 3670 - DNA, 768 bp, Avena sativa
tacctgatttgaacctgcagggtggacctgtcgttctgtccccgccaaggaagttgcgcagggtgtctgcccctgatgggacggaaagcaacattcatcgagcagagaaagcagaagaagttcctcctactggcatgaggcggcatactgatgagaacatgtccagtcagagttcgagaataccaatgtcagttgatgttggagttgtgttcggcacacgaccagctcctagaccaacattgaacagtgccgacaaatcacgcttaaaaaggaaattagatatggatcctgaatttggatacgcagagtaaaagaagtctgcatgcaccattttttccctcactggcgtgttgatccttttacatattctttgaggagacaattccaccaacaaaagagcgtgtccaaagccataaaaacttcattgaagacggctgacacaatgaccagctcgtgaaccaaaaagtgaagagatgcgtcgctaatttacaccgagagaggtgcacaggtcattggtataattagccaacatccatggggaaggctcctcgatctgtaatctttattggatacatgagtttgctccggcgagaacctcagtctgtaatatttattggatacgatgagtttgctctggcgagaattgtgttttccattttcttcttgtgtggacattgagctttgagtgttgtttagaaagacatatcaggtgcagtaattcttgtaaccaagagaaggctatacgttaattttgtaagaatatgtaac

SEQ ID NO: 3671 - DNA, 912 bp, Avena sativa
acaattcagaccacccattcagggtatatgacactgaaaaggataccttagcttttactgcagttgacaagtttctgccaaatgaagtctattaccacggctgtttaaaatcatttctgcagataacaaagtggataggtccagaggtgatatactttggtgatcatcttttaagcgacttgagagggccttccaaagctggttggcgcacagctgctgtaattcgtgaactggaggatgaaataggaatccagaacggcgacagctaccggttccaacaggcaaaattaagtatactacatgatctacttgggaaagttcatgcaactgttgttagcacggagaaaggccaggtttacagagcattgcttgatgagttgaatgcagaaagacatcaatgtcgatctgggatgcgagatctgtttaatagcgcctttggtgcaacattccttacagacacaggaacggaatcatcattttcctatcacattcatcaatatgcagatatctacactagcaagctcgagaacttcttgtcacatgcccctgaagcatggcttcatccacctcatgacataaagatcatgccacataatgcgaaggtcccagcgagtttgttcactggctcttagttaattctatccatttctgatggagaaccatgtggtaatagcgtattacccatcttagtttcttggtgattacgggattccgtgctgccaatgcattttgttaggctttggagaaaccagcacatgatgcacccagctaaagaggccaggtagcaagtcagcaagatgtgcctactgtgactgatgggagaatcattgtccacttgagtacgcgattctgttgtacatccctgtaataagaacttgtcaaggctgcttcagtgtgtttctcaacacatcc

SEQ ID NO: 3672 - DNA, 659 bp, Avena sativa
agcataaatactgtgaaaattgttagtctgttaaggaggatgctcaagtccaatattcccctagagtcaaaggattgggtcacatcatgcctcgtgaaactagaatcaaggggtgcattgtttgatcggagtgttggtggtataggcacggagataactatctaccacactattcccagactagttgaggagatgatgacctcattttcttttgaaaagaaaagaaaaaatgtaatagagctgaacaggataatgtctggaggtgtgatggaatacgcaagagcagttgccacagctggaggtatatttccactggtaaaaatgattgaagagagtgaaggtgatgcattggaagctagtctaggtgtcttgtataatctaagcatggatccagagaatcacccagcaatgattgctgctggagcagtgcctctgttgaagcggattgtgcatgtggaaagcccacactggaagcgcgctcttcagttgctgaggacattgcccgtatgacttgacaggcaggaaatccccatgtcctctcaatacgcattaagcagcgctggcagttactgtgttacatggaaatcacagctgacaactgaaatattaggagaatttcataacagggagtcttactgagaccagggagttcctaattc

SEQ ID NO: 3673 - DNA, 494 bp, Avena sativa
gtcaggttcagcctcaacatgttcaggctgacgtggaggacggcattcgtgatcgtcagcacggtgctcgccatcctcatgcccttcttcaacgacatcctgggcttcctcggcgccatcgggttctggccgcccaccgtgtacttcccggtggagatgtacatccggcagcggcagatacagaagtactcgacgaggtgggtggcgctgcagacgctcagtttcctgtgcttcctggtgtcgctcgcggcggccgtcgggtccatcgaaggagtcaccgagtcgctcaagcactatgtcccgttcaagaccaagtcatgatcgatgatcgatgacgagagttttgcgcgttgtgaaataactggtgcttgttgtatgtggcaaatcatcatctgttcgagctcggtgacccgttagccgcttgtgttgttcaggaacttgagggagggaggggaggggaggagatttagagagcgtccttatcctacaggcta

SEQ ID NO: 3674 - DNA, 684 bp, Avena sativa
  modified_base (672)..(672): a, c, t, g, unknown or other
accaaatcgattgacaggtgatgttttggagcagcttcgtctaagcaaacaatcactggtcgagctgggttcacgagcaggtgctctcaagcaaatgctcatcgatctcctagaagatcctcatgaaattcgtcgaatatgtattatggggagaaattgtacactagataaacagagcgatgatgtggaatgttctgttcctttagagaagcatatcgctgaagaggaagaggaagaaattgaaatgctattggaaaattatcttcaaagatgtgaatcatgccatggtcaggcagagagacttcttgattctgcaagagagatggaagattcaattgcagtgaacttaagttcccggagactagaggtgagcagggtggagctgcttcttcaggttggaacattttgcgttgctgtaggagcattaattgcaggaatatttggcatgaaccttacatcatacctcgagacgaacgcgtgggcattttgggcgacgaccggtggaatcgcagtcggggcagtagctggatttttcctcatgtaccggtacctaaaggctaggaagatattttaaaccaatgcaccaatttgtacacctagaactgtaaatatagcggttttgatctcgtccggaggcaagcagcgtatcgattcttgagattgctttttggngcgcctgatgta

SEQ ID NO: 3675 - DNA, 892 bp, Avena sativa
acattgccaagctcctcgccaactccatcatataccgctacctatgcagcgaggacctgctcgaggacgtcctcggcggcaaggaagccctcgccactttccgggaaaccgacgagaagggctacctcgaagtcgagaccgaagggctgaagcagcttacttccatgggcagcctcgtgctctgctgcggcgacggtgccgtcatgaactccaccaatctagggctgctgaggcacggggtctccatctggatcgatgttcctctcgagctagccgcgaacgatatgctcaagagcatgggggcacaggctatttcggacccggattcgttttcccaggccatgggaaagcttcgtcagcgctatgataatctgaaagagcgctatgcaaattctgatgtcactgtttcagtgaaaaatgtggcttctcaactaggctatggcagtatcgactctctgagcctagaggacatggtcgttgagattgtgaagcaaattgaaaagctgatcaaggcaaaggaaatgatggaagctgccggaaagcccgaatgattccgccatggacgagaatcctagctctgatgaatcaaacaccgtcgtttgattccaatatttttgcgatgtcccaatgctttatacatagtgtgtgcccgtcgaggaaggtttgcgggacatatcgtgtaaatgagttgaacacgtttcaggacgacattagtaacacacgctcttcgctgctagttttatttatggatccagttcaaatgtacattgctcaaaatactgataaacattaatcggggtattttccaatgagagaaaggaaagagaagaggcagcatgaaattctctatgaaaccaatcggctatgcctgtttctctgactgattgtgcta

SEQ ID NO: 3676 - DNA, 885 bp, Avena sativa
ctgatacttgtagcactgatccttgttcatacagatgccaaaggaatggacattgtttagtaagtacttgtagcactgatccttgttctaaacctgatgctatctaaacccgctaaataaatagtatctggaactcctacctgtggatcagctcatgtaataaccattgtgcgacagtggctggaacattgttttactcgcaaattactgtcattttttacttcacacattttataatcatttgattccagtcctataaaggcagaagtatccggatgtggtggacggaggttaagatcacctgagactgctgaaactgctcttctctgctggtcttgatgtcatgaacaatggacagggaggttgtgttctgctgctgatcttgatccacgggcggagatagagacgagactcgatttgctgttgctgcatgtacttctccgtgcttctccctgtgcagctcggtagcaaccgacggggatccagccgccggtgaggtagtggggggcgatggagctcaacgacgaggacgcgccaggagccgcaaaggtttgtccgcggcggtgcggcacaggtggcggcggcgtcccggcgtctgcgcaggtcgctggagaaccaccgcgctgcctggcgatcgcggccctcgattctgcctcgatctgctctcgcggacctggcgtcggcgcaggtcgccggagaaccaccgcgctgcctggcgatcgcggccctcgggttctgcctcaatctgctctcgcggacctggtgtgggagtacagggccgtgggagcccaacaaaggcgacctgttgcagctggatggaggcgcgggagcccgacgacggcgacctggcgcgggagcacgtacgcggacggcaacctggtgcgg

SEQ ID NO: 3677 - DNA, 726 bp, Avena sativa
ccaccaccgcgtccaatctcccatataaaaataccccaatcctctcgtccaaatccaatttcctccgcccgttcatcccccaaaatctccaccccgaatccctagatcggaagcgccatgggcaacccggagaagctgatggcgcagatcttcgacctcaagttcacctccaagtcgctgcagcggcaggcgcgcaagtgcgagaaggaggagaaggagcagaagctcaaggtgaagaaggccatcgagaagggcaacgtcgacggcgcgcgcatctacgccgagaacgccatccgcaagcgcaccgagcacatgaactacctccgcctcgcctcccgcctcgacgccgtcgtggcgcgcctcgacacccaggccaagatgcaggccatcggcaagtccatgggcaacatcgtcaagtccctcgactcatccctcgccacggggaacctccagaagatgtccgagaccatggacaacttcgagaggcagttcgtcaacatggaggtgcaggccgagttcatggagggcgccatggcgggctccacctcgctctccacgcccgagaccagaggtcaacagcctcatgcagcaggtggccgacgactacggcctcgaggtctccgtcggcctgccccaggccgccgcgcacgccatcccctgcggcaaggcaaggagaaggtcgacgaggacgaccgtcacacgccgcctcgccgagctcaaagcacg

SEQ ID NO: 3678 - DNA, 689 bp, Avena sativa
attcatgcagccactagcccaaattttgcatcagaggctgtagacttggcagcacgagaactccttgaagttgcaactcctggaaaagttactcaagaagaacttgaccgtgctaaagaggctaccaaggctgctgttctgatgaacttggaatcaagagttgtagcatctgaagacatcgggagtcaggttctgacttacggggaaaggaaacccattgagtttttcatgagagttgtggaggagaccactctgaacgacatcgcttcagtcgcaaagaaactaatctcttcgccacttacgtttgcatcatggggcgatgttatccatgtcccgagctacgggtccgtcagcagcaagttccatgtgaagtgagcgtccagcgatcggcgctcggacccctgtcttgcaacactttaagccgtatattaggttgtccagtggtcctcggctggaataaaccagtttttctgttggatagttattacagagatgaataatcgtgcggtttcgatcgctttgcatgccttccgccaagcatcaacacagccagcggcgttttagtttggagacgcccttgtatcgtgtgttgcccttgtgctatttttttgacatatcgggtggtaccgtaaatctggtgccctcaggttgaaaccattttcttgttgaactttggatctggcgtttgt

SEQ ID NO: 3679 - DNA, 682 bp, Avena sativa
ctctatggcaacattgtgctcagtggaggaaccacgatgttccctggcatcgccaacaggatgagcaaggagatcactgcccttgcaccaagcagcatgaagatcaaggttgtggcacctcctgagagaaaatacagtgtctggatcggtggttccatccttgcctccctcagcacattccagcagatgtggatatcgaagggagagtacgacgaatctggcccttcaatcgtccaccgcaagtgcttctaagcctttcctcgtgccttcctccgccgtgcccagtccttctgcactttcccatgcttgagtgtgtctcctccaactctgcatcaagtgttccccgagtctctgcgaccgttttcgcagacgctcaagtgtgttgctggctggatgaaacgcaaagtagatccaagccccaccttcattcctgcattagctattcagacgctgcttgctgttctagcgatatatgttgatattagcaccgggtttggctccagctgttctgtggctgcagaaccttagcttatgttgtgtatgtataaatatttgctttgtcgtatggttgtttcccatgtcttgtagtatattggtgtggaattaaacttctacctcttgatacttataagtatatcagttgttagtacaaaaaaagttaaattaaatacgcctgagactg

SEQ ID NO: 3680 - DNA, 833 bp, Avena sativa
tgtgaactgtgatgcttaccatatgactgatccaagagccgatggtcttggtgtttcatcatgcattagacaaagtcttcaagattctggtgtggcaccagaggaggtcaactacatcaatgctcatgcaacttccactcttgctggtgatttggcagagatgaatgccatcaagcaagtctttaaggacccaactgggattaaagtaaacgcaaccaagtccatgatagggcattgcctcggtgcagcaggtggtttggaagccattgccgttattaaagcgataaacactggattggtgcatccgagcataaaccagtttaaccgggaggaggcggttgaatttgacaccgtacctaacgtgaaagccgaacatgaagtgaatgttggtatctcaaattcttttggatttggaggacacaactcagtggtagtatttgctccgttcaagccttaatgtggcggcacttgctccacaagtcttggtcgaaacagtgaggttttttttccggaagctccccgttatttcaatgtgttttctttggtgaagcaactgccccacctgacatccatcagcgttacaatgaacagaggacatgagatccattgcgtttttagatacatctatcttggattagatcgagagcacaccgtgtgacgtttttccatcatttgcagtccgagtctacctatttcccgtgagacaaaagtcagggaatttctaggtgtgtcatgtagaagcaacaattaggtcttctgctttatagagagtgcattgaacgccaaagagtctgtgtgtactagtacattgtccggggaaatctatatactat

SEQ ID NO: 3681 - DNA, 519 bp, Avena sativa
gtttgcgcagtcagcacagtctagtgaaggagcaaagttgaatatggtttacgaggttggggagctgttcgagctgggaattcaactttcttatctgctcatactgcttggcctgcttggaaccggtacattcttcgtcatccgtcaggtccttgtccgcagggagctcgacctttctgctaaagacttgcaggaacaagtgagaagtggcgagggaagcgctactgaactcttcgagctcggagcagtgatgctacggagaaagttttacccagcagccatcaaatatctacagcaggcgatccaaagatgggatagagacgagcaggatcttgcacaggtgtacaacgcgctgggggtgagctacaagcgtgagaacaagctggagaaggcgatcaagcagttcgagaaggcggtggagctgcagccggggtacgtgactgcgtggaacaacctgggcgacgcgtacgagcagcagaaggacctcaagtcggcgctgcgtgcgttcgaggaggtgct

SEQ ID NO: 3682 - DNA, 862 bp, Avena sativa
ttagacaccatccctctcctgtcatggatcccctaacgttatcagcacatccggggtagagtccctggatggtgcactagcagaacacacagctgatgtctccgctatcagaatcatcgaaacagcaactgatacagtcataggggatgcaagctacggccagcttcggaaagttgacaaggagaatacaaggctaaagagggaagttgagctctcgaagtagctgttcaaacatatgaacataaagaccaagaaacttgctcgtggttggttttggtctgttaggaggatgttttctttctcgtcccagtttcgtaatgtcgcaatcattgcgaactttggtgcacaagagcctctaaatgatgacgtcagagcagcttttgcaaccatatatgaatctgcactacaaatgaaacagaaaagcagaaatctagaatccaagcttgaagagataaggcattcatagacaagggttacaacctctctattctggactgcccctgcaaaatttggagtggattgaggctggtgcgatcagacagttggtgcagtgtttatgtatgcagaacctctctactagctttagttagaaaattatctccagttggcaactactatcatactatgttatctataatgctcatggaacatgtctctcagatctagaatgctcatcgatatactccttgctgatgggctttagatacaattcttaatccaaaaagagcttagtttattataccttttccccttgtctggttcgatattatatcgaatttccaaaacacctttcagaaaacaattaacgcatattttatagcacattatgtctcgcctgtctccatctgcttacccagcagag

SEQ ID NO: 3683 - DNA, 590 bp, Avena sativa
gctgatggcgtactgccaatctcgagggcatatcagccatgctgggctgcctgatgagaccagggctgctcgacagatactgaaggactatattgacggaaagattccacactttgagcttcctcccagtgagatagacgatgaatctgatctagaggatgccagtgacctagatggctcagccgctgcagcagctgatgaatcagacgactacgcttctgatgaagaacatgacgaggaaatcaatcaaggtgaagctgaacgaaacatcagccatgccctaagcgaccttcaatcttttgacctgaacggccaagtgtccaagaattccacaaagaagaaagaaacgtcccacaagcaccaccggaagccccagaggaagaaggatcgttcatggagggttggaaacgatggtgccgatgggtcaggggtcataagggtgttccagaaacctgccgttaatcttgctgccagtagcaccagtgttggtggttagtgcttcagttttactggcttgtgtgccattgtctgaacacctttttctgttagcattccgccacagtacaagtagttctcactcgtttggatgg

SEQ ID NO: 3684 - DNA, 605 bp, Avena sativa
tgagaccagactgagagaacttggtatagcactgccgctgatgtgttgcgcagcagacatgctcactgtcccatcgaggaagcaggtagtgctggtgggggacaaaggatctgcagaatttcaagacatggttgcagctgcattctcatcatatgatccaaacagaaccgtgatccagatagaccctaggaatacggaagaaattacattctgggagagcagcaacgctaacattgcgcagatggcacggagcagcccaccagagaaaccagcagtggcgcacgtgtgccaagagttcaagtgcagccctccggtgacctctccaggtgcactccgtgagcttctcaacaagacggtggctgctgctggttcatctgtctgaagctttgttcctgctggttcggctagacgctactgacgctcaccaagtccttgaacccatttctgttggcagttgatgtaaatagatatcccaataaaggataggctagtttcgtatgttacacacgtcttatgttcaagcacttcatatgtttgttttctatacgcttgtaaactgagaacatggggtacaaacttgagaagtgctatcctttgttaacaaa

SEQ ID NO: 3685 - DNA, 738 bp, Avena sativa
aatgatacatattagtgctcaagtacagtgtacaccacaattgtctaagaacagatgatttgcttctagtcctgaattttatctagataccggatcaagattcaccctatgggaagctatccaagagtaacagacatcaacaataatacctatgaactgtttggtcctgtgaatttattctggagcacccgatttgacaaggcgatgacctggtttctgacttgcctgcaagagttcgccgaattcgccataagtttggataaagagaacaatgttccatccgataagtcattgaagctcccatacaagattgatggtgacaaagtagggagctacacgatcttcctaagttttaataaactggagaactggacaaaggcgctaaaatatatgctgtgcaacctaaagtgggttctctactggtttatcgggaatacaagttttgcggcagaatcaacatctttgcacttggcgcaatcaccaaacaagaaaggttgatgtgatgtttgaacagagatgaagccactgacctcagatgctgaatcgctgattgttgctacatgttgactaaaggcagtaacagtatgcatttgatgcacataattaccagtcatagctacttgtaagtaaccgatgtatgtacctgcccactgtgtatatggactgcacgaggtccattagtatgcaatcagctctacatgcacatgaactaagaatgccagcacaaaaaaaaaaaaa

SEQ ID NO: 3686 - DNA, 890 bp, Avena sativa
gtgcatgcgccagcaggctcaaggagcagcagaagctgattactctgtcatgctgtatgatgggcatggctccgacgcaaaccttgtcgcgcgtgcccaaggcttgcattcccagtgtggtatgaaccaagctcagccatccttggttactgtcaacatagagttcgtcgatgagaggtttatgggatccacccttactgtggttggataccagcagacacacataggtgaatgggcagtcgtgggtggaaccggggagtttggctttgctcagggcgttgccacctgggaagtaggtgagggcaacatcagggagcttcacatccattgtgtcactcttaactttcctaaaacgaccaagctggggatgtttggcggaccgggagggtttaatcacgacaccccaacggtaccggaacgcctagtgagtgtaacaatccaaagcgacgatgtccttacttcaattgcgttttcctacatcgatgaggatggtcagctgaaaagcgcgggtccatggggattcgatggtgcgaattcaaacacaatccagtttgctcccacggagaccgtgaagaaaatcgagggaacattcgacatgtttgaagaagtaactactatcgtgacatcactttctattatcactgatgtacggacgtatggaccttttggacaagtaattggtaccgcttttagtgcacccgcaaaggacaccgacgaggttgtgggcatatatgtgcgcgccggacattacgtggacgcaattggactccatgtgcgctcaaactagtacaattattagttgtgttgcttagatataactaaataaattttgcttaatgtgttctgataatttggttatccggtcccgacaataagacaagcgcaggttg

SEQ ID NO: 3687 - DNA, 538 bp, Avena sativa
agcagcagctgagaccaacagctgttgggttgctggctcagagcacagttcctcagttacaagacttacaggggcaggctcaacaaaagcacaggttcctggtcaacagcagatgcagtacagccaagcagccttgtcacagtttcagaataggcagttgcaggcacgcatgcagcccggcatggcccagagccaattgaaccaaggaaatcagttgagaagtcatctggggcagttcactggagctgcaaacagtgcaatgtttactgctgcccaggcatcttcaaactcacaaatgatggcaaacctacctgggacaatgcaatcacagtcaatcttgccacaaatgcagcagtttggtttgtctggtgggcatcctcagaggaatcatccatcccaaatgataactgaccaaatgtacgggttaggaggcacaaacgccagcagcatgatgggaatgcagcagcagcaacagcaacagcaacaacagcaacaacagcagcagcagcaacagcaacagcagcagcagcagcagcag

SEQ ID NO: 3688 - DNA, 845 bp, Avena sativa
cctgtacctgcttttaatgtgatcaatggaggttcgcacgctgggaacaagcttgccatgcaggagtttatgatcctaccaactggtgcctcctcgttcaaggaggccatgaagatgggagttgaggtgtaccacaacctgaagagtatcatcaagaagaagtatggtcaagatgccacaaacgtcggggatgaaggtggctttgcacctaacatccaggaaaacaaagagggccttgaactattgaaggaagctatagctaaggctggctacactggaaaagtagtcattggaatggacgttgctgcttctgaatttttcagtgagaaggacaggacttatgatctgaatttcaaggaggataacaatgacggttcccacaagatctcgggtgacagcctgaaagatctatacaaatccttcgtttccgagtaccctatcgtgtcgatcgaagatccgttcgatcaggatgactggggcacctatgccaaaatgacagatgaggttgggcagcatgtgcagatcgtagcagatgaccttcttgttactaaccccacgagggttgccaaggcaatcacggtgaggaagacctgcaacgctcttctcctgaaggtgaatcagataggctcagtgacagagagcatcgaagccgtcagcatgtccaagcgtgccgggtggggagtgatggcaagccacaggagcggtgagaccgaggataccttcatcgccgacctctctgtcggtctggccacgggccagatcaagacagggagctccctgccggtctgagagtctagccaaatacaaccagctgctgaggatcgaagaagagcttggcgatgcgg

SEQ ID NO: 3689 - DNA, 822 bp, Avena sativa
ttttcttttttttttttaaaactaattggtgtgtattaattaaatagcagagtttttggttacaaacgcgattacaatcttttcgagtcgattcgaccaagcaggaaggaatcaaacccattaacacacagccacacccctcattttgcccaacacaaggcagatcatgagccagactattgcccaacctattcaccttgcacactttgtactcaggcagagcacaccagtaacttgacatctgccgtcatgattgaggtctcagatttttcttcattctctgttattcagtacttagaccagcgccgcattgtcactctcgataattactggaacagcagctacaggaatgactgcttttaaaccctccagctccaggcaagctaaagcttaggttcctttggcagatcggcaataaggtataacgccccacggcaacattatcaccctgcaatcaggtcacaaaggactgctccccaagacccattattttttccctgagagaagcttgcatccacattaagcttgttccatcccagttcatgcttcctccacgaaacaagaggttcttttgcctttttgggctggccatcactttatattcggttcctgcttaagcactgtcacattggttccaggccaaggctgccgaagaggccatcggacagagtgagatcgagcgtcgcaggtcagagacgcgtcgaaatctggagcagatggtggccacggtggagttcaacggtctgttcctcgcctggcagatgcgttcatgtctcattagcagcttatggaagcacgcgacgacagcagcgtgtgcccaag

SEQ ID NO: 3690 - DNA, 1024 bp, Avena sativa
cccgggatcacagaaattcattgtctaaaggagcatggtaaatcgctgaaactccagttcctggagaaacagtttctcttggcatcgataaacagtttcgggcagctccactaccaagatatgagcaccggtgagatgattgcaaactacaggacaggtcttggtcgtacggatgtcatgcgggtaaatccctacaatgctgtcattggccttggacatgctggtggcaaagttacaatgtggaagccaaccagtgtgaaaccacttgtgacaatgctgtgccacaatggccctgtgactgccgttgcatttgacaggggcggtcaccttatggcaacagcaggtgttgacaggaagattaaggtttgggatctgaggaagtatgaggttgtgcattcgtacgctgcacgtgcccagtccttggatttcagccagaaggggttgttggctggtagtaacggatctctagtagagatatacagggatcatggaggccaggattacaaaatctacatgaagcacagaatggtaaagggttatcaggtgggtaaggtcttgttccgcccttatgaggatatatgtgggatcggacactcgatgggtctctcttccattctagtccctggatcaggcgaggcgaactttgacacctttgttgagaaccctgtggagactgccaagcaaaggagggagagggaggtgcatgccctcctcaacaagcttccgccagagacgatcatgctcaacccgaacgtgattggtagcgtgagacagccaaagaagaaagagaagaagaccaagaaggagattgaggaggagatcgaagaggttgtggaggccgccaagaacacgggggtgaagaagaagaccaagggtaggagcaagcccagcaagcgggcaagaagaaggaggaagtggtcctcagagccaagaggcctttgctggaccagtacaaggagatcgacgggcagcctgacaagaagcaacgggttggtgagaagaccgagctgccgaaagccttgca

SEQ ID NO: 3691 - DNA, 637 bp, Avena sativa
ccaatgttttctgctattaaggttggtggtgaaaaatgtatgacaaagcaaggaggggtgaaacagtagagctttcacctagacgcatatcaatatataagtttgatattgagcgcagtttagaagacaggcaaaatttgatatttcgagttacatgctcaaaaggaacatacattcggtctctatgcgcagacttgggaaaagcacttcgaagctgtgctcatttaactgcgctgcggagagactcaattggtgactattcggtcaatgacgcttggaacttcgatgagctagaagaacaaattaccaagggatatttatgagaatcgggtaattagccgtgccctttggaagattgcagtcgagagctactgttgccagacatgtggttggctgagccctcatggtcgtggcacgaggcacagggcagggatacagcactatagtctgcagaaacctgtgtgatcttggattttggacttctgatgtctccttggaatcaagaaatccatttgctaaccctgaaagcagtagtatggctgtctgggttccatgtttggcgaactgtaaggaatgcatgctttgtatagcctgtctgccgcaattttttatactgaatatacaccattttttatca

SEQ ID NO: 3692 - DNA, 783 bp, Avena sativa
tgcttgcatctccgatgtggccttccttccttcgctgctttgtgctggtgtgaccatctctttctattgcccgcaggacggctttccgaagcctggactccaccatttcccatgacacaagcttctctagaaccgcagagacatactcagcccttcgattctgcaatccctaccagcaacagcagtacagccaccacccaactgcaatgcagcctcttcagcagcaaatgcccagcaatacccccatcctttcccaggcttacctccagcaactccagcagcagcagcagcagcttcagccttcacaaacatggcagcagcagccgaatgcctggtggccagcgcaggcgcagggtgcggcggctgctgttcaagtaccccagtatgctgtaacaatgcctaacaataacagtgcccaaggttacaacgctgcaaatttaggcggcatgccctggagaccaagatagaaaggaacctgtaacagttagttctcttgatttctttgtagctctgcccagcttccgttctagggttggtttcttttccttattttttagctcacaggttcatgtaagtatcagtcagtcgtgtacacaccccctgtacacgaggatgtaaatctggataaattagattggctgtgggttgtattccgtccaataaacataggatctaccgtttcagtacaatttcgtccatcctgtttgtcggcgcccgtggaaaaatgacaataatgttcagacgtggataaaataattttttggaacatttgtgaaaaaaaaa

SEQ ID NO: 3693 - DNA, 630 bp, Avena sativa
cctcgctggaggccatcatggccggcgtgccgatgatctgctggccgctgtacgcggagcagaggctgaacaaggtgcacttggtggaggagatgaagatcggggtggtggtggagggctacgaggaggagttggtgaaggccgaggaggtggaggccaaggtgaggctggtgatggagtccgaggaaggcaaaaagctgagagacagggcgaccatggcgaaggacatggctgcagaggccgtcaacgaaggtgggtcgtctgacgtggcattttgcgcgttcatgaagcatttggagatgagcaagctcgagcaaggacaagtcaacgagtaatgctacacttactccctaaaccccaaatcacgttcatcaacccgtaggagagataagtccggcggtggagcttctttcaaatggaaggtcatggagaccgtcactccgaaagatggcagttgcggtggcttatcaggaattccaacgtgtgatgctcgcgcttcctgtttcgcaacatttggacggtgcacgccttttgcattgtgcagcttgtacccccaggcaatactatttagctcttcaccgagatttgtcgtgcagcctagccaaggccaacgaccggagcgtctacaca

SEQ ID NO: 3694 - DNA, 623 bp, Avena sativa
cagacctgcccaatcatcatctaaacagcagacagctaacagacaggaaggaatcaagcaggacagatcatttcttcttcttggatggtggctggtcctcgtcttcctcctcgtcttcatcctcatcttcgtcctcctcctcatcatcatcatcttcgccgtcttcaccatcctcatcgtcatcgtcatcgcttcccccttcaccattcgcctcagggtcagcttcctcctcgtcatcatcatcatcctcgcccccttcttcacctgagaaatcctcaccagcatcatcatcatcagcgtcagcatcaccagtttcatcatcctcatcttcatcatcatcatcgtcgtcgtctgacccagcgtccttgttctcagggacagtttcaggattggttctgccaaattgcttgataatttcttcctggtctccactgaagatatctgctccattgtttacagcttccatcgcgagtgcgagaagagcgagcagcttctgcgcggcagcggtaacggccaccgccgcaggcgcccccacgaccctctcggtcccgcgtgccgccgtcgccgtcgccgccatctctgttgctgcgccgaggaggagggaggaaggtggatcccgggaa

SEQ ID NO: 3695 - DNA, 638 bp, Avena sativa
ccgggataatcgacctctgctcctcctcccccaccccacgaaccaaggccatggcccgcaccaagcagacggcgaggaagtccacgggcggcaaggccccgcgcaagcagctggcgacgaaggcggcgcgcaagtcggccccggccactggtggcgtgaagaagcctcaccggttccgccccggcaccgtcgcgctccgggagatccgcaagtaccagaagagcacggagctgctcatccgcaagctccccttccagcgcctcgtccgggagatcgcgcaggacttcaagaccgacctccgcttccagtcctccgccgtctccgccgctgcaggaggccgccgaggcgtacctggtcgggctcttcgaggacaccaacctctgcgccatccacgccaagcgcgtcaccatcatgcccaaggacatccagctcgcgcgccgcatcccgtggccgagagggcctaggcaggctgtgacgttcgtgactgcacctgcagagatgtgttaggtcgttgttagcccgtgtggagtagtggagatgttctagtgctgtaggaagttcctttgttcttgccatggcgtggtctgatgttatcatcttgttgtcatcagcaatggaaatcttgttatcaaaaaaaa

SEQ ID NO: 3696 - DNA, 833 bp, Avena sativa
tcccgggatatcggagtatctaactagcagtatacttaccaccatggcccccgccgtgatggcatcgtcggccacctcggtcgcgcccttccagggtctcaagtccactgctggccttcccgtcagccgccgcggcaacgccggccttggcagcgttagcaacggtggaagaatcagatgcatgcaggtgtggccaattgagggcatcaagaagttcgagaccctgtcttacctgccaccattgacagaggaggccctcctgaagcagatcgacttcttgatccgctccaagtgggttccctgcctggagttcagcaaggttggcttcatcttccgcgagcacggcagcactcccggatactacgatggcaggtactggacaatgtggaagctgcccatgttcggctgcaccgacgcctcacaggtcatcaaggaggtggaggaggtgaagaaggagtaccctgacgcctatgtccgcatcattggcttcgacaacatccgtcaagtgcagtgcgtcagcttcatcgccttcaagccaccaggttgcgaggaatccggcaaggcctaagccacgagctgcgaataacagatgctgtatgaagtgtcttgttcaaatttgtcgacaattctgattttggggttttacttctggttccatataaatatgtatgcgtatacgtatgtatgtatgtacatacgaacctaggtcgatatgaacactcgcaggcttgggaaagtctgttccttctttagattgtcttcgttgattaagattaacccacgcaacacaaatgaggtttctgatttatacgagtgattctatatagtttaaa

SEQ ID NO: 3697 - DNA, 956 bp, Avena sativa
aggctttagaggacaaggagaagccaacgcatttgaggttcctggtgtctaacacagcagcaggatgcatcattggcaagggtggctccactatcaatgacttccagtctcagtccggggctcgtattcagttatcgcgcagccatgagttcttccctggcacgaatgacagaatcatcatggtctctgggctgtttgatgaagtaatcaaggctatggagttggttctcgagaaactcttggcagagggggaagaatccaatgaagctgaagctaggcctaagtttagacttgtagttcctaacagctcttgtggtggaattattggtaaaggtggagcaacaatcaagtcattcatcgaagattcacatgctggaattaagatatcaccacaggacatcaacttcgttggcttgcatgataggcttgttactatcacaggacccttgaacactcagttgcgagcaatatatttgatattgaacaagttatctgaggatgttcactacccacctaatttgagttccccatttccatatgcaggccttggcttcccaagttaccctgctgctgttcctgtcgggtatatgattccacaggtgccatataataatgctgtgaactatggacctaatggttatggtggtggtgggaggtaccaaaataacaagcctggtacacctgtcaggtcacctgctaacaatgatgcccaagaatcgcacaccatcggtgttgctgatgaacacattggtgcagttgtaggacgtgcagggaagaacataacagagatcattcaggctagtggtgccaggatcaagatatcagataggggtgacttcatagctggaacatctgataggaaagtgacgatcactgggtcatctgaagcgatccaggcggctgagtcgatgatcatgcagagggtggcagccagctcagagaggtgatgaacatca

SEQ ID NO: 3698 - DNA, 799 bp, Avena sativa
gagagtgctgattcaattcaaacctgcagtcaattattgctgcttcagatggggctatggtggctcgtggagatctgggtgctgaacttccagttgaagaagttcctttactacaggaggagattatcagaacatgccgtagcatgcagaaaccagtaattgttgccacaaatatgttggaaagcatgatagatcatccaactccaacaagggctgaagtatctgatatagcaattgctgtccgggaagctactgatgccattatgctctctggtgaaactgctcatggaaagtacccattgaaggcagtgaaggtgatgcacactgtggcacttcgaacagaagccagcctttatgacccaactaaagctcccagtcttgttgcacgcccacaggccctgctcaacgatgacttctgcaaaagccaactgagtaaaatgtttgggtctcatgcgacgatgatggcaaacacccttcgtacaccgatcattgtgtttacacgtgtgggttccatggctgtccttctgagccactaccgtccctcgtccaccatatatgcattcacaaatgaagtacgagtgaagcaacggcttgctctctatcagggtgtggttcctattctcatggaattctcagatgacgcagaagagactttctcgagagcaattaccagcctgctggatgcgaaatacatgagtgaaggggactatgtcaccctggttcagagtggatcgcagtccatctggagagaagaatctactcaccacatccaagtgaggaaagtggcagtactgatgca

SEQ ID NO: 3699 - DNA, 779 bp, Avena sativa
gttggtgctgatgtctcacttgataccgccacaaagaatctcaccaaatacaatgctgcgcttagctacaccaatgcagatcttatcgcatccctgagcctgaacaacaagggagacagccttactggatcctattaccactttgtggagaaatccaacacagctgttggggcggagctgacccacagcttctcaagcaacgagaacagcctcacctttggcacccagcacactctggacccgcttaccctcgtgaaggcccgcatcaacaactctggtaagctcagcacgctgatccagcacgagttcaggccaaagtcattgatcaccctctctgcggaggttgacaccaaggccatcgagaagagctcgaaggttggccttgcattggccctcaagccttgatcacccatcttcataacttctcgggtttacctcggtttcggatgaaattggggcgagttggacaagacttcacgccttccccctccttgcagtctattagatttgaagaactgccgtgtttcattctgagaaatttttgtgttcgtcaggtgtagtccgcgtccattgagcaaccttttgcaataaattcaagctctgaaattctgaacttgcttcaatactcatcttgtaccattttcgccctaatttcaacagcctgcaatgatgatactgttgataatcgctgttctttgtctgcatggttgcaagttcatcatagtgggctgtgtaaacccagccagggagagagatcctatgctggactagaacagcga

SEQ ID NO: 3700 - DNA, 817 bp, Avena sativa
gacgaagtggaagtggggcatcttggagtcatccctggggaagctctcgccgtgaacttcaccctggagctgcaccacattccagatgagactgtgagcacggcgaaccaccgagaccggattctaaggctggtgaagagcctgtctccgaaggtgctcacccttgtggagcaggagtccaacacgaatacggcccctttcgtgccgaggttcgccgagacactggactactacactgccatcttcgagtccatcgacctgacgctcccgagggatgacaaggagaggatcaacatggagcagcactgcctggcgagggagatcgtgaacctcgtcgcctgcgagggtgcagagagggtggaacggcatgaagtcttcggcaagtggaaggcacgtctgatgatggccggcttcaggccgtctccgctcagctcgctggtgaatgccaccatcaggtcactgctgcagagctactcggtggactacaagctcgccgagagggacggggtgctgtaccttggatggaagaacaggccattggtggtttcatccgcatggcactagtgctgtggcgttacaatgctatctgacgacaaacttgtttgcagcttcgtttttcgtagacaatttagatgcatgctttgtcgtactgtaggaaggtttggtgatgtatggagaaaacagctatacaactgtaacctgctgttgcattgtgaacttaggtcaggcctgaatatggctgatgaggtgtagtccaagtgtaaggggtatgtgtttagtttctagacttatgatcataatcagtgttactactatc

SEQ ID NO: 3701 - DNA, 854 bp, Avena sativa
gtatgactctgaaacacatatctggacacctcttccccctatgcacaggggagaggaagatgtgttctggggtgttcatggatggcaagttctatgtgattggtggagttacccataacaacaaggtattgacttgcggtgaggagtatgatttgaagcggcagtcctggagggtcatcgacaacatgtccgagggcctcaatggtgtcaccggcgctcctccgctcattgcagttgtcaacaatgagctgtacgcagctgattacagcgagaaggatgtgaagaagtatgataagctcaacaataagtggatcactcttggcaaattgcctgagcggtccgtgtcgatgaatggctggggccttgctttccgagcatgtggcgaccggctgattgtcatcggaggtccaaggacctctattggtggcatgattgagctcaattcatgggtcccggatcagcaaccgcctgtgtggaatttggttgccaggcggccgtccgggaacttcgtgtataactgcgccgtgatgggttgctgagtccactgaaaataaaagattcaacgcagtggattatttatgaaaggatgatagtattgcacaaagcgcagcctgttcaattgctccggcccctgattcttcgtagcgattctgcccagtttcagaccttaactggacatctgctgagtggcagcagtctcatgtaaccccccttgagttctaatacttctctgttttccctcgctaatccatttctacatttgcatttggatcaacagctcgtgatttcaaagatacgagactatgcaaaaacagtgttatattaataatctagaaacaacttacaggaaaaaa

SEQ ID NO: 3702 - DNA, 895 bp, Avena sativa
  modified_base (20)..(20): a, c, t, g, unknown or other
gacatgctctctacaagaanatttgttgcaccaccccacaagagcctataaggagaaataaatgcctgttgttacaccaagataatcagctttgttgttgatcatagaatgggagaccaagcacggttgatatggtgatagtgttcgcctcatctgaatgcctcggaaccttttgcttctcgctaccatgcagcgagggaaccttcattggattagcttgtgtatctacgagatcagattctggcttcctttttttcttacttttcttctcattggcttctttcccattttctacagcatcaccattttcattgacactgttaggtttcgccttgacctcagcaggagcagttcctgcatcagccttatctgaggtttctgaagttgatttattcttcttctttttcttccccttatccagaggagcaccatcacccacattagcctcatcattctgacccttaggttcagcctcttcggatttcatgccatcatccttaagtttccctgcagcctcaaacttggctttgactgctaattccaccttctccagcctagcttcaacgtcctcatccttctcctgtttcttgcttttctttttcatgccatcaggcttctgatcatcaccagtcttcgctactgcatttgcctcagcaccagcatcatcccccatcgatgagctatccttcttcttcttccgtttcctttcttttgtctcatcactgggaatttcaagggcagaaggctcacttggcttactctcaggttctacaacttcagcgctgcctttcttgctcttctttttcttgccaccgtctttctcttgggctacggcatcagctactttctcttgctcgttgctcgccgcaatgacagcttctggagcagaattgct

SEQ ID NO: 3703 - DNA, 662 bp, Avena sativa
cacacgggtcttaggagagggggacgacccatcttccccaattggccgtggatggcactctacatttctcacgaaagataaatctgtcgccgaggaaagggctgcgaagcttggaatgaagctggaatggaccgacgacggggttaaaacaataatgggtccaatacctgccgttaagtgggacgaggtccgaatgaggaaaatatggttcaacagcatggttgctgcctacacggggtggaaggatgcccggaatgatcctgtcaaggctgtcacggtttggcgacggctccccattgcctgctgatgtcatagacgaatgcgggaagatcttggaggaggaatgtgccgccgttccgtggcagcaaggtgacatatttctcattgataactgggcggttctgcactcccggaggtctttcgagcctccacggcgcgtacttgcttcgctttgtaaatagcctgtaaatgcgttatgaggcatgaggccatgctgaagaatttgtctgcagtatgtatgtacgacgcctgttttgcagatacgaactgaatgagccctagtaacgccaaacgacgcaacttcggtagcaagtaacaaaggctgcagtttttgtctttgtttgacaatttctatgtcagtgtatatttgataacttctatgc

SEQ ID NO: 3704 - DNA, 622 bp, Avena sativa
  modified_base (611)..(611): a, c, t, g, unknown or other
cagtcgggcaaaggcaatcgatgatgctgaagggatggtgaaggttatatctgagaaggaaactgacagaatccttggtgtacatattatgtcccccggagcaggagagatcatccacgaggctgtgcttgcgcttcagtatggagcatccagcgaggacatcgcccgtacatgccacgcacacccgacagtgagcgaggccctgaaggaggcgtgcatgcagacctacgacaaggcgattcacatctgattcctgatatggtttcagctgccagctcaagacacttccaacgtttcgaaataattttgaatcgatgtgttctcgaaacatcctttttccttttgtgagctcgttcctctgcgaaactgtgacctttttcctttgtgagctcgttcatctgcgaaactgtgaatttgcccctcactgcagattattgttacatcatgttaatttcccttcccttttgctagctgctgcatttgctactactccctaaataatatggtaaactcatgttgctggtattatttcctagattagagcttccttttgaattgatacctgggagagaaaatatcatattatcatttcgctagtaaaaaaaaaaaanaaaaaaaaaaa

SEQ ID NO: 3705 - DNA, 588 bp, Avena sativa
ggtgttgcatgtgttgaattcattgctgggaaggagggccatgttgattatgacactgtacctggcgtggtgtacacacacccagaggtggcctccgttggcaagacggaggaacaggtcaaggcatctggagtagcctaccaggttgggaagttccccctgttggcgaacagtcgggcaaaggcaatcgatgatgctgaagggatggtgaaggttatatctgagaaggaaactgacagaatccttggtgtacacattatggcccccggcgcgggagagatcatccatgaggctgtgcttgcgcttcagtacggagcatccagtgaggacatcgcccgtacatgccacgctcacccgacagtgagcgaggccctgaaggaggcgtgcatgcagacctacgacaaggcgattcacatgtgattcctgatatggtttcagctgccagctcaagacacttcaagacacttccaacgtttcgaaataattttgaatcgatgtgtttcttgaaacattcttttttttttccttttgttgagcccgttcctctgcgaaacttgtgaatttgcctccttgctgcagattatagtt

SEQ ID NO: 3706 - DNA, 731 bp, Avena sativa
tatacttacaaccatggcccccgccgtgatggcctcgtcggccacctccgtcgcaccattccagggactcaagtccaccgcaggactccccgtcagccgccgcagcgcctccagcctcggcaacgtcagcaacggtggaaggatcaggtgcatgcaggtgtggccgattgagggcatcaagaagttcgagaccctttcttacctgccaccactctcagaggaggccctcctgaagcagatcgactttttgatccgctccaagtgggttccctgcctcgagttcagcaaggtgggcttcatcttccgcgagcacggcagcactcccggatactatgacggcaggtactggacaatgtggaagctccccatgttcggctgcaccgacgcctcacaggtgatcaaggaggtggaggaggtgaagaaggagtaccctgacgcctatgtccgcatcatcggcttcgacaacatccgccaagtacagtgcgtcagcttcatcgccttcaagccaccgggttgcgaggagtccggcaaggcctaagccgcgagctgggaataacagatgctctatgaagtgtcttgttcaaatttgtcgacaattctgatttttgaggttttacttctggttccatataatagggcgatgaacaatcgcaggcttgggtaaagtctgttccttcttagattgttttcgttgattaacccaggcaatgcaaatgaggtttctgaattaa

SEQ ID NO: 3707 - DNA, 880 bp, Avena sativa
gcaagagcattaacccggatgaagctgttgcctatggtgctgctgttcaggctgcaatcctcagtggcgaggggaacgagaaggtgcaggaccttctgctccttgatgttaccccactgtctcttggtcttgagactgctggaggagtcatgactgtcctcatcaccaggaacaccaccattcctaccaagaaggagcaggtcttctccacctactctgacaaccagcctggtgtgctgatccaggtgtttgagggtgagaggacaaggaccagggacaacaacctccttggcaagtttgagctctctggtatcccacctgctcccaggggtgttcctcagatcactgtctgctttgacatcgatgccaatggtatccttaatgtctctgctgaggacaagacaactggccagaagaacaagatcaccatcaccaacgacaagggaaggctcagcaaggatgacatcgagaagatggtccaggatgccgagaagtacaagtctgaggatgaggagcacaagaagaaggttgatgccaagaactccctggagaactatgcttacaacatgaggaacaccatacaggacgagaagatagcttccaagctgcctgctgacgacaagaagaagatcgaggacgctgttgaccaggccatcacatggctggacaacaaccagctcgctgaggttgatgagtttgaggacaagatgaaggagctcgagggcctctgcaaccccatcatcgccaagatgtaccagggcgctggcgctgacatgggcggagatgatgatgcccctgcttccagcggaggtgctggccccaagattgaggaggtcgactaagttataccactagtgtcttggatgaatttcatgtagtg

SEQ ID NO: 3708 - DNA, 776 bp, Avena sativa
tggctgaggtgtgccgatgattctcgggtctggagtggtttctctagacgaaagtcctgcttgacatctgtcgatgccgatgacggcgacaccttcgggtgtcgtttgccttgttgaaggcgtcaccgaggagatccatcaccaatctcatcctttgaccttgttttccggtgaaaaccgagatccatttattggactggcgatggcggcgtccttgacgtcgctactttgatgaaagcttcgcttcgaaagcaagatattttggtgggagcacttggtttgtggtcgagaggtggcccggacaccgccggtagcgggatgatcgtggagtttgtagtgctaggtcaggcggggcctggctgatggtggtggtggtggcggcatgagcatccttgacatgcgggcggcgttggacgagccttgttttctgtcttctcaagaccgcagcggcacatgccgcctcccttcggacatgtcttctctttttggtgttggtgaagctgacaaacaagctcgtggctcgggatcgacgtgacagggttggcgcaaccttgacgctctacgacaaagtccatgtctactaatcataagcacgaccgctgacatttgatggcgtcgctagctctggtggtgtgctttcctatttgtgtcgttgttggcttttcgctctgtatgttttggttgtgctcatgctgatgtaaaggtttttgctcggttttcctcctaataaaccaagcagttcgggtctctgtacctttcctctaacgcaatgaata

SEQ ID NO: 3709 - DNA, 578 bp, Avena sativa
ggacacttggtatagatgagatacctcatgtcatcgaggactttaggcgtgctgcccgaaacgccattgaggcagggttcgatggtgtggagatccacggtgcgcacgggtttctcctcgagcaattcatgaaggatagcgccaatgaccgcaccgacatgtatggcggaagcctcgagaaccggtgtcgcttcgtcgtggagctagttgactctcttgtccaagaagtcggggcacatcgtttgggaattaggttgtccccattcgtagactacatggattgcgtcgactccgacccagaagcgcttgccgcctacctggtggagcagctcaataagcaccaaggatttctttactgccacatggtggaaccccgaatggccatagtggacgggcgcagacagattccccacgggctcttgcccttcaagaaagccttcaatggcactttcattgccgctggtgggtatgacaaagaggaagtcgacaaggtggtatctggtggctacgctgaccttgttgcctacgggaggcttttcttggccaaccagacttgccgaggaggttccagcttggcg

SEQ ID NO: 3710 - DNA, 592 bp, Avena sativa
gtcgctcgccgactccctgctcctttcgacggcggcggcaggggaagaagaaggatacgacggcgcccggtacgtggggcggcggatggcgagcgcgatgggcaggctcaaggagctggccgggttcgtggagcaggcggaccatctccggcagcagacgctgcggaacatgtacaggatcctcactgggcggcaggcggcagtggggctcctcgccctcggggactactccgagcggctccgcgcgctcagcacgctctgggcggcgcgcccgcgcgagccggtgtaatttaagcgcagcgaaatggctacagtgcctcaagtcgtgtgtgtcagaagaagaagaagaagaagaagctgcagctgcccggtgacgtccctcgttgatcagatcgtcggcgtcgcggaggcggaagaaaagaagacatggttccgctctgctttcctaggaagaaagagtcgacgtgtgtgtgctgaagaagcagcaggtccctgatttgatcaagacattcggactggcagatgaaaccaagattcatacaaatgtgtaaatatatatagtccgtagtactgtacttggtttggagagtaa

SEQ ID NO: 3711 - DNA, 839 bp, Avena sativa
ggttactgtgtggagggtactcagaggatacttgtctacgagtatgtgaacaatggaaacctagagcaatggcttcatggagctatgagtcaccgtggctcccttacatgggaggctcgtataaaggttcttcttgggacagctaaagcccttgcttacttgcatgaggcaattgaaccgaaagttgtacaccgcgacatcaaatccagcaatattttgattgatgatgattttgatgctaaagtgtcagattttggtttagccaagcttcttggtgctggcaagagtcatgtaactactcgggttatgggaacctttggctatgtggcaccagaatatgcgaacactggattgttgaatgagaaaagtgacatttacagctttggagttgttattctagaggcaatcacagggagggatcctgttgactatggtcgcccggcaaatgaggtaaatctagttgactggctaaaaatgatggttgctagcaggcgctcagatgaagttgtggatccaaccctagagacacggccttcgaccagagctctcaagcgtgcacttctaacagctttgaggtgtgtggatccggattcagagaagagaccgaagatgggtcaagttgtgcggatgctggagtcagatgacccgattcctcgtggggacaggagatccaggcacaaccgcggagggagcgctgaaatggattcacaaagggacaacaactcagacacggacaagagtgacaacccagattccaaaccgagcaggagccgagcctcgtcctccaaatgaggcattccctcctatcacattcttcgtctgttaaaggccttggtacc

SEQ ID NO: 3712 - DNA, 527 bp, Avena sativa
tggtggaagcagggcatcttatgcatgcctgtcatttttcaaggtagcaccaatccagctcctggaagagtttctgtgctcaatgaaagttccattgtagttgaggttggaggtattgaaattgatcaaggactgtggacaaaaagtacatcagacaactgcttttgctttgggacagctgtggcttgatgggtgtgaatgccttcttgatagagtgagtgttcttcaggctgatatgttgagcttaatccaaggtggagttactgttggcagcactacatctgaatctagttgtgcatcaatccttcaggcctgcaacatgctgattgatagactgaagccagtcatggataagctcagacaacaagcctctaaggataacgttaatttgtcttcaagtgcatactgcgttcccggcgaagaatccagtaggtatctgaattatggagctggtataagtgaggtggaaattgatgttcttactggagcaataataactatactaacgagtgatgttatctatgatt

SEQ ID NO: 3713 - DNA, 752 bp, Avena sativa
ttccgaatttaacaaataaacttatgtagtacagaaataagatatgtcagttacttttatcagcagttcgaactcacagaactaaaggaaagagcaatgaagtgcacagattaaagctggacacagattcatgattttcacagttagacacggtagcaacgacataaaagatagagcagttcttcaatcttataaaatggctgccatacagagacagtcaaatagggaacgggccgattacaaaagagactcaggatgcaacttttcgcatctaagcttagacataagcatatgctagccgaaggtgacaacagggtgccttcccaatctcctagtcttcttccctttgtccctatttacaggttccgaaaccctcaataaaattcaccagggatgagcatgtcatcgaagctccaaaggtccatgttgccgaggacatcctggggtccatcaagattcagaaggctttcaatcggttcttccacaccatcatccatgagaaacttgagataagattctaaatcccccagcccatcggcgagatcaactgcattgttctccataacagcaggcacctctgagatgtaggtattgctcatgacaagcgcagactcatcaccttcagcaatggtagaaatggtggcaagagatgttatatctggagtcttggtttcatgctcccagcccaagtcagagcagccaaatgagttgcttccctgatcagagtacaggttcataacaggagcttcagt

SEQ ID NO: 3714 - DNA, 564 bp, Avena sativa
gggaggtttgatgcaactaatgtggttaaagcacctgtagtgtgtggaatatcttctctcggatatgatcatatggaaattcttggaaatacgcttcgggaaattgctggggagaaggctggaattttcaagaaaggagttccagcctatacttctccacagtcagaggaggcaatggcttctctcaaacaaagagcttcggaattgggtatttctctccaagtctctgatcctttaaagccgcatctgttaaaagatcaacatcttggacttcaaggtgaacaccaatatataaatgctggccttgcagttgcactggctagcacatggcttgagaagcagggacatgtggagagaatgccacttaaccgtactgatcccttaccagacgagttcattaaagggctctcaagtgcttctttgcaaggccgagcacaaattgttccagattcacaagtaaattctgaagagaaggaccgagattgttctttagtgttctatttggatggcgcgcacagccccgaaagtatggaaatatgtgctacatggtgggcggccgcaaat

SEQ ID NO: 3715 - DNA, 806 bp, Avena sativa
atgctttaagacggacacgaggagacggaaactgtttttatcgatgctttatgttttcatatctggaacatatcctggagacacaagatagagctgaggttgagcgcatccaaaaaaacattgagcagtgcaacaagacacttcaaggtcttgggtacattgaatttacttatgaagacttcttcgctatattcattgagcagctgcaaaatgttctgcagggacacggaagttctatagggcctgatgaacttctagaaagcgccagggagcaaacggtttctgattatgttgtcatgttctttaggtttgttacctccggtgaaattcaaaggagggctgagttctttgaaccatttatctccggcttgacaaattcaactgtggctcagttctgcaaagcttctgtggagccgatgggtgaggagagtgaccatgtgcacattattgctctgtcagatgcattaggggtgccaatccgtgtgatgtaccttgaccgaagctcttgtgatcctgccaatttgagtgtgaaccaccacgatttcatccctgctgccaaatcctctgagggtgatgacgcaatgacatcaactcctgctgatgagaaaccttacataacccttctctaccgtcctggtcactacgatatcctctacctgaaatgatctctgtctgattgaacaaggttggtttctctcgtgaattcgggttgagaaagcgtccagaactgtgtagtcatgttgcttctgcatgctgccaaaggcgccttacagagggatcctgtgtgttcttgggacgcaatcgga

SEQ ID NO: 3716 - DNA, 910 bp, Avena sativa
gtctcttaatcatagaatggtatacgcagatggcgtaggtcaaaatcagatgtacaaactaccaaccagaccaataaagtaatcacgtatgaatgcttcaaccctttcacaacccaggtgaaattttattgtcagaccccgaggctttgtcaaggtccctcttgttcatgtaaaataaggattgtttgtccgtgaatgccgattttatgaggattggcgaaaatccagcatattccttgtcaaccttagccagaccaacttcaagaatgtatttcacgagttcatgtttctgtacaaatggttgtgccgcaaattcttcaaccggtatccactgagcatcctcaatttctgattcttgcttagtaatgttgaaggaaagtggccgcatgatgcacacaaaaaatagatctgatttttcaaaataagctttgtggctctgcctgaaggcaagtacttcaatgaattctgtatcaatccctgtctcttcttttacttctctgacagctccaatgtttatatcttcacctggttcaacaactccagttggaaatttccatacacctagtcctcgaagtacaccacttttttcttgaacagccaatacctctcttttgtcattcattacaaaagctccaacacccacacggtgtgtagcatttacaggtaatgtatgagtcgtattcgggagccagtacgcgagcatcaagtaagtttcctctgcatgatggtaccagaatccttcctctactgctgactggataaggttggcaaggccgatcggcaattttatccagacacctcttattccctgctctctccactttgacaatgcagatttcaaggaagccgagaaaacttgtggatccatcagggtcgtcatctcaataatgatgcctccatgcttgtcatt

SEQ ID NO: 3717 - DNA, 964 bp, Avena sativa
cagaatctctcgcctgaaattttaaagttatatataactcaagaaggagtccggtcgccattttcctccaagccttctgataagcctgttccaaatgccaccttgcaagtcacgggcgctgtgggttggagaagagagggtcttgtgtacaagaagaatgaggttttcttggacattgttgagagtgtaaaccttcttatgtcttctaaagggagtgttctacgatgtgacgtgacagggaagattcttatgaagtgcttcctttctggaatgcctgatcttaagttgggattaaatgacaagattggacttgaaaaggaagcccaacttaagtctaggccttcaaagagtgggaagaccatagaactcgatgatgtcacattccaccagtgcgtcaacctaacaagatttaactcagaaaagacagtcagctttgtgccaccagatggtgaatttgaattgatgaaatatcgaatcacggaaggcgtaaatcttccattccgggttcttcccacaattaaggagttgggccgaacacgcatggagattaatgtgaaagttaagagtgtttttggtgctaagatgtttgcacttggtgttgtcgtcaaagtcccagttccaaagcaaactgcaaagacaagtttccaaacaacatccggcaaagcaaaatataatgcttcaattgattccctggtgtggaagatcaggaaattccctggacagaccgaggcaacgatgagcgcagaaattgagctgatttctacaatgggggaaaagaagctggcgaacaggccaccgattcagatggaattccaggttccgatgttcactgcttctggtttacgtgttcggttcctcaaggtgtgggagaagagtggttacaacaccgttgagtgggttcgctacatcacragggctggatcatacgagataagatgttagtgaccaacaaactgtcctgggc

SEQ ID NO: 3718 - DNA, 442 bp, Avena sativa
cagaaaatacaccaactgaacgatggcataaacaaaattgtacagttcgtttagtttaacaatgaagaggcagaaacaaacccagcatctgatatttattgaagtcctaacagtgagacatgaccttatatcgttcaaccggtctcaaaattgagcaatgtttggccgacctgacaatgtaaataaatggcgtaacagcataaccgtaggcgtgggcagcagtatctgctgaaatactctcaagtagagcagctaaatcaagatagcaaattggtaactactaggaacaaatatatgtgcctgatacatctctttcaggtgtgcttcgttgaactctatttgtcattcacaagggggctgtaaacaggataccacatcttccgagccacgtagtccactgtgtccgactctgacatgctctttagctccctaggatccattt

SEQ ID NO: 3719 - DNA, 741 bp, Avena sativa
  modified_base (735)..(735): a, c, t, g, unknown or other
tcaagccttgttactcatttggttggtgtcgtttgttcgtttgtaaaaaatcagagtgacagacagaaagaaatcgatactgttcttgatcttactacgtttagaaaaaaaaaaaaaagaaaaggccttccgcgatttcaagcgaagaaatagcgagagagaaagaagggccttgatcctgcttcgaatccgcatccgccgccgccgacgagatgtttctcacgaggactgagtacgaccgcggggtgaacaccttctccccggaggggcggctgttccaggtcgagtacgccattgaggccatcaagttgggctcaaccgccatcgggttgaagactaaggatggtgttgtcctggctgttgagaaacgtgtcacctcaccgcttctggaaccaagcagtgtggagaaaatcatggaaattgatgagcatgtaggctgtgccatgagtggccttattgctgatgctagaacactggttgagcatgctcgtgttgagacccagaatcataggttctcatatggggagccaatgacagtagaatctaccacgcaagctatctgtgacttggctttgcgctttggcgaaggtgaagaagagtcaatgtcacgaccatttggagtctctctccttattgctggtcatgatgaaaatggacccagcttgtactacacagacccatctgggaccttctggcaatgcaacgccaaggcaattggagtcaggctctgaaggngctgat

SEQ ID NO: 3720 - DNA, 707 bp, Avena sativa
ttctccgggagctgatgcagagaaacatcagagtctgggtttacagtggagacaccgacgggagagtgcccgtcacttccagtaggctctctgtcaaccagctccagctccctgtcttagcaaaatggaggccatggttcagcagcaccacgggtgctggagaggttggtggctacgtcgtgcagtacaagggcgacctcagcttggtaaccgtgagaggagcaggccacgaggtgcccagctaccagccgcagcgagcgcttgtgcttgtccagtctttcctcacaggcaccacgctccctgactgcagaaactgcggactggattaacaaaagaaaaataagtttttacggtaaaagtagtacagcagaagcttcacaggctgtaccattccatccggtacaagaaataagcaaaatcaagtaaagttagacacagaaacccatcaacccatttcactccgcagatcatgtaactgcaggtcagcaatgctttcatatagataggagactgtatgaagcaatgtattaagtctgaatattgatgccaaaatggcatgctgcaatactagagataactgtatgaagtggtgcctcactgtgttacgatgaccgatcaagagaatggaatttatatattggttctaaagcaaggggatactgtaaactttggagatttggcagcagcagcagcagatcatgtaagtg

SEQ ID NO: 3721 - DNA, 600 bp, Avena sativa
gttcagataacagttgtcaggggagaaaccaagtctgagcgaaaggttgttgaggtgatcaacaagcttatgtggctggcatcagtttgcactaccatttctttcatcgcctcatgttacattgtgctaggccgccactttcaatgggcagcaatactggttagtttgataggtggtgttacaatgactggtgttcttggtacgatgacgtactatgtggtgaaatcaaagcgcataaggaagattagaaaaaaagagaagatgtcaagaagaagcggttcaagctcctggattgacaatactgaaatctcagagactgagcttaatcaagtgtatgccttgtaaagaggcggggtgtttgaactcagcctcatctctggaattgagaatgtacatgcttaatcaactgtatgccttgtaaagagacagggtgtttgagctcagcctcatatctggaatcgagaatgtacatgaaaattccagatgcacacattaacaaatacattagctctcattattacttgattgtatacaattcctttctgttacgactaccgtgcataactaaaagggaggcctgttgtgctaggctcctgcagt

SEQ ID NO: 3722 - DNA, 615 bp, Avena sativa
gccgacccctacgaccgcgccaccgcacgcttctgggccacctacgtcaacaacaacttttccagtcgtggagatccctgttcaggtcgacgacggcggagcagagagccgaggcgttcaagaacgtggttcctcaggtggagacgctggagcgggcgttcggggagtgctccaaggggaagccttttcttcggcggcgacgccgtcggcatcgtggacctcgcgctcggggagcttcctggtgtggatcagggtggtggacgagttggccggcaccaaccttctggatggggagaaattcccgggactggcggcgtgggcggagcggttcttggccgtggacgctgtcgggaaggtgatgcccgaagcagggaggatcagggagcactaccaggggtttctggctaaaactggctgcaccggctggttctagctaattgcgatgctcccgtactttgtcactgagactgcactgttagaaataatgattcgctgctgagaggtgtccctattgaataaagagagcaaaatgtgaggctttgtcagtgtgttaagacgtgattttgttcaatagagagattgaattgaaatggtcaaatgttttcagcggaaaaa

SEQ ID NO: 3723 - DNA, 747 bp, Avena sativa
tgcagaacgagcaaagaaggagctcgagcaacaagaatactatgatccgaaaatagctgatgaggagagagagaaaggcaatgaattctttaagcagcaaaaatacccagaagcagtgaagcattacactgaagcgctcaggagaaacccaaaggatccaaaggtgtacagcaacagggctgcctgttacaccaagctggctgccatgcctgaaggtctcaaggatgctgagaagtgcatcgagctagatcctacattctccaagggatacacaaggaaaggcgcgatccagtttttcatgaaagaatacgacaaagcaatggaaacatatcaggaagggctaaagcatgatccgagtaaccaagagttgcttgatggtgtgaagaggtgtattcaacagatcaacaaggcgaacagaggtgaacttaacccggaggaactgaaagagagacagggcaaagctatgcaggaccctgaaatccagaacatcctgacagaccctgtcatgcggcaggtgttaattgatttccaggagaatccaaaggctgctcaagagcacctcaagaacccaggagtgaagcaaaagattcagaagcttgtgagcgcagggatagtccaaatgaagtagactaaggctgaaagtgtctcaggctttagttagttggatgattgcgtaaaaaatgctgtgaaattttcctccagatttgggtgtgtgtaaaagtacatttcgtggtggtatcgttatgt

SEQ ID NO: 3724 - DNA, 657 bp, Avena sativa
tgtacgtgagctttgggagcttggcgtccatggaccccggcgagctctcggaggtcgcatgggggctggccaacagtggccagccttttctatgggtcgtccggccggatctcgtgccgggatcggacggatcaggtttatcagagggattccatcgcgcggtggagggtagggccaaggtgatcccatgggctccgcaacaggaggtgctggcccactctgccgtcggtgggttctggacccacaacggctggaactcgacactggagagcatcagtgagggtcaccccatgatctgcaggcctcaattcgcggaccaaatgatgaacacgaggtacgtggaggcaacatggggcgtaggtttcgagctcgagggtaagctggagagaaacaaaattgaggaggccattcgaaatctcatgaaggggagccagggtgagttagcgagggaaagagctcgagagctcaagaaaaaagtaatatcttgcttggagagtgacgggtcttcttcgttggccatcgataaattgatcgaacatatgttatctttgtaggatttgtattatagtagttatgaaatactcttcttaaggacatatcatctactagtattataacatttgatctaaataattgatgttattgactacaaaaaaa

SEQ ID NO: 3725 - DNA, 944 bp, Avena sativa
caggcatgtgcagggcatctgtgacgtgctcgcggagacgatgaaacgggaccacggcctccacgtcgaccctctcacagacttcgccatctgctgcggccaatccgaggccttcgccgcggctatatttgcaattatagatccaggggatgaggttctgctcttcgacccctcttacgaaacgtatcaaacgtgcatcgagttggcccgaggtgtccctgtgtatgtgccgttggatccaccttcttggacactgaatggggataagtttttgaagtcgtttacgagtcagacaaaggccgtgatcctaaatagcccacataatccaacagggaaggtttttagcaaggaggatttgctgattatttctgaagcctgtcagaaaatggactgttttgcaataacagacgaggtttatgagtatattacttacgacgagaataagcatatctctctggcttctcttccaggaatgcaagagaggactatcatcacatcctctctgtcaaaaacttacagtgtaactggttggagaattggctgggcttgtgccgtagcaaacatagcagcagcaataagaaatatccatgtcaaactgacagattcagcccctgcaccattccaagaagctgcattgattgcgttaaccagcacaccagactactatgagtcccttaaaaaagctatgcaatgagaagagactttattcttcagttgctgaaaaattatggtttccacattagcttcgagccacaaggttcagtctttgtgtttgctgagttgcccaagtcttggcaaatttctgatatagattttatgacgaacttgatcaccaatgctggtgtggcggccgtgcctggaagtggcttcttccacacagatcctgacgaccaaagctaccatcaccggtatgttaggtttgcgttttgcaagagcgacgagac

SEQ ID NO: 3726 - DNA, 709 bp, Avena sativa
acaggatgctcaaagaatttgatcacttggaagtccaatcatcctcattatatgaatatgatcttagtaactacaatgatgataggcctttggatgtgggcataacttggaagcttcccctcatttggtcttgttcccctgcaccatatcatgcaagaagatttcttatgggtagtggaaacgaaagagggtctattgctctgtcatttctatctactgatctacataaccagttgggtggcagctcaaatgattgttcgataaaggctgtggttctccaggtttttccatggtatgttaaggtcttttatcacagcctacaaattttcattgatgggagcagcaaggctatatcagaagtacttgacatgatacatgccactccttcagaagacaaactttcgcctggaactctggagatgctgctaagatttccttgcggcatgcaatcagctaccttgatattggactttgacaaggggttcctacacatagacgaatatcctcctgatgctaatcaaggatttgatattccatcagctttggttagctttcctgagtttaattctagccgaagataccccgaaatggatccattgtttgtatcacctttgctagaaaattttaaggaagataatgttgtgaaatcatacacagaagtgctgcttgttcccttgacaactacctagatttcagcatgccgtataat

SEQ ID NO: 3727 - DNA, 993 bp, Avena sativa
ttctcaatcctcaatgtggcgtccaccaacaattggtcatgcaatgccatctagtagccgccctcaggggcagggcttcttgtatggtggtcgccaggcttcattgtttggatcttcagatcaaaaccgtcatcatgttgggtctgccccttccggtgctccatttgagagtcactttggatttttacctgaatcacctgagacgtcattcatgaatcaagttaggtttggaaatattgggaacattggtgctaaccgaaatggggaggcctcatgatgaacatggcttcccgtgcttctctaaatcctgtttcttccctaagtggaagcctgtcagataataactctactaacttcaggccaatactgtcatcaccaagattgagccaaccattctttgggaaccccacatatcagggacctggttattttggacttgacagctcaatggagcgtggtcgtagcagacgagttgacagcagtgtgttccaagcagatagcaagaagcagtatcagcttgatctggataagatccgtaaaggagaagatactaggacaacattgatgattaaaaacattccaaacaagtacacatccaagatgcttttggctgcaatcgatgagctccacaaaggaacatatgacttcttctacctgccaattgatttcaagaacaaatgcaacgttggttatgcattcattaacatgatatcccctgtgcacattatatctttctaccaggcgtttaatgggaagaaatgggagaagttcaacagcgagaaagtagcctcattggcttatggtaggatccagggaaggaatgcacttatctcacatttccagaattcaagtttgatgaatgaggacaagcggtgccgccccattctttttcattccaatgggccagagactggaaatcaggagccatttccaaatgggatatgcatccacatgcctctggatggcggggcagctgccagcagggagcctctc

SEQ ID NO: 3728 - DNA, 739 bp, Avena sativa
cgtatgggcagttcctgaaagcaaatggtgagcagcctgttacatggaagagggcttccagcatggaggaggtcctcagggaggctgatgtgataagcctgcaccctgtgctggacaagacgacgtatcacctgataaaccccgagaggctggcgatgatgaagaaggaggctgtgctggtgaacgcgagccgagggccggtgattgacgaggtggctctggtggagcacctgaaggcgaacccgatgttccgcgtggggctggacgtgtttgaggacgagccatacatgaagccgggtctggcggagatgaagaacgcggtggtggtgcctcacatcgcttctgcttccaagtggacacgtgaagggatggcgacacttgccgcgctaaacgttcttgggaaaatcaaggggtatccggtttggggaaacccgaatgcagtggagcccttcctggacgagaatgcagtgccgccgcctgcttgcccaagcatcgtcaactccaagcaactcggcatgccatcttccaagctttagacagacagagagagagataatgccgcctatggatggtggacctgtggatcactgctgctgcttggttgctatgtatagctagtatatatacacacacacacacacggagtagtggcgaacatatcaaagagctttgggctcaaccttaatcgattattatgtattttcaatacccgtgagaaggaggatcatgtacgagaaag

SEQ ID NO: 3729 - DNA, 795 bp, Avena sativa
cgatgacactgttggagagttctactcggtagcactgactaaggattaccagcaggcagatacagggacgaagatgatccacaaggggaagaattcacgcagccggattatatccaagggtatttcggcagggaagtcaaggaattgctaccgcgggctggtccagattatgtcaggtgcagaaaatgcttataattcttctcagtgtgattcattgctaattggggataacgctgctgccaatacctatcccactattcaggttggttgcactagtagccgtgttgagcatgaggcaagcacttctaaaattggagaggaccagctattttatttccagcaaagaggtatagaccatgaaaaggctgttgcagcaatgatcggtggattctgcagagctgtttttgagcaccttccttacgagtttgcccaggaggtagatgcactcatgaacctgaagcttgagggatcagttggttaagttgtgggctcaacaagtctatgaatatcacacgataattatctgaaaatcatatgatgattatctagaaagtccgtatgtacagcagtatgaggaatcaaggactgagaataataaattacatgataaatgggcgtctcatagcttgtctgcctgttaaggtgcccatgatgacgaagagaaccgtgatgcttctcttttgttcgttccatttttgtttgttggttcttctgctgtaaaggagctcatgttgggatgcctatacaagaacataaactgtggtcttacttatttgaattctgtataaggcctgt

SEQ ID NO: 3730 - DNA, 669 bp, Avena sativa
ctgcccgcaaccaggtggtctctgtacggcggaatgttgaagctggaaaacacaagagtgcctttggacgttcaggcagtcctgaattaggcagatccaagcagcacattgctcaggataacgatgacttcattgcttcagaatctgatcagcagatgctcctgatgaagcagcaggatgatgagttggatatgcttagtgccagtgtccagcgaattggaggtgtaggtctcaccatacacgacgagcttgttggacaggaaaagcttttgggtgaactaagcatcgacatggaaactacttccaatcgtctcgattttgtgcagaaaagagtggctatggttctgaagaaggccagcttgaaagggcagatcatgatgatagctttcttggtgattcttttcatcattcttttcgtcttggtgttcttgacctgatcgtcggagtttgggttttgtgagtatccaccatcaagtgtgtagagagcataacacatacgtacaattgattcatgtaattgtggccggtatagttttattcttcagggatctgcccgcctgtgcccaagtaatatcatagctatttttccttgtagtactttggactccagttgcatgtatgagaaaagtattggtcttctgttataagtacaacaactccttccatacc

SEQ ID NO: 3731 - DNA, 611 bp, Avena sativa
attgccgagccggtgccaccaaagaccattaagcaccaggagctatcatggacagtctgggaccgatggaccgtgactggcaacatcactctgagggagctcctggggtggctcaaggagaagggcctgaacgcatacagcatatcgtgtggtacctcgctgctgtacaactccatgttccccagacacaaggaacgactggacaggaaggtggctgatgttgccagggacgtggcaaagatggaggtgccctcttacaggcgccatcttgatgttgtggtggcttgtgaggatgatgacgatgaagacgtcgacatcccacttgtatcggtctacttccgttgaaggcctccctccacatttatatgatgttgtggttagccttgtcagaccgacagacggggtgtgcgttgcatactgtaagctgagtagggtttatgccacaccgctgacttctctatcatctcgatattgcttgctcggatcattggggcagatctggtgttgttacttgacatcacgagactaggttactggcttaccgtcgtcttgataattgttgtttgatatatacacttcaactaaaaatgggtccttcgttttcaaaaaaa

SEQ ID NO: 3732 - DNA, 680 bp, Avena sativa
tgccgtcggtcaggacccgcaggctgcggccgggggaccagttcctcatcttcgcgtcggacgggctgtgggagcagctcagcgacgaggcggccgtggacgtggtggcccgcagcccgaggaagggcgtggccatgcgcctggtcagggccgcgcagctggaggcggccaggaagaaggacatcaggtacgagagcatcgcggccatcgagaagggccggaggaggagattccacgacgacatcaccgtcgtggtcctcttcctcgacaacaggccctgctcgccgcggtccggcggcgtgggcgacgagatcgacggcacctgcggccccgtcgacgtgttctcgctcagctccgacgaccagggcgacgacccggccagacccgtgctccgttgatcggttcaccgatcgttcggccggtcagcgacgacgtcggtaccttcactgaacgtatacgttcagtagtactagtagtagcgttcgtaatttcggcgagacttttgctctgtaaactcaagttacgggagcaaatgcgttctttggtttcttgatgatgagattgctgcatcaaattattatgagtattactatgtgtaattagttccgagaagtacaatgtcaaatcgtgttcatgcatgtgcacagaattaagtgccactctttgcataatcttcttct

SEQ ID NO: 3733 - DNA, 782 bp, Avena sativa
gtcaacagtatgcttttaatatattttcacataatgcacctattcttgaaaatggctacaatgaggaagagatgaaaatggtgaaggagaccagaaaaatttggaatgacaaggatgtgagagtaaccgctacctgtatacgggttcctacgatgcgtgcacatgctgaaagcataaatctgcagtttgaaaagccacttgatgaggacactgcaagagaaatcttgagggcagcccctggtgttaccattagtgatgaccgagcttccaatcgcttccctacacctctggaggtatcgaataaagatgaagtatcagtaggtagaattcgtcaggacttgtcgcaagatgataacagaggattggaaatatttgtgtgcggagatcagatacgcaaaggtgctgcgctgaatgctgtgcagattgctgaaatgctactgaagtgattgcctttctgtatgtgtcttgtgttcctcattgctgtagccattgatggattggtgtacacttctttaggtttgctctcggttttggtcagttgccttttttgtaatctatcatcctagggaaataactgtaagagagaatttagtaatctgttgcacacaatagtgcagccaggagtttgaggaaaaatggaggtccgtcacttattcagattttcgtacttaaaaattggtgtgtcagtgtgtgaaatgcctaatgtaacctgacctagaaagcaccgatttcaggagactggggcagtgaggcgtagtaaaggcaattactgcacagaaccg

SEQ ID NO: 3734 - DNA, 920 bp, Avena sativa
atgcacgatcaaagcaaggaagacttcctcttgtccggattcaggatgatgatggaagttctgaattatcatcagaggaaaaacttctgaatgatgtatttgtaaaagacagtatccctccctggttggcaggatctggttatgtgggcctggcagcaatatcaactgcgactgtaccaatgctgttcccacaactcaagtggtaccttgtcctctctgcctatgttgttgcccccctactcgccttctgcaactcttatggcactggcctgactgattggaaccttgcatccacatatgggaagattggtctcttcatttttgcctcatgggttggccaccatggtggtgtgattgccggcttagcagcttgtggtgttatgatgtccatcgtatccacagctgctgatctcatgcaggacttcaagactggttacctaaccctctcttcaccaaggtccatgttcgtgtcacagttgattgggactggtcttggatgtgtcattgctcctctcacattttggctctactggacggccttcgatattggcaatcctgatggcatgttcaaagctccatatgcagtcatcttccgtgagatgtcaatcctgggtgtcgaaggattctcagcgctgcctagcaatctgcagtttcttcttttttgcagccatagcaatcaacctcctgaaggacgtcactccagccagcgtgtccaaattcgtcccgctcccaatggccatggctattcccttctacattggagcatattttgcgattgacatgttcgtcgggacggtcatcttgttcgtctgggagagggtgaaccgcaaggagtctgaggactttgcaggcgcggttgcttctggtttgatctgtggtgacgggatctggagtgtcccttctgcggtactttccatcat

SEQ ID NO: 3735 - DNA, 400 bp, Avena sativa
ccagaatatgccaggtagttgttgcagctactcggaacttcgataaagtattgccacatgattcctcagctctttatgaatttctggggcaaggttcagcaattgaaggaagccggaaattggagcatacaaccggacttgagttcttcgataaagctgcaattgtgacacaatctgactgtgaatctcctggcctagttaatacatggaagatttgtactgtcactcaggtggaggagttaaagcttttgatcagaatgttcccagtttggtctgcaatgctattatttgctgcagttcaggaacaaatgttctcaacatttgtagagcaaggaacagcaatggagagacacatcgggtctttgaatacctgctgcatccttccaatgtgtagatacaa

SEQ ID NO: 3736 - DNA, 940 bp, Avena sativa
cgaaatcattgaagatgataatcttgttgagaatcctcgttgaaatgtagttagaaatgccattccagccatttgatccatgaatttatcatttcaatgctattgcaagcaacgcatctgcattaagtggtaagcccagttgaccgtcaatgttcaccccaaacaaaaggttatttgttggatctgtaacctcaaactcactatccggagctgtgtccctcaacaggtgatgctgatcaaatgatgaaggttgaaagttttgttgcaatgatccatcagcctgggaaaggcaaaccgaagtagctgaagaggatgtgtccaagtaatccatatgggggttgttgtttacatagtctcgtccagcagctggcccttgttcagttatcttgggaatcgttattgttggcttcacactctggtaaggcttttcctgttcaattgtggagcccagcacgacagatgattgagatgtttttgctgcagttagtaaactctggttcttggagctacatggaatggattgccggagaacaccattagtgttagtggatggtgatgttgacgaagagtgaacattatcagtcttcagtgactgcactccatcagccacattcaaagagctagcacccatggaggtaacaatatctgattttgcaacatgaatggtactcccaggcgaatcttgaactggttggtgaggttgagccctttgttgtgttgggcattgcatagtgatgccattatgtaaaccaacagtttgggtagctccttgcatacagtgctgaggatttgactgagaatttaccatctgctgctgcaaatcgaaaagcagtttctgctgctcgaaggtcagatgttgctgtggctctagagcctttaatagttgaagtttcatttgataatcagatagctgcgtattcatgtttgcatcactggacgc

SEQ ID NO: 3737 - DNA, 956 bp, Avena sativa
tgccagtgaaggtgacactgttactccaggtaccataattgccacgatatctaagtctgctgccccaagtgaggcccatgttacaccatctgaagagacctcccagaaagagacccctccaccacctccagagaaacccaaggttgagcaaaaaccaccaaaagtagaatctaccaaaacacaggcatcaaaactagcctccccctcagaacctcagctccctccaaaggaaagagagagacgggtgtcaatgccaaggctcaggaagcgtatcgcaaaccgtttgaaggattctcagaacacttttgcgctgctgactacattcaacgaagttgacatgaccaatttgatgaagctgcgttctgactacaaagatgagtttgttaagaagcatggtgtcaaattgggtctgatgtcctgctttgttaaggctgctgtttctgcacttcaaaatcagccagttgtcaatgctgtaattgatggcgatgacatcatctacagagactatattgatattagtgtcgctgttggcacttccaagggtcttgtggtgcctgttatccgtgatacagaagggatgaactttgcagacattgagaaggggataaacagccttgcaaagaaggcaactgagggggcactgtctattgatgagatggcagggggaaccttcaccatatcaaatggtggtgtctatggaagtcttatcagcacacctatcatcaatccgcctcagtcggcaattcttggaatgcattcaattgtccaacgccctgtggttgtcaatggtgacatccttgcgagaccaatgatgtaccttgcactgacatatgaccataggctgatcgatggcagagaagctgttctgtttctgcgtcgcatcaaggacgtggttgaagatccacggaggttgctccttgacatatagttccatatattagtcctggtctactact

SEQ ID NO: 3738 - DNA, 934 bp, Avena sativa
acgccatcaacggcagcctcgccaacatctcattcaccagacggatgggcacgttgtcatcgccgatgcacctgaacctggaggcgcggctgcggatcgcgcggggcgtggcgcgggggctggcgttcatccacgagaagaagggcgtgcacggcaacgtgaagccgtccaacatcctgctcggcgccgacatggaggcgctggtcggcgacctgggcctggaccggctcctgtccggcgccgccctccaccgcaacacgggcgcgtcggcgcgcctgttcgggagcaagcgttccatgcactccacgagcagcctccccgacctgtcccagatgcccggcggcgccagcccgtcgtgcgcctccacgtcgtcggcggcaccgttgcagccgtaccaggcgcccgagtgcctcaagagcctgcggcccaacgccaagtgggacgtctactccttcggcatggtgctcctggagctgctctccgggcgggtctactccgaggtggagctctgccagtggcacgccggcgccgccactactgaactcgaccagcgctgccgcgtgctgcggatggccgaccccacgctgcgcggcgaggccggtgacaacgaggacgccctgctcggctgcttccggctcgccttcgcctgctgcgccatggcgcctggcaagcggcccaccatgagggacgccgccgcgctcctcgacaggataccggcagccgtgccctcggcctccactgccctcgagatcccatactgatggcttggcaataagttgacagggaaccccccattgtagcgtagtacaattttcgttactgattaatggcgagattactgtgttagtgtgtgtagatttgtgtcactaattttgatgaccctgtgattaacacatcttttcaaacctgttgtttcatgatattctctgactgt

SEQ ID NO: 3739 - DNA, 723 bp, Avena sativa
gaactgaactgacatttgatactcgagcaagtttggcactttttgggtcattcacttcaacagattatgttgcttctcagcgtctcaggagaaggataatgtactatcacatggaagctttcaaaaaggttgatgtcatagcaacccctacaaccggcatgactgcgccaaaaataccaccaagtgctctgaagataggagagtctgattatgttgtatcagctaagctgatgcaattcatttttgccgcgaaccttcttggttttcctgccattactgttccggttggtcatgacaagcagggccttcctatcggcttgcaactgataggccgtccatggggcgaggctagcttattgagggtggcttcagcagtagaggagttgtgtctgaagaaaggatcgcccctccacgtttacgacatcctaaagacctgaaacagtctagtaccagtacatatgtaattcttccctgactgtgttatgcctgctacaattccatctgggaacgtacacataattccttcttcgtgttgctgtaattcaatatgtatgaggttcttggcagtggccaggacccgggacagacacagcaaaccaaccctcctccgggttggtcaaagtcatttgtaggagatattgcagcaacaaataagtaatcgaaatagtatataaaaaatcgattgatgctttcgataaaaaaaaaaaaaaaaaaaaaaaaaaa

SEQ ID NO: 3740 - DNA, 713 bp, Avena sativa
cttctcgcagccgtgcgcggtggacatcatctacggggagctctgggcggggcggatggcgctgccggccacggacggccgcgagctggtggcgagaggagcgctgagcgtagagctggggccggaggacatgccgccgttcgtggcggtgccggagtcgcagcctgtgttgaccaagacgtcgattcgacagttcgaggggctggaggaagccgacgacgtactcgttaactcattccgggacttcgagccaaaggaggcgaagtacatggaattaacatggagagcaaagatggtaggcccaaccttgccgtcattctacctggacgatgatcgcctaccatccaacaagtcttatggttttaacttgtttagtggagatgcaccgtgcatggattggctagagaagcaaagcatctcttctgttgtacttgtatcctatggaactgtatccaactatgacacatcccagctagaggagcttggcaatggactatgcaattctggcaaaccttttatttgggttgttaggtcaaatgaggcacataagttaacagaagagctcaagatgaaatgtgagaagataggattaattgtttcttggtgcccccaactcgaggttcttgcacacaaggccattggttgttttgttacacattgtggatggaactcaacattggaggccgttgctagcggtgtacctcttgtgggta

SEQ ID NO: 3741 - DNA, 790 bp, Avena sativa
ggcagagctagagcccaaggttgtggaggttattgaggcctctcccccggagattaaggcagtgataaaggataagaaaccagccaagatcaagaagaactcggttgcagtcaccaagttcctcgacgaattggccaagattgaattccccggagccaagatggtgagtgacgcagtggcaaagtcaggcaccacgcccctctcccccgcaatcgtcttcatcttggacaaggtcgcgcctttcgtccccgagcccaaggaggaacccaaggccgagcctgaggctgccgccgccccggcagaggaaaccaccacccgggaagtcgccgtggaggaaaagaaggaggaggcagagccctccgccgcgtcagcggaggttgccgcgccagtggagactgccacgccggttgaggctgccgccccggtggctgaggtagtggaggagaagaaggaagaagcgaagcctgccgagaccccagcaccggcagctgaaccagagaagaagtgatccttcatcaccaaattccaagagcaatccaagctaccacctggtttgctgctggtaattaaaggaaccatttaagctattgtgaatttgtgatcactctgggtgtccacgtagctgcacagaagtaagtacgtacgacaacacacatttgccatgcatattacggcatgcaaacgtacacgcaagaacatttgttattctttcgatcgatcaatccccgtatgtgtaaatttttatgttggggctttcttgttttttgtggtggttaaaaacatgtgtaat

SEQ ID NO: 3742 - DNA, 606 bp, Avena sativa
agatgcttcccactcaaggattggcatctgaaaagacaaatcgttttgcccttctatttggtactttggatggtggaattggatgcattgcgcctattgatgagttgacattccgccggctccagagcttacagaagaagcttgtagatgcagtcccccacgtgtgcggcctgaacccaagatcattcaggcagtttaaatctaatgggaaggcacatcgtcctggaccagataacatcattgactatgagcttcttgtgcactacgagatgttatcattagaagagcagctcgatattgcacagcagattggaactacccgtgcacagatccttaccaatttcagtgatatttcgctgggcactagtttcctgtgaactgaagctggagggcggtgatgttggaagcaacgccatgatacagatggaacagctagccatacaggaccagccttgtaaaattacaaatgcaggtctaggaattaaccgtgcaaccaatgggattatcactgcctaacagcagtaaattgtaactacaatgacggtagcatgtgattaacatttgaaagcgatctgtaaatgtccgtgttctttactttactaaaaa

SEQ ID NO: 3743 - DNA, 651 bp, Avena sativa
aaagcttgttctgcggaaggatataaagaaccatgggaatcctacaagtcataagccagagttagtgctgaacaatttcactacacgccttggtcatcgtgttggaaggatgatacaatctctgtttccccaagaccccaatttccgtggccgacgagtagtgaccttccataatcagcgggactatatatttttccgtcatcacaggtatgtctttgaggagaaagaaaaaaggtggtgtcaaaggacaagaaagccaagacttctgaaagcaaaactgagaagcacgtgaattgtcgccttcaggaatgtggtcctcgcttcactctcaaacttatcactttgcaacatgggaccttcgacacgaaaagcggagagtacgagtgggttcacaagcctgaccttgacacaagcagaagaagattcttcttgtaattgttgtctttgcctcccatgggaatgtttgtttctgttcctcggaaaattattatagagtagtatgcgtgagccctccaatgtaacagacttaaatccacattttaagcagttttttgtgtacccatccatgagttatgagttattatacagaagttcatgagttttgagttatgctagtaatatttttcaaagtatcttgaacagaaaaaaaaa

SEQ ID NO: 3744 - DNA, 891 bp, Avena sativa
aaggtatacctagctgagcttcccgaaggaaagttaatggaggttatgaagattgacaatgctaacggaagagtgtcaatagatgactttctagatttggttgcacgtatctcagagattaagaatcctaacatccttgagttagttggatactgtgctgaatatggacagcggttacttgtgtacaatcacttcagcagaaaaacactagatgatgcgcttcatgatagagaggaaactgacaatgctctatcatggaatgctcgcctccaggtcgctcttggttcaggaaaagccttacaatatctccatgaaaacgtccaaccaccaattgtacatcagaattttgaaccagaaaatgtgctccttgataacaagttatcagtgtgcgttgctgaatgcggattggcagaactgatgccatcaagttctgtcactcagttgtcaggtcggatgcgtacattactgaactatgaagcgccagaactccaggaatctcggatcatcagcgaacggagtgatgtttacagttttggagtagtgatgctggaacttcttactgggcgtaaaccacacgatagttcacgcccacgccatgagcaacatcttgttagatgggctggttttcagcttcatgacattgaatccctctccaagatggtagaccctcctatacgtggacagttttctgagaaagcattgtcgcggtttgctgacataattagccgttgtatccagagagagccagaattcaggccaccaatgtctgcagttgtccaggacctagctagtattgtcaatgcttcaggtgaggagtcagagtaacaaacaattcaacatgcgccaagctgctgctgggaaatttttgggatgggactaaagcacataata

SEQ ID NO: 3745 - DNA, 671 bp, Avena sativa
ggcgcaggagtgggcggcgatccccggcggccaggcgacctaccttggcaacccggtgccgtggggcaacctgccgaccatccttgcgatcgagttcctggccatcgccttcgcggagcagcagcgcaccatggagaaggacccggagaagaagaagtaccccggcggcgccttcgacccgctcggcttctccaaggaccccgtcaagttcgaggagctcaagctcaaggagatcaagaacgggcggctggcgatgctggcgttcgtggggttcgtggtgcagcagtcggcgtaccccggcaccggcccgctggagaacctgggctcgcacctggcggacccgtggcacaacaacatcggcgacatcgtcatccccaggaacatctacagcccttgaggcttgagcggagttgagaggggatcgtacgtgtgatgccctagcagtgcatatgcgtggttttcatgcgtgtgtctgatcgatcgatcggttggttgattatcttggctctgcagcacgcgtcgtccatgcgtgcgtgcagcaactgttgtacaacaacgtcggctctcatgccggcaacctttgtaatgtgtaaagcttaactagcggctactcctgtgaatgcgcatctcaatataatctgtgtcaaaaatttgaaactagaaaaaaaaaa

SEQ ID NO: 3746 - DNA, 750 bp, Avena sativa
gtatggtagaacaagctgcaaaaccacttccccgtcctgttagggtatgggttcttgatgctactcctggtaaagttcgtgctgggttagatggtgaagatcaccctgctgaacttattgagttcctcagaagaatgcctaggcaggttaattcaaagcaggaagttgttgatgctctcgttaaggcaaagttttctctggatgtcgcacggtgggtggcaactaatctccgacgaagcagtccagtaggactacgatcttcttcaggcttctcatggatattcgacttaaatggcatctctgagatgtacaagtcatatgaagatactaacttgtggagggttgtagatgatgtgccgcggggagttcacattaatttccttaaggctgaaaggagtttgcatagatgggctcttgaagacctccagaggattcatactgcggaggagctggctgcagatgagggtggaggagttgaaatgcatctgcttgaagatgctggacactgggttcatgcagataaccctgacgggctcttcagaatcctttcatcgaccttccgcgtcgagacttccgtaagagggatgcaggattaataaggtgcagaaatctgaacagtgctgcaacatggccagctcaagtgggtacgcctgacatgaagaagatacataagaattgtgttgtactctgcctgtatttcagttttgtagtaataccgagaggatggaaaactgtacagacagagcgaat

SEQ ID NO: 3747 - DNA, 626 bp, Avena sativa
ttcggcgattcggaggtcgcggagcaatggaacgagtcaaacagcgcaacagctgtgcaagcgctgccagccgaaactcagagattttggcaagggcaccggttcctcaacttcctcctcgcttgcatggtcttcgccttcgtcatctcgtggctgtttcacttcaacgtcccggggtgagttttatgtgttcaaggggacctcaataaaagccccggcgcagttactgcagacatgtagtgctatgtgggttagattcagcaaatctgaagaagaggctttaggtgaagttaagttgtgaggagatacacatatggtagtagcggcgtgatggccttaaatttgcgtgtggcattgaaggaccggggggattagaacggccaatggaaccccctgactgatgaggatttgaagattcgggtggagataagagcgaaaaaaatacgtagaagatttgttgtttcacgccggttgttgtttatcgtggtttgaagaacagggtttgtgttgggggttagtcgtttcttagctttcttttttttgtgttcatttttgtctgccgctttggtgtgatcctttgcataatttttcttcgttacgatgtttatgatcctgataagcaggat

SEQ ID NO: 3748 - DNA, 731 bp, Avena sativa
tttcaaaatagtatcgagtaaccttacaatcaaggtgtttttgaccgagacactaatatattatatttaagaagttgtacgtagccgccaccagggaagaacaagctaaaacccatctagggtttcgtcctcctcgccggcgacatcgtcggttcgctccgcatccggtggccctagggccttggaggtgtggcggaccatgccctctcaccggcgggaggctttctgttgtttgtttaccctgctttttcgtatcttcttcgggatgttgaagcgacggctacgtcttggagttagaataaggtcctccccactctatcctcgctccggtggtgcatctagcgccaatgggaagcgcatggagtcgtttgtccggcggattcccgggatccagtccgtcttcatgttcgtttgtttgattcaaggtcagtctcttccgatctacgattgtcatctttgacgatggttgctactcttctgtgctggtcctttgtgaccttagcatgacgacttcctgtctatctactacaacaagctctactacgacaagttttaccgcctgactccggtgatgaaggggcgaggacggcggcgtgtcttcggcttgcgctagtggttgtagtcatcgctaggtggtccaattacctatttgtaatttttattacttttggatctctttgtactacagttgatgacttttaatagatcggttgaattttgacaaaaaaaaa

SEQ ID NO: 3749 - DNA, 653 bp, Avena sativa
aacagatgctggtgatgtccctatccaagagattcatgactgtagtgttgaagatgaaagattaatgcatgttatcagcgagtctgtcaaaacagtgatggggaagtaagtatatcataccacaatgattgattcagaaacttattttagaaactcccaagaaatttatctactgcagttaatacaacttaaggatcttatttccgaatctagtgaagtttgtaataattgtctatgtaaactagccagagatttgcttcaacaaggctgaaagctatttaagaagataatgtttgaagattcttttcatgcatttaataacaatgatacactgttgtataggatcctcttcggccgttggtattaggaatcgatcactcaatatcttatccagttgttagggctgtgtctgaaatgcttggtggacccgtttacattcttcatcttgacacatattcatatatctatgagtgttttgaagggaacacttactcgcgtgcttccacatttgcaagaataaaggaaggatgttatgctaggagacttctataggttgggcctactccacagactccagttggtgccccccaccaaattagatcgccctagctaattcctctatcagagaatcatcttcaggttggactatcacc

SEQ ID NO: 3750 - DNA, 631 bp, Avena sativa
ccatggtgctctttcaactgcggccaccccaagaaccgcgccgccctcacgccggaggccgtcagcacgcggagcggcgcgcacctccaccgcttcgcgtggctcgacgacgccgacgtcggcgaggtcccgttcgcctggaacttcctcgtggggcacaaccgcgtcgacccggacgatgtcgccgggaccacgccgcgcgccatacactacacgtcgggcggcccgtggttcgagcggtacagggactgcgagttcgcggacctctggatcaaggagcgcgacgcctacgtgtccgaggagaaaggggacggacagcttaaacccgcgggggcatcgccaacagtactaccatcatcgtcgactgcggctgtgctcgacgcatgatataccttgatcactgccaggtggtcgagcctctacagctagcagcatgttctgtttcctcctgctctttttccatgtcgatgtggatcgtgttctattgttcactactctctcccttccaaaataaatggccggcgtggtttttgaactaaaaccacttggaacggaggagggagtatctgctttgataagtaagcttatgctatgataaataaaccggatcaacaattggagtgaaaaaaaa

SEQ ID NO: 3751 - DNA, 580 bp, Avena sativa
ccgggatgccggcacggaggacgaggacaatgcgagcgaggtgaacggcgcggaagagggcgacgtggaacggctgaggcgtcggatcgtgcgggagaggcggctgaaggaggcggcactagatgagctggagaaggagaggcgtgcggcggcctctgcagctgacgaggccatggccaagattgcgtgcctgaggagtgagaaggcgctggtggagcgcgaggcgcggcatctccgggagctggctcagcagaagcagatatatgaccggcagcagattgagtctcttcagtggatcataaataagtttggcatgcaatgatcgagccgtgtcagagacaagcgagaaggacggagacaagcggctgtagatcctgcttcctggtagcttgatgtaatagcaatgttgtctcaaaacttgggaagttcttggcaatttaggctcttcattttgtattggcggcattcggcagccatgataggtgtgagaatactcaagcagacaaaactctgcaggagaaatatgtaatattcatctgtaaatataccatcctttgcaagcgcctaagaagtggttaaa

SEQ ID NO: 3752 - DNA, 822 bp, Avena sativa
gtaacattatcacagaagcaagcattaattgacgtattgtttagataagtcttatgaaatttcccttggatgtggccagtttgggaattgcctggctgtcaatgccgatgctatagcaaagttgagaagtgaactcggaaaccagctagctgacaatagtcggaaattgaatctgagagcaattggcgcggtggtatataaagttcctgagttgaataatgaccagctggtaaaaataagtctgagaagtttgggacaagaagacacgacttctatctctcaggaatacggcggcggggggcaccgaaacgcaagctcatttctgttgagtgttacagaatttgagaggtggaaggttggagctgaaccttccagcacagaagctgcctagctcatccagctttctctattactccatcaatcaagcatgtgttaaggttcagaacgaagaaattactatgatgggagtaagtaggttttatgtttgggggcgcagcccatcatcatgcaaaggagcacgtaggtgacatgtctggaaagttatgcagcattgtgctgtcatgccatgccttgctgtttggcgctcatgaatatgctggggagcggggcttgctttagaaagttcactgaaactgctgggcatccaatgtctacattgcttgaacgtacgttttctgttagctaacctagactatggagtgtggacctgaagaacggacaaacgtgtacactttcataagcaaaggttttactgtactagtaattggcaacttgccagcgagtcatatgaactgccgtaaaattcctggcatatgaggcatg

SEQ ID NO: 3753 - DNA, 646 bp, Avena sativa
gcgtatttcacgtttgaagatctctgtgacaggcctataggcgcagcagactactttgggctattcaagcggtttcacaccctcgcggttgacggtgtccctaagtttgggtttcacaacagagcagcggcgtatcggtttgtcacgttggtcgatgtcatgtacgagaacaaggcgaggctgttatgcacggccgaggccgcgccgatagagctgttcgagaacatagtgacggtcgaggaagcacggaagagctcgcccaggtcttcacgctcgcggaagagcgacgatcctgacctgtgcgtggacaacgagctcgggttcgccaaagaccgcacgatcagcaggctgacggagctgaacagccgagagtacttggaggagttcgaggcgaaatgggcgcggcagcagccgtcgcactcgcaggctgtagacgacggtgacgatgttgtactagcataagtagcatgatggtgttttatgcccggacatgttatagttttgtcatgtgttttgctgcctgcctggcttattacgggaaggaatgggtattgctttctcccgtcggcactactgcatgtagattaacgatattgccatgtaaatcatctttgcgtgtaaaaaacttggcaaatgttgtcaaaaa

SEQ ID NO: 3754 - DNA, 812 bp, Avena sativa
agacaaggttgaattgtctgatgtctatacagatgtaatgcgcagccgatcaaaagagaaggaatcacgcgagcttccagttttcaagtattgactctatcatgactccaagtaggatgtcactaggggactttgatacatcaggaggtacagcggcaagcagtgaaccatcagagtatgttcgtgctcttgatccaagagcaaaacggttgtctctgggcagaagcaacattgtttcagaaccagaagaagtcctgcgccctcaaccacaccatgcatcatactggccaagaacgaggcccaaagcaaggaccgacagaaattcagttggtgccacggctgctaatgatacacggacatcctggcaatcccaatcaatgcatgacaaggaggacatttcctcgacaatatcagacccaggacctatttgggataatgaaccgaagtgggatactgggccaagatgggacacagagccaacttgggagcctgatcacccaatcgaacttcctggaccaccagaagattttgcagtatcaaaggaacttgtgccaaatttggatgagaaatgggttgtcaggaaggggcactttcttggtgtcctagtatgtaaccactcgtgcaaaacggttcaaagttcacagattgttgcgccaaatgcaagccatgatgacaacagtttagacttgctcttagttggcggaagggggagatggaagctgttgagatttttcatattactacaatttggtcgtcatctttctttaccctatgtggaatatgtaaaggtgaaatcggtacaaggttaaacc

SEQ ID NO: 3755 - DNA, 907 bp, Avena sativa
cagctttcacagctgatgtcaaggtgtgggagattgtttactcgaaagacagttcagtgaaggaggttaacagagtgatgcaactcaagggtcacaagagtgctgttactagtttgtgtttcactccggattctgagaagattattactgcatcaaaagatggtaccattcgagtatggaatatcaatgtaaggtatcaccttgatgaggatccaaaaaccttgaaagttttcacaatcccgctgcacgattcaaaaggttctgcttgcctgtacaatcacatgggcatctccccagatggtaaagttctggctgtaacaagtggatcgacgttgcaatggttatgtgcagaaactggtgcagttttggatacatctgagaaagctcatgaaagtgatatatgtggcattgcttgggctccacgcactattccaaatggtggcgttcctgccttcgtcttggcgacttgtggtgaagacaaaaaggtgaaactgtggttagcaccagaggttaattcagcatgagagactcagatcatgccatggccatcctctacaagacaacttccccaagggagcaaacagaaacacagagagagagatccaaacttgttttaaaaaacgagcgaatcgcagttccatatctccgagtttgagggtagtctttagtccgggccggcgatagttgtcaaacatggagactgttacagaaaaaagagatagaatgtgcttgtgtagccatgcatctcacattgtacaatagtttctccatcgaatctgctgccttttggatataactaaaagtttttctggagtggttcttctgactagaagctgttctctagccaccgtaattcgcctgactatgttgtgctcaaactccatagtttcttgtgtgtatgccatag

SEQ ID NO: 3756 - DNA, 535 bp, Avena sativa
tgaaaagaaggtgctgaaagatttcagctatgctcagttggagagatagaagaaggtgaaaagagatcttgtcagacagatggaatcaaaggacttgaagatacaaaagaaaaacaactggcaaatggaacttcctgaagcctatgataactacatggctgttgtgtccaatgccaccggtcggattgactaagataatttcagagcatggcaagcatagcagcatcttccctagcattcaagccatggctaatgatcttcagcgtaactgccggtctgaaagccgagattttttttcttcttctaaaatggggagcatagccacagcctctgtatcatgacgatgcacacagccttttattgcaaagttcatagaatcaggacgatacaatcatggatcacaaagagttgagacatgtatcaaagcaatgacaaaaatgatataaccagactagcatcttggatttttactagtgcgttgccacccaatagccaggtagtagaatactctccacatagagaaattggttgcagc

SEQ ID NO: 3757 - DNA, 592 bp, Avena sativa
cgatagttcacgcccacgccatgagcaacatcttgttagatgggctggttttcagcttcatgacattgaatccctctccaagatggtagaccctcctatacgtggacagttttctgagaaagcattgtcgcggtttgctgacataattagccgttgtatccagagagagccagaattcaggccaccaatgtctgcagttgtccaggacctagctagtattgtcaatgcttcaggtgaggagtcagagtaacaaacaattcaacatgcgccaagctgctgctgggaaatttttgggatgggactaaagcacataatatgccacaaatttctgtgaggagtatatatagctattaatccttaccaatgtgtcatgtaactatgtaaatgatgaataggggatcacgttcattcaaggaaaacattatgctttccaaatgagatgtcttagaaagaacattggatattagtgaacagaaactggggtgcagaaaacagaaaaaaattagagaaatagaaaatatgcgtggattagaggaattggatgtaaaatgtctactgcaatatgaaagtcatctttgatgaargataaaaa

SEQ ID NO: 3758 - DNA, 843 bp, Avena sativa
gccgctcgcaaggccgagaaccgccgcctcgccgaggccgaggccgccgccgtcgccaaggccgtctccaagaccgacgcccgcaaggccaaccgcgtcgccgccccggcccccaaggtcacggaggctgagctcctgcgccgacgcgaggaggagcggtttcgcctggagcgcgacgccgaagccgccaagaagcgcgccgcgcgcgtcaacgaggaggaggagtacgagcgcgtcgtcgtcgtccccaacaccaacagggacgactccatcgttgaggcatcgtcggtcggcgaggccatcgtgcggatgtcgcttgtcaactcagaggcgcccttgcctgccgacaggcatcccgagcgtcgcctcaaggcatccttcaaggcatttgaagaggcagaacttcctaggctcaaggaagaaaagccaggcctaacactgaaacagtacaaagacatgatatggaagctatggaagaaatccccagacaaccctttgaacaaggctgctgagtgaggatgcactcctagtttcgtactgaacgatatgatttgtaaggcatccaagagaactgaactgtagctgcctggatatatttgtccatggactggaatgtgtggctgagcttgaaccaaacactcagagcttctcggctaataatcaacaaattgttgcagtgtatatcgtgagggttacttttgattagagattttgtccaatttcctgctgtatttagatatgtttggggcatgttagtacttgagtgttgaacagttggcaaattggaactatggctaaatctatgagataattatgcaattttctacaaaaaaaaaaacaaaa

SEQ ID NO: 3759 - DNA, 843 bp, Avena sativa
tgcactacaagctcatgatgacaaatctggtagtcttgaagcattgaacgttgcagaactcaagctcaaagatatactgaattcaccttcagtcgacgctgcatgcagaaagattgatgacttggccgagaagaaggaactagattccgcgttagttttgatgctttcgaaagcttggtctgcggcaaagggcaccgacatcacgaaatccgaggcaaaagacataatgttccatctatacatgactgcggtagccaatctgcaaagacaaatgccaagggatatcagaatactaaagcaccttataatgatcgaggacccagaagaacgtctgagcgcgttgaatgatgcgtttactcctgggcctgaacttcaaggcgaaaacgtcgatacattatacacgagtccagaggtgttacacacatgggggagcgctataatcgatgcgtactatagcagcagggaaggcaccctccttgggcaagcaagggacttgatgaaccctaagattatcaagagagttgaagagatcgtgaagacgattaaggataaatacctctgactctgaaagccaatcatcagaaagagaattgtggtctcgcattcctagtgattgcactacaagtatactcatctgaacaacatgatgctctgcttgctgtagagcggagttctcatccataaagttgttgtagcaatataaggatgtaggtttcacctagatatatgtcttcctttttttgtcaggtactctccccagcctccctatagatagtgtacgtagattaattgctatggtcaggcagaatctgtagaggccaccgacagactagcacctcatgt

SEQ ID NO: 3760 - DNA, 888 bp, Avena sativa
aagtacctggctggagaataagggcacagtaaaaagaatctgtgatgcaagagtctgaagtagacttgatttctataattcggttgaagaacttgtagagcttggtcctgaaaagttgaaagaggctctagctgctcgtggactgaaagctggtggcactgttcaacagcgtgcggagcgacttttcttgctgaagcatacaccattggaacaattggaccgcaagcattttgcaaaaggttcacgtagttctgtctcaaatgtgccctctaatggcaacaattccaaggatgatttgaagaaggaaattgctttgatcgaattaaagataaggcgcctgtgtgagattctcgatgaggtcgttgtaagaacaaaggaaaatgcggagaagaaactgactttgacttatgaagaaatggaagcagaacgagaagaggaagaagtacaagctgatagtgaaagtgatgacgaagaccaacaaatatacaaccctctcaagttaccaatgggttgggacggaaaacctatcccctattggctctataagcttcatggtcttggtcaggaattcaagtgcgagatatgtggcaaccacagttactgggggagaagggcttatgagcgccatttcaaggagtggcgccaccagcatgggatgcgatgccttggtattcctaatactaagaacttcaatgaaatcacatccatcgaggaggcaaaggcactctgggagaaaatacaatcaaagcaagggctgaacaagtggcggccagacttggaagaagagtacgaggatacagatggcaacatctacaacagaaagacttacactgacctgcagcgccaaggcctgatatagaattgtagatgtgatcctagtgcactgtt

SEQ ID NO: 3761 - DNA, 826 bp, Avena sativa
attggccatggaggaggcaaacgttgttcagttgctggatgctccaacgcagcatgtggaagcagtcaaggccgtactgactgctgcgtgaggcatggtggtggcaagaggtgtaaacatgatggatgcggaaaaggtgctcaaggaaacacagatttttgcattgcacatggtggagggagacggtgtaagtttgaagggtgcgggaagagtgcacaagggcggagtgattactgcatcaaacatggtggtggtagacgttgcaagtttcaaggatgtagtgcaagctcaaaatggggggtggatttctgctctacacataggaagagcatgttgagtggcggtgattctgccgatggagtgcttccagcaccacagccgaaacgtcgggcgaagaaggccggcaccaagaaaaccaagaaggcgaagagcacggttgagccagctggtgcctctgagaatgttaccatgtctgccatacctgcaactggtgtctctgagaatgttgccatgtctggcatacctgaagctggtgtctctgagaatgttaccatgtctgccatgcctgcaactgacatgccagagatgggcactatacatgttactgatgctggttcggaccatctgaaatcacctgagagtgcgataatgaagcagcactctgctgtagcgtgtcaacaaccgcctcattctgaatctccatctggattggctgcttcaacagagggtgtgccagcattaggaaatcgcgtattatttggtttatagatcaaatcatgcttttgcatagaggtgggttgaatagagttgttacattaaacgatta

SEQ ID NO: 3762 - DNA, 736 bp, Avena sativa
ggaagcaagttgtgaaattatgtccctaacatgttagttatgtttcaaatgatgttctctgaacaagagttttatatgtgatggactggtccctcggcgtgtttttcgttggatgcaaaaagtttgactgtgggcttggtttcggcaagcgcggcacgtccaaggccatcgtcgagcaacttgctagcccaattgccactaattacttcccggctgacagcgggaagcagggagaggcagcacaggatgcttgccatgcataaaacatgtcctcgtcggaggactggaacactgacgagctctttggacaggttttcgagatgcaatgcagtcgatatctaagctcatgtcctcacctttgctcttactgtgactccaacaacaatgccttcatactggaactcagctccctggacaattctccctggcactgtttcctgcagactagatggttattaccacgcgctggtgaaaattatcaaaagatataaatcttggaaaatgtgattttagtcattatactgatggagtcatgtgctagcgtgcaagacaatgacatgattgtgtttgccaggtgtggtcttttccagggtatatgagctatgggagtaatcagtgccaactgattagaaccagactgtaattagtgtctccaaacgcccaactgatttaatccagttagtactgaatgcttccatggacaataaataagatatgttttgcacaaaatatgttt

SEQ ID NO: 3763 - DNA, 755 bp, Avena sativa
caggacttacagcacgagaaaggacctggtcaaccgggtgtacgcctccgacaaggcaagagagtacgccatcgacatggccgaggcgctgcaggacaagctggattcagactaccccactttcgtgaagcccatgacgcagtcccatgtcaccggaggcttctggctgggcctcccggtgcagttctgcaagaagtatctgccaaagaatcgtaacgagaccatcactctggtggatgagcaagatgccgagaccgatacgttctatcttcaccttaagaccggccttagtgccggttggaggaagtttgccattgatcacaagctggtggatggcgattgcctgctgttcgagctggtagagcgcactaagttcagggtctatataatcaggcaaagttcctacaatggaaaacgatgaaggtgtgagattcagatatgcccttagagcaggtgttttggtgaactggaggtacttggaagcaattggacaaacgaagtttgcaaatggttatcgtgaactgtcttcagcctttagggtgtcagacaaagttcacatatgaacttcacggattctcctagtagtagtatgtttggactcatctctgagaactgacaacacttgtaaattttgcctgtgatgccccatctctatttccatccatctacttgtgatatccagttcaatctactctgcaagcatgcatgtcttggagatttcagttgttcctgtgatcatatgtgcacgttggcct

SEQ ID NO: 3764 - DNA, 673 bp, Avena sativa
aggaagggctcaccacactagaaactgtcctggagtgatgaagcgagtccagaagtccaggaagaggtactagagggcctttgcccaccccaaggatctcaaatcatttggtatcgaaaattacaagggtctgaggtatccaagttggatgcacgacggtggcccaaagcacgtgaaccgtctcgagatcaacggatgcagcccaaaacctggtcctgaacttggtcggttttgcactcatctccgtgagctcattattcggtgctgcagctgggacgccttgccagattgcatggagcacctgacgtcactgcagagactggagatctcgcactgctacaatattcggtcgctaccagcaccgccgcggtctcttcagcatttaagcctgcaattctgccatgaggtgtcgatgagcttgtgttgcatggagcacctgacgtcactgcagagactggagatctcgcactgctacaatattcggttgccagcactgccgccgtctgttgagcacttaaggctgataaactgccctgaggtgtcgatgagttcgtgttccatggagcacctgacgtcactgcagagcctgaagatctcgttgtgcaaaaagattctgtcgcttccagtactgcctcagtctattaagaacttcgaactgtggaccagtgatgag

SEQ ID NO: 3765 - DNA, 745 bp, Avena sativa
agctgcaatccaggcatccttcactacaacaacgtcgagattgtggaatcaagacctaacccgtcggacttgccatcgcaagacgcaatacagattgcaaataacatatccgaccttgggtcagatatacaacaggggaagatatggactctgataatccagcaagggggtcaggtacttggagaagacggagtgcgtgtgcacagcatggttcttccaggacttgcttccagcacatcggtcattctgtcaggccccggagagatttacaccttgaagcacgatgttacagatgttcggtgcctaatgccaggactaattctagcaatacggaaagtgatacgcttgaagaacttgatttatggtctggagaagttcttgtaggaaatggtgactagcagatcaaaagaactacactttctgactttccagctgttcatgataagagataactgggataaaatcaagtccttgggacataatcagatgcagtgccaatggcaaggcgggttcgagaaccctatgaaggcgatgcaaagttttgagaagaatggatccacaaacagatggcacttctgatatcactgaagacaataaacaagacgatgacatgctcccaggggttatacctgatggctctctatacatttagagatttttccaataattagagaaaaaatatacaggttcacgccacggtggtcatcctttctggtgtattctttatttatttacagatctccac

SEQ ID NO: 3766 - DNA, 825 bp, Avena sativa
ccagcaccttatgggcctcctgctcagagctttcctcctgctcagagctttcctcctgctcagagctatctgccaaacgtacgtccaccgtccccttacatgccaccacctggcgggcctgctcctcctttctacgggccaaatcctggcatgtacgagcctccagcagtcaggcctaactctgggccaccaccgtcctacaatgctggatacaaacagcaaggaggcggcggtttccctgagcaatacggttacagtgggtctccgtctcaccgtggtaatcccggaatgaactcgccgtcaccctttaccccagcaggggccccttctggcaactacggcaagctccctacagctcaaatactgccccaagcaacgccagtgagctccactccaagcggctcttctggcaacagagtggcggtggacgacgtggttgataaggtttctaccatggggttctcgaaggagcaggtgagggcgacggtgcgcaggctgacggagaacggccagaacgtcgacctgaacgtggtgcttgacaagctgatgaatgaccctgacgcgcagcctccccaggcccagagaggttggttcgggcgataagcctagccgctggctcctggagcagcctgtgtatatcgatcgctgaacagctgtggaaccattttgtgcattcgttgagtatattctcaaaatttcagtttcctggactggagggacaattgagcagctttcgttggacaggtcctgtttttcacctgttagtgtctggtagaattcatccatcatctgagtggttaaagttcttctatagtgttattgctg

SEQ ID NO: 3767 - DNA, 678 bp, Avena sativa
gaagaagctaagaaggcatataaggctgctagagaggagtcagatgacgctgaagaggttgctgcagaagaaaaggtctcttcagcgctgattgacaaggttgatgctatgcttcaggaactagaaaaggagattgatgatgtggatgcacaaatcgggaaccgctggcaactgcttgatagggatcatgatggcaaagtgactcctgaggaagtagcagcggcagcggcttatctcaaggacaccatagggaaggaaggcgtccaagagcttatcagcaacctttctaaagacaaagaaggaaagatccgtgtggaagacatcatgaagctggggtctcaaacagaggaaaacaatgaagatgaagaagaaacaaggcattagttggaaatgcgttggaagagttttttgcgtgttaagcgggacaacctgttatctcagtactccatagcagtgccatgtgtatagatcaaaagacaagacaggccatttttgtgccaccctgggcttacttcggtagaacgaccagtaattcgtatcttaacttgctgcgaagatgatgacatgcatatagttaggcttggtcttgtggattggcaggtgaactgcaaccgagatttcaactggttgctaaggatgcggaaatacagtgcggtttgaacttgggatgctaaaaaa

SEQ ID NO: 3768 - DNA, 597 bp, Avena sativa
  modified_base (8)..(8): a, c, t, g, unknown or other
  modified_base (74)..(74): a, c, t, g, unknown or other
gaacttgnacccatgaggattgctcgttcattggatcatataagaaactctgcaagcatgtgaaggccaaacanccttcatccaaaccccgtgaagttgacccagcacgtttagccgagtggaaggagcttgaaagtgaaaaggagaggcaggatgcaatcagcatagtcacaggcttgaatcctggagccatgattatgggggactaccttattgatcccaatagtggcagcagcgactttgatatggaaagctctgattggagtgatagttctgactgttactcttctgatggtggcgatattatgatttctgaaggtgctggtatcagaacattacggagggcagttcgcagagcttataggagaaatgaggcaagagcaaggcgaaatgtcccaattgtagcagctggtgattctggcattcagcgtattggtttaaccatctctagaagcagtggaaggcgtcgtggcgtaaccaaccgcagggagctgctggttggttctgctcggagcgggcaaggatctacaattgacagctgagatatgggagcattccatggatgcgcacattatccatcttccaggagacagacag

SEQ ID NO: 3769 - DNA, 680 bp, Avena sativa
agcgtattatgcatatgtggaattcatttgttcgaaggcaaagggtactagccgatggccatatacgttgggcttgtgacgcattctcccggcagcatggacaagaactcgtgcacaaccccgctctacgacggtgttggcgattcgttatgatcaagctctggaaccataacctgctagacgcccgtaccatgaatgcctgcaacaagtttctcgatgacttggaaagcgaaagctccaaccccaagcaaacgtgatctggagaaaacatcggccaacctgagcagggctagccctagggcccaccgatggtcatgcttgtggtggtgcgccgtggcatattttgattcttggcgtcctcattgacggtcgcagaatgaatttttggtgacagtgatttggataagttgggttgggttggccagagttgtggaattgttcgtttcatgcattgcttgaaacaggtttgaacggtggattctggccgcgtgtgcagaaacaaaagatgattagacctgtcgtagtaggatcaaacaacatagaaggttacgcacacgtgattgtttaccaaatcataggttaattcataaatttcatagtgggttgggctgatcttgagagttaatatttggaatattcctctaaaataaaacgattattcaatgtcagtgaaaccaaaa

SEQ ID NO: 3770 - DNA, 779 bp, Avena sativa
gttgacactggaaacaaaacagtagaaagattccgtaccgatgaggctcttgagagagtttttgttgaggagaaatcttttacctatctgtatcaggaaggagacaatgtggctcttatggagcctaaaacgtttgagcaactcgaggtttcaaaggaactgtttggcaaagccgctgcatatctgaaagatgagatgaaagtgagtttacagtactttgatggccgaccattgtctggctcggtgcctcctcgtgtgacttgcactgttgttgaagcacaacctaatacgaaagggctaacttctcaaccacaatataaaagggtcgtgctggataatggtcttacagtgcttgctcctccttttattgaagtaggcgagaacatcgttgttagtactgtggatgactcatatatgacgagggcctaaatgctgtgtcatgtagatggcattgtgtgctccaaaattgggattggactttcgcttgccttcttagatgtttgcttgtaatattgacacaaatctgaatctgccgcctcctcaaaaaaggcgcacagctttaccaagagttcagtattcaacaacatatatagatatagttttaataggcttcttgttttaaattatggggaaacgctgataatgaatgcatgttctgctgtactgtacgtgctgacattgaaatgttttgcccttgtataacttgcagttttgtaataatgaaataatactggtatttgctcaatatctgcaattccatgtggaaatgccgatcatat

SEQ ID NO: 3771 - DNA, 725 bp, Avena sativa
gggacagattccgagagctcccaaggtagcagcgcggctccccacctccccaccgtatcccgccggtcgcctccctctcgccgccgcagctgccgtcatggggttcgtctccttcgtcgggagggtcctgttcgcctccgtcttcctcctatccgcctaccaggagttcaatgaatttggaactgatggtgggccagctgcgaaggctctaaagcccaagtttaacagcttcaccagaaacatctctgcacaattgggagttgtggtgcctcatgttgagttgaagcatgtgatcgctgccgccattgggctgaaaagtctgggaggtctcctgtttatcttgagcagctcctttggtgcttacctcctggcgatctaccttgctttcatctcgcccgttgtctacgatttctacaactacgacatggagagggctgaatttgtgcagctcttcatcaagttcacccagaacgtggcgctctttggagccctcctcttcttcctgggcatgaagaacgccatccccaagaggcaggcgaagaagaaggcatccaagaccaagaccaactagagcgtgtctcagttagttgttgctgtagcggcggaaggcgttgtggaggagacggtcttattttaacaagctaccgtaccgttgtggcgctcctttatatgtaacagaygatgagatccttttgaagggtgtgggtggcccttgggtggcggtt

SEQ ID NO: 3772 - DNA, 761 bp, Avena sativa
tggatgttccaattttagcgacgctgctttggtccacctcaccagtcaatgcaggaacctcaaatgcttgaatctgtgcgggtgtgtcagggcagtttcggatagagcattgcaggccatcgcacgtaactgcggtcagctgcaatctttaaacctaggttggtgtgatactgtcactgacaggggagtgactagcttagcatctggatgccctgaacttagggccgtggacctgtgtggttgtgttcttataacagatgagagtgtggttgctcttgcgaacggatgccctcacctgcgttccctggggctgtactactgccagaacatcaccgaccgggccatgtactcgctcgcagcaaacagacgcatcaggagcaagggcatgagctgggacactaccagcaggcgcagccgtgacgacaaggacgggctcgtgaacctgaacattagccagtgcacggcgctgacgcccccggctgtgcaggccgtgtgcgactcctttccggcactccacacatgcccggagaggcactccctcatcatcagcggctgcctgagcctcactgccgttcactgcgcctgtgctctccaccgcgccgggagagccatgctgtctaaccatgcgtactgagaccccctctgtatatggcagggtcctgagatcccagtatggcggagtttgtatcgtgttgtatcagagaatgtaatgttgaacaagggaatcggcaaagactgtctatacaccagtgacaaaaaaa

SEQ ID NO: 3773 - DNA, 738 bp, Avena sativa
atatacgtattgacttcattcagcttcttcttcggcacacagtcaaaaaaaatagtagtaagatggactctgcgagtaacaagcattcatggcgtgcgagcaccactgtcatttcttcggtcaatcgaggtttcctttccagaaagatctgacatgaaacctgtagtgcttatggagcaaccattttctttgcagagggaaacatcaatgtctagcacatttttcatgttgctgacattgaacttcagtgatggttgtggctgctcgaggtcatcaattgaatgtcatgttaattttcagaggcgaaaggagagctttgttagagaaagaagcctagtcctacaagagttgaagtgcagtgcagagcgccagcatcgcgtcgggcagcaagctattctcgaaaggcagagtctgccacgagccgagacatccacacacgcgtttgtgaccaaccttgtcaggtatgatgctgaagatctcaaggtggctgagcccaagggtacctggatggacagcggcagcggcagcaacaataataggcctacaaaacgccaagtggaaggctctagtggttacccagcatcgccaaagaagctaaagtggtagaactgtccagatcaagttatctgacttgttccagtgaattcgtcgggctcagtagatgggtactagtttgcagtagcaagagtaaggtgcagagagttagataaacgaagtaagaagaaggtaggtgcgtag

SEQ ID NO: 3774 - DNA, 656 bp, Avena sativa
atgtaacatcagatttgtgtgcttacaaggtacaactttcggaggaagttggatgagcaatgtcatttctaagaagttgggcgagcatgaaatcgcgtgggtcgatgcagaagttgggaaagtggatgagaagcttaccttgctaccgccctcgtcaactccgtcagcccacaaatcagtcctcgtgggtgatctgaaactggccgatttcaagcagttccttgcaaacaaaggtttacaggttgagtttgccgggggcgctctacggtgcggcgagtacatcacggtgcgcaagatcggcgattccacccagaggggcagcacgggttctcagcagatcgtgatcgagggcccgctgtgcgaggactactataagatccgcgagctcctctactcgcagttcttcctgctgtaaccaacgccagcctcctggagctgccgtctctgtctgtgtgttgtacaattgaccggtagaatagacaagtggataccacctcgctaacattagttaattaaccctggggatcccagattccctgttgtactttatcttgccttgttgtctcgccaacgctatgccgcttgcgattttattttgattgcagtttagctttgtaaaacgaatgtatctagacaacttttgtgtatagattcag

SEQ ID NO: 3775 - DNA, 736 bp, Avena sativa
atcgcaatcaacattgccggctgtctagattacctgcacaatgagcgagtgatcccacatggcaacctcaagtcctcgaacgtcttgattcaggatgcaagtccgtctgctctggtaactgactacagccttcacaggctgatgactccgattggcatggccgaacaggtcctgaatgcaggtgctcttgggtactcacctcctgagtttgcaagcaccagcaagccatgcccatctctgaagagcgacgtgtacgcctttggcgtcatcctacttgaacttctgaccgggaggattgcgggggagatcatttgcatgaatgacggcgcagtcgacttgacggattgggtgaggatgctggcaagggaggagcgtgcttcagagtgcttcgacaggcgcattgtcgaagctgaagtcttagggggctcccctaggaacctggagggcatgctgcacatcgccatccggtgtatccgctccgcatcggagaggccagagatacggacagtgttcgaggacctctcggccatgtcgtcttcgtgatggggagtccatggcagcgtacatctcgtacttacaccagtatatcgaaactctggtgagagggtatagttaacagttgttactagtagttttttgtggcggtgtgtgtagtctcttttgagcatttcattggttgggttcctcttcctgggtaagcgttcattcatttctttagttagttcacaattctagg

SEQ ID NO: 3776 - DNA, 980 bp, Avena sativa
tgattgataggatgctggtcagcacctggtaatggttccagggctgctgtggtgaagattagttgctatgacaaagtgccggttacaagccaggaatttataacaaatgatggaagtggtgcatcgaagaaaatgaagcgtgatacaagtgcaatgcctcttaatgtgtcatcagctggaagtgtcaatgatagcttcaagcaaatatttagtgtagatacccctgatctacaatcaactgcaacctcgcgtgtcaagtggcaaaaatttgaggtaaatcatgctctcatggaggagatccaggagataaaccaacagctcatagataccgaactccatgtatgcgaggacgatgctgactcattcgctgctacatctgaaggggcagaagggacagttatcaaatgcacatttactgctgtggctgttagtccgagcttaaagtccatgtttgcatctgctcagatgagtccaataatgccgttgaggttgcttgttcctgctggataccctaaatgctccccggtgctcctcgacaaatttcctgatgaacaaagaaactccgatgatctttctagcaaggctaagtcgaagtttggcatattgctgcggggtctagctgagcccatgtcattgagagaaatcgcgaggacatgggacgcttgtgcccgcaaagtcatcgaggagtatgctcagaagactggaggaggaagtttcagttcgagctatggtcgctgggagagttgtgtaggtgcatgatccatgtcttgttatgtgtgctagcgttaaacttcatgttgcgttgtgcagttgccatccctagtgattatatttttatacacatagacaccttaatttaaaggtcgaccaccaagagcaacaatgcagtggctacccgtgctgtatctgtgattatatttgtggaagtgctcactgctggcytgatatgttagaggcccattttgtgctatactatgcat

SEQ ID NO: 3777 - DNA, 636 bp, Avena sativa
cggcagtgcagaatctgatgatggtgtgaaatactgtctcctggaaaccgctgacgaagacgagatggtggagcctccagcggaagcaaggagatgatggactagtctgtaaataaccaagacacccgaacttctggtcttctctgttgcaaggatctagtttataggtaatagctctctttgtacagcacatgcgaagactgaaggcactgaaagtggaaggcacactctgtggatcgctgaaatttgcggcttgcaaacggactctgggcaagtaaactttggtagacaggcaaattgaagtttgcagctgcatatattgcgttcgaatctgccgctgacgaatcaagttgacccatccacattcagaattctgaaagcattttttgcagggctacctgtggctctgtgcaagactgcagcaagtagtagcagtcgcctgtatgactagacatttgttatgtctaccacatttctctgaatcctcttgtatacaatacaaggctaaagttttcctgtacaagcacatacatacagaaatcagtgtatgctagaccaaacatttgtcgtcgttgtaaactgtcgcggcaagtcatccttttctgtatataaacctgaagcatacatttgtctcct

SEQ ID NO: 3778 - DNA, 556 bp, Avena sativa
  modified_base (527)..(527): a, c, t, g, unknown or other
ttgatggaatcgagagcctaatcgctaaactgacggctctcttgactaagctccagactgcaaatgaggaatcaaaagcagttacaaaagcgagtgccatgaaagcaattaagcagcgaatggagaaagatatagatgaagtgggcaaaaattgctcgcatggcaaaggcaaaatttgatgagctggaaaaagataacttgtctaacaggcagaaacctggatgcgggaaggggtatgcagttgaccgatcaagagagcagactactggagcagtgaaaaagaaattgaaggggcggatggatgagtttcaggtattgagagaatcaatccggcaggagtatcgggaagtcgttgaaagaagggtatttactgtaactggtaatcgtcctgatgaagagactattgatgatttaatagagactgggagaagtgagcaaattttcaaggatgcagttcagcagcaggggagaggccagatattggacactgttgctgagatacaggagcgacatgatgctgtaagggntctgggagaggaagctcctggagctgcag

SEQ ID NO: 3779 - DNA, 830 bp, Avena sativa
acagagactttggcgattcccaaggcatcgccagccctatcgtggtggtggtcggggttaccgtggaggtggtcgttcccgtgggtcgtactatggtggccgagactacggaaatatgggtggtggcagagactacggaaatatgggtggtggcagagactacggaaacatgggaaggggtggtggccaggagaactactacggtggcagaggaggctatggaaacacggggagaggtggccaggaaaactactatggtggtggcagaggaggctatggaagaggtggccaggaagactcttaccctcagcgtggttcctacggaagaagctgatgataggatcggagcgcgcccgccataccctggtgctgtagcctttaccacagtgcatctctcttaccgttctgcaaataaacgctctttggcgtgtggccctggtcccagcaggaaagggggacctgtaggcctgtagttcgtgtgggttcgtcgttcatacaccctggtggttgtgtaagagctgtcggtagacaagcagcagccgtctgatgcttgctttgagcgtgtaccgcgtgtctgagatgtagttgtatagggccgatctcgtacctggtaccgcagcgctgggcttttatctcacactcagtagcagctcctttcttgatttgcttactctagctgtaccttgttttacctgttttgtagaacttgacaaagagtgcgtgttactattgccgggattcacaggtcatgtaatactactacatttgtaaacacaactgtgagtactgttacaactgatcacaggttttaattcagtttctattatagt

SEQ ID NO: 3780 - DNA, 867 bp, Avena sativa
cgaagttggatttggttcaaacaatggaggttttatgatcaaaagttacagtgacatgctcaaggaaatttcttcagggacaacgaaagatctagaagatatttatgactcgggatactgtgctgctgccgaagatatcatgtcaacaaatatctgtcaattaccatcgaaaaacgcaagcacagcgagcaacaagcgactgaaggttagctcatgcacctcgacaaacgaggggccaacaacctctgggaaccacgtgcctggttcgggatccttggtgagctcttcccatgacagaggagcagctcccactagggagatctccttcggtgatcaaaccattgtcccgactggagctgagaggcctatcccaaggatggatagcgagacgcttgcgctgaacagggatagcgccatgcagcggtacaaagagaagaggaagaatcgcaggtacgagaagcacatccggtacgagtcgcggaagctgagggcggacacacggaagcgggtgaaaggtcgcttcgtcaaatcgaatgaagcgctgaacgccagcagcaatggcgggtgacaggatgagccaccttcctcgccctgtggatggctgctttatgtagcttggtttttccatgtagcagatcggcccgtagtggcctgcgctgcacgccgctgcgcgtaagcatgataccgtgtattgctcggctaattttttggtggtggcggcgtcttcttggtctccagcaccgtgatcgtcagttcacagcagaggatcgtattcacggtgttttcttttgtaagatctctctccccaggaccaagaaataggcaacttaattgtacactgatgtttatcgtaaaatttgtactaca

SEQ ID NO: 3781 - DNA, 617 bp, Avena sativa
aatttacagaggcaaagattggaaatccagatattcgaagcctctgactctcgttccaaaaattgaaaagaataatctggcagtgtcatctgcttcgagtagctcagatgaatcgagtgatgctagcgataatgtggcaataagagaagtactgagacccaaaatgtttagactgtggaagcgtgcaatcgggtcatccatagcgttgttgctagatgacgatgaagtctattcacttacacctgacatgcttctcgcaagggttgaggagttcagtatcacatcccaggccgtggagcattcgtttcaagctttgcttgtgaccaatggcgtggacagccctgaagttctaaatgagtccggagacgagtctgaagataaaataattagacgccaagagattcggtctgagcaatcacctgccagcgaggatgattactttgaatatgacatgctcgggcgtttggagtcatcggcaccattaggatcattaccgatcgatgccgtcatagagcagttaaacagagagtaaatttataagctaatgaagctgttgaagcattgggtgatgatcaggctgacgtgctcccattgtatagccattttccgtacaaaaa

SEQ ID NO: 3782 - DNA, 685 bp, Avena sativa
cgggcatgggcatggcggcctctcgagcatgggcacggcgaagcatgggcacgacggcctctcgggcatgggcacgtcggcctcgccattaggcgacaggtcatcgtgtcgctggagattgcctccacgggtggccatgactgtccgcctgtcttggtggtgttggagagtgttgtccggctgctgcctcttcttcactgctggatttaggatttggttctattgctgggtcatatgaatatgcagtgtcgtgacagaacacaggtgttgaagtacttattcagttatgtgatgaaaggtcctgactgggttgggtctgaacttgcattggagtcgtcctctcggattgggtttgaagagctttgtttatctgcaattgatgatccaaatcctccggctgccccatatggtgctccctaccggcgctgcgggttcacagtccaagaagaacacctagatcagaaatagatataatatatctgaaaagatctgtatatatcttcttacatgtccacctggatattcttagaaacctcggtgggtttatgtttctcatagtgatcacagattaagcatatgttctttatcatccatttgttttgtcctcaaattagtcgctgcatggtttcttacttttcttttcaggtagcgttggtcgttttggttggctataggtcaagagttt

SEQ ID NO: 3783 - DNA, 696 bp, Avena sativa
  modified_base (620)..(620): a, c, t, g, unknown or other
tcaaggaattgttgaggataatggtggtaccaaggttgccactctaacagggaagtgggacgagcgcatctactgcaatgttactaatgatacatctggagtaaatcccaatgctgaagccactctgctgtgggagaaaaacaagcctcctgctaatcccacgcgatacaatttgtcatcatttgcaataactctaaatgagctgacttcaaaactcaaggagaaacttccgcctaccgattcaagactcagaccggatcagagacatctggaaaacggggagtatgatcaggccaactctgagaagctgcggttggagacgaggcaaagaatggcacggaagatgcaggagaatggatggaaaccgaggtggttcgacagggataccgaggatgggacgttccgctacacgggaggctactgggaggcgagggagaagggtcgatgggatggttgccgtgacatattcggcgacaactgagcttctgcggttctccccattgcggatagctcaagtatgtagtcgctccactcccaccagtaggtgttagcatgagacggcttaccgaaagtacatatataccgtgcaagtactagcttggctcgtcgtgcaaaaaagngattactgaggtcctcctttatagaaacaatgtcatatgatgacaggatattgatttatgtgcatatatgcgtttg

SEQ ID NO: 3784 - DNA, 892 bp, Avena sativa
cacagatatagaacaccatatttgtcatcgagtagcagctcccaaatgtggtatgcagtcaggcgtgcatctgctcatattatcgtgctctctagctattcgccattcgtaaaatacactccccaatggatgtggctgaagggtgaattgaagcgcgtggacagggagaagacgccctggcttattgttctcatgcatgctcccatgtacaacagcaacgatgcgcactatatggagggcgagagcatgagggctgctttcgagagatggtttgtcaagcacaaggtggacttggtgtttgcaggccatgtccacgcctatgagagatcgtaccgtatatccaacgtcaagtacaacataacatcggggacacggtacccagtgccagacaaatctgctcctgtgtacattacagtcggcgatggaggcaaccaggaaggacttgcctcgaggtttaacgacccgcagccggactactcggcgtacagggaagccagctacgggcactcgacgctgcagctgaagaacaggacccatgccgtgtaccagtggaacagaaacgacgacgggaagcacgtgccggccgacaacgtggtgttccataaccagtactgggcgagcaacacgcggcgcaggaggctgaagaagaaccacctccgctacgagagcctggaggacctcatgtccatgctctagaggagtcggtctttgtcggaacatctgcagcacggaaactttgagacagagtcgcggagtagctcctcccttgtttcgcttgtgcctgcctggttggttggtgccttgtgaagcagccttggtcgaccgaggagagacaggctaagcagatttcgtgccagggagatactatacgttaaactgtatactatactac

SEQ ID NO: 3785 - DNA, 663 bp, Avena sativa
ggataaagagtcagcctatgctggaaaagcgctttgctctagcaggtgcggaactgaatggtgtgatttatgcagttggaggcttcaacggcattcaatatctgggctctgctgagagacttgaccctagggagcctaattggaaaacaatcccagcaatgagtacaggaagaggttgccatacggtagcagtgcttgatgagaagatatacgcaattggtggttatgctggtgatgctggagctatggtagccactgttgagttctacgagccaagaatgccatcatgggtggcggtggaaccaatgaactacaccagagggtaccatgcctcagctgtgcttggtggctcgatattcacattcggtggggtcaaaggtgaagcagatactattttggatgtggtggagcgctacaaggaaggctgtggctgggtgaataccgggatgaagtcaatcggcaggagatgctactgttctgccatcgttctctgaccgactacctttctccaatccccattgacaccctgaacttactatctaggctgctgctgattggtgaccagcaagcaaactgttaagaccttggaaggtcccctcttcttcttcttctgaattgagaagcccttgtctccccaatctgagaaccgccatctgtccagtt

SEQ ID NO: 3786 - DNA, 688 bp, Avena sativa
gcggccaggccaggcgtggtggcgcgccaccaagtcgacaaccgccgctcctctacacagcaagctgcagctactccctacatcgaacgacctgctactcctcttcatcgacggctcggcgaccttctcctcttcatcacctgctgctctgtcccctgtctctgccgtgcttctgctctacaccaacattggaggcgacgaggccgtgcacctgaactgctgcaccttcttctccaacatcatctgctgcttctgctttggccccgcctccctcttgctgctgttcttcatcaacgaaccagcgacgacaacgaccacaagctctgtttcctctacttcccctgcttcaaccaaattccaggacgatcataaggtgtttggtaatttgtccacaaggcggttcagtgcggtgacgatcccttttctctgccctagtctccttctctgctaatattttcttgaaactgaatcgttcaagtgcatgcatccgattttgtgagagtttggtctggtatagttttgtcgatctggaatactagactgagacctgtaaaattctgtttgtgtgagtgtatgtgctatttgaatcgtcactgtgtgtactgcacttggtgcatagacgtgttttatttccagtcttgtagtgtattgctcgtaatgttattctgtccatgttccataaacatgc

SEQ ID NO: 3787 - DNA, 647 bp, Avena sativa
gaaagaggattgcttcatgttcccaaagtaagacgcgcagaaggctcaggcggctatgttttcagatccaaacatggccatggacatgatgaagaagaatctctccatgatagttccacagacacttacgtttgcatgggtgaacttcttcttttcaggttttgtagcagccaaaattcccttcccattgacccaaagattcaggggaatgctgcaaaacgggatagaccttagcactgttgatgtgagctatgttagcagccgttcatggtacttcctcaatttatttggcttgagaggtcttttcagtttgatccttggtgaagaaaatgctactgacgatgcacaaaagatgatgcagatgggtggtggaatgggcttcaacccagcaatgagtttgggcgcagagaaagacagccttgatatcatccagcacgactgggctctaccgaagatggaacatcacgccgaagaggtcttgaggaaactactgaagaaatgacctgaacaaagctgtactacgattcgcaagttttgttttagcttgtcgactgatcagacagttatacatctgtaattgtattatctattgtttacgatctaagcagtcttctctgggagcgctactaggaaaaggttgtactgta

SEQ ID NO: 3788 - DNA, 442 bp, Avena sativa
aagcagtggtatcaacgcagagtacgggggggtcgcgagagagcagagcgtaccgccctgccatagtcacgagtctgtttatagtcgcgactgttgtcatagtcaacaaggttgaaacttccaggaaaaaaacttcgaattgggagggcgatcctcccggtgaactgaccgtaccccaaaccgacacaggtgaacaagtagagtatactagggcgcttgagagagccatgtcgaaggaactcggcaaaatgaccccgtaacttcgggagaaggggtgctctcctatcttttgattaggaaagcggcacataccagggggcagctaagttggtatggaagaactgctgcgccgcgggaaatccttctctatacaagttctcggacgaggtttttgaacagaacttcgataggcgagaggtgtaaagcaccgcgaggtgtgaag

SEQ ID NO: 3789 - DNA, 1004 bp, Avena sativa
attgccatcccagtgctagtatacatgaaaaccaaaagctctgttctggtttctgaaattacatagtgaaagtggggccatataaaattacaaatataattgaaaataattaagactgacgatagtaattgagcagaaaacctgctcatatgaaaacgtcagaaccagacttcaaattacacaacaagatggcttcatggcctgatcttctactttaagtgacagaagaaactaaaacgactgaacgctatctacaggccgaggcatgggcttgtcttgcaagaaatgctcaaaaagcttcaaggcctgttgtggacgatggaggggaacctcgtgtcccgcgcctcggactgtcaccaaggtcaaacctttatacacttggcaccaaccagcaacctcctcctcctcataccagggataccagttagtgacggtcggaaggtggagtgcatcaatggagtatcttgtagcagtgaggggtactactgaatcggcatcaccactgaagacccataatcttaggccagctgcgataagttcacggtaaataggaagcgtggacctcggcgaatctttccaatattgaaacaaaacatcactgcagccggtccaggcatatggtattccagtgacattggcacgaaaagctttctgcacttccggtagattgtaatacttcgtggagtacacttcagtacaaggatcatatcctcttggcaaccagggcctgtggccctttatgagcctccgcttatgaagtgaggacttcttacaggtaggtgtgtagatgctgtatgcatcgatcaagccttcctcattataagctacatcaaaaatattgttgcatgcctcggaagcgtgcgtagatgaatcaaaatcacaggccagctgcagcttctgataggtgtcatcggagatcagcccgtgcgtccaccaatactcgaatgttccaacaaaatcatggtaatcatcaataaccgcattcccgaccatgaagcctttga

SEQ ID NO: 3790 - DNA, 854 bp, Avena sativa
  modified_base (314)..(314): a, c, t, g, unknown or other
ttacctaaatcggaccccggtgctccatttatgggcctccgttggagttgccccaagtatttacaagtccagcactcggatatctaccccttgaaaagaaaatcttcattaaaaataggagtagatgtcctagtacaagaaaactctttcatttcaggattgtacatatagcatggtgagagcattgaacaattgtacaaagacggctcggttacatcaatatgtcacccactgttctcttacacggagaactcaagcaaagtgcaccattcccgtgcattgtttacacagtttccctaacaattccagcggancaccacaaggccactattgccttgcaagagagattcagtcagaataaatagagcaggtgcctgaatgtgcatagcagcctgaattcacagtgcaatctgcacttcatcacaccttttcgactgaagcacggtccccgaacaaaccgtgcagccgagagataagttaggtggcaccaccagtctccataacaatgcttgtcagtatgaacttgctgccctgacttctctccagatgatttagattctactgagaacaacccagccctcacaattgtgaaatcagtatttgctgtcacactgtgtcatctcactgaaaacacctgcaccaggcattccatatctcaagttttcactttggtatccaaatgaccttacggttgatccatgcttggaacctgcatttgtggctcgcccactgcaagtggatgctgattatgcgcacgtggggtgctaacatcttcaggtaaaaaaacatccgtgtcccactgcacgtctggtgctgttttccaaatgtcggtaatgctaacgtccccttctgtt

SEQ ID NO: 3791 - DNA, 842 bp, Avena sativa
acgacctcgccggcctcgtggccgccttcgcggccaaggggctcacgtcgcgcgacctggccgcgctgtcgggcgcgcacacggtgggcatggcgcgctgcgtccacttccgcacgcacgtctactgcgacgccaacgtgagcccgtcgttcgcgtcgcagcagcggcaagcgtgcccgacctccggcggggacggcagcctcgcgccgctcgactcggtcacccccaacgagttcgacaacggctactacaggggactcatgacgggcgccggcctcatgcgctccgaccaggagctcttcaacaacgggcaggtggactcgctggtgaggctgtacgggaccaatccggccgccttctcggcggacttcgccgcatccatgatcaggctcgggaacatcggcccgttgacggccgccagcggggaggatcaggctcgactgcaggaaggtcaattcctgattgttttttacattgtatagagaagcaacatacgtactacagttgaataggaacgtacatcaagcaattagtgaattgattgatcaatattattctctcctgaatctgtagagctagctatactgttcatgacccgtcttcatgatctagtgatcactttcgtggaacaaattaagctttaacacctgctactttctagtccaagaagctagtgtgactatttttcagttatactaggattttggaggaaatttcgctttacactttcttggggaatgttagtgttgacctcctattccgttgggtttcaaaagaagggaaaagaatcagccggaacttcttcgcggaagttcatgtgtactttctgcacatcactcgtt

SEQ ID NO: 3792 - DNA, 738 bp, Avena sativa
gtcatgcatgggtgcacgccgtcgagctgttagtgtagtagctgcaagtcctaaggatgaaatgactacagaaactcatgttacaactacagtggattcggagtcttttgttgtagaacaacacggcaccgaggtcatggaggagctgcagtatactgaaactagtatttcagttcacgaggaaacagaagaagaggctcttctgagtgatcatgaaacctctaggcagcatacggaagaagaaataactgaaggcgagttgtggtttgagtttgagaaggaccgggatcggctggctgaagtggaagcacagacccgggaggaagaagcagctgctgccaaggaaataatggaggaggaaagtgctgtcctattgaatgtagaggataggcaatctttttcatcagatagcttggagaggcagcaattctatccccctggtagaatcatgcacatggttgtcatgcctcctccagatgctggtccggatgatcctgttgtcattgacgagtgcactgttggaatatacgagacaccaagacatctttacagcaagatccgactgtctaatacgatgatcaatgaccattatatgccaatgtacaagaaaattatggaaatattgattgagaactttgcaaacatcgatgacaacttttgtgcaaattccacagtacaatagttggttgacttgcacatgaagtgtaaaatagtttcttttctgtttaggtgcaagtc

SEQ ID NO: 3793 - DNA, 799 bp, Avena sativa
tgggtaacaaccgattcgcctcggtcgaggagctggcgccgctctcagcgctcggcgtcgagacattggacctgtaccaatgccccgtcaccaaggtgaagggctacagggagaaagtgtttgcgcagattcctagtttaaagtacttggatggcgttgatgctgagggtaacgatcgtctggagagtgatgaggatgaggatgacgaggaggatgaggaagatgaaggggacgaagagggaggtgaggagggtgaagaagaaggagaagaagaggacggagaggatgaggaaggagatgaagaggatggggaggaagatgaagaggatggtgaggaagaggaaggagatgaagaggaagaaggtgatgaggctgaagatggagaggatgaggctgatgacaatgagccagattctgctgcggatgacaaaaccaaagaaaccaacggaagcaaagcttctacagggtctgccctgccaagcaagaggaaaagggacagcgaagatgatgggaaataatctggttcccgggatgcttaaggttggttggtcttcgcaatttcattgcgaaggttgtagttgctgcatgtttttcggaggctccttgctgtgtagaagccttggtagttctgttagaagacaattgccaaacgattttctgcaagtttttctaattttagttcaagacgcggggatctccctgagccgtgctgctcctttctgttaacttgttctggtggtgcgaatcgagatgttggttctgattatcaggatttgagttatcatcgtcgttgtgatgt

SEQ ID NO: 3794 - DNA, 870 bp, Avena sativa
ggacagttttctcgttactggaggagtgaatggaaaaatggccccaaccaatggcaacagggattgcaaattccagattctgatattgtcctagaagataattgtgctagggtggtctcccagaaagataaggagaggtcccatgccatagtgaacccaggttctgagcttgcattgtgtgattgtagctggtcaatgaagggaaacctttgcaaacatgtaatgaagtcgactaaggtttgccgcgacaggggattggcaccaccatccttggctctacttcgctattaccaggcactggccagtgttgttcattgcccacccagtgactctgtggtttgtgaccatgcagttgctgtggcagtttctgttagaacacagttagagatgctacttggcaccaccaatggtggttctctaaatacatcggctttcaaggatgcccaatcaaccagtgagcccagagagtccaatactcaagtagccctcattgaaaacggtgctcgtgcaagtcaatctccagctgccttggatgccaggaatgaagttcccaccggtgaagacagtggtcaggacagttatgcttttaagaaaagaaagtgtggaggagacaaagctgctacagctgcggaagtgatgcagccttctgaaactgagatcagacgttgcctggaatgtggagaagcttctgatggtgatgaaggaactgaagagatgcaagcttctgatggcgatgaaggaactgcggagatgcaagcttctgatggcgatgaaggaactgcagcgacgccgatcatggaaccttctgaaactgaaggtagtgcagcaactcctgaactgaacgattcttccgatgagctgatcggatag

SEQ ID NO: 3795 - DNA, 467 bp, Avena sativa
ctcagttcatttctataaacaggtctgttctccggacatatgcgcatgatgatgttagtgtaggatcatggatgattgggctagctgtgaagcatgtaaatgaagcaaagttatgctgttcatcgtggccctcaggagcaatgtgttcagctctttgataagaaatgcttcccagaggaagagttttgtgaacagcgtgttaggctcaagattacaccagaaggatacatccaaactatagagaatgagatcaaatcggcactgtatagattttgttttcttttgccattcttttccatggcattcttgagtaagcagtgtcagttcgtatcttcaccgtgatggtaagagcatgctgcgtctcatgagttctaactaaaatccacccatctgcagattgtacttcttggttttcttttcgtttgtagatcgatctccacccttaccattctttgccacagacatca

SEQ ID NO: 3796 - DNA, 900 bp, Avena sativa
aaaagctcatgcaccattgacaattgtatgtgatggttgcttttcaaatttacgacgtgcgctttgttctccaaaggttgagtcgccatcttgttttgttggactggtcttggagaattgtgaacttcctcaccgaaatcacggccatgttatcttggccaatccttcgccgatcctattttacccaataagcagcaccgaggttcgctgtttagttgatgtccctggtcagaaggtgccttccattgcaagtggtgaaatggcaaattatctcaagaccgtggttgcacctcagatccctccagaaatctatgattcctttgtagcagccattgacaagggaagcataagaacaatgccaaataggagcatggcagctgccccacatccaacacctggtgcacttttgatgggagatgctttcaatatgcgacaccctttaactggtggaggaatgacagttgcgttatctgatatagtcgtcctacgtaatcttctgaaacctcttcgcaatctgcatgatgcctcttcactgtgcaaataccttgaatcattctatactcttcggaagccggtggcttctacgataaatacattggctggtgctctatacaaggtcttcagtgcctcacctgacaaggctagagacgagatgcgccaagcttgctttgattacctaagccttggaggtgtctgctcgaatggtcctattgctctactctctggtcttaatcctcggccactgagcttggttgcacacttctttgctgttgctatctttggtgttggaagactaatgctccctcttccttcacctaaaaggatgtggattggggcgagattaatttcgggtcgcatgtggtatcatcttcccgatcatcaaagctgaaggcgtgaggc

SEQ ID NO: 3797 - DNA, 672 bp, Avena sativa
atgctcattattggaactctcaccataactaatgggatgagaagagttttccaagtgcaaaaaataattcattcagaattatcaatggaagttacatgttctccttcgaatctgtaagatgatattgttgtgttggttgcacatctgttgacagatagcagagcaagttgagttcacgcagatgacatttggttacagcaagatgatgtggggaagttcctccccatatatctggctcagggtatcctcaagcatgacccttttgaggtgcttgatcagagaggggtggaggaactggttaatattgctatagagcggggtcgcaaggcgaggcctaatttgaaggtgggcatccgcggcgaacatggtggagatccatcgtcagttgctttctttgcaaaggctggtctgtattatgtttcttgctccctgttcagggttccgatcgctaggatagctggagcctaggtgcttgtctgaggggtgccgcctcattgtcgaccgatctcctgatgttggtgtttctgttgaagtcaaataatacatagccatggactggtggaaactttgctgcctgacgaaggctgttgtatatatgtagtctgcgcatgtaagcttgaaacgagtggttatgtgacttgcacatatactacaatatattgcctctcttaa

SEQ ID NO: 3798 - DNA, 470 bp, Avena sativa
aggctcattttggttctatatacttctcccacatgtggtccctgcagaaccttaaaaccaattttgaacaaggttatagatgaatacgatgaagacgttcattttgttgaaattgacatcgaggaggaccctgaaatagcagaagctgcagggatcatgggaacaccttgtgttcaattttttaagaacaaagaaatgatcaggactttctctggcgtgaagatgaagaaggaataccgggagtttatcgagtcgaacaaatgatctgagccgaatattggttccaggtttttgaagtgtcatggccttcattcacccatatattgactatatttagatgccactttggtggccgatttttggtcaaatcttcagatgagccgtgtgcagtccgatatcataggaaattaactgaccgcccttattgttcaatcccaatggcacaaaataatattctttgttagaaaaaa

SEQ ID NO: 3799 - DNA, 531 bp, Avena sativa
gttctgcttttggatccggtgcttggcacagggaactcggcaagtcaagctatagatcttctcataaggaaaggtgttcctgaggagaggatcatattcctcaatcttatatcggctcctgaagggatccattgtgtgtgcaagagatttccaaggttgaagattgtaacatcagagatagattctgggttgagcgaggaattcagggtcatcccaggtttgggagagtatggtgatcggtactttggcacagacaactgatggctcatactgttctttatgtctgtgcacttaatcgctggataatatggagagggatgatggtacaccagaggcatcgattggaccaagaagacatgctgggaaatggatgtaaactaagaagatacattgtaatttttctagactccagagctagatatccgcccttagccatggctggagctagtaatctggctttaggccgagacaggaggtagtagaaatgattgcaagctcgtcacgtttaaatattctctgtcgtcgtactgt

SEQ ID NO: 3800 - DNA, 787 bp, Avena sativa
taatccacattgtccatgttttttatccttctctgcactctatcctggattggtctagattactctgttctagctgagcttggaaacattgccaaaacattcttgctagatttccatggacactgaaaaatcttgatagtgcattgtgtagtaagttggttaagtgtatgaagaaactaatataattctcaaattataaggaattaaagagttcctgtgtggctatgaaaaatggttggaaacataagtgtactatgttctgtttcttcttcgttatgtttcattacatttctagtgcatgatttcctatgtatttttttggcacacctgatattataactgaaactaagatatagtatcgcatacagtgtattatagtgcaagtgtgctttatgtagttcaatattaagtgtaactgtgattctggccaggtgcactactgatgggagatcatgatgatgagcatggcggcgagttgcagagctattactaggagatcaccacgacaagaacggtgagctgtggagctactgctagagatcatgacgacaagcatatcaagctgctgctagatatcatgatgtggggatgagctgcaaatctactttcggtgataatttgcaggagtattcatagtgtagaatgaatgaccaggttcacatcttttgatggatgattgcttgctgatgactggatatatgtatatgtgatgatctggatatgtggtataatatcttattttcgaaccttgacatactggtaatgtgaagtctgtgttaaaatgact

SEQ ID NO: 3801 - DNA, 840 bp, Avena sativa
ggctgcctgatgacggtgaagatgcggaattgactgctcgccttcagaagcagttcactgtcgaagtcaccattctcgctcgcctcaatcatcgtaatgtcatcaagcttgttggagcatgtagctgtccgcctgtcttttgtgtcatcaccgaattcctgtctgggggttctttgagggcctttttgcggaagccggagagcaaacaacttcctttggagaagattatttccattgccttggacattgcatatggcttggaatatgttcattcgcaaggagtgatccaccgtgatgtgaaacctgagaacattctctttgatggagagctttgtgcaaaggtcgttgattttggagtagcttttgaagacgtatactgcaatacattggaagatgatccaggtacatacagatggatggcaccagagatgtgtaggcggaagccgtattgtcggaaagttgatgtttatagttttggccttgtcttgtgggaattggttagtggttcaattccttatgaagagatgactccgctccaagcagctttcgcagttgttaataagaacttgagaccggttgttccttcgagctgcccgacaccattacaacaattgatggagcaatgttggtctgttcaaccagacaagaggcccgagtttagtcaaatagttcatatccttgaaaaactcaaggcggttcttgatagagatggaacacttgacaagatcccaggcggcaactgtcaggaagctcaggaccaaaataagaacaggcttgccaactggatccaaaagctctcatatagcccaccagatttctcagggactccaccgccaaagc

SEQ ID NO: 3802 - DNA, 656 bp, Avena sativa
  modified_base (36)..(36): a, c, t, g, unknown or other
catgcagtattatccatctcatgcagatgctaatgnaacccctcctgaaactaccaatggtggtatgttttgcataatcaaaagatggcatggatgaagaaattggcaaggcgactgctgtgttaaacaatgacaagatggaggaagatacagttgaggcaaaggatgacatgatgaaggaagtaaataagatggatgaaggtaatggtgaggcaggtgatgtggctattgaagatacggtggaagaaaatgctgatgaggccaaggacaagatggtagaaggaaatgctgatgtggctattgaggacaagatggtagacggaaatgctgatgtggctattgaggacaagatggtagacggaaatgctgatgtggctatcgaggacaagatggtggaaggaagtgctgatgtggctgtgcaggacaagatggtggaaggaagtgctgatgagaccaaggacaagaaagatgaagaaaaggctgctgaggctaaggacaagatggaggatgaaaatgcaatgtcagagggcgtgtagcttgatatggtggaagaaatggcagtggcacccgatttgggacaaattttcaactgggtggcctcataaacacggcacctgagtctagcagaagcggaaccagccatgtaacacgtatcg

SEQ ID NO: 3803 - DNA, 540 bp, Avena sativa
  modified_base (423)..(423): a, c, t, g, unknown or other
ttcatcaaagttactcgaattcaattctactgattcatttgtttcagtttcttctcacttgaaccacccgaggattttccacttgagccagtcttaccattcaacctatctttgagaagagccttgacctgagccagagcaaaatttgcaattgactttacatctctacctccttgataatccactggtggcttgccagggagaaatactttatagttggaaatccttgtatcccatattgctgcgcgagctccttgtgagcgtcggcgtcgagcgcggcgattgtggcgacgcccttgaggacaccggcggccttctcccaaatcggcgtcagctgcttgcagtgcccgcaccacggcgcgtagaactccaccaggaccaccccgttcgcattcagcaccttcttgaaattgttggggggtnagctgggaggaccggggagccggcggagtagagcgcggcggccggggaggccgaggccgcggcggcgacgaggaggagggcggcgaggaaggccggacgcatggcggagtcgagaag

SEQ ID NO: 3804 - DNA, 690 bp, Avena sativa
acgttgccgacataccattgtcaccagcaatagtttccagacgcactcattgcagacacatgttgtcaatcacacagaacaagatgaagctaatctgagcaaaacgaacaaagttaacaaacattcacatcaattagcattcaaacacccctcacaactccactgtacaagttcgttccaacgcagctcaaaacaagcatcaccacctcttgcgcctttggccttctcgctcttctccaaactggggcaaaaacgcccagacctcgccgaggaggaaaataagtaacaaaactggggacggcttattgcggctttccttggtcgtccccggttagtgagcgaacatcgagtcctcggcctcgaccgcgttcgctctgcggctagagttctcctggttaggcgaggtcgacagactcgcgtcgccgcctctggtgtctgcgctatggagcggcctgtttcggccggtcctgggacgaatgttgtttcccacaggaaaaggttcctggtcccctgcattcgggccatctttgtggaaaagtatagggcggcaccatttgtcctcgttcatcaggctagagttccggaaatgagagatcagatcgctcctgccctggattcgagcatatgcaagtgacgccaccttctcgctattgaatttctcccatctcttgccattaaacgtcttgtaaa

SEQ ID NO: 3805 - DNA, 504 bp, Avena sativa
ggtgtttctgtggacacttcttggttatttttcatggtccaccttgagtcatccaaggtcagaaaacctcccatcaaatcgttctatggtttggttcatccattcacaagtgtctacattccagacatgggcattggtggtggacgcgacagagccaatattttgcataatgcataaaatgattgtctggctagataagctattgtgatacattggtcgagcaggtatctgaagtttttattcgggccgccgagctttggaatggcttatcgatgaaggttctcgccacgccttctacgtggcatgtctggtcaactgagaaagtagacatgtagggttctaattttttttttttgttaaaaaaagtagggtttccccttcaatttctagtatctaaataaactgtaggcattgccaataaatgctgtagcattggctctggcatttgtttagcacctgtggttcatttcttctgtattttcgaggcaaatctcacaaagtcat

SEQ ID NO: 3806 - DNA, 764 bp, Avena sativa
  modified_base (746)..(746): a, c, t, g, unknown or other
aagccctcctcctacgctgtggcctcgaagacggtcgactacacccgctacctggcgacgacgacgcccgacatggaccacgacggggccgacctgggcgacaacagctcctccgacgagcagtggttcgtgcgtttcggcgaggtcatctccaagcacacaatgtgatgacccaccccctcaaaattttctcctccccaaggcagagagagagagagagctggaagtaagaaagcatagtagcacagtgcaggaagataggtgtaggatctctcaggtagatggatggatggattagacggtgccattgtttcttcacctcctttttttgttcttctcggtgttaatggtagaagtggaacataatcaagatctaggattcactgcgtggagtgagagttcttggtaaaattcacaaggtgtggatcaggatctggttcagagatgatgatcatagaggtctcgtgagcgccttcaaagccctacaaaatttatgtgctgtgactgatgacgatgagtagggaaccagagggatacataaagaggtgttcttggatgctggagggcgcattgaattggaccatgcgacgcatcatgcccctgctgctgcgtccacaggacaggaggggattgtgcaatgtaaaatgctgccccctgttgggtttttcgacggtatttatgagtttgtctccgctgcctccctatctactgtggctgtacgacggtggttgccttctctgaatccntagtctctgtgtgtagct

SEQ ID NO: 3807 - DNA, 917 bp, Avena sativa
gtatattctctgaaatggaggggaaacagaggaggaagttcagcggtatgctgaagttttcaaggaaagatacacagaattgaatgattatgaccgagttattaagaacattgagaaaggagaatcaaagatctctcggaaggatgagattatgaaagccattgctaaaaagttggaccgctataagaacccatggttggagttgaaaattcagtatggccagaacaaagggaagttgtacaatgaagaatgtgaccgtttcctggtaatgcctgtgccacaactcttatcgaataactgaaatggttgacatgattgatgagctgttcctgctgtacagttatgcatggtgcacaaacttggctatggaaactgggaagaactgaagtcggccttccgcatgtctcccttgttccgttttgattggtttgtgaagtccagaactactcaagagttgtctagaagatgtgacactctcattcgtcttgtggagaaggagaaccaagagtgtgatgagcgcgataggcaggccaggaaagataagaagaatatgacatcaaagcgcccttcctcaagtagtccaggttttgatactcccatccagagctcttccaagagggggcgccgggatggtagtgcagcctcgggaaggagaaggcgtcggtgatcttgtgttcccagagaacacactcgtttggcggttgacaacaaagtgaagccccagacgtgcactgtcatctcatccagcttgtttgcacttagctttagtggttcaaaatctaatagaagaggttactcttgagtctgaaccaagtcaaaagaaaccgaagtctggattcctatcttacatacagtactagactccagtggcatggtttgtgtgccggttaaaaccgttaaaacatgtatcatgtctg

SEQ ID NO: 3808 - DNA, 671 bp, Avena sativa
ggcgccgctccagcatccacgacatcaccagcatcaacgccggcgaggtcgtcctcccgcagcaaccgcccatcaccggcacggggatcatgaagcacccgggggcgatgcccgggatgggcatgtacgggggcgcgcccatgggccaccccgtcgctggccaccacatggtccctgccgccgccgtgggaacgccggtgatgttcccgccggggcactcgccctacgtcatgccggtcggctacccggctccccaggccaagatgcaccaataaccatgccaatgccacgcttacaccaagcagatcgagctagcgcctgcatcatgaacgatatacacaagcatttctctctttttctttcttgaatcttcttgatttgttttgtccacccgtccctgatcctgtgctcctacttggtgtaacatagatgactctgtgagagtgagtgcagggaaggtataaagtaagtaagcatttgctgactgttgcaagtgctagcttaggataacagactcgggtaaggttcacaaatgtgaatgtaattagcagcagtttcccgcggtgtatccgttgatcatttgcagagktgcgactggaactgatttccatttgccggatgtaaatcagactagaggaataccgttgcgtttggtctatgttgtacaaaaa

SEQ ID NO: 3809 - DNA, 835 bp, Avena sativa
ggcgcagtgggaggcaaggctgtggcggaggaggaggacgacgagaagaagaaggcgcaggcgccggccgcaaaggcacaggtggtaggatggccaccaatccgcagttatcggaagaacactatggcgacgagcctatctgctccaagaagcaaggatgaggttgatgcaaagcaggcgcccatgccagggtgcctatatgtcaaggttagcatggatggcgcgccttacctcaggaaggtggatcttaagatgtacaagaactacaaggacctctctctggagctggagaaaaagttcagctgctttactgttggtcatggtgaatcaaatggaaaatcgggaagagatggcttatctgattgccgactgatggaccttaaaagcggggctgaacttgtgctcacatatgaggacaaggatggcgattggatgcttgttggtgatgttccatggcgaatgttcacagacagctgcaggaggatgaggatcatgaaggggtcagatgcggtgggccttgctccgagagtcgccaccgagaagggcaagaatcagaaataggaacacgatgaacccgatctgttccctgccactgcagggtgattgtacttcatgtgtgagaaagggactactaatatacctatgtatatgtattctctttattattttcgtttggaacaagtatttttagatttggaagcgtgagttgtgtaagttggtgtatgtctatgtactactctacttcgacggcgtgctgtagcttctgttgtaaatggctgtgttctgtgctaagagttgaggttgttgcttgcaaaaaaaaagttaaattaatcgc

SEQ ID NO: 3810 - DNA, 601 bp, Avena sativa
cgtgcgctgggaggaaggaccgggaggtcgaccaagggctgggacatcggcgtcagctgcatgcaccccaccgccgccgcggccaggctcttcgcgccgctcaagctgccggtgcacatgcccatcatcgagttccaccacgacgaggtgtgggatctgcctcctcatgccgaggtgcttgcgaggtcagacaagaccggcgtggagatgttccggctgggtgaccgcgccatgggcgtccagggccaccccgagtacagcaaggacatcctcatgagcatcgccgaccgcctcctccagcacaacctcatcctggactgccaggtggacgtggcgaaggcgagcttcgacgtgcggacgccggacaaggagctatggaagaaggtgtgcaggggtttcctcaagggcaggctccagtcgcagcagcagcaacagccacaacagcagaagcaacataataagctgctataggggggaggagcattcagccagcggcaactgatagcgttattgagagtgtgggaggggtttatgagcctagaattaattaatcctttattttctgctgcgggcaccttaaccatctttgtacagaaatatt

SEQ ID NO: 3811 - DNA, 894 bp, Avena sativa
tataattggaggaacacctctgcttagaaatgctatgatcggagaaagcgctccacttcgtgtccttcgtgaatcggctgaactgatcggtggaggagctattccatctgtcacgctgatcatgggagggaacctcatcacgggattgcgaggagacgcgagtgtcccccggtcggtgatcgctggcgtcgtggccgtcaggtacgtcctgctgccgtcggtgggcaccgtgcttgtcaaggcggcggtgcggttcggggtcatccggccggaccctctgtaccagttcatcctcctgttgcagtatgccgtcccacccgccatgaacatcgggacgatcacgcagctgttcggcgtcggggagagtgagtgttcggtgatctttgtgtgggtgtatgcgctcgcctccgtcgccgtgacggtctggtccgccttcttcatgtggatgctgtcatgaggctctctcgcgcagtagtacgtcggagtttctgaaagctgcgagatagaaggagggaaatgccggcgagcccaacgagctagcggccgatccatttgatctacctgaatccatcagaacgcgcacgctcagatcaagttgctacagagcctacaagatgtggtttttgctatggagcgtaactaaacacctaacctctgtatatatcatgactaaacttccatacagttgttacttggtcgatgatgatcggtggtttcgccacgatgccacccgaggtttgccgtcacatagtatgtgtattaagcgggttggtgtcggcgtgtcgcatagtcccgtagttagggcatgttgtggggtttggaacaaattgcttgtgatccgatttcatgtttctttgttgtataagagactaagagcatcttcaccatttgatg

SEQ ID NO: 3812 - DNA, 635 bp, Avena sativa
tttatagctgtactcatgggaacgaaattacccgagctcttctttggggaaaatgatcacaatgtcgataagaaatgaccaaaagagtgttaggaaagagaggactcagaagcagtggcgctacgacttgatctgtcccgaggactagaaatttttgaacatccagtagctccgaggaggtgcaatgacaagtactattgctgcaggtcgcctcaggttatggaagctacaaattttgtgatgtcgacatcgtggatctcctaagcaacaaagctctataccctgcttcatcgtatgatatttgcattaagcttaaggagagaggcattctagcaaagcctacgcttgacaccataattcgattagcccctcctctttcaatcagttctgaggagctcgcagaagcgtcgaaagaactcagtgatgtgcttgagcatgacctgccacggatgcataagcatatcaagaagccagaattggaagcaaaaacaccagtatgcgatagatgcagccgggatttgtaaggatgactgagatatccgaaaagagatgatgtacgtaaaatttcaggggcaacatccccagaattacaggcatagagttgtcttcttgcattgtcttttcagattgttaca

SEQ ID NO: 3813 - DNA, 757 bp, Avena sativa
gtgatcggtgcatcaagttctggaacacgcacgcaggtgcatgcctaaactctgtggataccggatcgcaggtgtgcgctcttctgtggaacaagaacgagagagagctgctgagttcacacggattcacacagaaccaactgacattgtggaagtacccttcgatggtgaagatggctgaactcaccggccatacctcccgtgtccttttcatggctcaggcgaactcttctcaccattttttagcagatactatggacatgttactgtcttttctttacctgacagtcttctcatgctttgaaactgcagagccctgatggttgcacggtagcatcagctgctgcggatgagaccctccggttctggaacgtgtttggcactcctgaagtagcaaagcccgcacccaaggcttcccacactgggatgttcaacagcttcaaccatatccgataatttgaggaatgagaatgatcctacggacagctctgttatataccggtgatgtaccttactgtggataagaaaatatacggatggagccgccgcaattcggctcccggggatgtaggcacactgctgaacctcgttaacaaacgttgtgtctttgtatttgggcttgtgggattgtagggtttgtctttgttgtttgtgaatgccgtacatggccgcaccttcgctccatggtacatttcgttcctggcttttagttcagtttcaaattcactagcaaagaaaggacatcgagacaagaaaa

SEQ ID NO: 3814 - DNA, 719 bp, Avena sativa
acgccaagcgcagcgccagggactcccacgtcccgatcctggccccgcttcccatcggggttcgccgtgttcctggtgcacctggcgacgatccccatcaccggcaccggcatcaacccgggcgaggtcccctcggcgccgccatcatctacaacaagaagcagtcgtgggacgaccactggatcttctgggtaggcccgttcatcggcgcggcgctggcggcgatctaccacgtggtggtgatcagggcgatccccttcaagagccgcgactagtcagccaaccagtcgaccatgggaatctttgctgttcatcagtaagacaaagtacccattcatcaagatgcttgtgcgtgcgtgcgtggatcatttctggcgctgtaaattatctatctaccgtcctgttcatcgccgtgtgcgtgtcttccattgcggctgtccagaatcatctgcgagtttcagtacttgtacttcctagtgtatttcccttcttcccttttgtattgtaccgtacggaaccaacatatatatgggtgcgtgcatgtaaatgtacattaagaagctacgatcgagttaaggatattcgcgtggaggaaggcgctcctacacacatgagaataatatatatgatcgtggatcgttcttgaaagtawatctcattgttatccttggctaggtgttctcactcatctttaactggtacaatcaaattacatgtat

SEQ ID NO: 3815 - DNA, 774 bp, Avena sativa
taggttcaagcctctgtcagaagatgtgatgagcaaccgcattttgcatatatgcagggaagaagggctcactctggatgctcaggcattgtccacattaagtgccatctctcaaggtgatcttcgtcgtgctataacttatcttcagagtgcagctcgtttattcggatcttctatttcttccagcgacttgattagtgtttcaggggctatccctgaagatattgtcaagtcattgctggcggcatgcaaatctggtgaatttgatgtggcaaacaaggaagttagcaatattattgcagatggatatccagtttcccagctactctcacagtttctagatgtgattgtcaatgtggatgatattccagatgagcacaaggcaagaatatgtaagaagcttggggaagctgataagtgcttggttgatggggcagacgagtatttacagcttctggatatggctagcgagacaatccgtgctctttttaacattccccaagggctggtcttttaagagaagatcgtggagatggagaatgatattgatgccagctgtctgcgaactctggcagatatatcttgtgtctcctttccagtttaagatgctgaagaagcctagcctcgctatcatcgtactcttgtgttatttttaggttggttttgtgatgtggtttaaatgtgatgaactcaagctatttcttgaccaactgaattgtgcctgaatatgtcaatgatctgaagaacagtttcaacttgccatcgaccaaaaaa

SEQ ID NO: 3816 - DNA, 695 bp, Avena sativa
taatctccgcttttctgttagcaaatgtaatgggtcgtttcccgtggctgacatgtccaagaaaggacctgtcaactgggtggcttcattgtgatcctgctcctatgtttaagccagagcattacattttaggcgactgggtgccacagtggtttccatggaaagaagttttccttttacccgtgcagtggcatgctttagcccttggtttgtttgcatcgataatagcaccatttggaggatttttcgcaagtggcttcaagagggcttttaaaataaaggattttggtgacagtatacctgggcatggtggaattactgaccgaatggattgtcaaatggttatggcagttttcgcatacatatatcaccaatcatttatttcgccccacaatttctctgttgatgcaatcttggatcagattataagaaacctaacctacgaggagcagaaatccttataccagcaacttggagacatcatccacgcaaggcaatttatgtaaaactgagaagagcgcacacaaagcgctttgtgtgttctcgttatgtagctctagattcatgtacagcatcatagctcctctgtaccgtgatagaaatgatatgtccttatccaaaccgttgtacagaatggagtgtggatggggtctaggttcttgattcgactactaccaagttaatagactgcttct

SEQ ID NO: 3817 - DNA, 732 bp, Avena sativa
ggatgatttggataagactggtaaaatgacaggaaaaatctaaaagaaagcgactggaatcaacatttaaagagaaacaagaacagttaaggcttcttcatgagaagttcaaggaggaggtaaatcagcagttgcttggttgcaagaactctcttgaggattttgaagcctatcacacagaacttaagggagtggctgacaagcaaaaagcgtcacacagaaagctcctccagcatgctgagaaaacagttggttctcagctcaacgaagctgaaatgaaaatcgcggaggttcagaagagagcccggaagaagatgaacggcctaaagttggtgctcaagcagctgatcatggaaaccgcagattgatcaagttcacctgccgtacacaagcacatagctaagggcgaaacgagtaggttaccacatgacacattaccacatgacacagacaggtctatggctccatgttacaaagggtataggaggatggtgccagaatgcacatatagggttccttttcttacagttacaagttgatgtctgtcagtaacttaccgtccaccatatatacagtgtcttaagcacgaagctttctgcatttatctgtcccctgctgtggttgttctctccacacttgctgaggttggggtacgactgtttgtcagagtgatgtattgatcaggtgcgaaattgcagatgcttaggttggatttgctgtcatgtgaatgtt

SEQ ID NO: 3818 - DNA, 702 bp, Avena sativa
ctggagtgctactccatgtactactacttggttcacttccatttcaaggtggctgtctagatgatgtctttgaagctataaagacagttgagcttgatttccacagtggtccatgggaatcaatgtcagtttatggacggaatcttattagtcgaatgttggatcgagatgtctcctctaggataaccgctgatcaagttcttagtcacccatgggtgttgttctacacagaatgtactctgaaggcagtaactcctaatgtatgtgtcactaacaaggttgtagcacccaaacttccatgggaaagaattaggtcacactgtgagtcctcagcttcagattcgtcaagccagaggtccgaggaccaggatgagtgtggcatagttgatgcacttacagcagcaataacacatgttagaatatcagagccgaaaaggactcggctctgcagcccggccattcctatacagcaggagtgttcttcaaacctgaagacttcaaatctctgtacggcattttgacacaaacgcaatgtatagctccttgttggttggtttgatgtcaccgatgactcggcctgttcgctgttcctgagctgcggataataactcgggtttcctgtcagagcaaacaagcatttgacatggtatgatgtagattgcagtgatgatgataagcccgacatgataggtgtgatgctgt

SEQ ID NO: 3819 - DNA, 621 bp, Avena sativa
cgtctcgatcatgtcgctgtgagcttgccagggggaagagtgttgatatttggtggatcagtggcaggcctccactcggcatcgcagctgtatctcttggatccgtctgaagaaaaacctacctggaggatactcaatgttcctgggcgacctccacggttcgcctgggggcacagcacctgtgttgtgggaggaacaaaagcaatagtgcttggaggacaaactggagaagagtggatgctcacagaagtacatgagctctctctggctagtaactcggtttgaggtccagaggtcttttcagcaagcttccttgaaaacaaatggcgtcaactgccaaggccggagcattgaatgaacatactgttatactgaatctttacagctacttgtatctgcttggaagagatgactgggtttgaattggggttgcgctttatgtagctgactagagttatatgtttttctcttgttgtttaattggtctttcaccagataagtaaaattcataagctacttatatgggatgagtatcggttttatgtattcttggacaattctgacatccattatgttagggaaaacaaaggactacgctgtacatatgaatcttctcttgta

SEQ ID NO: 3820 - DNA, 947 bp, Avena sativa
agctgccttttacaatttgctattgaaaatgaaccattttgtgcctttcacagtttcctgttggagacgaatcacgattggtgtagcaaggatacttccttttagtcaaactaaacagattgctaaaaaggctgatattgtggaacagagggagtaccttataaaagattttggattcagtttctgaccatctctccttttttggaatttaacttttcatgtacacataagcgtagcattgacttttaatatttctataagataatatttttattagaaatcatggaaattatttgcacatatttaattatttgtgtagggtgttagtagccttcacagcataatgccggcactagcacctttttcttcgagaactagtttgcctagctactatgacaattattggacccattaataattcgtgttttctacttttcccagtgcagttgggcgatgacacgctggctggatcgatgatggtgactgatgcattttggattaaacttttgccagcgttcacagggcaatcacatggtgagaccgactggccttatcgccttcattagtaaaatctgaccgctggacgccctagacgcccggtatggcggtgggcgtgcgtctggacggccggcgactagccgtcgttgtcgccgctgggcaacttgcccttccgcggctaccagctcccacggcagatttgctgactccattttgcaagtattggtaggagtacaaatatgctcttatgaaaaagcaaaagtaggttcctgtatcgtatacaaaacttgcataaccaggttgttttgaactcaaggttttatttccatgcacttaatctgacgctagttgggtgtatcctgtttctttcttgcataattttattgacagtttagcgaggtgtggaaccaatcaaacattgtttgatactagtggatattctattcagc

SEQ ID NO: 3821 - DNA, 536 bp, Avena sativa
aatcatgacgtatggctggggctctgcagctgttcagacagattcatggggtgaccaaaaagatggctactgtgtgcctgacagccaagctcaaggcagctcatctggacactggagaaggaggaacaacgagtccggcaggaggaacagcaggaatagggacagagggggtcccattagctcaaaggccatgaaatcaaagtaccaggtggatgagcatagcggcgcaaataacagctggaggcactgccgagtaagagatagcatgcactactcttatgagcagcctggttacgccaaccagtcactggcaatgtaagaatggcgaagacgatcacgcttgttggccgcagtgtcgttttgcgttggtacatgtgagcatcctgggatgttagagtagagccagccagggacctgtagattatgtgaagttcctgtagatcgtaatgtttttgtcacgtgatttgcgccttgtttaaatatgtctttgagctcagctgttcttcgttactggctgtattgcagtgtcggtgttg

SEQ ID NO: 3822 - DNA, 730 bp, Avena sativa
taaaagatgtctttagaggtgtttattcagaaggtggaatgcgagccctgtatcgtggagtaggtccaacgctcatgggaatacttccttatgctggtcttaaattctacatatacgaagggctgaaggcacacgtaccggtgaaaagttacaaaattcagtcacgttaaaactgtcctgtggtgctgcagctggtttatttggacagactttaacctacccattagatgtagtcaggagacaaatgcaggttcaaagccatctgcaacatgatcaatttggtggcccacgaataacgggtacattccaggggcttaaggtcatcaaacaaacgcagggatggagacaattatttgctggtttgagccttaattatatcaaggtggtaccctcagtggctattgggtttaccgcatatgacacaatgaagcatttgctgaagatacctccgagagagaacgtaaagtctgatcaaggttctacttgaagttcccatccacaagaaagacacattggcaaagtgtatttgagaagctcaagtctcaagtccatcactgttacgtagtaactgtatttgcgtacttaacccagctgacatattcttttcattatatggtttccaaattcttttttttgtacatgtatattttatccactaggtggaattctgtcattggatagtatttgacgataaaattacagaaatgcaaggaattctggtcttgagcat

SEQ ID NO: 3823 - DNA, 608 bp, Avena sativa
gcaccgcggttggccacgacctgcactacatcgcctgggactaccctgcaaagcagcaccccctgaccctctccatgaaggacttcaacaacatggtcaagagcggcgcgccctttgcgcggaagttccccaaggaagacaaggtcctggacaggatagaccgcgagcttctgcaccgctcggaagggcggttcacccctggagcatggtgttctgggagttctgaaggaggagcggatccttgtttgtccagggacgaagactctgttttcgagcctggtcctggcgccgagaggctgcgcgtgttgatgaagaaggtgctgtcgtgggattaccgcaacgggagctgttcgtcgctctcttacgaccagacaaagagagactggtatgtccccagaggtagaggatagttttgcttgcctacttgtaaatggaggacttgaacccgttccagtgaaatggataatgctgatgaatgcagcattctgacccaaggaaactgttgaaatgccgatgttcatagtagtgctggaatacacatggccgtctcgcagaaattagaagttctggaagattttatttcagtacactgcaatcttagaagaatt

SEQ ID NO: 3824 - DNA, 666 bp, Avena sativa
ctagctttctcccgaaatcaaaaggacagagaggaaataatttggctactctctcctagatctcaaatatatagggtacaggaggcgtcgtcctgcttatacatatcccttgggttgcttcctctccttctcttccgtgagtaggtgtgcttcgagatcgatcccggggaaaaatgtcgtcggtccagttcgcctcggagcaagtttgctatgtcaactgcaactactgcaacaccatccttgtggtgaatgtgccaaacaattgttcctacaacactgttactgttagatgtgggcattgcacaatggtgctctccatggatcttggccctttccaccaagcacgcactgctcaagataaccaggtccagaatagagttctatctaataatcttgggagttacgagccagcttctaggaaccagcgaacattgcccatgtatcccgtgtccaacaatcagcagcaggtgtcagcgatacgcccccccgagaagagacagcgtgttccatctgcgtacaacagattcatcaaggaagagatacaaaggataaaatcatgcaaccctgagattagtcaccgagaggcatttagtactgctgcaaagaactgggctcatcttcctcgcctccacttcggcctgagcgtcgtagacggtggcggcggtg

SEQ ID NO: 3825 - DNA, 573 bp, Avena sativa
tgcagaaactcaatctttcaagtgaagctgaggtggagctgatgtgctgcggcaagacagtagacccagcagtcaccctgcatgacctagcagacagctggctcgacaaaggaccgaagggtcgggtgcggtcggccgagggcgcccctgccaccgggttcatcacgacggtattctacagcaggccagaactgccggcacccctacccccacctgaaagtcacaatggctgatacagagctcctgagtcgctcgtgtctgaaaccagtgctgcctcactcagagtcatcccgatgcagagccctctgattggtgccaatcatgtgaggctcaagctgcctcgtgacatatagatagatgtctgatttacatgccctgtgggtgattcccatcttacgcttgaaaccgttcttcaccattttcatcgtctggcgaagtacatgtgtacccatgcgatgtataattccatgtcgagttgtgtgagtgctatttgtaactgtaggcgtggcgaggggtgtgcaaaaacacaaaacggtgaaaactgtttaaacaggttgctgaaagtgtagttca

SEQ ID NO: 3826 - DNA, 380 bp, Avena sativa
atgactaccatataaccaggtttacaaaatgaaagccaaatgcctaccatataaccaggtttacaaatagaagccaaatgactaccatatgaccaagtttactccattacacaattcatcttgttgatgggaaacatccaggtacttggtggtttgcagcaaaaatttagctataattcatcatatttgaaggggacacctgcacaaacaagtacaaatagataagaatccatagttacacacattctcagtttgcaaaaactagtacaaatagataaggttgcaaaaacaaatacaaacagaagatacattgtccttgccaggctaatgtacggcataagtgtgagccagagtgtgggatcaatttatgggtatatgat

SEQ ID NO: 3827 - DNA, 617 bp, Avena sativa
tagaaacaagtacaagtactttacaacgtaccaatttcaatccgcctgttgtaatctggaaaactgcttctccctcaggaaggtttaggggcatcaaagatcttgcagacgcgctgctcgcctttgcctttcctcagcatcaaccggatggtggctgcatgcgccagcacgtggcctcctgccggctttttggggcagttatgaacatacccaccgcctggatccgcgatcacttggttggtgatgtacactgcaacattgaactcctcagcaatcttcgtaaggcgggacagcatctgagccagtttttgctgacgctctgcaagctcacccctaccactgaaatcaacacggaacagacgcaatcacagaatccacaatcagaagcctgaaaggctcttcagccatcttggcagcaaggccaaggagcaagttgtactggtgctcatatgtgtatgcgcgagcatatatgatgttgtcaagaacagcattggcatccatcccaaatctctcagcaattggcacaatgcgttcagggcggaatgttccctcagtgtcaatgtaggcaactttcccattcccaccatgcatgtgaagcggaagctgagtggagacac

SEQ ID NO: 3828 - DNA, 253 bp, Avena sativa
tgacctatggtgtgcgtaagaactgttctgacttcttcctgaagggttacaatgaggatattgagaaggtagaacagatgttgccacccccgacgaggaaatggcaacgattcaaatgacaagaagtgcagtccaacagaatggtgagagcatgccgcttcatgcaaattgcgctgaccatggttgtgatgattcacaagccaactcaacatctcatcgccatgttagttcgtctaaatgttgcatcatagta

SEQ ID NO: 3829 - DNA, 703 bp, Avena sativa
acaaggaaaggctggaaatagtgtatttcttgcatcctgggctttattcctggctggccatggccacatttggcaggctcttcttaagtggagggtcagttttctctcatacattttttgaacattaaaatattcaagcatgttggtttattctatgatgatatgggatatagctaaaaaacagcattacacttttatatggctatatgcagttcagagtccttcttgcagtatgagggcactagtaataaactagtacctgtggacaaacattatagattttgctgaccttatcccgcttgagtaatgattttgtccagtgtacttttcttgaatcatgagcagtgaactttacttgtaatttgctttagggaattttcctgtagaaaaaaacactcgtttaatatgctgaccttatcactgctctattcttagtttttggtcttccatatttaccaaattttggtggaacaatacaacactataccgtctggccaacaaacagttgctttgaattcatatatctgtcttgttcacttaaaattgtatttgacttctcactcaaaaatgcagttaatttccctcatttctgctcatttttttcttgcaggttgtattggaaaatcaagtatgtcagtcgactggagtttctgtgggcggacataaaaaagggcgaggttgagattccagaatttgttactga

SEQ ID NO: 3830 - DNA, 627 bp, Avena sativa
ggcaagagcaccatcgtgctgcacaacacctgcgaggactcgctcctcgccgcgccgatcatccttgacctggtgctcctggccgagctcagcacaaggattcagctcaaggcagagggagaggacaagttccactccttccacccggttgccaccatcctgagctacctcaccaaggcgcccctcgttcctcctggcacaccggtggtgaatgctctggccaagcagagggccatgctagagaacatcatgagggcctgcgtcggcctggcgcccgagaacaacatgatcctcgagtacaagtgaggaggatcggagggcagagtcgccgcgctcatggtaacaagtgcgaatggatggacgggagggtaggaggaaggcgagattggctgtggaattatttggcttgtcttgtgtttcttttccgattctttccctggttaaagtcacctttctgtgctttgcgagaaactctgtagtgtccgcctgtccgggctctgcaactagcagacgcttcttatggtttgtcggataatggtggtgttagcttagttagtctctgttagtaactttggtacttgaactttcagttaaggatgacttgtgctccgtgttttaccaaaaaaa

SEQ ID NO: 3831 - DNA, 445 bp, Avena sativa
gtcaaatcgccttattcttgaatttttgttctatgttaaagatcatattttgattggcatgtttgctaatgtagacacactaatggaaggttcaatgagtaactatcttgaccaaccgatcaaatttatctcttgtggctgctgtaggattgtgtctctctgttcctgctgttatatatccttgctatttaatcccatccactatgtgcagttgccgctaaaaagactatgtatcctctgcacacatctaccagggatgtgtccgtgcgaagagcaaggctttaatctggcgtttttggttcatcccaatgcgccctcgatcgcgcagaaatgtggattcatcgactggatctccatgcaaggttgtcatcttgccagatattactgcacgaggattactggggattgagacaaggtgtgccattccatacaagtaagacatgtg

SEQ ID NO: 3832 - DNA, 659 bp, Avena sativa
gccatcttaaaacatgcctagttctcaccttcggctacgttttgcttcatgatccatttagctggagaaatatacttggcatcctaattgctgtagttgggatggtactatactcatacttctgctcaatagagccaaaaaatgctgaagtatccccacagcagacaaaagagggtgactcggcacctttgatctcagactctctgagcaaagttgaaaacggaggcgatgacgacgagcctttgaaggtaccgatgtggagctcaaagtactcgagggcgtgagaaatttcctcttttagccagtggatggcattatacaggattcagttaagtaggcagatagtagggttggaagccaacccacagtaatgaagtaatggacatttcggctacattttttgcgcttaatctactagctgtaaaaggatctgattctttggaggattttaccttcgacgattgcagatctaccatgaaactagacagcagatatactgtatgattatacctggaaatgggccacatcttctcactgtaacttcatgttgggacattaatccacagacacatagagtccattctttttgtaccaaagatcctgagaaccagtgaagtatttataggttcaatttggaactgcaagttacaaaaaaaaaa

SEQ ID NO: 3833 - DNA, 378 bp, Avena sativa
ttttttgtactctcaggaacaaatcacagatatattatcacttgacctctgacacagacacacagtacatggcttgtgtaattccccacatctcaaacacgtcaatatcgtaaatccctacgaaagtgaagtactgtttcaaccattttgacatttgtttacacaaggtccacatgaggcacaagctgaagattgcaaataaggtacagcaagcacttgcagcatggtaaaccagtgaactttattctgtatatgcattcactccacagttgcaacttactccactggcactggctgcatggcctctgcttccttcctcagacccctcgaagagccgccgacgacaagtatcgctctcccgcgctcggatgaacggtc

SEQ ID NO: 3834 - DNA, 844 bp, Avena sativa
tctcttaccagaaataagtgacacggatctatctatatttacatgtatctagacgcattttagtgtgtaggtacattcgaatctagacgaatttgagtcacattttccggtcggaagaaggataaactaatgtactaattatttttataaaataaagttaagtagttacatgtttaagtagataacgagataaagagatattaagttatcttgtgcaaaagaaaaatggccttttgatgtcactcagatttagttgagggccttgggtataaatatccagaccaatgttatctatatctatacctaataataaatggcaaagtgtttcttctggtctaacacttttttaaacagagttattcctaacagtttaaaaatgtttacccaccgtgccaaccataatttatcccttccttttattatgctataccgtgtcccctcctaaccctgcctccctaccatcttccttcatccgccatcctatcccaccatgggagctcgactacaacgaccagccgccgcaggaggtggaccaggacaatgaccggccaacctctaccaaggcatactcccgtggaaggtgctctgctggctgcaacttcatctctgaatcaatctatttggtggctttgtcctgcaatgcactctctaccagggaaattaaattacagagacatgctactgtgtctggcaaacttcaccagagtaagaaaaagttctatcccaatgcgcaaggggctgatttgattcaccgggaagaagactggcagcagcagcgggaaagaccagcagggcgccagcgccactgcaggggaacgtctttgtacgggattactcactccgt

SEQ ID NO: 3835 - DNA, 479 bp, Avena sativa
gtggccaatgtgatccacccaatgagcataagttgatagtggcaagtgatgaagcagccgatgcaaatgtagaatgcaagtcgagaatggacactggcagtaaccaagaactaagcccacagtcccttatgcatcctgccttggcatccccagagcctgtaactgagaccgctgaaacacccaaatgctgccatgaatccaaagatattgagatgggcaatccatctccggagcagcaaacaaattgtgtgaatccggacctcgagacagaaaatcaatcatgagctacaattgattcccacagacacaccacgaaccccaacacgcaaatctaccaatcgcatgtatgcatgcagcgtcgcagcttgtgagcgactggatggtagagcgagggattttgttcctacatggcgtgtttctctcaggtttgttattttcaagtgagagtttttgagattattcttcttaggtttattcta

SEQ ID NO: 3836 - DNA, 704 bp, Avena sativa
agaggaacttagatcagttgaaaatcagctagcttctgaaggttcaagatgccagaaactggagtctcaaattgctgccgcacataaaaggttggaatctgctgattctttggaaaatgaactggaagcattgcagcaacaaatatctcaggcagaacaaaccatgacaacttctcagaggcggaaatctgggggcgtgtggaagtgggtggcaggaagtgcagaggtctccgacaatgaatagtggaggttgatgcgattcctgagttttcaaggataccaatgcatggtccatcaaggcaagcaggccacccgaacagcgagacccaagtgaagctgctacagttttgagacggcttgtttgtcactgactactgggtgcctcctcaggaacttgcccgcgatcgattttgtcaaaatgtctccgataacagtcttttggatcttctgaagtggcgccacctggtagaaattttccataggccagtttagacaattccatagttaaagcatgtcatcatacatacaagtatactgaagattgtaccgcattgggaatatataattggttggggttattagctttctttctcatcatatatagcaatacaagtatgttcattggttgtggtgactggaggaagtacatttgtttatagcgtaaaatttacagctatgttatcgagctgtcttcaaaaaaaaaa

SEQ ID NO: 3837 - DNA, 542 bp, Avena sativa
aagtaccgcccttcgctgcttgctgccgctgcggtttacactgcacaacgtgctatcagtcgctgctggcactggacaaaggtctgcgagttccatagcagatacactagagatgagctcattgagtgctccaacatgatggtacagttccaccagaatgcgggaggtggcaagcttacaggcgtgcacaggaaatacagtacattcaagttcgggtgtgtatcaaaagtggagcctgcgggcttcttgcaggcctaaaaatggggtgaaaacttctggtgcaatctagggcaatctattcctctggatagattttaaccgttccactgaaaacatgcagacatcatcgtgttgatgttgcacagaagtgcagcaggtttcctagcacagaatatgcttgtgacgatgtaataatcttggtagtcagtccttaagctactctgcggctaataatatatttagccctcgttaaagtgtcttttaaccttataaagatcatttgcgtgcaagaagtcgagcaataatctctcttttactgacga

SEQ ID NO: 3838 - DNA, 680 bp, Avena sativa
catacatagaagcagctccatggaatgagagtgaggaggaaaagctgaagaatctctttgtgagatgcacttttgatgaggcaatatctctagatgtactggctagattgcggccaaacagccggatcagctcggaagatctaattgtgcatctcatccagtctgtcactagcagcacaaatagtggtgcaagaaaagacatgcaatctttggtaaatggtcttctaagcaaaagctcactctatcaaaaggactttgcagggctaaacaaagagagcatataccaaatctgtcgttcatattttggaaagttagtggatctctttgaagaagctacagagtctgcaaatcacacagctcaactgtcgttggctacacagagtaaaccagtgatcgagcgaatatctcttcaaacagaaaacctctactggctctttgagatccttgtgaacaatgacatggcagaagattttgtggaactgtgggcaatgcaagaccggctcattgtgatgcacccgcaagcatcaccaatgattaggtacgagctaagccgaatatcagccagtgtgttcatagcacttggcaaaggagagtgcagtgcccgtggcgacctgagaagcctcctcttttacgggtggtttggaccaatgctactggattttggctggcttcagcggtgc

SEQ ID NO: 3839 - DNA, 542 bp, Avena sativa
ggcctgaattgcgacatatattacaaaccacattacaatgaaatattaccataaaatatattacaaaccacattatagtcatatcttacagtgacatatcttacagtcatatcttacatttgttcacagccatatcttacagtcattgttcacaaccattcgtccacaaccattgttcacaaccattcgcccacaaccattcgtccacaaccattgctgctcgccggagctgtggccagagctcctccttgctggccgcagccgccgaagctgctccctggttgggatcaagaggcaagtcgcctcaccactggagctccttcctcgccctccttcctcgccctcctgctcgcgctccttagaacgaacatttcacacggtagaagttctcgatcatgaacataacatttagaacctcaatttgagagcaggctatgtagccacatagaaaaatctagcaagcgagagcttgctgggctaacctcccggtgaccaacggcgtgactaacctctgcagtgccctggccccaaattatcccggg

SEQ ID NO: 3840 - DNA, 719 bp, Avena sativa
gcttggtgaaagtttgcatagaggagcacctgactgatgccaatcgaatcctgagttgtcctggaaataacattccacttctagtgcagatggttacagaacccatttcttggtatcttatcgtaatccagtcctgcataagagcgattgcgccacaaggaaagaagaaaaagaaaagcggtccatcgctacgaccagacatacctcacttgcaaggaattcaaagatctgttcaatgcttgattgacacactccgaagtgtacaaacatggttatctgatcagatgagtccagaggagcatgctttagataccttgttgtcgcatttgcaaggagctagtgatgaagggccaggacagacattccgtgtcctggaagagaatccagcatcacatgcctctgagcttggtgatctgatttccaagtcattggaaacatggagttctactggtgtgttacgaagaattgtgggagcagaacatgagctgctagctgagttcaagaaaacggttgactcgaaactaaagcggctcgtgtcagaattggcttctttatcttcagtgttacactagagttgataaattttgcacatgaattttgttcaattcctgttgtagctttccattatatatgttgtaacagtatagcgggatggctgtgcactgtcatttgatttgcttctattcaattttgagagaacatcgcctttgcttacaaaa

SEQ ID NO: 3841 - DNA, 652 bp, Avena sativa
gctcgggctcatcagttagttatggaaggatataactgggctcatgaacaaaaggttgttaccatattcagtgctccgaactattgttaccgatgtggcaacatggcatccattctggaagttgatgactgcaacagccactcgtttatccagtttgagccagcccctaggagaggcgagccagacgtaacacggagaacgcctgattacttcctctgagttagcgggtgacaccattttctcagcttgtattgcgataatccgcaccgatcagtgagatagattctgctggatccaaatctgcacatgagccaagaaacaataacaaaggccctatgtaaaactcgacccccattggtcaagtccagaagatgctgctatcctgaaacaaaacaagcttcatgcagctacacctgcctgagttccaggtgggggaaaaagggccatgatacatcctctccacagctgcgcatttcgtagaggcatggaattacattggcaaaaagactgaaactcctatatatatgtagcttaagcttgtattactaggcttgtaatctgtactatcaatgccaaagatacagttaattaaatcatatttcagtttctatggagattgatctctccaagtttttgtctccacaaagtaacg

SEQ ID NO: 3842 - DNA, 653 bp, Avena sativa
ctcgaaactgcaggacagggggcacttggtgcactgtataaagttttagaatctgccactgcagatagagagaatgggtcttcagctcaggggcaaataatatggatccactttggagtcaacagtggtgcatctcggtttgctcttgagaaccaagctgttaatgaggccaccttccgttgtcctgatgagctagggtggaaacctcagagagtcgctattgtgccatctgatggaggcctctcacggacacgagagactactcttccagtgaaagaattgaccaaatcgctccgaaagacaggctacgatgtgatgccttcagatgacgctgggcgattcgtatgcaactatgtgtactaccactctctccggtttgcagagcagcaaggcatcaagtctctgtttgtacacgtgcccctcttctcgacagtcgacaaggaggtccagatgcatttcgctggttccctccttgaagctctcgcttccttgaactaggaacaaccacttaacggtcagcggcttgacctcgaagatgtaaagttggaagcagactgaataaaattgcgtggtgattgacgcctattggtcagatcttgctccaagggtgtatttaaggggacaggagaaaaaatagacatatgcttagagtg

SEQ ID NO: 3843 - DNA, 755 bp, Avena sativa
caagccttctggggataaaaagaaagcccaagagaagaccacaggaaaaacaacagaggcagctgctgagaaagctcctcagaaaagtgcagaaaaggattctgagtgcaatgttagtatcctgaatatacaggttggtcttattcgtaaagcatggaagcacccatcagctgacagtcttctggtggaggagatagatttgggagatggcaatgtgcgtcaagttgttagtggtcttgctaagttcttcagcccagatgaaattgttaatcgccgtgttgtcttgatcacgaatgtgaagcctgggaagctgcgggatgtaatgtctgctggtctggtcttgtgtgcttcaaacaaagatcatacagttgtggagcctttgattcctccggaagaagccaagcttggagaacgcatttcttttgctgggtttgatgggaagccggaagatgttctaaatccaaagaagaaacagttggacaagataacaccgcatctccgcacggacgagaatggaatcgcaacgttccgaggggtacccttcacgacgtcaggtggtccgtgtagatcgtcagtcccgaatgctgatgttaaatgattgcaactcattaaacatgctgatgtgaaacattgatgtgctataaaagcacatgtgacctgtaccattttgtcttgatggccatatcaaatgctgttactaaatgtcaacagagttgccagccagttcgccggttttaatatctgaaaacaagttc

SEQ ID NO: 3844 - DNA, 784 bp, Avena sativa
tctatcatacactctatgatcgaaacccaggattcatctgtcctggctcagcttgggatggccagatatgcggttaccaatcctatacaccttatcttggccagacagggtctattgctccgaggtcacctggccccggttagatctttgcaagctgggctcgctgacattcaaagctcccgaccatgtgaaatacccgtcagtagaacttgcatacgcagctgggcgagctgggggcaccatgacaggagttctgagcgctgctaatgagaaggctgtggagctgttcatcgacgaaaagatcagctacctggacatcttcaaggtggtggagcttacgtgcgacgcccatcgcaatgagctggtgacaagcccatcgctcgaggagatcattcattacgaccagtgggcgaggaggtacacagccagcctacaggcatcctctggccggagccctgttcttgcataaggccctgttggaacagttcccagttctcgtcggaacttagctgtttctgtgatattcctgcgggtccaaacttcagaatatgtctagctttcgtagctaccaccatgacgatggtgtccagcagaaggtctagaagatgaagtgtgggcagacaggcacagaggatgtacactactcccatggccttttgtcaaattggtcatgtgggaagcttagatcaagatttatgaaggcacacaaagaatgccttcctaatgtaaatcatgtctttgcacaaataaaacgtgtgtatccaatgtaaattttgatgggtaa

SEQ ID NO: 3845 - DNA, 743 bp, Avena sativa
attttgaaatggaaggaaatagttggctctcaacgaaggaaaagtcagacctaaagaaggtgcatgatgaagctcaggatgcagctgagaaacaaaaagggaaagtgactgtcacatttgatttggtgggccgtaaggtaattttgaacaaggatgaagccgcagaggcagaatctgatcaagggatcatgagaccattagaacagaagcagcagaagcctcgcatacagcccagccccacgaccagagagcagccatttttcattgaaacaggaccggtgaagccgaaaactgacagagtaaagcagagcaagaatcttgctaagaacggcttgtgcttggaggtaactggaaggttgcagcacgacgacaaggatccccagagctttcttggtggcaagatgaagaagggtgatcatttggcgtacagttcctttggtcaagtgcgtgaaggcgatgactatgagtgctcccttgattttgattgagccttagttgggaattgtgatggttgccggagtgcattcacatcgaactgaattatccatttcctacggattggattatggttttgccaagctttcagcgttaaaatggatctaagtttgtgcaaatgtaaaaatatgtcatttccagttctttgatctttccttgttcttgtgaagttcctgatgtgtggaagtgtttcgcatacaattttgaatttcaatcccacttgctaatattaactttgtagaaaaaaa

SEQ ID NO: 3846 - DNA, 797 bp, Avena sativa
gataaggctgatgcaggaactgctcctgctgaggtcaaggcgaaacctaacagtgtcaatgaaaatggtgatgctgtagaaaatgggaaagaagccaatgagaagaaaagtaagaagaaaaggaagtcgggttctgaagaaaatggtctggtagaagataaacaggtagcaggaaaagaatcagttcccaaacaagatgatgaaagcaagactgccatggacattggagaaagcagaggatggaaaggcttcaactgatgatgcagctgttagtaagaagaggaaactagaagatgttgaaggaagcaaaccccatgccaaagaagataccgctgctactgaagatgatgtgaaggagcccagcaccatatcgaaaccgaataaaaggcagaaactttcatctgagcctaaaactttgattgcattccaacgggtgaagctggatgatgttaaatttgctgatgaaagactacaagataattcatattgggctaagggtggtgcagactctgggtacggggcgaaggcacaggagattcttgggcaagttaggggaaagggctttagacacgagaagaccaagaagaagcgtggaacctacaggggtggaaacattgatctccagacccactcgattaagttcgacaattcagacgacgagtgacggcttgagtgctgcaagtcatcctgcatttccccattcttaccctcatcactcggtcattccctctgctaagaagaggcagagggtgtgcctgctctctggtgaaagagcaaaactggtgccctgcccagtt

SEQ ID NO: 3847 - DNA, 812 bp, Avena sativa
ttgaagcatctactggttgtcgtgttttcatcagaggaaagggttccatcaaagatccagggaaggaggacaaactacgaggaaaaccgggctatgagcatctgagtgaacaactacatatcctgatagaggctgagttcccagccagtattattgatgccagactgagacatgcacaggaaattatagaagaattgctaaaaccagtggatgagacacaggatttctacaagaggcaacagctcagggagctggcgatgcttaactcaaccctgcgagaggacagccctcatccaggaagcgtatccccattcagtaacggtggtatgaaacgtgcgaaaacaggccagtagggaaccaactcccccaactgttaccggtattgtcgaggtgccttatgcccatatgggacgccatgtcttgggggcatttgccgcgggtgcatgtgaaggaagcgacacctgcgttcgctagccgagtctggtatgagtcgcggtttctcctactgactaggggaaaccgctggaaacaatggcagtagtcctgggtccttgggttgatccagctttggttgatgtaaggtctagaacattcgctttatttgttaattgactgttaaccctagtatgtggtgctatgttaggtgaatctccatgacagactagagaggcccgggtatgtgagctttcttgttttcctttcacccctttaggtgtttaatttgccttgtatattattatatcccttctacattatggagttgcggataataatccaataaaaaaggtacaaggaacattggcttgtgcctg

SEQ ID NO: 3848 - DNA, 680 bp, Avena sativa
ttagattcattatccaacacagagaactcctacaaaacatcaagtggagaaacaataacagctgattgtcattttttgtgtattggtaagccactgagctcgtcgtggctacatgataccatcctaaaggaatctttggacaacaagggaagattaacggtggaaaaggatctaagagtgaagggttataataacgtttttgcaatcggtgacatcacggatattcctgaaatcaaacaagggtacctggcccagaagcatgcgctgctggcggcgaagaacttgaagctactaatcaaggggtctcctgcgagcaagctgggaacctactgccccggcttcccgctggccatcgtctctctcggaagaaaagaagcggtggcccagctaccgttcgtgacgctcagcggacgcataccggggattctcaaatccggagacctgttcgtcggcaagacaaggaagcagatgggtctgggtgcttgagcagggcgtgccctcctgaccttcaaagttcaaacagacaaataaactcgtgagtgcaccatatatatatatcgtactatcatgtatttgtgtaattaaatgttgatggcgtgttgtgaatggcgatgagcattttggcaaagcgtgtgtacatgtttacagaaaccttcgaggcatgatttttgggtaaattg

SEQ ID NO: 3849 - DNA, 768 bp, Avena sativa
  modified_base (201)..(201): a, c, t, g, unknown or other
gtctcgggagatctacgacgtggttgtaccatgggatagagaaggccagggtgtatgacatgaagaccataaccatggctacctcctccgcagtcaaccgcagctcccagaagaacaacatcaagctatccctggcggtcacggagaagcagacgagcacctgggactcgactctctccgtcaagactggcgtcaaaaccnccatcaccgccggggtgccggcagtgtccagcgtgaaggcggaaatcagcatggagtacgccgccgagcatagctggggtgagaccgaggagaaagagaccaagcaggagatcgtctatgatgtggtcgtgccaaagatgaagaaagtgacgctcagtgcgatcgcgtcacaggccaagtgtgatgtgccattctcttacacacaaaaggacgttctgcccaccggagaggagatggttacccagcatcatgacggcatgtacactgggctgaatacattcaatctccagtatgagaccaaagaagaagacctgccggcccctcagtaaacttttattgtccgctatgcatgcatgtgtgctctacctatctactaccacatgatgcataaataaataattaaatgtagcagctgtgtactgcatactgctacgtactattggtatgttgtgatactatactagtagtcgagagcaagtgacgtttcatggacgttgaaatttgtattatggcactgtgctcgaataaataaataagagggtttccctattttgtaactaaaaaaaa

SEQ ID NO: 3850 - DNA, 676 bp, Avena sativa
cagcgggaccatcgacgacaaggagctgcagtccgcgctctccggctacaaccagagcttcagcctccgcaccgtacacctcctcatgtacctcttcaccaacaccaacgtccgcaggatcggccccaaggagtttatttctgttttctacagtcttcaaaactggaggtctatatttgagaggtttgaccgtgaccgaagtggtaaaattgatgcatcagagctgcgtgatgctcttctcagtttgggctattcagtttctccaactgtgctagacctgcttgtgtctaaatttgacaaaactggaggcatgagcaaagcagtcgaatatgataactttattgagtgctgccttacagtcaagggtctgactgagaagttcaaggagaaggacacgacttactctgggtctgcaactttcagttacgaggcattcatgttgaccgtgcttcctttcatcattgcatgatggcaacctagtctaaggcttgagtgaaataccttcttgttggaattgtttttttgtaactgagattgagtgatgttgctgcgttgctgataagatatctcttgggagatttggaactggtttatatatggtagaacctgtcgatgatttggatctctgaaaatgctgtcacaataataagaacttaagaattaaatttgccctacg

SEQ ID NO: 3851 - DNA, 723 bp, Avena sativa
gctaatggtggacccactcaaagggcgtctgcattagcagccctatcatctgcatttaatccatcgtcgcagccgaagcaggctaatgataggcctgcaagctcgggtgatggacccacccagcgtgcctctgcattggctgccttatccaatgcatttaatccatcctcaaaaccaaaaactgcactcccttctcggtcaggtcaaggttcacaaagagcagctgcagttgctgcactatcctctgtgttgactgctgagcagtctggatcaactgataatctccgagctagcaagacgagcatgccgagcacaacagcaggaaagacagatacagaggttgtcgtaatatctcaatctgagacatctcctcgctctgaagctggggagtcttctgaatttcggaccgagaaagacgctgtagtagaagaggtgccatctgcgggaggtagagtagagcctgaggcaccacaggaacaaacaactgaacatgttggcgaagcaacatttagctacgaccgtttgatatctaaatctactgatcctattcgcgggatagactacaaacgcagagaggcatacttatcggatagcgagtttcagactgttttcggcatctccaaggacgcattctaccgacagccaggatggaagcaagagttacagaagcggaaagccggtctcttctgaataaacggctatttctaagttacccttgcagaa

SEQ ID NO: 3852 - DNA, 830 bp, Avena sativa
agatccaacattcctagggtacttatagaaaagggtgtatcttctgctgcaaaggttgttaggaaggcttatccacaagagaatgtggagtattgtcaacgaggtcgaggggacctctctccgtggtcgagtatagtgaaatggatgcggctatgactactgaaattaatcaatcaacagggcgccttcgttattgttggagcaatgtatgcttgcatatgtttgctttagattttctgaatcaagtggcaaacagccttgaaaaggacagcgtgtatcatcttgcggagaagaagataccttccattcacgggtgtacaatgggcctgaagcttgaacaattcatattcgacgcattcagttactccccatccaccacacttttcgaggtgtcacgtgaagaggaatttgcgccagtgaagaatgcaaacggcgcagcttacgacacccctgataccgccaaactcatgctgctccggctccacagcagatgggtagttgctgccggtggcttcctgacacattcagtacccttatatatgacaggcgtcgaggtttcaccgctcagctcatacgccggagaaagcctggaggcaatctgccgcgggcggacattccatgcacccagcgagatttcattctaggtgtatcggctcatgacagcagcagctacacgcaaatggaagctgtggtggactggtgggggtgggtacattggtgtggatgggcctgagctccttgagcaacggcaatcgagtttcagatactggcctggatgttgtatcgtttgtgagtagttcggccaaggttctgaagcatttgtaattgtg

SEQ ID NO: 3853 - DNA, 906 bp, Avena sativa
agatatctgctgaggaccttggtggagcagcagtgcattgtaaaatatcaggagtctctgatcatttcgcacaagatgaacttcatggacttgcactggggagaaacattgtgaagaaccttcacatggccgctaaagtaacaaatgtaccaaattctgcttgtcattaccaagaaccgttgtacgatgtacatgaacttcgctcaattgcaccatctgatatgaagcaatcttttgatattcgctcagtaatagctcgtacagttgatggaagtgaatttgatgaattcaaaaaattgtacggaacaacactagtgactggttttgcaaagatatgtgggcagccagttggaattatcggaaacaatggaattttatttaccgagtcagcgctaaagggtgcccacttcattgagttgtgtgctcaacgcaatattcctttgatattccttcaaaatattactggatttatggttgggtcgaaatctgaagcaagtggaattgcgaaagctggagcaaaaatggttatggcagtttcctgtgccaaggttcctaaaattaccataattgtcggtgggagtttcggtgctggaaattatggaatgtgtggacgtgcatatagcccgaattttttgttcatgtggccaactgctaggatatctgttatgggtggtatccaggcagcaggtgttcttgctcaaatagagaagagcaacaggaaacggcaaggagtggagtggaccaaggatgaggaagaagccttcaaagccaaagttgttgaggcttatgacaaagaaggaagtccctattactctaccgctaggctttgggatgacgggatcatagacccgcggataccagtacgggttttaagcctttgcctttctgcttcggccaagccagtcc

SEQ ID NO: 3854 - DNA, 813 bp, Avena sativa
tgacattgcatcaagcagggtggagctattattgagagagctcgatcctatcctggagtacaatttctagtacggtgcacatcaaagtgcgaaaccgtgctatcaccgcattgatgaaagccacctttgatggcttcttgctggtgcttcttgccggtgggcctttgcgtgcttttacccgccaggactttcagataatagaggccgactttaggtccctcagagatctgtttttagctgatggagatggtttgccagaggaattggtcgataaggcgtcctcccaggtcaagaatgtcatgcccctcctcggaacagattcggaaggcctcatcgagcgatacaaacgcatgatggccgggtctgcctccaaaggtaaattgccgttgccacctactacaatgcactggagtccaaatgaaccgaacacggtcttgcgggttctgtgctaccgacatgatgaggcagctacaaggttcctcaagaaaacctataaccttcccaagaagctttgatactacatgggatagctcacacactgtacattttcagccaccgctatcatgagacttgcccaggattctgtatgtcatgagagcctatgagaaacaccactgtaaaggtaccacaacggagagaaggtgttgtgctttggggggttgggggtactcacagctctattttgattattattattattatacctgtttctctgatccagttcttctgctgaccttcgcctttgttgcgcacgcgtgtgtaacagatatatcttcattcattctagtttgcaacaggtataaccatcttgtg

SEQ ID NO: 3855 - DNA, 787 bp, Avena sativa
gcaggatggcatcctgtttgacaacattcttattgccgatgatgagaaggtagccaactctatcctggagaagacatggaagcccaagtttgacgtcgagaaggaaaaacagatggctgaacaggcagcaaagggttcatcagatggcctttctgaattccagaagaagatctttgacgtcctctacaagatcgcagacattccgttcttggaaccttacaagaccaagatcattgatgtaattgagaagggagagacgcagccaaacattacaatttcaattgtggcctcaatcgttgtcgtccttgtctctgtacttttcagaaccctgttcggtggcaagaaggcagtggcacctgtgaagcctgctgccacggtcaagaagcccgctgtcccggcggctgatgcagctggaagcagcggtgtcacggaggagaaagaggatgagaaggatgacacggctgcaccacgcagaaggtcgcgaagagagacatagacttcagtctaggaccttgctattttggacgtctcggctctagccttttcgggaacttcttgagtgtataattgaagtatcgtgctctacctgtagttttaagtcgctagaatttacgaggtgccatagcttgtgttgttcggttgtttgtgtgctgttttgaatcagctagaacagatttttcctctttcttttatatctgatggacaggaatgatcttttgatatttcagatactgttcatttactcacttctgctagtatcttattaaatcagaagctagcttgaact

SEQ ID NO: 3856 - DNA, 802 bp, Avena sativa
ttaaggagttatcatcggattcatctcagcatgttcgctcagctttggcttcagtcattatgggaatggctcctgttttggggaaggatgctaccattgaacaacttcttcctatttttctttctttgctcaaggatgaatttcctgatgttcgactcaacataatcagcaaacttgatcaagttaatcaggtcattggaattgacttgctgtcacaatcactattgccggccattgtagaactagcggaggataggcactggagggttcggcttgcaataattgagtacatccctctgttggccagtcagttaggtgttggttttttcgatgataagctgggggcactttgcatgcagtggttggaggataaggtgttctctatcagagaagcagctgcgaacaacttgaagcgcctggcagaggagtttggtccagagtgggcaatgcagcatataattcctcaggtgttggagaagataaacaacccacattatctgtatcgcatgaccatcctgttagctatctcaatgctagctcctgtcatgggtgcggaaataacatgtcagaagctgctcccggttgtcattaattcctcaaaggacagagtgccaaacatcaagttcaatgttgcgaaagttctgcagtcactcgtaccgatccttgatcaagctgttgtcgagaagactttgaagccttgccttgtcgagctgagcgaggaccctgacgtggatgtaagatactatgcaaaccaggcccttcaggcatgtgatcaaatcatgatgtcaagctaactggatac

SEQ ID NO: 3857 - DNA, 726 bp, Avena sativa
acgagaataacagttcaagaaatgctagaggatgagtggttcaagaaaggttacaagcgcgcagagtttgatgagaagtatgacacaacattggatgatgtggatgctgtcttcaacgattcagaagagcaccatgtgacagaaaagaaagaagaagaacctgttgctttaaatgcatttgatctgatttcaatgtcagcaggcctcaatcttggaaatttattcgactctgagatggaatttaagagagaaacaagatttacatcaaaaagctcgccaagagaaattgtccgaaagattgaggaagctgcaaagcctctaggatttgatattcagaagaaaaactacaagctgagactagaaaaggtaaaggctggaaggaaggggaacctcaatgttgctaccgagatactgcgagttggaccttctcttcatatggttgaagttcgcaaagcaaaaggagacaccctagaatttcacaagttctacaagaacctttcaaacaccttgaaggatgttgtttggaaatccgacgatatccaggtccaaccttcctagcagaaacttcatacaaggagggatgggtaaactattagcatcccattcttccaagttgatccattttcaggaggtggatcaaagaacatgttcattgcattttgtaactactggtagatggcccttgttgtcaggtgtgcttgtcctccactattgttgtatatgctg

SEQ ID NO: 3858 - DNA, 735 bp, Avena sativa
ataactaggacacaatgtgagcgtcgctcagaaccacgggtgccacgtcggatccatcatgcacaagttcctcgaagataatgcggcttccactagatctgtaacgcctctttggacagactgaggcggttctgttgtgttctcttcctcgtcagcaagatagtgtggtgatattgatttgatacgattgatgacgtgttccacattgtttaccaccttatgctggaaatctaatggattgatcattccagcagcaactggaacagaagggatgccaagtggccttcgccatgaccaagataacagttcgtcgcggaaaaacatagccagatgatgccatatgtgttgggtttgtttaggtgaaaccacagactgggcagcagaacacatggcagaaacaatgagaccttcgacgccaaaatttgagaagaaagcttgcatgttgcgtgtcagcctaaatggaactagctcattgaactcaatcattccatttggatcataggctggatggaagtcagtctggaagatcttcccagtatttttagcaaacagaattttgttaggagccctgccaccaatctgcaacatgtatgacatgaagcaggacagagccacttgggtcgcaaactgtttcttgaagtccagaggtggttcccagttggcagaatcttgtgcatgtactgggagaagatattatcattcacaattatttttagtaatttcactgtatgcttg

SEQ ID NO: 3859 - DNA, 577 bp, Avena sativa
cttatttgtagggtttgccttgtgctgcttcaaacacatcataaccaattaactactacaccggcggcaagacccatactgaccgaactgaaggatattctttacggtagagtaaaggactgcaaggatacaataggtttcaatctcgccgcgatggatcatatgaaagaactgttggcgatgagatcagacgcgccgttccgagacgccaaggcgaagctgatggagatcaggcaggagcagtcgaagcggtcgcggtcagataggtcggttggcggagataaaaggaaaaagaagaagcccaaggcgtcgtctacacagagctagtccttgcgctagtgcaaagcagtattttgtttgtttcttacttcgcagctgagctgttgtagcatacgcacacacacactatggattgacgtgttcatttccttccgtggaggatgagcacagcggaattttgacagatgatgagtgtaaaatcagaaggtctgttggctccagaagttaggtgtccatgaatgaatgatatgatgcagaaatcctggcacttatattgtgtaacttactaggacgaaaa

SEQ ID NO: 3860 - DNA, 633 bp, Avena sativa
aaacgatagacatatctggaaaaaacatactttcattaacatatatgctttctggccgtcatctacatcgtcttatctataatactgctttttttcctttgcaaagtgttttcgaggtaatgcctataatactgttgccaactaaatgctcggtttacttccttgattttcgtgtctaaaaacaaatactccctccgacccatattagttgacttggatttctcaaaatttggatgaatctatatactaaatagtgtctagattcatcaaaatttaatattggtcggaggaagtaaaaaatctgcatgatcatataatttctgctagacatttctggtggccccaacatgatgtatgaaatttcaggtatcccgtacctcaacaactagcgcgaagtttgcagccttatttggtcacaagaagaaatagtgctctagtatttgctacaagatcttatgtatgctggaaacaagactcgcagatgacatgccagtgtggaaacatctaaatgttactatttcttttcagaaattatgttccttttgctattatcatgcaccaatgctactgttggtggctgattagattagatgattccagataacttatgaatgaaaattactctaccattgc

SEQ ID NO: 3861 - DNA, 619 bp, Avena sativa
ggagcgccggggtggtgatgtacgtgctgctctccggcggcgcgctccccttcggcggcgagacggccaaggacgtgctctcggcggtgatgcggggcagcgtcaggttcccgccgaggctgttctcggggtgtctccgttggccaaggacctcatggaggcggcatgatgtgccgcgacgagtggcgacgcttctcggccgagcaagtcctacgccacccgtggatcgtgagcggcggaggaacccgagcgatggagcagccaacctgattctgaagtcgaccagagactcagagagttagtccatgacatcggctggagatcttcgacagtccggtagagaagtagagatatcggcgagacggacacaccggccgagccgaggatgtcagtacggtttttgtaaaatacaacgctgcgcagatgcagtagcatctcgctacggcggtagatcttagaagaaggagcagcagtactagctcctctctgggcttgtgtttaacccatctggtttaggctctgctccatctttatctagaagagcgccttcttcctttttttttcttgtgtgtgctgctgcatcatgatgcatgatgatgcaggatctaggctgttgtgt

SEQ ID NO: 3862 - DNA, 806 bp, Avena sativa
ttctaccagatggtaccgtgctccagaggtgctgctgcaagcttcagcttacacaccttctatagacatgtgggccgtcggtgcgattttggctgagctgttcacactgtctccactattccctggtgaaactgagacagatcagctatacaaaatatgcactgtacttggtaccccagatcactctgtgtggccagagggaatgaacctgcctcgctctagcagcttccaatttttccagattccaccaagaaatctgtgggagcttatacctaatgcttctttggaagctattgacttgattaagcaactttgttcctgggatccacagagaaggccaaatgctgagcaagcactacaacatccattctttaatgttggtaagtgggcaccaaggtctctccatgataattccttctcaaggatgaatgaatctagagcaagtccaaggttggaactggacctttggggctttggttcagaatctgatggccttgatctaactctcagcctaaagccaagttctgtatcagatcctaataagcatgttccagaacgtagagaagaggaaaacctgctatattcaggattcggaaatcctcctgtacagccaggtttgtggcctctcatgtcctcatcacatcgccccattggtgatgttcaggccatgccatcctggcatcagacatatatggctgacagccaatcagcagctctgccagctggtggaggattctcgggctctcctttcggtctgttccctttgcagccgaacctgatggagagccgatcattggcgccggcgc

SEQ ID NO: 3863 - DNA, 645 bp, Avena sativa
tgctgcctttgtacactcaaatcgcgataaggtttgcggaattgcatgacacttccctcagaatgcttgccaaaggcgtgattaggaaagttgtagactgggaagaatctcggtctttcttctacaagagattacggaggagggtatcggaggacgttcttgcaaaggagattagaggtgtaattggtgagaagttttctcacaaatcggcagtcgagttgatcaagaaatggtacatggcttctgaggcagctggagcaggaagcactgactgggatgatgatgatgcttttgtcgcctggagggagaaccctgaaaactatgaggagcatatcaaagagctaagggctcaaagggtatctcagttgctctcagatgttgcaggctccagttcagatttacaagccttgccgcagggtctttccatgctactagagaagatggatccctctaggagagcagagtttattgaggaagtcaagaaggtccttaaatgatcaaatgataccaacacatccaatacagaatgtgcatgatatctgttttctcttgaagtacatatatagaaggataatagctaatatgggccaaccattgtttttgtaaacttgttggtggtctatgtcattcaaggcacaacttgct

SEQ ID NO: 3864 - DNA, 949 bp, Avena sativa
aatcgagctggtaccctgtcttcaagataactatgcgtacatcttgcatgatgtggatactggaacagttggagtcgtggatccttctgaggcgatgcctatcataaacgcattggaaaagcgaaaccagaacttgacctatatattaaacacccatcaccactatgatcatactggtggaaatttggaactgaaggcaaagtatggtgcaaaggtaattggttccgagaaggataaagatagaattcctggcattgacataaccctaagcgacggtcacacgtggatgtttgccggtcatcaagttcttgtaatggaaactcctggccatacattaggtcatctgagcttttacttccctgcatctggagcaatattcacaggtgataccttgtttaatctatcttgtggaaagctttttgaggggactccagagcagatgcactcttcactccagaaaattgtagctcttccagatgtgacgaaggtgtactgtggacatgaatatactctgagcaattccaagttcgccttgagcgtagaaccaggaaacgaagaacttcaggaatatgctgcaagtgcagctgatctccgcaataagaatacaccaacggtgccaacaacaattgggagagagaagcagtgcaatcccttcttgaggacttccagtccagagatcaagaaaatgctgtcaattccagatcatttcgatgacgcacgtgtccttgaggttgtccgacgggcgaaggacaacttttgactaactacaaagacaattcccataaaaatggtggtccagctatcttgttgaagagagaagcggacaaagaaccccacaagacccccaacagaaggaacacagggaggaaatgtgtatagcttgatgttcctaaaattgttggtggaaaattgcctcgcattgtatgtagctctgcatagtgcttgttaa

SEQ ID NO: 3865 - DNA, 851 bp, Avena sativa
ctttgaaggaaccttcttggacgattttatacggcaatctctactgcctaaaactctgcccatcaatgcagacacccttaagatgttaaaagatgatgataggaaagttgttcttacggttgtggaggacgaatccgatgaaacttcaatgcagttgataaaagttttgaggtctgcagccaatgcaaaccatgatctagtgtttggatatgtgggggtcaagcaatgggaggaattcaccaagcctttccatgattctaagagctcacagctgccaacgatggtagtctgggacaaagatgaggattatgaagtggttgagggttcagagagtctgcaagaaggtgaccatggatcccagattagtcgcttccttgagggatatagagctggaagaacaataaagaagagagtgggcggacgttccccaacactgctcggtgtgaatgcactgtacatcctcctcttcttggttgctgttcttgttgccctgatgtttttctctgggcaaggcgaggaagatcgacaaccaacacgagcccatcaagaataaacacatgtagaagtttcctgaaccagattaaacttaaaaggaattcctgaaggagaatagaagcatgttgtagagggggtaacacggagttgaggataagtttctgatttttttccatttgaaatgccctttggtaggcatcgttttgacctcccatttgtctgacctggcagttactaactccattgtctagctatttccattttcatgtgaatttgtcaagttgcactcgagaagcggtctggtttgattatatccaattacaggaggaaaaggctagctggcacgctgcgataga

SEQ ID NO: 3866 - DNA, 800 bp, Avena sativa
agcaagcaaacctaaaccggaagtgaacgccaaggacagtacccctgctgcgaaggacgggcaagttgtaactccggcgatacaggaagatgtgaaggagggtcagccagaagatgaggaagggcttcctgtatatccgtatgatcgtctgaggacatcttccaccaatcctgccacagacattgaccaagcaaggcgtgagacatatctatcttcggcagagttcagggagaagtttggcatggcaaaggaggctttcgcgaagctaccaaagtggaagcagaataggctcaagatcgcactacagctgttttaaaatgtgttgtacaggctgttattctctgcttagaggttggttttcaaaggcaaatctcatgcagcacacaggtacttggagatctcgcttgcactggctgtagtgctaagaagaaactttgtaaatgttagcctatatgggtcaagggacccttggtgggcgtcggaagcagtaagtttttagctgtttgtgtccccgaattgttctgtttgctgacggattttttatgtctcgtgttggatcgccgcattggcggtcccgatacacaccaattctttagattctgttccaagatcaccggtttggttgtgagcttgcaatgctatgatacctcacatttgtttaattcttggtttgatgagacaataatgtcacagatatatgatgtaaagttaggcaaatgtaatgaaccagggcgaaagcccttttgtcacaaaatttaggcagtgaatgaatgggaaatggtgtcttgcactttagaaaa

SEQ ID NO: 3867 - DNA, 644 bp, Avena sativa
gctaagatcatcggtgtggacatcaacccctgaaaagttcaccaaaggcaaagagatgggcatcaccgattttgtcaactccaagacgtgtggcaagcccgtccacgaggtgatcaaggagatgacggatgggggcgtcgactacggcttcgagtgcacgggcaacctggatgtgctacgggagacctttgtttcaacacacgacggatggggattaactgtgatgctggggattcatccgacgcctaggatgttgccgctgcatcccatggagctcttcgatggccgtcggatcgtcggctccaccttcggtgacttcaagggcaagacgcagcttccgctgctcgtcgaccagtgcatgcagggggaggttaagataaacttcgatggcttcataacccacgagatgccattctcagagatcagagaggctttccggctgctggaggaaggcaagtccctgaggtgtgtgctgcgtctgtaatgggcaccccaagggattggagaataaaagtgctctacgggtggaatttgctgtgcttgttagttgttactacttccatgtgttgtacatcttgtataaattaaactgaaggcatcgtttacttaatgaaaaatgcaaccttctttcaaggagaaaaaaa

SEQ ID NO: 3868 - DNA, 824 bp, Avena sativa
ccagcgttgagcccaaatgaggaggacattcctcatggattcatatttgccactttcatgctttcatctatgttgggtagctccattgcttcacgcctattggcccggaaaatgaaggtcgaaggttatatgcagatagtgttttcagtatcagcagttacccttttcctccctgttgccaccagcttcctagtgccatcttcagacaaaggaaatggcatctcgtttgcaggctctctacagctgcttggtttctgtacctttgagtcatgtgtcggcattttctggccatccatcatgaagatgagatctcaatatattcccgaggaggcaagaagcacgatcatgaatttcttccgcatacccctgaacctgtttgtctgcgtggtgctttacaatgtgaacgcattcccgatcaccgtcatgttcggcatgtgctccatcttcctcttcatggcagcaatcttgcagagacggctaatggttgtcgccgacctacacaaactatcaacaaaagcacaagagatgactggggaagacgagccactaaatccttgaaaggccaagagaatcgagagcaaaacggacgaacaatgatgccatccgttgatattcctgagccttttctacctggcggctgaataagatggaagtgagaaaaagcctggagtgggtgatttttcttgtaacttcgtttatgtagtgtagatcgattattgttaggtgcgaggacgatacatatagctgagcaagtattaagctacacgggctgagataagggagtttatgagtgaattggtggtatatgctattcatgtgtcatt

SEQ ID NO: 3869 - DNA, 765 bp, Avena sativa
agcacattattcttgagtataacgaaaacaaaccagtgacaaacagcagagatacacaggaggttaagcttgagcatggccttcaggttctaaagattttcaaggaccatgtctgcaaaacatccgtgttggatgactttggcttctatgataaccgtgagaagataatgcaagagaaaaaagccaagagacagcagccgctggtgaagataatgaacggaaagctgcttgctaccaacaacactggaactggagatgttgacgggaagcaggggctgcaggaacctgcagttctaggggagcaaaatgctgctgcggaaaacggcgtggcgactggagctgcaaacggtgttgccccaacagatgcaaacccggcagtggtgacagtgggctgttaatttttcgctgctcaagtcgtttgagcatccatgcaaggaggacaatcttatacagggtgcagaaagctgatgtggttggaggcattcgaggttctgctagttcgatatgctttgtaggttgcagaaaggtgcaagtctgaggcaattcaggatttcaattagaggcttccggttgttctcttcttatgttgtattttcgggctggtagggtagagatgggttcttgttctggcgagatgttttctttctgaaatggtattaggaattgtacctaggggtttgagatctgtaaggcttttgaaaaccaataaaagatttgtggtgcatcctctattttggaagtggatgctagtagtttactaaaaaa

SEQ ID NO: 3870 - DNA, 510 bp, Avena sativa
gtagaccatcaaagtagttgaaaagacctctgtcaaggataactcaacaaaagatattgcagcttcagagagttccaatttgggtgacaattcagctggcaactgtaagctaggaatggatattaatacaaagtctgctgattcagagaaaactatgccatttttcatgtcaaaagggtggagagagactctatgtaaatgtggaacatgcaccaacttctatgcacaacgaggcattgcacatcttactgataaggatgactctattgaggaatatgaaaagatggctaagcagaaaaggaagaagaagttggagcagcaggaaggagctgaagctaactttatcaattcacttgaccatgtccagaagatcgagattttgagtggcatcaatgacatgaagaatgagttccagtcctttctggaatcccgtgatccgtctaaaccagtcacacctgatgaagtcaatctatatttaagaccttgctaagaagaaacagaggataatct

SEQ ID NO: 3871 - DNA, 890 bp, Avena sativa
ttaagtattggcccatcacaaatagctcaaaggaggtgatgtttttgggtgagttagaggaggtattggaagctactcagccagcagagttccagagatgtatggtgccgcttttccgacagattgcccgctgtttaagcagttctcatttccaggtggcagagagagctttgtttctgtggaacaatgaccatattgagggtttgatcaaacaaaacagcagggtgctacttcccataatccttcctgcgttagaacgaaatacaaaaggtcattggaacccggcagttcaaagcttgagtcttaatgtccgcaaaatattcctggaccatgaccctggactgtttgaggagtgcctcaagaagtttcaggacgacgaagctcaaggtgctgcggtaagatcaaaacgtgaggctacatggaagcgtctagaggaaattggcttgtcaaatctgcaagcagcgaggcccgagacaacggttcaccagcagagttctacctaacttgcttcctgacttgcacacgagccgctccctttcgcaggatggagttaaatcgctgacatgaatgcgcatggatggatgactgcttgccttttggttacctgttcctgaacatcttacaggctgacatgtaaatacaacctagatgaagaactgtgaagctttggcgctgctcttgtgtttcgtcggttggttgttacgggatcgtgaattcagttccattgctgtggaaccaaggaaaggatgcaaattacctgtcctgggctacatgatgtgtatgtcctacaacaggtcaatgtggtgcttgcgcttgcttgttgaaggtgatttgctgaatgtaatgcattatgtacggacgacttcgagttatgycttggtaatatgaac

SEQ ID NO: 3872 - DNA, 580 bp, Avena sativa
aaaagtgtgcgaaacctcaatggacacagcattggaccataccaaatccatgcagggaaatcagttccaattgtaaaaggtggagagcaaacaaaaatggaagagggtgaattttatgcaattgaaacctttgggtccacaggaaagggattcgtgagggaggacttggaatgcagtcattacatgaaaaacttcgatgttgggcatgtgccactgagggtagcgaaagccaagcaactgctggggacgatcaacaacaactttggaacacttgctttctgccgccggtacttggaccgcatcggcgagaccaagtatctcatggcactgaaaaacctgtgtgacgttggcattattcagccgtaccctccgttgtgcgatgtgcgggggagctacgtgtcgcagttcgagcacaccatcctgctccgaccaacctgtaaggaagtcatatccagaggcgatgactactgatgggcgctgcagctcctctttgtaccggttgctcctggcatggtcattttgcacctgttaggcaacctgtgttttcccgctgaatggcacatcacatcagaggcatggt

SEQ ID NO: 3873 - DNA, 935 bp, Avena sativa
aatgtttgtctgagtgatgacatggaaactaacgagtgtctgagtgataatggaggttgctggcaagacaaagctgctaatgtaacagcttgtagggacacttttcgtggcagagtgtgtgaatgcccaacattcaatggtgtgcaattcaaaggagatggctacagcaactgtgaacctgctggaccaggaaaatgtttgataaaccatggtgggtgttggcatgaaactcgcaatggaaaaacattctctgcttgtcaggaatcaggaaatggagattgcaagtgtccagctggtttccgaggggacggtgttaaaaaatgtcacgacattgatgagtgcaaggagaaaaaagcttgccagtgtcctgaatgcagctgcagagatacgtggggtggctatgaatgtacttgcagtggagaccttttgtacatcaaggagcatgacacttgcataagtaagacatcagttcaggctaaagcagcatgggctgccgtgtgggggatcttggtagcgttggctgttttggcagcaggaagctacatggtatacaaatacagattaaggtcatatatggactctgagatcagagctatcatggcacagtacatgccactggacagtcaaggagaggtccaaaatcattcacaggaagatcatccataagagtgtgatttgcagatcacatcatggaacccgtacaactgacaggcagaaatgtgaagctcgcgcaacgatgagaacatatacagagaatgtattcagaggtgtatgatggctagttgttaagagtcgacatgaatgtgtgattcacctgctaattcatggggagcactttcaccatatatttggtggtaagctccatttacggaggtgcaccaacttgtggacaatgaatttttggtgtggttcatgcgtagtggaaatggaatcta

SEQ ID NO: 3874 - DNA, 771 bp, Avena sativa
cctcaacagagagtttggatctaaacttaaagaacacatgcagtactgtgtagaccaccccgaagagataaacaagctcgctaaagtgcaagcacaagtttcagaagtgaaaaacgttatgatggaaaatattgagaaggttcttgatcgtggcgagaagattgagctgcttgttgacaagacagagaatctccgctcacaggctcaggatttcaggcagcaaggacacaggtgaggagaaagatgtggctacagaacatgaagatcaagctgattgtgctcggcataatcatcgcactcattctgatcatcatcctgtcggtgtgccatgggttcaagtgcagcaactgaagagggcgagattgtctgagaacacacattcaactgtcactatattactctgctgctgctgcttggagcaaaaaacccatatggtgttttgttctttcttctctactagtgtgctctggcctggttcgtggtgcctttggggttggtgtttacgttgtctgtctgcttgatgctgctggatggtggttgctgggtcagcgggtcgtgtatttttggtgaatgctatgtatagcttggatcttgacacctttgctctattattatatgatgagtagatttacttaattcgcgcgagaattgtgtgtgcttggttctcattgtcggagctctggctccactagcctggctttcacgagttgctgtcatccggtgtagtgtgattttcatcgttgaaatagtcaaaaatctgtgtagtaaaaa

SEQ ID NO: 3875 - DNA, 323 bp, Avena sativa
ccaatcacgaaagggaagcaggaaactagccaaaattgtgatgcttcttggctgcatatttgggaatgggaagaaaaacaagcgcaaatgtgtggtcattatgttcttgtattcttctgtttactgtaagctaacagattttccatttaccaagatgttgaatgtatagaaagccagattagcagccaatttgtagatgtgaaatcccatggcagaaacaatggttgtgaccaagggacaacatatgtaattgtatacaagaagcataataaaaagaagaataaaaagtggctgcacacagctaatttttgcgacaaaaaaaa

SEQ ID NO: 3876 - DNA, 754 bp, Avena sativa
gtcgcgccggagctccagcccggacagcaacgtcgagggcggcagcgggagcggcagcgccggggacgagcgcaagcgcaagaggatgctgtccaacagggagtcggccaggcgctcccgcgcgcgcaagcagcagcggatggaggagctcatcgccgaggccagccgcctccaggcggagaacgcgcgcgtcgaggcccagatcggcgcctacactgccgagctcggcaaggtggacggcgagaacgccgtgctccgcgcgcgccacggagagctcgccggccggctgcaggccctcggcggcgtcctggagatcttccaggtggccggggcggccgtcgaaatcccggagatcccccgagacccgctgctccgcccgtggcagtcgccttcccgccgcagctcgcagctgctggtgccatggccgacgccttccagttctgagccccaagaagagtactgcttcctactagtactcctgaagaagaagagaagagtactactgctactactactggcttctctggttaatgcttaattatggtttggttcatgtttcttatggcaattctagacctatcattgataagtatttcgttgttgtaatcttgtctatcatgtcatggtgctcctacccaaaatgtgtcataggaatttcctatggatggataacaactgattgatttgtgggggagcatatggatggttgtaataatatgtcctgacatggaaacttatatatgtctagaccaaa

SEQ ID NO: 3877 - DNA, 720 bp, Avena sativa
agctctttgacagcgatatccgacggctggagcatgtcgactcagctcgtagaaccgccaggcatgctgttgcagccattttggagccttcgaaaactagggacgtcgattacctaccattcttctactccagagtcttcacattgtcctggcagttctacggggataatgttggagaagtagtccactacggtgacttcacaagcagcagcacaaggttcggcgcctactgggtcggtagaggccagatcacaggcgcgtttctggaaggtggaagccgagaagagtacgaggcgttgtcggttattgttcggcgcaaaactaaggtgtcagacttgtccgaacttgaaaaacaaggcctggcattcgccatccaggagagcaagaaagacgtgcccgacggtggggttacccttggtgaaaagcctacttttgtgtggtatgcaacggcgggggttgtcgtggctgtgtcgatctccgcatttggttattggtatggcaggaagcgccgcaggtggtgaattttgggatcgcccaggttgagctgatggaagaatggaggatctgtgacgtgctattgtttacggttacttggagggaatcaaatcctgtataaacctgtacgaaagtgtaatctctgtctgatatgtatacaaatacggatcatataatgttaaatgaaatgaatatgagatgatgataactaaatctcaaaaaaga

SEQ ID NO: 3878 - DNA, 909 bp, Avena sativa
ccactccgtctcttcaacacttgggttcatgtctccagcttcgagaggaatgcttcttaccgggatgattattctctatcttttcctcggtattgcagctgggtatgtcagtgttcggctatggaggactattaagggaacgtctgaaggatggagatcattgtcctggctgactgcctgctttttccctggtattatgttcattgtccttactatcttgaacttcatcttgtggggaagcaacagcactggagctttacctatttcgttattcttcacccttctggctctgtggttctgtatctctgtgccgttaacgctcgccggtggcttccttggtacgagagcggagcaaatcgaattccctgttcgcaccaaccagattcccagagagatccctgcacggaaatatccatcatggcttctggtccttggagcaggcacgctaccatttggaacgctgtttattgagctgttcttcattctctcgagcatctggcttggaaggttctactatgtgtttggcttcttgctgattgtcctactgatgctggtcgttgtttgtgctgaagtatctgttgtccttacatacatgaacctctgtgtcgaggactggcggtggtggtggaaggctttctttgcatcgggctctgtcgctctctatgtgttcctctactccatcaactacttggtctttgatctccggagcctgagtggacctgtgtctgcgatgctttacatcggctactcattcctcatggcattcgcaatcatgcttgccactggaaccatcggcttcttgacatcaatctccttcgtgcattatctcttcgcatccgtaaagatcgactgatggatacttggtatatccaaacggtccttttgtatttgtattgctagagtgtgcgc

SEQ ID NO: 3879 - DNA, 869 bp, Avena sativa
ataatcaaattgaaggagaaatataggttccgtgttattctggaggagagccattcatttggtgtgcttggaaagtctggacggggccttgctgaacattatggcattccaattgaaaaaattgatatcatcactgccggaatgggaactgcattagctagcgatggtggcttctgcacaggaagcgccaaagttgttgatcatcagcgtctaagcagcgctggctatgtcttctctgcctctctgccaccctatcttgccagggcagcaatttctggtgtcaactacctagaggagaatccttcagttctgaccaagctaaggagcaatgttgctcttctacataaaggactgtcagatacacctgggcttcatatttctagccatgtcctgtcacctatcgtcttcctcaggctgaataaatcgacaggctctcttgccactgaccgagatctccttgaaaccattgcggagaaggcattgaaggaagattcagttttcgtcgtcccattgaagaggtcaagtttggataggtgcaagctcccggttgggatccgcctgttcgtatcagcgggtcacacggaatcagacatctcaaaagtgtgttcatccttgaagagggtttccgcggaggtcctttcagaccacagttgatcatgcgttccctgcaagacaagaagagacattggttgttttcgctacactgtgtacgctagcctgagtgtggttggcttatctacataaaaattatgtacatgtctactatatgtgggtatgcatggggcacaagttcggcgccatacatcatccatgccgccgctaataaagtgctatgtttggtgttggaatattcagaactctcgcccaaa

SEQ ID NO: 3880 - DNA, 743 bp, Avena sativa
cgaagctgaattcaaaagatctgagctttgtggggtatacatacaaaaactttgatgcagtgaaaggattaaaacatgcagatatgcaaaggagttcatcgctaacaaggccctccattggtgctatatttggttcaaatggcatggacacatctagagaaccaaatggaaaggacacacacatgcacacaatttcttctggggatgcgatgagtccataaccgggcatggttctgtttgttcctgagagttttctgagctaaattagcatgcaaacgactgaatgatgtggcttcatccggacaacctgcttgtttttagccaggtttctgccctgttaaatcgttggcgagcattttgtagaaatccaacaaagcttctagctgtaaaatagtatgctaaggacttgacaaatagcccatctactgggaaggctcgttgtgtttggtgtagcgtgttccgaccaagtggagatgggcatgtttgggagtatttgcaccttggggctggctgcccaggttggcagagcaaattgctgccttctcttgtggcagttcctggtccgctaacatttgatcctggaaacaaataaggtggtaattgtggcaggctaagctattcttgttggtggtgtttgatacatgtgtaccagataatttccattcagacgcttggccattgatctgtggtctcctgttgcagaaatgccttaattttttactgtatcagcccttatgtcacat

SEQ ID NO: 3881 - DNA, 639 bp, Avena sativa
tcctacttcaacctggtcctcgtcaccaacgtcggcgggcccggagacgtgcactcggtggccgtcaagtcggaccgctcggcggcgtggcaggccctgtcccgcaactggggccagaactggcagagcaacgcgctcctcgacggccagtgcctctccttccgcgtcaccgccggcgacggccgctctgtcgtctccaacagggccgtcccccacggctggtccttcggccagacattcagcggcgcccagttcgcctgaaccttcgccagcaccgtcagtccggcgtagtactgttatctactagtagtagcaagtagtggttatcgtcccgattggagcgtgctaggaagcgccatggttttatggttggttcttcctcgagcaatttacgttcttcggggattagtagcagtagcaggtagttaggcctagtattatcatgggcttttaattctcctggcgtgccagtgtgttagcaggagtgtgagccgaagcatttgaacgagcttttggctaggatggcagcggtggtaaaggatggctccattaactagaagccgccttgtatcacccgccaaattagcgattcggcctcttggatgatggccttgtctcgaggatgcctttgtgtggtcc

SEQ ID NO: 3882 - DNA, 435 bp, Avena sativa
tacaaagtctggtgcaatgcgtagttttcttttgtgggaaatagaaacgttgcgccatcactacacacctgcagtttctagattcgttgactcacttgaaaatgatctcactgtacgtgccaaaacaactgagatgaaaataacagactttagttctggctcgtatgcaacagttttccgagatgaggtgcggcggaggataaaacaagttccacttgcgttctacagaacgacgccaacatctttatttcaagggtcggattttcctggatggtcctcggagtacaagccgaataaaatggcgcaggctagcttagaaggaaatgaggtagagactagtgacgcctcacctgctaaaaggtctcgtgttttgacttgagtaggccagacagacagggtgttgtaacatttctctgcaagtgctgctagactgtt

SEQ ID NO: 3883 - DNA, 833 bp, Avena sativa
cagaggaggttttgattggaaggatctcgactggtgctcagaatgatcttgagaaggttacaaaaatgacatatgcgcaagtcgctgtatacggtttcagcgacaaggtcggccttctatccttccctcagagggaggatggcttcgaaatgaacaagccttacagcaaccagacagcatccatcatcgacacagaggtgagggaatgggtcgccaaggcctacaagagaaccgtggagctgctgacagagaagaaggaacaagtagctcaaatcgcggagttgctgctggagaaggaggtcctccaccaggacgatctcaccagggtactaggagaccgccctttcaaggctgttgagctgacgaactacgacctcttcaagcaagggttccaggacgaagagggcaagagccccgaagagcctgccaaggacgccgaggtgcccgacgacgacgggtcgcccgcgctttccgacgtcgttgtgccgacgtgattttggcgaaaaataaaaaatctactactacagctgtacatggcacgcgctcatccgataggcaatatcttgttctgttgcagcagcataaaggaaggaaaactgtataaatcagctcgccctcgtctgaatcgatcaccatcacgccggctttagtaggtgtcgaggaaatgcggtaggcgtttccgtggccggcgtgagtgaccatgttgtgagccgctggtcgaggttcgtgctcagaagctttgtatcgtggcccgtccaccaaaacgttttgacgaatcctgtaattttctcttgatgatgattttatcaaatgttttcgtccactagaaaaaa

SEQ ID NO: 3884 - DNA, 723 bp, Avena sativa
attcatacatctacgaatgcagcatttgctcctaaagctattgacttggcagccagagaactcacttccctcgcgactcctggtcaagttgaccaaacccagctagatcgtgctaaagcatcagctaaatcagcaatcttggcgagcctggattcaaaggcatcagcaactgaagacatggggcgccaagttttggcatttggtgaaaggaaaccggtggagcgccttcttaaggctgttgatggtgttagtctgaaggatgtatcaactgtcgctgagaaaatcatctcatctcccttgacaatggcatcccatggaaacgttctcaacgtaccagcttatgagacggtgcgtggcaagttcagctcgaaatgagtatgcttctggtgacaagttaactgttgatatttttttcctccaagatcatttctggtctcattttcacagaaaataagaaacgttacaaatttttgaccgttaactcctactgcggggcactttgggaatcttattcttttgcagaacatgtatccacttgagttggtggtgtaatattgttcttgtgagttgttcgcttgtaaatttagtcaaatcatgcatgggtcctctttcgtgggcagtctggaagagtgtatgaaacgttccttcacttttttgataaatcgttgaaactagtttttggaccatggaaattaataaattccctgtatgataggtggaaaa

SEQ ID NO: 3885 - DNA, 903 bp, Avena sativa
gatggcactcatgtaactggagcaaaaattgggaaccgtttgatggcagaggcagaaacaaacttggcaattaatgttctgcctggacaattgtcagaatcttttgaagttcaaggaaggggagaacttcagttaggaatcttaattgagaacatgcggcgtgaaggatttgagctttcagtttcacccccaagagtaatgtataaaacagagcgtggggaaaggctagagcctattgaagaagtaactgttgaggtggacgaggagcatgtcggatttgtgatgacaacccttaacaacaggaagggtgaagtggtggacatgggccctgtccctgggacaatgggaagaactcgtatcttcctgacctgtccatctaggggtttggtgggtctcaaaggaattttcaacagccatacacgtggaactggatttatgcatcgtgctttccaggcatatgctaaatacaaaggtcaactaggaactgttagaaaaggagttctggtatctgttggcaagggatctatcacttcacatgcactcatgagtttagaagctcgtggtactctttttgtctctcctgggatggagacatacgaaggaatgatagttggcgagcattcgcgtgatagtgatcttgagatcaatcctgtgagaactaaagaacttacaaacatccgagccccaggaaaggatgaaaatattcgcctgtctccacctcgcttgatgactttggaagaggcaattggatatgttgctgcagatgaactgattgaggttactcccaaggtcatacggcttcggaagaaatacctggatgccaacaaacgcaagatgatgaaaaacaaaattgagaaatgaagcccagtggctccgtatcacattagtactgctaacacaact

SEQ ID NO: 3886 - DNA, 866 bp, Avena sativa
cgggcgactccgggaagctgacgacgcggcaaatcgtggcgagccggctcagcgggtgcagaagggtcacttgccaactaattggtgttgtttttgaggagaaatctcctgaggaacttcagaaacaagccactgttaagccctcagtagtggaactactactggagatatccaaatactgtgatttttatctgatggaaactgtacttgatgacaagagtgaggagaatgctcttacggccctggagaatgctgggcttttcaagactggtggtttgattaaagaaaaggtactcttttgcagcagtgaagttggccgaacttcgtttgttcggcagttggagtcggatttccacatcgacacaagccttgacataatttcacaactctctcggttcatccggtgccaactattcgtttcctcggtggaaggaggacaactctccatcaatgtatttaattctccgagccttgagcagttcttctcatgaaaacgtcaggaccgagaaatcaaaggggtttacgcgctaaacgtgtgaaccctgacagcgcatcccttgaagctcagagatttacttcaatgatactagcttggcagtagaaccctcggataaacaatgcggcatgcactgttgctgatcatttcgctgcagctggttgcccgatttcagttgatctcattggtgtgctgggtaggtaactaggacgatataatttagatgcctgtagttcatggtcaggcaccgatatgttgtaaattaaatgagacagattccttctcttatttatatgtaaaggacttgttcagcagtttgtggagcgaactagctaagcattccagattgaagcagaagcgatgtacctga

SEQ ID NO: 3887 - DNA, 881 bp, Avena sativa
caagtctagtaagcaagcaagaggctgcgattagaagggagagagcactcgcatacgcattttcccatcagtggaagagcagttcgaggtcctccaacccaatgtttgtagacccaaacaacccacactggggctggagctggttggagcgctggatggcagcaaagccttctgaaggtggccgaacagggactgccaaggaaagcaacggtgaccaggtatctgtgaagagcttaagtctgaaccttggagagggtgagatcacaaaagccttcaaaagtcggagcatcaagccagacaagtcgtcgccgacgactccaaagctggcccgcccagcctcccggctatccccatcaacgccctctgccaaagtaacaccaatcgttgtgaagaagaaacccgctacaccaaagaacgggatctcgcaggtggatgacgacgcaaggagtgtgctcagtgtgcagtcagagcgaccaaggcggcacagtatagccacctcaactgtgcgggacgacgagagcctcgcaagctctccatcagtgccaagctacatggctgccacaaaatccgcaagggccaagtcccgcctgcaggggtcgccatcgatcgatgccacagagacaacaccagagaaagtagcctctgttgggtctgtcaagaagaggctgtccttcccagctggtgcggcgtcgccgatgaggcggcattctggtcctcccaaggtggagattctggtgaaggacattgctgagacaccacagccagaggccctggcgatcagcgggtgaaacacgtagctatacaggtggcgacagggggctatggttatgcagatacacaaacttcacccatgagcaaaggttaaagttctatcagatgta

SEQ ID NO: 3888 - DNA, 677 bp, Avena sativa
atcgaagggagcctgatgcactgctgatcatcaacctacctgagggccctactgcacatttcaagctatccaagcttgttctgcggaaggatataaagaaccatgggaatcctacaagtcataagccagagttagtgctgaacaatttcactacacgccttggtcatcgtgttggaaggatgatacaatctcttttttcccccaagaccccaatttccgtggccgacgagtagtgaccttccataatcagcgagactatatttttttccgtcatcacaggtatgtctttgaggagaaagaaaaaaggtggtctcgaaggacaagaagccaaggcttctgaaagcaaaccgagaagcacgtgaattgtcgccttcaggaatgtggtcctcgcttcactctcaactgatcactttgcaacatgggaccttcgacacaaaaagcggagagtacgagtgggttcacaagcccgaccttgacacaagcagaagaagattcttcttgtaattgttgtctttgcttcaccatgcgaaccgtttgtttctgttcctcggaaaattactgtagagtagtatgcttgagtcctccaatgtaacagtactttttttttgcgaacttcgagcgtaacagaacttaaatccactattttaagctaggtttttttttttgtaccaaaaaaa

SEQ ID NO: 3889 - DNA, 463 bp, Avena sativa
tcggacactttctaagctgtagttcttgtactctacagacgtgagatgcatcaactttcgtcgtcacaaagtatggtgcagcaaatgtaacatatgagtgcagcaaatataattgagctgagaaactgagtaattgcataaagtcaccttgtagctcagttctatgattagcttccagtagacagtactatacgagagggcggacgttatactataatatagaagttaaataagttcgtagtcccacaaactagaactctgtataaataaattgctctgtttagtcctgcattatacttcatgttcagtgccaaacttggtatgttgagtagtgattcgtttgccttgatggagaaaggaggcaacaagacctgatggctggctgctaaagtgctaaggccgacttttttcagcttatgatttcagagaagctggattttggaagattgtggagagaagctga

SEQ ID NO: 3890 - DNA, 842 bp, Avena sativa
ctctgcgtgaagcagtaattgttggtagtattctcgagaaatgtaccattcctccactccatgcaagcgcggcattaatgaagctagcagacatggagtactgtggcacaactagttactttatcaagatatttctggataagaagtatgctttgccgtaccgtgtacttgatgcagtttttgcccatttcatgcggtttcttgacgatgagaggaacatgcctgttatatggcaccagtcgctgctcgcttttgtggaaagatacaagaatgagctagagaagaaagataaggaaaaacttgcacgcttgttggatcaccagaaacattatttggttactccagaaatccgtagggaacttcggagtagctcaaacaggggtgaaaaggcggccgatatgatgatctgtccacctgtttcggtgatcaccaagccgattgaagaggacaggtgggatattccagaagtacctatggaggacgattaatggcagcggagagcgttgtggtttgctgtgtgaacttcatcggcgctccagttttgatggtagtggttttcctgggcgatttgtacctttttgtctgttgttgagaaaaagagaaatatataccctggtttgtatgaacgattgctatggaagtttcattgaacactcattagagaggagttggaactgagtttgaaatgtaatcatgattctgccatagcatagcccacggcctaaacaaacgtcatgaatgtaacttatcaggaccattggaacacaccaatgatctaatgttgaatgctgctggggatgccctttgggatacaccgtggatgtagtccagtttctgtggat

SEQ ID NO: 3891 - DNA, 750 bp, Avena sativa
gtcaagtctgcaaagtttctttacctgatgggagctgatgatgtaaacttggacaaccttccagaggatgcctttgtcgtttaccaggggcaccatggtgataaggctgtctacagggccaatgttatcctgccgtcttcagcattcagtgagaaagaaggcacctacgagaacaccgaggggtgcacccagtggaccatcccggctgtccctacagttggcgatgccagggatgactggaagatcatccgtgctctttctgaggtcgccggggctccgctgccttacgacagcgtcgcaggcgtgagggaccgcattagcatggtggccccaaaccttgtgcgtgtagacgagagagagccatccacgatctctgccgaggtgaagcccccggtgaagcaacaagtgagctcggctccatttaaaaccgccgtggagaacttctacatgaccgactcgattacacgagcctcgaagatcatggctcagtgcagcgcggccttgttgaagaactgagatctactctacgtctaatcatcggcagacgacgagattgtagttgatttttctgttttgctcggaactccggccggttgttgcttgcttggttggagtataatttggactgcctctagatccgaagagcagcgaaacctaaagcagtgcatttctgtaatgtgttgtgagaagcagagcatacttaataagcttgttgtcctttgaatcatatacaacagccacaggcaataa

SEQ ID NO: 3892 - DNA, 637 bp, Avena sativa
gaagcattgttctaaagtcagctggatcatcaatgttctctgtgccgcaaagccccataggcgtgttagatgctgctgcatgtctcagccaacagagtgatgatactgctgttggatctccagcagcatgctaccaaagctcttcagcaagcaaaaggaggagggttggcagatgactgatctcatgttgtgctatgctccaggtgtgttgctcgccgttttggcatttttgttgtttcaaacacctcaatttagtttgatcactcgagaatcatggcatggtcaagtagttgctggaaagaacaaaaacaccatagacaatacttggcccataaaatcaaacaatttgccgcgagcctattcaagcaatcaacatatgtaaggggcatgctgtcagtgtcccgggatgctagtgtaggcagagaaggaacaaggaatttggatgttgtagagatgagagctctcttgtcctgttttgtatttctgttccgtataaatttccaatgaactttgagcaagggctgctttgatcattgaaggcggtgaatgaaaaggatccgtaaacggatcggtagaggaacataacagtttatattggttttctgagttaaccaaattgtcgacattatatagttaa

SEQ ID NO: 3893 - DNA, 650 bp, Avena sativa
ttgtgggaacaaagcttgatcttcgagatgacaagcagttctttgtggaccatcctggtgctgttcctatcactactgctcagggggaggaactaaaaaagctaataggcgccccatactacatcgaatgcagctcgaagacccaactaaatgtgaagggcgtatttgatgcggcaataaaggtggtgctagcgccaccaaaggctaagaagaagaaaaaggcgcagaggggggcttgctccatcttgtgatctaatcaatcggtagacaaagaagaagggcgaagttgccatgctatattattgttacgtcttgcttcagcggatcagcactcatggtcgtctccaccccaccctcccctaggttactactggcagctgcagcaaggtctttctttgtcgaggcatcgggcgatccatttgtttcaattttcttcttcctgccttgtgattatcgcgcgtgttgactgacaagtcgtggcaattaggtaacttgcttagatggtattttcccgtgtttgagaccccgtaaaaaaatatctcgttgctatctcggttccataagtagagacgttatgatgtaatcgcactcagtttatttttcgttgtttattttcactttcaatggaaaattatgtttcctttctcaca

SEQ ID NO: 3894 - DNA, 857 bp, Avena sativa
tttctactaagacatcacgcttcccattaaatcttcatcagaggatggtaataaaagtttacacagacattacaaggggaatgtaaaggactaaacgaacaacgaacagggataagaattacagaacaaacgaacgcctggtaattgcctcaggttacaagttgctgcacttgccacagttcttaacatgattgttgctgctgctgctgctgctgctgctgctgcttgggttgctcgccttgccaagcccagactatgtccttgagtgctggccgcatgtcttggttcaagaccttctggtactccaaggtatcaccgtttgtcttctttaactccacaagatggaagttaggggtaacctcaaatatctcggcatcgatacccatcacacctttccttcctggcctggaaccttccatcttcaacattccggcatctttctttgtgagctttagtcgcaagcgctttgcaacatcctcaatcttcgacacgatcatcggagctgtgttagtggatgtgaatttggactcactcttcttgtcagactcctcaaacagacctgagaggtcgagtccagttgaaagtgaaattatatcaaaagcattcaggtttgtgagattttttgcttcttgctgcttgcactcggatgttgggttgctgctactcaaggaatcagaagccacggtcaagtcgtcagcaggaatggcatctcttgcttgtaaattatatctgagtagcttcgcatctagacccttcctgaaccaaggatttgtcatgattttttcaattgatactcttgtactagggttaggatcaagaatccttagcagcagcctccgaatatcagtactgaacca

SEQ ID NO: 3895 - DNA, 752 bp, Avena sativa
gctcgcctaatactgtcatcaacagattatactgttggaagggtccctccaccacatttatctccttttgtggacaatgatgaagagggttatgttcctgagtatgcagagaccattaagaggctgcaagatgctgctaaaaacaaggtgttgcctctgcctggtctaggtgatgaagctcaggagaattcgatagtagatgcaagatcagagtataatgaagtggcagaaaagaagaggaagttggagatgctagagaagcagtaccacgaggagttgaagttggaaattgaggggaaaactttctctaatgtgtcaaataagaaggcggatattccagatgatgtggacgagaataaatctgaggaaggtaatgcgagtgattctactaaacaagctgcggacgatgctgctgaaatttcgaagtctctcatgtccaacaagaagagaggccttcttgaagcaatggagattggcaaggaaaggaaaaagagcaaggttgcgctcctgaaggataggaaaaagaaggccgaatccagtgcttctgctaagaaacgtagctgatgcacggcatgttgtatctgttttgacgcgcttttaccagacctggtttgtactgcatctgtagagttgctgcgaagatcagcacatctacatgcgtgatataagtagtcactttctggtcactatgttctgtatggcctaaatgtactgagatgacttaaatggtaagtttttgatactaaaaaaaa

SEQ ID NO: 3896 - DNA, 642 bp, Avena sativa
ccaagatctgtcatccaactgaattcgacttctacttgtgcagccatgctggcatcaagggcaccagccgccccgctcattatcacgtcttgtgggacgaaaacaactttaccgctgatgggttgcagacccttaccaacaacctctgctacacctatgcgaggtgcacacgttcagtgtcgattgttccgcctgcatactatgctcatctggccgcctttcgtgcccgtttctacatggagcccgagtcctctgacagcggctctgtgacgagtgggcctggaggacgtggaccggtgtctggttcgtcgacgtcacgcagcactcgggcccctggtggtgcagctgtcaggcctcttccagctcttaaggatagcgtgaagaacgtcatgttctactgctgaatctaggcctacggaggccgagctaaaaaaatgcttcttatgtcagcagcgggtcgcctcttgccattataactatgtgaataggatagtagtaataatctgccagctgctattccatgcctggtactatgctgttctatgtttttgcttaagtacaatctctgtctgtgtgtgtactttatgatgtaaacttcgaatcttgaacactctttaatggtcttgagcttgagaataaaaa

SEQ ID NO: 3897 - DNA, 813 bp, Avena sativa
agcaatgtcttgtacctctactagaatgtgaatcttccaaagaacgagtttggtgtggatccaccatctgacaatgcagtagctggcgacgaagccacatttgagaggacgccatgttggcatttattgagctcgtcagggctgaactgtagtagcgtcgcaaccacgggcagcaaggccccgacttcccctgtttcaaggagctttaagatcacattttttaaatatgtcatatctattccttcccgcttttgtgatctctccatatcccgaagctcagtctttagcattacttcctgctgatcatgaagacggttttcacgttcaagctcctcaatttcttgttgaagcgctaagatatgcctctgtgactggcccaattcttcttccctttgtgcttgttgtcgtgcaagaagcagaatttgctgctcagccaattcaatgctcactacatcctgtttaacatgtcctgggctttgattttcaccgttgctgactgctgctttagcctctaaagaatgatgaagatccttgttttctttgaggagtttatctatctctcgttccttctcttcaatcattctatcagaaatatcacggaacgattcgtgctcttccttcaatttctcatatttcagtgtccactccccaagattcttctgaaggtggtcttcaacatggccattgctctgatccttcatagactcgcattttaatatccagttttcctctacacttgccaagtctttctcccatgattcttttctgagagaaattgagaagtaacagaatctaatgtttcatgacattctt

SEQ ID NO: 3898 - DNA, 1075 bp, Avena sativa
tcgcgctcgcgctcgtgtcggccgtcgccggcgaggtcttcttccaggagaaattcgacgacgggtgggaggatcgttgggtgaaatccgagtggaagaaggaggacggcacggccggcgagtggaaccacacctccggcaactggagcggagatgcccaagacaaaggcatccagacctcggaggactacaggttctacgccatctcggcgcagtacccagaattcagcaacaaggacaagaccctggtactgcagttctccgtcaagcacgagcagaacctcgactgcggcggtggctacgtcaagctgcttggcggcgacgtcgaccagaagaagttcggcggcgagaccccctacagcatcatgttcgggccggacatctgcgggtacaccaccaagaaggtgcacgcgatcctcaccaagtacggcaagaacaacctgatcaagaaggaggtgccctgcgagacggaccagctgacacacgtgtacacactgatcatccggcctgacgccacgtacagcatcctcattgacaatgtcgagaagcaatctggcagtgtctatgatgactgggacattctccccgcgaagaagaagagggatcctgacgccaagaagccagaagactgggaagacaacgaatacattcctgaccctgaggataagaagccagagggttatgatgacatcccaaaggaacttactgatcctgatgcaacaaagcctgaggactgggatgaggaggaagatggtgaatggacagctccaaccattccaaaccccgagtacaagggaccatggacacaaaagaaaatcaagaacccgaacttcaagggcaagtggaaggctcctttgatcgacaacccagagtacaaggatgatccttacatctacgcttttgacagcttgaagcacatcggcattgagttgtggcaggttaaatctggaactctgttcgacaacatcctgatcacggatgaccctgagtatgccaagaagtttgcagaggagacctggggaaagcataaagacgctgagaaggctgcctttgacgaggccgagaagaagaggct

SEQ ID NO: 3899 - DNA, 959 bp, Avena sativa
gcgtgctattcttgggagacttgtcaaaggaaccggagaggttctggctatgcagctctcagcggaacataatgcatcctttgaggaggttcggcgagagatgcaggcaatgcatcctgatgatccccacattgtggtcctaaagcacaatgtttggcgtgtgaagggtattatacagataacaaggtccattggagatgtatatctgaagaaaccagagttcaatagagaacctttgcataacaagttccggcttccagaaactttcagccgaccacttcttagttctgagccagcaattactgtacaccaaatacagttaactgacctgttcatcatttttgcatctgatggactctgggagcatcttagtaatcagaaagcagttgagctagtccacagtagtcctcgcaatgggattgctcgaaagctagtgaagactgcaatgcaggaagcagcaaagaagagggagatgcggtattcggacctcaagaaaattgaccgtggggtaaggcgccacttccacgatgatataaccgtcgtcgtggtattttttgattcaaattcaatagccatggacaactggagcagacccacggtgtccctccgaggcggtggcgttaccctccctgcgaattcccttgctccactcagttcctagctcttcctgaaactgtactggagtcaagaagacacgagtcaaaaagaagaagaaaagaaaagcagcagccacgatcaactgtagcgtgttacctctgcattctcgcgaaaaaaagaaacttttagattccaaacctggttactagtgtactgatagcaaggtataagattagattattcttagtgtacattctcgggatcgtcttgtgataatagttcatcgcatcaccacttgattttgtctccgtgcgaagtgctgtgtttctggccacctcgaggctaatcttggacttgtagca

SEQ ID NO: 3900 - DNA, 963 bp, Avena sativa
gtttgagctcaatttatggtggctgttgatttcaccgcttcaaatggtgaccctcgtgcaccacagtcgttacactacattgacccctctggcagaccaaactcataccagcaggcaataataggggttagcgaagttctgcagtttatgacagtgataggcggttccctgcatggggttttggtgcaaagataccacaaggatttatatcacactgtttcaacttgaatgcaactacgaatgattgtgaggtagtcggagttgaaggcatcatgtctgcctactcctctactctttacactgtttctcttgctggaccaaccttgtttgggcctgtgatcaacaaagctgcagaaattgccaaccattccgtgcagtattcaaacaacaagtacttcgtcttgctcattatcacggacggtgttatctctgacgagcaagaaacaaaagacgctattgtaagggcgtcagatttgccattgtcaattctcattgtgggagtaggaaacgctgatttcacgcaaatgaggatcctagatgcagactttggtaagcggctggagagctcgaccggcagggttgcgacgcgcgacatcgtccagtttgtccccgtgagagaagtccaaggtgggacggtgaccgtcgtccagtcgctgctggaggagctgcccgggcagttcctggagtacatgcgcacccgggacatcaagccgcgccctccccagcaagcctcggctcctcctccccagctgtgaacacgagctggtcctgcgtgcacgtactagtagtaccacctagcaacaattgtagattctgccatctatctgagttactcccgtggttaggcctgtctgggcagcatttgctttgcagtatgatcgcatctgctgcgctctagatactactttcccccaccccaggttttagcacgctgcaagcactatatacgtttgttttcttgtt

SEQ ID NO: 3901 - DNA, 697 bp, Avena sativa
tgtcagggcacgtgcatttgccaagaaattgtctgatgcgcctttagctattgttgataaaagaagacagggccacaatctttcagaggtcatgcatttaattggtgacgtgaaggggaaggttgctattatggtcgatgacatgattgacacagcagggactattacaagtggagcagcattgttaaaacaggagggagcagaggctgtttatgcttgttgcacacatgctgtcctaagcccacctgcaattgaaaggctttcaggaggcatctttgaggaagttatagtgacaaactccatcctgctgccggaggacaaatgcttccctcagctgacggtgctatccatggctaaccttgtagccgaaactatctggcatgttcatcgtgatggctctgtgagcagcatctttcaatagcatcgaggcatattcttacatttgggcggtatagagaagggcaccattggcgaggaatcaattttggtgacatgacaaataaagttactttgccgtgtaggcatcatacatgtaatggggtggtcaagttctcaagacacctagtaaagggtgtttagttcctaacctgcgtcacataagctctcttctagtctggaagtgccggcttgtgcctattctaaggaatttaatgttgtcggaatgtatcgctgagaaggcagattggttagctaacca

SEQ ID NO: 3902 - DNA, 880 bp, Avena sativa
tctcgtatctatgtgcatggagatgagcagatggccgtgtattcctcaaagcaagttcaatatcttctgccgttactgggccaacttcaggcaaatcatcctcaggcactaattccttgtgcgccttctagagctgccattatccgtctaaggggttggcattgcagcctccttgcacacaaggcgtatatcagagcctgaatatccttcagtgttctccacaagaatatcatacggaacctccattgtgttaggagaagatggtaggaactcttcaaacatagcttgtctagcttctgattctggtaagggcacaagaatacgtttttccaatcggcgtaacattgctgcgtccagttcccatggtaaatttgtggccgcaagaacaaaaacaagttcatctgtcttagtcagcccatccatctgtattaatagttcagtcttcaatcgccgactggcttcatgttcgcttcgagcttcaccacgttggctaataattgcatcaatctcatcaagaaaaatggtagatggtgcatgatgcctcgcaagctcaaataacactttcactagtttctccgagtcaccacgccatttgctaacaattgatgaggctgaaatgttgaaaaaggttgtgttgcactcagtagccacagcttttgctagcattgtctttcctgttcctggtggaccaaaaagcaatatgcctttccaaggtgataacagacctgtgaagtacttgggatactttataggcatgacaactgcttctttaagaaggctcttcgcagtttccaaacctttaatgctttcccatttaacatctggactcccgcgaataatatccctcaacaatgtctcagctaagttgcgtgtttctgca

SEQ ID NO: 3903 - DNA, 952 bp, Avena sativa
gttcgtcaagcttggtattgaccctcctaagggagtcctctgctacggccctccaggaactgggaagacacttcttgctagggcagtagccaatcgcacagatgcatgttttatccgtgtgataggaagtgagctcgttcagaaatatgttggagaaggagcacgaatggttcgtgaactcttccaaatggcccgatcgaagaaggcatgcattgtcttctttgatgaagttgatgccattggtggtgctcgcttcgatgatggtgccggtggtgacaatgaggttcagcgcactatgcttgaaatcgttaatcagcttgatgggtttgatgctaggggaaacatcaaagtcctcatggcaaccaacaggcctgatacattggaccctgcactgctgcgtccagggcgactggacaggaaggttgagtttggcttgccagacctggagggtcggacccagatcttcaagatccatacccgcgccatgaactgcgagcgagacatccggtttgagctgttggctcgcctctgccccaactccactggagctgatatccggagcgtgtgtacggaggcaggcatgtatgccatccgtgcacgcaggaagaccgtcacggagaaggatttcttggatgcggttaacaaggttatcaaaggttaccagaagttcagtgccacaccgaagtacatggtctacaactaggtggcctggtgttagctccctgtatctttgccactcgggcctcctacgagattgttgtttgttattgtgcctttctcttgtcccatagaaactgtcgaggcattttctgcatcagatgctattctggactgtatcttcagaatattttaatggcaaactggaaggatgatgatgatgatgatatgcccttttcttctcttctcggatataaacgcttgaggtgctagatgcatcgaatctttggactgt

SEQ ID NO: 3904 - DNA, 790 bp, Avena sativa
aaaacatgggactttatggccaacgagcaggatgccttactattctatgtgacgatgagatgcaagcagttgctgtgaagagtcaactgcaacagattgcccgacctatgtacagcaacccaccacttcatggcgcactagttgtttccacaatccttggtgatccagcattgaaaacattatggctgaaagaggtcaagggtatggctgatcgcattattggaatgcggaaagcacttaaggaaagtcttgaaaagttgggttcaccattatcatgggaacatattactaatcagattggcatgttttgctacagcgggatgacaccagaacaagttgatcgtttaacaaaagaattccacatatacatgactcgtaatggcaggataagcatggctggtgtaacgacaggaaatgtcgcctacttggcaaacgctattcatgaggtcaccaagcaaaattaagatccctttgtcctgtcatcctgggaaataagaggagccttttcaccttcaagtttcaagcggcggcttgtaattgttttaaccttttctgacaggacatggtcagatagagagaaaaaaatatcgttattgctctcaaacaacgtcccatattgctgtgacctatttggtgtacgaattattgatttcttttactggatacacaggcggcaccaccttagttttgggaattagattggatacatatgtttgtattttggaatggacaggaataagttttctagtagtcctaaaatgatatgttaatttttagaaattttacaaaa

SEQ ID NO: 3905 - DNA, 848 bp, Avena sativa
tgttatatccaactgaagctaacaactttcacatgatgggttcaaatgatatgtataacagaacctttggactttaattgtataacagaacctttggactttaattgtcttggaagatgcatatttgacctgtccgcctctaacctgtggcgtgtcttgttctgaaagtaactggttgcacagtgctgtctaatgagtgggcttatgagctggtacgtgagcattctattggaagggtagttgatgcaaaattgcaaatggaccaacatgaacctgagttttaccagcccttccaagcaccaggttcctgttaagcgaagtcatacatgaacaggcggccattgaagtatatggatccatgttgttcgggtgcgagcaaagccagcctgagaagtgatgaactgtttgacaatttgttctatatttcaccatcgtagctgtgtaaatgttttcttgccttgggaaaatggaagtcctttgtacatgatatgtaacttgccgctggtagctcttgtggtgcatagaatctcatgttttggtgtgtggtttgctgagccaaaaactgaaagcaaatgactatcatctatagctcaattgacatttgtttggcgtcaaattgaaggaaagttttgagtacacatataatcttgttattatctgttgtgtgcagttctcaaatttgtttcaagcaagattctgtatgcaattgtgtagaaagatcattatggaacattccattgatggatggttgtaggattttgaatgcaaattttaccctgtcaatctcctcaaccgtcctatccacaaaacaaacattgcaccacctttaactaatttcttaaacctat

SEQ ID NO: 3906 - DNA, 604 bp, Avena sativa
tgataatccacagtctgaactaaaggctggaattgatctacttggtccagtagatgaactattttttgatatgtatgacagatatgaaccagtcaatgaaccatctcttgataattgctttgtctcttcgagttatgatgctactactcactttgagacgactgtgacagatgttcttaatatgtacacgttgattactggaaagactgttgatctcagcgttgatcttagtgctgccagtgctgctgaagaatactaaatgtatcaaacaagcatttcttcaagacaatacttcctggaggaacaccacggagctcctaccgcacgatgaccatgggctacaccagctgcatacggcgtagggtacatgcctggtagcagcactatgcaaaattggtggctgtgggatggtgctggtttccttcattaactgaggtgttgatcgactggtgtaacagtattctgtcgtaacgtttggctctagcatgttcatgttcggatgttcctcttcgatgcattctactgttatacatattggtgttttggacgtatttccatgctcaatgtggccaacgtgtggtgcattttcttctcttcaaaaaaa

SEQ ID NO: 3907 - DNA, 703 bp, Avena sativa
gaccttatcagagtaccgtgcgcatttcagcatttgggcactcatgaaggcaccccttttaattggatgcgatgttagaaatatgacttcagaaacaatggaaatattgagcaacaaagaagtaattcaagtgaaccaagattctcttggaattcaaggaagaaaagttttaagtcaaggaaaaggtggatgccgtgaggtctgggctggacccctctctggcaagcggttggctgttactttatggaatcgttgttcagaaacagttaatatcacgatgagattgccagatgtaggccttgatggttcatatgcttattctgttagagacctgtggaagcatgaaacactatcggggaacgctgtaggaactttcggagcccaagttggtgtgcacgagtgcaagatgtacatttttactcctgccgtcagcgtatcttcaatttgacgagaaaggtcaaacccacgcggtgtatcagcatgttttgagaataaactcgttcgatcatccacacggtaatactacggtgtatatatcacagcatgttctcgatcagttatatatccagcatggtgtggaaagttagcaatgtgtgtcatatctcttcgggaaagttcatgtgagtggactatgtccaataactaattattaccattactgaagggaaacataaagcatcagctgttttctcgttgacaaaaa

SEQ ID NO: 3908 - DNA, 588 bp, Avena sativa
gaagcgtaaacagaaagagaagaatgaaaaaataccgtggatgccagcaccaacaaggcagatttatttcataaaaatactaagaggcaaaaatctgctgaggcaatgtttgagggagaatcgagcagcaaaaaactcgcgagtgaaaccaccagcacggcattcttgaataatagtggcaagaagaaatcacctggtttcctctcggacaaaccaagttccaagaaacaaaaacatcagaggcccaattctggtcaatcagacagcaggcggtttgttcgggatagcgataacacaccgtttgtcaggaacaatgtcaagcagaaacagtctatcgctgagcttgctgctctggctggtaaggataaactgactgcaggggaagtcaggaaactgctaaagcccgaaatttcagccaagaactgatctcagatcacgtgaccagttgtagaaaaacaggatatagccatgctgtgtttcgctcccatttcctgcaaggcacatgggccgaagcatcaattttgttcktttgttttaactcatctgttgcaagtsatgagctgtaagttgcacgaaaaggttaatttg

SEQ ID NO: 3909 - DNA, 754 bp, Avena sativa
tcgctttcatgtcaagtcgtggctacctgcaagatctattgtcatggagtgtttgctgtcaagagaaaatgttgatccaagtggagaaatcatggttttagatagattctgcccgtggaaacttcatttatttgagttagagcaggagctgaagactgatcctctgaccaagtatgtgctgtatcaggatgagaggagcaaaagctggcgagtgcaagctgtctctgtggctcctgacagattcgagagcaggaaggctctcccagaaaagtggaggggcatgagagatgaggaactgtcgaaggaaactggcatccctggctgtgtgtttattcatatgagtggcttcattggtgggaacaagacctacgagggagcgttggaaatggcaagagctgcgatcaaatgctaattcagcagaagcaccaagcagtaaaacggcctcacctaccaattttaccattgagacttattggcacatttgagtatggttgttctttgcggaaaaatccacctgatagcatagaccggtatctgtatgactctgaagatggagagtaacatttgatagaagatgatggaactcattaagttgtggcccttccccagtgtttatttactgatccaagcattttgtatgcgcaagcaagccattgaataactctcgctgatatgcatctgcagcttaaatgtgctactagtggaagatttattacaggagaatatcagaactgttatttccaaatagaaaaaa

SEQ ID NO: 3910 - DNA, 901 bp, Avena sativa
gggcattcaaggattgcgagtgttggaaaatgttgatgtgtatgcccagtcgatagagtttctcgaggggctcggcagtctaaagaacctgagggagctgggcatacatttccaaaaaaatatatcgtgggtgacaactgggttgagaaacaggagaaggcggtcttgtctgtgtggaagctaggccacgcaagcctggagtctctgtacattcacgtcgacaaagctgatcccgatccaatcatggaagaggattggttcccctgtcctccatgtggcattcggaagctttccatccagggggaatcactcacagcggttccgaaatggatgaaatcgctcgtcaaactcgagaatctgagtcttgtcctgtccggaatagggaaggaaggcatggagatcctgggatccctgcctagcctgtcctatctcagcatcgattggtgggattgggaggaggaagaggaagaggaggaggagaaggaggagaaggagaagggatcagagatggaacctgcgataaggagagcaatggaagcacatcccaaccgtcccaagttagattggtactagtactaattcattcagggattaataatcaagcaaaggccacagtgaaaagccaagacaagagccgacacccaacggaacttcttgttgcatccacagattggtaccgttataatatttccatttccaaaacacaaataaggatcgcatataatatattgtatcttaaatgctgatcgagaatgctactacttgaaataaggtctatgtaatattattatctagtactactactgtgattcccgcatttgtgcttctatatttacctatatatgtgttagaaactttctaggtagttatttggttccctggtcaaggtattactattgat

SEQ ID NO: 3911 - DNA, 986 bp, Avena sativa
cagggaagctgttccacagtggcctcgcacataaggccataaattccatggagttaaatatggatgcacttaaagaaatccaaactcggttttataacgacttccctgcacacgagaaagagaagctctacaagttttgctactccatctacgattaagccaacaaagtggagctatcctggtggaggtctgaatcaaattcctggagaatgtacagtttcaggggatataagattgactcctttctataggtaagcccttctcctatgtgtgcaatatgtattattctttctcttggatgtatgtccatggttaccaaatgatgtgttaaattgatacttgccactgacattattgtgcagcacgagttttgtagttaagaagttgcaagagtatgtaaatgatataaatgataaccttgaaaagctccctactcgtggtccagtgtccaaatatgttcttcctgatgagaatctacgaggaaggcttgaaatcacttttgatggagacataatgaatggggtggcatgtaaccttgagtctcaaggctttaaagcattatgcaaagcaaccgaggaaatcgtcgggcacgtagagccatattccattactggaagtttgcctctgattcgggaattacaggatgaaggatttgatgttcaaactgccggatatgggttactgaagacataccacgctaagaacgagtactgtctgttctcagatatggcccaaggctttcaagtgttcgtgagcatcatttcgcagttggaagcagttgtctaaactttcttctagggagcaatgagtatcttatctgacatatattcctgttactcggtgattttaatatgtttcgttcatggaccctctttatctctcaaacctcaatttgtcgagatcattttaaggctgtttattgttcgagaacgaaagtgacgcgctctcatggatctaaatgcgcatcagttgcatgcgtgtaaatt

SEQ ID NO: 3912 - DNA, 830 bp, Avena sativa
aggacctacaagtctatacaaatgcgttgaggagaaagctgcagcgtctgcctgctaactgtctatctagggcacatggagttattgagatgccggtccctcctccagagtcattgatatttgagccatatattgaaaccgacgaaattatcatttcaaatgaatcaagggatgatagttcccggcatctggtttggaagggagaaaaggaatggcttgaaataactgttggtgtagttggcaaacgtggggagatgcattcattaaacccaagcatcacggtcaaagaaagtggtgacattttatctcttgaagagaaatttcaaggtggaactggaatcaacctgacgccacctccagcaacaattatgagtgaggctgcgcttcagaagtgcaaaagttgtatcgagaagatggcaaacacactggggctggaagggttttcacgcatcgacgcattcgtgaatgtgcgcagtggagaggtgctgttgatagaggtgaacaccgtacctgggatgactccgtccacggttctgatccaccaagcactcacggaagaaccgcccatctacccccacaagttcttcagaacactccttgatttggcgttcgctagggcaaactagaaatgtagttccaccgaggtctctcgagctcatcgatttcagtgcaaataaggctgttttatcaccatgtttgtatcgtgcaactgtcgatgtaagtgatcatgaggattttggtagtcagtttggtttgtgaaaatgtttctgctccgttgataccgggagaagatgtacatgtactgttgtctgttgaatctccctaccaaa

SEQ ID NO: 3913 - DNA, 842 bp, Avena sativa
ttgacaagagagaaggccttctgaattttatgctgattctcattgctaacagagatgagcgtaggaaccgcggcattggcagaaaagggtcttggttgtcacccttgtatgcaatagctaatttgaaatatgctaaataccttttgcgccaagtctcgacgaagaacactgcgacacaaagtcgtcgaaatatctctctgcactatgatcttagtaacgattttttcaagctttttctggataaatcgatgacttactcttgtgcagttttcaagacggaggacgaaagcttagaagcagcccagcaacgtaaacttaaccttctaatctccaaggctaaggtcgaggcagggcatcatgttcttgatatcggtagcggctggggcagtttagcaatacaagtggttaagcaaactggctgcaaatacactggaatcactttgtcagaggagcaacttaaatacgctgagaaaagagtaaaagaagctggcttagaggacaacataacttttcttctgtgtgactaccgtaaaatgccaccatgcaagtatgacgcaatcataagctgcggtatgatcgaacatgttggccatgagtacatggacgaattttttgccatctgcgagtctcacttggttcaagatggcatattggtcctacagttcatctcaattccagaggaacggtatgagcaatacagaaaaggccagagtttataaaagaatatatattccctggcggttgccttccttctttgtcccgtgtgatgtctgccatgaccacgtcgtcaagattctgcatagagcatgttgagaatattgggccccattactacacaactc

SEQ ID NO: 3914 - DNA, 796 bp, Avena sativa
  modified_base (702)..(702): a, c, t, g, unknown or other
cattggactagccagcacgaactcttttaccaaaacaaggttattgatctggcgaggttgaatcatgaaaacacagcaaagtttcttggctattgcagagaaagtgatccattctccaggatgttggtctttgaatacgcatcaaatgggacactgtatgagcacctacactatggggaagcagcccaattctcttggctgaggcgaatgaaaatagccatcggtatcgcccaaggcttaaggtatctgcacacagagctgcagcccccttttgcgatatcagagctgaactccaattcagtttacgtgacagaagattttacccccaagctggtcgacttcgagtgctggaaaatgctgttctcgagacacgagaaggcgctgggccacttcaacagcaaggcctctttccgtggccgggactctttggaggagaagcaggcggacgtccagggcaacacgtttgctttcggagtgattttactggagatcgtcagcggacggctcccttactgcaaggacaaaggctatctggttgactgggctatcaagtacctccagcagccggaggagatcggtaagctggtggacccggagctgagcaacgtgaggacggaggacctggcggtgatctgcagcgtggtgagccggtgcatcgaccccgaccgtcgaagcggccgtcgatgcagatcatcgcgggtncgctggagaccggcatcgacctctcggcggcgggcatcctcaaggagtcctccctggcctgggcggagctcgccctctcgttgtagcgatgtgc

SEQ ID NO: 3915 - DNA, 873 bp, Avena sativa
cggctatactctggttcaatggataaaccattagagtctgggatctgtcaacgttgcagtgcatacagactctttctgatcatacaagtgtagttatgtctctactgtgctgggatcagtttctattatcttgttctttggatcaaacaataaaggtctgggcagctacagaaagtggaaacttagaagtaacctatacacacaaagaggagaatggagcacttgctcttactggcatgcctgatgcgcaatcgaaacctgtgctagtatgttcattaaatgacaacacagcccgcctctatgacctgccatcgttcagtgataggggcaaaatattcggtaagcaggaaattagggcaatacaaactggccctggtggtttattttttaccggggatggaactggtgagcttaaggtttggcaatggattattgatgcctcccaaacctgatgaatatatagtgtattctagattagtttcccaatgtatgttatgatggatttctcaaagctatgcattacgagttgaggtgtgttttgatggccagttcatttttctgttatatcctacatttattctccaaggatatgagattcagctggactggcgggcagttagaatacatgcagaggctatgtagtatcagtatggacgctagtgctgtcctgggatgagtttgaacgtcgggggcaataattcatcgtattctgtaaagcaccggaaccaagaagtgtctgataacttatctccgatctgcttatagcttcaaaaggatgtaatacaaagattttgtttggccacattcatgtttaggggaagctctccttttcgtcttgtgacgagttcaaaaaaaaaaaaaaagttattaaat

SEQ ID NO: 3916 - DNA, 758 bp, Avena sativa
ccttcctccgatggcaatgggtggcagagaagaaaaacggaggcatggtttcagtactccccaagcaacaaagaagttcagagagagggaatgggatagggaaagggaaaggggtatggacttcgacttaatgccccctcctggcagcagcaagaaaacagctgcatctatggatgtggagcaaatgattgatccaaatgaaccgacatactgtatatgccaccaggtttcatatggtgatatgattgcttgcgacaacgataattgtgaaggaggcgaatggttccactactcgtgcgttggtctgacaccagaaacgagattcaaggggaaatggttttgcccaacttgcaggaatcttcaatgagaggttctcctaaattgtgttgaagaggccaatggttccaccaattggcctaattgttcgccgacatgcagaagaggttctcagaagtttggaagggcaggatgccaaatggaacatctttcgatctgtaaggaggtgttactcaaagactgacttcaacacactgtggcatcttccccatctaaaactgctcatcagacggaacggttctggagaggatggaaatgcttgtagttacaccatgttccgttgttgtatcttatccctgtaaacaatttcatagattgggttgatgtaaacctggtatccatgtactttgatcatgatggctatttaagcgttatcacaagcttgctcgtaaggttctactctcaggaaccattctctgtta

SEQ ID NO: 3917 - DNA, 505 bp, Avena sativa
agatgttccagcagctcgtcagagccgcgagccagctgaacacaccgcagtgcttcctgctgacgcccaagctgctgccagacttggagtacagcgacgcgtgcagcatcctgaacattatgaacggcccgtggatagagaagccggcccaagcttggagcgcgggagattgctggaggaaggtgatgggcgtggaggctgcaaggagctgaccgatttgagctgctgctgccttttgcgaggttaatctaaaaaagaagcaatgatgtaaatattgctgatctgaatatctaagctaaggggtgacgatggtgatgtaaactaagaagacatgataactgtccttttgaccagatcaaatggacaacttgtagtactggctagtagttgtaatttcaacctaggtagctaggttatcgctggcctcatcttcaagatacagatgattagttacgcggggtcagttaatttgaagcaaagtacttagcaagaatttcgagagtga

SEQ ID NO: 3918 - DNA, 729 bp, Avena sativa
ttcagatactgggggcagagaaggctttgttcagagctctgaagacaaagcatgctacaccaaagtatggtctcatctatcacgcatcattaattggacaggcggctccgaagcacaagggaaagatctctcgttcgcttgctgctaagactgcacttgccatcagatatgatgcccttgctgatggtgacgataactccatgggtcttgagagcaggatcaagcttgaaacaaggcttcgggttcttgagggtaaagaattagggaagtcagcgggttccactaaaggaaagcccaagatagaagcatacgacaaggaccggaagggtgctggagctttaatcacacccgctaaaacttacaacccagcagcagatctagtgctgtccactgaagaaaccccaaagaagtcagaagtggcttcaaagaagaggaagcacgaagaggccgagcctacaaaggagacagctgcagaggacggagagcaggagaaggagaagtcaaagaagaagaagaaatccaaggacgccgaggagtctccagcagtcgaagccgacagcggcgagaagaaaaagaagaagaagaagagcaaggagagcgaggagcttcctcctccttcagccgacgcagatggcgagaagaagaaaagaagaagaaatcggacacggaggatgccgcgccgccatggaaaccgacgcgtctgccaagaaggataagaagaagaagaag

SEQ ID NO: 3919 - DNA, 615 bp, Avena sativa
gtaaggcgccatgccgcgttgattctccagaagagtgcgccaagataatagatgcaaacaagaatatgcatctggaatctggtatactcattgcagtgccaattcccaagcagcatgcagcttcaggaaacattatagagtctgcaatacagcaagccctaaaggaagcagatgataggaagataacaggaaacgcgatcacacccttcatccttgacagagtgaaagtactaactggaggatcttcgttggaagccaatattgcacttgtaaagaacaatgctcttactggcgctcgaattgccgtagccctttctaatctccggaggaagagagcaacaaacagttctgtgaggtctgcgctatgaagttcttgccgaaggagtctctgtgaacttgacctccgatgccaggggctataaattcctcggcacggtatcatctggctcggatttgcgcatccggcctgttattgcttgtacagacctttccttgcaactggatacagtatttttttacttggttcgaacatagttggcacggtttcaacagattttgaagattccttggatgtgcaagataataatctatatacctaataataaaaggaaaaaa

SEQ ID NO: 3920 - DNA, 781 bp, Avena sativa
agtgcaacctggctggcaaacctgtgatcatcactagagttgtggacagcatggttgacaatctacgccctactcgtgcagaagcgactgatgtcgcaaatgctgtcttagatgggactgatggcattttgctcggtgcggagacacttcgagggcagtatcctgttgatgccctgagtactgtgggcaagatatgtgcagaagctgagactgtgtataaccagtcacttcacttcaagaaagtagtgaggcatgtaggtgaacccatggcccatgaagaatctgtagcatcatcagcggttcgttctgccatgaaagtaaaagctgcggcaattgttgtgttcactttctcggggagagctgctagattaattgctaagtacaggcccccaatgccagttttggcagttgtgttcccacgtgagggctctgatccatcaaagtggcgatcgtatggaacgacacaggcgaggcaatgtttttctgtgagaggtgtctaccctttgatggggagtactgatgaggccgaaactggtgggctcaccaaggaagaatatgggataaaaacttgcactaaactatggacgctcggtcggcataataaagccgtacgacagggtgataattttcgaaaagattggcgattcttctgttgtcaagatcatcgagtgcgatgattctgaaagatgaaacaaccatttctcaggcaccagttttagttacatgcctgggattactttttgtcctccattcaccccgaccagagataacaagagaacta

SEQ ID NO: 3921 - DNA, 446 bp, Avena sativa
aagagcttaggaaagcaggacacagccggtggctaggctggcgcccggttgttcgtggtgttgcaatgaatccagtggatcatcctcatggtggaggtgagggccgcacgaaaggtggtaggccatcagtgtcaccttgggggaagcccaccaaagcaggatataagacagcaaggaagacaccaaaagcatagttcatgccatgacgatctacatggaacggttcttttttccctggataagtagcagggtaattgatgtggatctccatcagtaagaactgtaactcgtggctgagtcctcgtgatggttttggtttcctgcaaaccgtttgctgctacagcagtttcacttttatatgtatgaaaataagtgatatttagacttgcctgtgctctgtttacttatttccattccctcaaggctatttgattaaattgtgtagc

SEQ ID NO: 3922 - DNA, 748 bp, Avena sativa
aatgcagtgaaccaaaaggaatcttcaacttgtgaacgctcgccgtcctttctgtcgtctgtaaggctcgtctccgctatgaaaggaggccgtgagagaagcggtgaagcctcgccaactgaagccaggcgcgttaagtgggccccagatgtatatgatcccccggtcacctcggtcgaccattcagtgaagagcctccaacagcgtcccaggtccaggaagaaggagaagaacaagcagaaacacaagaagaagaggaagtctcgcggcaacggcaaaaatagcggtgtccacgacgctgtccatattctgcctgccctcgaggtccctgggccgtcatcgcctgatgactgcgacttagagcccgaggtgctggattacgataccggaggtggccaagaatccgggcacgggatgctagatgaagctactagctctcaccagggtcctttttagctccagagatgtgtttctccgcgtcgatgcatcatgatgtgatctgcaggagggtagtacgatctttttgtgaatattgcgggtgtagataaataaacccagcctgagatgccagttctgttctgagcttttggtttgtgtcctgtagtgtgtgtgtgtttgtgtgcatggtccagtcgggttgtttgtttcgtagcgaccgactgatcttggactgacaagtgttgccatgttgagattgtccctattttctgagggatgttggctatttttagagtgattatgagaacga

SEQ ID NO: 3923 - DNA, 725 bp, Avena sativa
tttttttcagaaaaataagttggtatacttgatttactggaccaatttacatcgatgtgctgtatcaaagtgtaccctcctatcacatggcgggccctgaagtttacctattgacggcgctacaagcttattacatcatgatgaaggaaagaattgggcgggaacaaatttgctgctactgtatggtgatggattcaccgtgtgcgcgtatgggcagggagaagaagacgcgagacagaacttgctaaccatgatgcattagttgaccttggtgcatacccggcgtatctcggcgtcgggtccggcggtcttgaccccgatgcgtccgagcttggccatggcggcgacgaacgcgtcgaagaatgcggtctggttggcggcgaagtggttgacggtggccctggatcggcggtcggcgaagagcacctggtccgaggccagcaggcccttctgctgctgcagcgtctggtagtacccgttgtcgaacctgagcggcgtggcggcgtcgagcatggccaccgtggacgggctgtagttgagcgggcaggtgccccgcatctgccgcaggaaggccaggttcatcggcgggctgttctgcggcggcttggtggcgccgcccttgaactggtacagccgccgcacgaacttgtcgcagtgcgtcacgccgatcgtgtgcccacctgagagcgcgatcatgtcggtctgggtgaggccgttgagggcga

SEQ ID NO: 3924 - DNA, 870 bp, Avena sativa
cgactacaacggctggctcaggagccgcgtcgccgacccgcagtactgggccaccatcgccgcatgcctccgagaagggcgagcctgctccgggatgaagcggatggggcgcgacccctacaccggcatgctccagcccgagacccccgccatgttcttcaaccgcgacctctccccgattcagtctgggtgctgcaagccaccgtcatcatgcggatataactacattaacgagacggcctggtcctcggtcaccaataccccgatggccgaccctgactgctacaagtggagcaacgaccagcagacgctctgcttcgggtgcgactcatgcaaggcgggcgtcctcgcgggcatcaagaagagctggcgcaaggtcgccatcatcaacatcgtcgtgctgatcatcctcgtcatcgtgtacgtcgccggctgtgccgccttccgcaacgccaagaggatggacaacgacgagtcgtacggcatggcgaggatgaccaagtctcggccgagcaggttccagttctaggcttgcgacgaaaccagaagcctctgcctgtacaaaatcttggcctgaattatatttcttgctgaaatgtgggaagtctcgaatgttgtggggtgaacacctacagttggctgatgcaaaacggaagttcttgtatggaaattttagggtggtgtttgggttttgtgactactttggtgtttaggataggtctattctgtattattctgcacttagagatgtattattatgactgctgtggtacaagatgaggttgcaaggaacaagatgagttgcttcagtcagggatgtattatttagcacttcgagattctgatttgtcaatttccttagaagactgt

SEQ ID NO: 3925 - DNA, 634 bp, Avena sativa
gaggacccacaactcgaaagatctgtcttggctacggccacagatattcaggaaccacgtgttccttctcagcagtctgttccattttctgacgacgcaaacaccagttctattgaggtcaatgaagcacctcctgagattgatgaaattttattggatgaactgacaatgtttttgaatgagcctccccagaatgacgtaccttttgcagagaattctggtctccctccaatatctgaatttgaggctcaagctcttgagatgaacacttttgatctttacaacgaattggcaggtcttgcacaggcaggaagtacttccaatgttgattatcgtgctagcaatgtggattctactgaaaacaatttggagaacacgtattcttttgatgattatttagtagcccgatgatctccttgctcctggtgaacattctcctatggtttgccaaatgatcagttttcacagtatcccagggatccatcaacacaggacagtcacattgattttggttcttctctatctgccttcgagcttccaccaatgcctagcttttttgatgagatgccttctgttcccaataaccttgtgaactccaactgtttgaacccagccatcaaggcacacaggggat

SEQ ID NO: 3926 - DNA, 765 bp, Avena sativa
gaaatgatatataggtgggtggttttagaggaagcatatgtagcagcgaagccgttacttcttgcaatgggcaaaaaacttatctactgtggtggggctggaaatggctcggccgcaaagatctgtaacaacatggctatggctatcagcatgcttggggtctccgaggcctttgctcttggtcaaaatcttgggatcaaagcaagcactctcacagacatattcaattgctctagcgctcgctgctggagtagtgacacatataacccaattcctggagtaatggcaggcgtgccttcgtcgaggaattatgatggtggtttcacctccaaactaatggctaaagatctggatttgtccatggcctctgcatctggtattggcttcaaatgtcccatgggctcagaagcacttgagatctaccggaagttatgcgacgaaggttgcgatgtcaaagacttctcgtgtgcatttcgccattactatactggcaaggatgaaaaatgatcttgtagttatggcagccagcttgtcaccggatgaaataaaaagataataatgctcccaaatttattgaatttgggtgttaaacagtatccagacaaggctggactcttctgtgtacagtgtccttagttttggtttggttctcagcgaccagtttgcagatctgcatttgctccgtttctgtctgcttgtgttcataaggttcacccataccttgggtaaagatgaaataaagcgtatccttaattaggacaaaaa

SEQ ID NO: 3927 - DNA, 428 bp, Avena sativa
ggcatgtcgaatctacttaagtctgcatatgctgcggcttttaaacaagtacgcccagcattccccgaggagacccctaaggatcttgcgttcatcgttgaatcatgctgggtcgaggatcccgccatgcgacccagcttcagccagatcatccgcatgctggaagctttcctcatgacgatacccccaccgcccccttcggaggcagacgaagacgcggagtcagaggacaccacatcatcgctgagcagcaagagctcctccgtgtcctccatcgtttcccgcgcgacaagcaagctctcggtcgtccgccatctgttcgcctcgaagaggcggcaatgggaggcatgatgcaatgcatgccctgagactgttttccttggcgctgtaaagaatgtttagcctaggttaatggtgatgatacagtg

SEQ ID NO: 3928 - DNA, 794 bp, Avena sativa
ataaggcctcactttctgtgacatcatgccatctggttgctccttctctacaagtctatattgaagaaccgcgtgttgcttgctgcaggacggatgatctgtggggacatctgcaatcctcctttcccttccaaaaaggtagtggctcatacgatgaacatacagtggttcattcagtgcttcaccacccttgaagacatagagtctccatctaatatctgatttgcgagcctccggaggttctgaatacaacagagttattcctccaactttgttagtctcctcggcaagctttccagacaactcaaatgatggtttttgcttttctttcacctccagagcttctgcagcagtattcatcattgccaacgaatcagtatcaccactccgggatgctccatccgctctagagcctgtctcctcaagacgtgctgcacttctggatgcccttggtgatgagcgagattcatgtctggccctatgtgtgttcacttctggagacactgatctaccacgtctagatgatcttcctgatccagcattgttctcatgccgatctgccattctctgtcgtgcggaatccattctgtcatcctggtctgtcctttgctccctggaagcaccttttcggtcatatggatctgacctttttccccttgaatcattcctttcatcatcccggcctgaccgtgcctctctcaaagcacctgaccggtcatccctgtcagcccttctatctcttgagtgagagtgatcccctytgtcatcattatccagcgtcccatccaccttcc

SEQ ID NO: 3929 - DNA, 635 bp, Avena sativa
actcatggctggagttctcgtgtggtcctatctttctccttcagatatcatgagcactcaaccacatctgctaattgttggaactggtttcgcgtttggctttcttgtggggagaatgattctggctcacttgtgtgatgaacccaaaggtcttaagacaggaatgtgcatgtccctagcatatttcccgtttgcaattgcaaatgcgctgactgcccgacttgatgacggaaatccccttgttgacgagcagctcgttcttctgatgtactgcttatatacagtggcgctgtacatgcattttgctacatccgttattcatgaaatcaccaacgcgctggggattcattgcttcagaatcaccaggaaaaaggcgtaattgtgaccagtgcacatgtgttttgcctaatcggtaatcacatggtacctatcaaacaagcaaaaacacctacttgtcttcatcacatggatcatgatgtccggatgaaatctgcgtctgtcactacggggacagtgtcccccatctgccattacaggggcactgcccctgaaatttacgtcagcattacgaatttgtgccgatgtgcaaacaatgtatgtgaaacagttggcaaaattttgttgtatcttatgta

SEQ ID NO: 3930 - DNA, 547 bp, Avena sativa
  modified_base (526)..(526): a, c, t, g, unknown or other
gtggaatcgatgcttcagctagtctattatcggcacatagttcaactgttgggcaatttaatggaggcaatggtacaccaataaaagcagagtccagcttctcgagcaatccagattttgcattctgcaacgatagcgctttcctagagccttgccaatcaatgggggatgtctcaggtggatcctttagcagctctgaactgaatggacaaccacttagtgatccaattttggacatggatacatcatcatatggtttcctgagccagattcctcgcaatttcagcttttcagatttaacggaggatttcagtcatagtacagaaatattagagaattatggtagatcccctttcatcccttctgagaataacttctcagaatctactgctggagaacatacagaaataggaaatagacggctagattccatatcggaggctgttagttatgaagattttggaagtgattaatcagcttttgttcgtactgcctgagtttgagcagtgatgcgccatttgacagngtcctttgggcaggcaaatct

SEQ ID NO: 3931 - DNA, 650 bp, Avena sativa
actggatatgctccagcaggagctgacatctgttcgtctcaatgaaactgccctcgatagcaaggttaaggcctcctactcaaggcggaggggtgaagcaacggagtctgtccattatatggacgtggatgatgacaactctgggaggcgaaggaaaagatcaaagagcacaacaagcccgttcaagaataatcacacggaggatggtggatctgtattttttggagaagataatgataatgtgagccagcagatggaggagacggagactgaagattacgccaagttcactgtgctgaaactgaagcaggaactcacgaagcatggttttggtgctcagttgctgcagctgaagaatcccaacaagaaggagatcgtcgcgttgtatgagaagcatgttgttggctcttaactgcttccttaacattatgcaactgagttaactccctagatttcttaatagggttcagcgttgatgacacgatttaggtcaagatgtgaaacaggaatgtatcgctcagtgtgtgcgcttgataacttggtttgtgagaacttgtattggcctctgccgtagcgtggcatatttgcattgcaagtagttaaaaactaaattacaataggtaagtaacagctcgagcacaaaaaaaaaa

SEQ ID NO: 3932 - DNA, 831 bp, Avena sativa
cttgctagctacaccctacaatccaatttataagttctggcatttttctgaattgcatgtatatagatgtgttttagtgtgtctgttcactcatttcagtctgtatggagtctacattgaaatatccataacaccttataattcaaaacagagggttcactagataaagtagcagtggaaggcctgactcctaaggcagaattctgtattcccatttaagctttgtaccttcttccctcgcagatatgcccagcaagttgcagagttctttgaattcgtgaatagcaagaaggaagatccatccgagcaaacaagcaccgagaaggaccgaatgaatccacagatcatgttccctaacaaaggcggtttgtgggtccctggaggtgtacccccgttcacaggctctgcaatgaatctggatttcagaagagccatgtcttcgtatctcccaacttaagacttcagcttcacgagtaagtggggcctgtttggttggaagtgataactttttgcctaaattggcttgtgccctcgaaaagaagatctacaagtgtggcaagcttagctaaacagaccatgtggctaagaaagtgtgggtgaaccatatttgtggtagtgaaccaagcacaagagattcagctcactgaccttgtaaaaaaccgctgatgcttttctctagatctagcctgcctaatgctagtcgacgatgtaagatagtctgtccgtccctgtcttgtaaattattgttggtgtcactggtagtttcatgtttagtggtagcgttagcttctgtttatctgaactacggtgataagccatgtctgtaccgct

SEQ ID NO: 3933 - DNA, 811 bp, Avena sativa
gcgcaggccaacacgcccgtgatgctggactacaagatccacgcagacaacggctcgctctacaacaccccgccctgcttcgccatctacatgtgcgggctggtgttccaggacctgctcgagcagggcggcctggcggaggtcgagaagaagaaccagcacaaggctggaatcctgtacgacgccatcgacgccagcggcgggtacttcatctgccccgtggagaagtccgtgcgctcgctgatgaacgtgcccttcacgctggccaaggcggcagacttcgagaagcagttcatcgccgaggcggccaaggagaacatgttggagctcaaggggcacaggtcggtcggcggcgtgcgtgcctccatctacaacgccatgccgctctccggtgtggagaagctcgtcgcgttcatgaaggatttccaagccaggaacccctgattgaccatgatcctctggtattgattttagcaggatggcttgttgttcttcagaacataagtaggctctgtctgtgcaagagctgctcatatgagatttgccatccatctgtagtattagtatggtaactagtattttgcaatgctgctgcattttggttttcgtgtttggggaatctcctttccattgctcaccattgagactggaatatgttgtttgggaataaaggtagatggtcaaattgtcttttcagagtagcttatgctgtctttgagtgctgtattcctgtatgattcgcagctttattatgttgcagtgaccaacttcaggtttggttgcttttgtccttaatgaatcaaacaagcaa

SEQ ID NO: 3934 - DNA, 825 bp, Avena sativa
taacagctggaaaaaggtctaccgccctttcaacaagcgaagacgaaaaactgggaagaaaaggagggtgaatggtgatgatatggtccatatgtcagggaaatatataccagaagatgctctagagtctttcaaaaacagcaatggaactgatacaccaaaatcgtcatctctgaagaaattaggggaaggtgacaataacaacgaaagaaatgtcatttcttctcgcaatgattttacagacaggtacaatggcaatggggaggatgaccttgtggatgtctagatttcggtggtggttgatagatttcaactgtaagcagcaaattgaatggaggaaaacttggtgcttttgaaaccagtgcttgttatatcgtctcttagttctttatacatctggctgtaggagactaggaggttcagcattctggtaactttcttctgcagcagtaacttatgtgaagacaggttgcattattgccagacagattatgatcatgtaatgctttcatctgaatatcgctggactcttgaagctgccacctgagcttgcaatggatcatacgacatgctttcctagtattggttaaggttttggcacccttcgtgttacacagcttctatttaaaggcctacttgtgcctatgtaggtgaagttgcaccatacgtcactaaatttgtcatgtaagccagtttggtccctgaacttgagagttgcacatttaggcctctttactaaatttttatagtaggccaaccaggatctgaatcatactctgttggtgatttgggaggacgtagcactataccttcacaatttgacca

SEQ ID NO: 3935 - DNA, 577 bp, Avena sativa
ggctggcagtcatatgctaagatctggatttcatgttacgccaattcgaccacccacagtaccgcccaactcatgcaggttgcgaataactctgagcgcggctcattcctctgatgacatcaagaggcttgcggaggcactcactccatggctacctcacaaacatggcaagccgggttcttccaaggggcatgctgaacagagcttcgccgcgacatcgaaactttaagaagactgagctaaaactcttttccaaggggtggcgctggattacgtgggagaaactggggcaataattatatgttgaagtggtcatttttatccatatttttggttacatcgaaatgttttcgcagtttgtatgtgtgatcgtgtcagacataaacatatctatctatgcgaaattggattgagtatttccatactgggagcgtgtgactgttgtatatctggaaacaacctctgcgccgcgatgtaagtagagactaccgaatggccggtttagaaagttgtaatcttgatgggaatgaaaatttcaaatgaaaatcggtcatggtattttcagataggaaaaaaa

SEQ ID NO: 3936 - DNA, 928 bp, Avena sativa
cgaaagcgagtcagactctgacagcgagtcactcatcgacgtagagggaggtcgatgcaagcgaagcggcaaatcctcggatacaaggcgaataagaaggatggtgtccaacagggagtcagctcggagatcgaggaggaggaagcatgctcaattaaccgacctcgagttgcaggtcgaacagcttaaaagcgaaagtgcagccctcttcaagcaacttacggaggccaaccagcagttcacaaccgcggtgacagacaacaggatcctcaaatcagatgtagagaccttaagaatcaaggtaaaaatggcagaagatatggtagggaggaccgcagtgtcctgcggcctagggcagcacgggctggcaccgtttctgaactccaggaagatgtgccaagctttggacgtgctcacagccacagggttggatttcccaggcgacagtgcacgcttcagaggtctaaccccagctcgacatgttcagacttcgacggtgcaaagcactgcgagtctagagagcctggataaccggatgtccagcgaggtgaccagctgttcggctgacatgtggccttaagattcacaccccaatcagcacctctgggcaaagtaatagcacacgtcgcaattgtactaaacactgaagggcaccggatcttaaagtggaaactctgaagggagtgaaactgtcatgtgcttcgtctactggtgggtggggaatatatgcaccgccgttcatctgcaaccaatcgaggtgtcctctgtccagcagttctgtaacttctgtcacgtattgccttcattcatgcttgtacagaaagcttggctatgcatgagttactagggttgtttgatatagttctgatgtactgcaccagcgtaaaataccaataccatcagttctggcgcaacatatgaaatgatg

SEQ ID NO: 3937 - DNA, 793 bp, Avena sativa
gagtgagattgtgggatgtgagaagtggaaaaatcgtccaaactcttgaaaccaaggcacctgtcaccagtgcagaagtaagccaggacggcaggttcattactacagccgatggttcaagtgttaaattttgggatgcgaatcattttgggcttgttaaaagctatgatatgtcatgcactgtggagtcagcttcacttgaaccaaagtctgggagtaagttcattaccggaggggaagatatgtgggttcatgtatatcatttcttcactggtgaagaaatagcctgcaacaaaggccatcatggtccagtccactgtgtccggtttgcgcctgttggagaatcatatgcatcaggatcagaagatggcaccatccggatctggccgctgaacccagctaatactgatgacactgaggcgcccaatgcaaatggtaaaccaaaggccgcggcggtaaatgatgttgcgcgtaaaatcgaaggcttccacatttccgaggaggggcagaccgaggcgtaagattacatcgccaccaaacctggcagtggtcagcgcttattgggagattgcgtcactcccgtcagatccctggtctctcggtgtcaccctcgactccatcatgttgaagcttctttgtcgaccaagggtggttgtatctgtcactccgggggaaaacttgtccgccgtgagcgagcacggtggtggacttctttatggggccctcttaagtagactatattctacggtagcttctaaagagccagaataaaccaggggaagcagtcagctag

SEQ ID NO: 3938 - DNA, 819 bp, Avena sativa
  modified_base (817)..(817): a, c, t, g, unknown or other
ccagttcaggctccacagtctcacgccgcaattcctccatcaggacccaatgctaatcccctggacctgtttcctcaggtccttccaaatgcttctgcaaatgctgctggtggaaatcttgatgttctgcgaaacaattcacagttccgtggcttgctctctttagtgcaggctaatcctcggattttacagcctttgcttcatgaactggggagacaaaatccacagattttacaattgattcaggaaaaccaggctgagttcctgcgcttgataaatgaacccgcggagggagctgaagggaatttactagatcagtttggtgcgggagtacctcaaacagtagcagtgacacccgaggagaatgaagccatacaacggcttgaacaaatgggctttgaccgtgacctggttctagaggttttctttgcgtgcaacaaggatgagcagctagctgcaaactatctcttggaccacatgaatgagtttgacgatgatgcgccggaaccgccacactaatctggtagttatagattacaaaaggtacatgtgtcgcgcaaatgcgatgattgagcccatttggaagtttggaacagtggtgcttgtgaaagctgaatgaacttgcccatgttagggcggtctgggcttgaggaatactttttagtttctctcattattgttcttttcttctgtttttgaattttatgctcttactacatactctagctgacactaccaggccttgaagtcgtagtattgtttaacctgtttaagagttgcttgtgtttctttaacaaaaaaaaaaaaaaaaaaaaanaa

SEQ ID NO: 3939 - DNA, 771 bp, Avena sativa
catttgtctgctgaggaagttgaggacataaaggagatgttcaaggcaatggatactgataatgatggtgttgtctcttgtgaagaactcaagagcggaatagcaaaattcggctctcatcttgcggaaccagaagtgcagatgcttattgaagctgtggacacgaatggtaagggagcactagattatcccgaatttctagcagtttctcttcatttgcaacggatggcaaatgatgagcaccttaggcgggcctttctattcttcgacaaggatgggaatggttatattgagccggacgagcttcgagaggctctgaaggacgatggagcagctgatagcatggaagtggtgaacgacatattgcaagaagtcgacacggataaggatggcaagatcagctacgacgaatttgtagcaatgatgaagactggcacagactggagaaaggcatcacggcattattccagaggaagattcaacagccttagcatgaagcttgtaaaggatgggtccgtaaaattgggcgttgagtgaagctgtggtggttattagtctgtatgtgttagttaggcatttgggcccactaagcagaaactcctttaattttcttggtcattttgcgtggaaatttagataggtggaacccctctgctgattggcttacgtttgtaattagttcacctggatcactggcaatcgcactcagtgaatgatgtatgtaccaaaagctttgcgcctgcttcctcaactgacaatcttggtaggaaa

SEQ ID NO: 3940 - DNA, 803 bp, Avena sativa
attacggagtgagttgaaccctctgcaggatgcctctggtgggaagaagatatctataaatgatcttgttattaaggctgcagcattggctcttcgtaaggttcctgcgtgtaatagttcctggatgaatgattttattcgccagtatcacaatgtgaacattaacgttgctgtacaaactgagcacggtttatttgttccagttgttagggacgcggacaagaaaggcttggctactattgctgatgaggtgaagcagctggctctaagagcaaaggagaacagtcttaaaccagcagaatatgagggtggcactttcaccgtttcaaatttgggaggcccttttggaattaagcaattctgtgccatcgtaaatcctccccaatcagcaatattggcgattggctctgctgagaagagggtgatccctggagctgagggccagttcgaagtcgggtccttcatgtcagccacgctaagctgtgatcaccgggtcatcgatggcgccatgggtgcggagtggctgaaggcattcaaggggtacattgagaacccgacgaccatgctgctgtagaggggctgttttcttctgctgtaaatgacgacgatgagagcgattttttccattgtaggctctcgttaataaagattagagaataaccacgtctcgatgttttttcctaccggcccttttctcgctgtgtataaaaccgcggtaactagggctggacactgagagcaaacagagcagcggagtcagcacaggctgtttaacttactcttttgcaaatggcaaatgcaat

SEQ ID NO: 3941 - DNA, 841 bp, Avena sativa
atagcaccaatagggatgaatatggttgctcttgctgctcaaaggcatgctgtgccttttgttgtggttgctggtagtcacaagttgtgtcctctatatccacacaacccggaggttttactcaatgaacttaaatcaccatctgatttgcttgactttggcgagttctcgaattgcatgaacttcagtactcaggatggtactcctcttctaaatgttgtcaatccaacattcgactacgtgccaccgaagcttgtcagcctctttgtcaccgataccggcggtcatagtccatcatatatataccggcttatttctgagtactattcagctgatgatttggtagtacggcggatgtcaacatcttgaaagaacacagggcacagaggactactctcatgtgttatcattatgaagataatatgggatcttgtttaaacccaaatgatgttcccaaagtcatcgcaattcctcattttgcttgtagagttgaagaggctgccctctcggctggtttgccctggaagctcaattgtgtaagtactgttatattgcaggagattaatgcaagcatgctcgttgagaggatttaatttacggtttcttttttctgtccaaactgctgaggcaatgggggccagggctcagccgtttaatgaatgaactgtataatctgtagaagctagatatttgtgatggagagtgcacagttttgcgttttatgaaggagtggagagtttgtctagcacaaatttttgctgctgttcaaccaaaatactttatactttgccattgcttatgtcggtgttggagattcaaactgtgagcaagagtagtaaaa

SEQ ID NO: 3942 - DNA, 692 bp, Avena sativa
ttaatgccatccttcgtgaatcagctagtgagataccaactgatcctatatctgatccaatcgttgcccaaaagtcctgccaattccagctggggagctaagctttggatcaggcgcacaactgaaaaactctatcggaaactggtcgagatggttgacagataacttgggcatagatgctgatgactctgaggacgaagatgataactatgaaagaagaggtgcagctaaagcaaaatcttttcaacttcttaacgaactgagtgatctcttgatgctcccaaaagacatgcttcttgagaagtccatcaggaaagagatctgcccttctgtcggtatcccgttagtaacaagaatcctgtgcaactttacccctgatgagttctgccccgatcctgttccaagcatagttttagaggacctgaattctgagagcctgctggagcgtggctccggcaaagatgcggtcagcgcattcccctgcatcgctgctcctatcgcataccacgccccttccccgatggatgtagctgagaaagtgtcggtgaccggcggcagcacaaagctagacagaaaggcctctatggtgcagaggagagggtacaccagcgacgacgatctggatgacctggactgccccctcgcatccctattcgacaagagcgctccaccttcgccttcgaatggtgtcg

SEQ ID NO: 3943 - DNA, 609 bp, Avena sativa
atcactgaatcaagttatgtcagaaggtgcatatatgctattctatttgagatcttttcctcgccctccgaggatctacattgagaaaggcctattgcctgttccatcatcctcaaagcgtcactcgtcaaaatcctcgaaaggctctaaacaagatcagaagcagacagaatcactcttttcttctgatgatcaaatccgtggtatttatgattttagaccggacgaggaaggctacaggcaagatcatcaggccgagttagggtccagaaatttgtatcacatggatgatgcttttacagattcgctcagcacagacttctcggatgccacatcaagtgaatggtcgctgtttaccagctctgatgaatcttcatttaccactgaaagcactagagattcattcagtgtcgtggattatggcgacaatgctggccttgatccaatcacctcaatatttgggccatattacgctcctgaccatcctgctggcagttttgcctcatgcacaaggttctcgccttccaatccgcaaacaagataccattcggaaagcacaggccttcgtctcggattcttccttgccaaccacccatacggcaatgtaca

SEQ ID NO: 3944 - DNA, 819 bp, Avena sativa
ctccagggaagggaattccaactttgattacatggagtcaaggaggaaatgaggtgtttgtggaaggatcatgggataactggacttcaaggaaggtgttagagaggtctgggaaagatcacgctgtactgttggttctgccatctggaatatatcattacaggatcattgtggagggggtgccaagatatgtgtctgaactgcctcatgtgactgacgagagagggcaggtggccaacctcctcgatgtccatgactatgttccagagagtcttgacagcgtggtggaattcgacgctcctccgtcgcccgaacacagctacgacctgcagttcccagccgacgaggagtttgccaaggagccaccgaccctcccgcctcagcttctcatgtccgtcctgggcggcaccgacagctccgacgagcacgccccgaagctgaagcctcagcacgtggtcctcaaccatctgttcatcgagaagggatgggggtcgcagtccctgctcgccctcggggtcacccatcggttccagtcgaagtatgtgaacttcgtgctctacaagccgctgccgaggaggtgaccgacatggggcggtggaacttgaaggaagcagtggcgactgagtaggagactgatgggagtgaataagtgagtgttagctggcagtgtatgtacatacaggagctctttgttgtttgatgctgctcctgcacctttctagcttgtgtctttccttttccaataaaatgttcttgtaggatgaagtttgtattgcctgaactctgagaaaatgaaacaagagagttgatagaaaaaaa

(The sequence listing continues in the following parts.)
